United States Patent Application Publication US 2005/0228172 A9 - sequence listing, part 100

SEQ ID NO: 459550 - DNA, 606 bp, Homo sapiens
cagaaggaattctttcttactagactttatgttctattaaggtcttcaactaattggatgacacccacccaaattagggatggcagtgtgctttactcattctactgattcaaatgttaatctcatccagaaactcactcacagacacactagaataatcataaaccaaatacctgggctccctgtggctcagtcatattgacacaaaattaaccatcagagctcccaataacctttggttacttataaaatttattgtttacaagttacatatctgacagcattaggaaaccagagaatgcaatgcatttgttgaagacaatttccaaagagattttccaaaagtattttggacttggcctctcaaagtctacactcaagaagataycattcatatgtatatatttatatgttctgtatgattgatgtgaactaaattacatgtatggagttcattgtctgttagaaaacgctagtagtagctgagactttcagagtgtcaaagataagattacttttcatgtaacctgagataacctggacaaatgaaatatctttaatctggaaatgggagaatactgtcaacattcctgggttaaatcataa

SEQ ID NO: 459551 - DNA, 578 bp, Homo sapiens
gaaaagtgtccattcaccagtcctcaaacttttttcttaaagggtcccaatctagrcacaaaagtgagattattgtgcattaatagcttcaataaatcatatatcttttggacaaactaaacaataggatagcataatgtttaaaatctgaaaaaaaattatttgttgaatcactaaaatgttatatttgaatttattaaaaatatctttaattcaatacacaaggttgatgtatgaagattacctgccttctccataatccaatattcaaagagatgaactcaatttagtatatctcttcattttgtctatttttgacagtttctgttttacttcttgctacagtgttacttcctgtggtaatggttacaaatcagggaataggttaaaagtttctagaaaaattatgcaggtgttaaatcatgtacacctaatctctttcttttataggtaaaattgaggctcagagaaaagggaaatagtttacccgaaaaactgggtacaaattctctatacatcctacatttggccttgggcaagttgttcagcctctgttgccccagctgtgaaaaagaggc

SEQ ID NO: 459552 - DNA, 601 bp, Homo sapiens
tatagggaaactaccttgttgaagagctagctgctgmctctcacttgggaatgtgttggggagatggtgtgagtgaaaggtagagatgtgttacaaaccctgactaccaccatggctgaaactgcaaccaccaactacaggagggtcattcattgtaatagaaaggggctgttggtggcagaactgtgttttcagcatccacagctgacagtccccctgaggttatagaactatgctgcacacgagttcacagctgtgagtgtgacaccgatgataaagcaataatcctctctatctaatgtccttccaggttgggtggctgcctgccttacctaaataggttttgtgtagacttacatttgaatgcattcattatactcatagaaactggtggtggcttgaataaactcctcattctccttgagaaatagcctgaaatcattcactcgtcattcctttcttcctcagaaatgtcctgaaccctatcatatgcttaagatttagcagggcacaaagaaagatacaaagaagcaaggtacccagcccttcaagtattttacaagtctggggtttgctaacagacctggaaacttaaacagca

SEQ ID NO: 459553 - DNA, 571 bp, Homo sapiens
actgcccgagactgggtaatttataaagaaaagaggtttaattggctcacagttccaccaggctggggaggcctcaggaaacttataatcatggcagaaggggaagcaggcacatcttacagggtggcaggcgaaagagtgagagcaaagggggaagcaccccttataaacccatcagatctcatgagaactcattcactatcaggagaacagcatgggggaaacctccctatgatccaatcacctcccaccaggtcccttcctcaacatgtagggattacagctgaaatgagattttggtggggacacagagccaaatcatatcaagtattattgctgtattatacataattatagtgcgtgtgtgtgkgcgtgtgtgtgtgtgtgtgcggtcatctgggccatcctatttcaggccccagttgagacagaggttatcacttactgaacatgcccacaagattcagtagcagtaccactaggccttcccagtagttgcaagatgaggattttattgattaagacaatttatagagacataagtttactagaaaacaaaatccaaagccca

SEQ ID NO: 459554 - DNA, 520 bp, Homo sapiens
aaagtctgttttgcacaggttaacagaacaagttagagaacaagttgcacaggttagagaataagctggtgggctaygtatgccctatgttcttttaccgaaggactgtaaagatttgagcagaggtggggaatggactagttgattctttcagacctgttctaggtccctcatagtgtagtttatctgtcagatgtgtttcctttcacttcaagagcctaactggatataaatattaaggtagatctttctttcaaaccacctattggaacagctatatttgctagggagtgtgtgcatctgtgtttcagtttgctgcacaacccaagctatttctcagtgtggagagctcagagaatgtaggaatgtgctttaccttgcactttttttctcaggctctaaatccaggctttgggctccttcacactccacttagccacatatttttaaaatatgtgcacaagaaaggttgatccgatgtccaagaagtccaaggagctttttcagtgaggccttattt

SEQ ID NO: 459555 - DNA, 541 bp, Homo sapiens
tatcatatcccttcttctgtttgtgaatgtctttacttccagaaaaatgaaaaaaattaaatgattttttatcccttggtcacaactttggtagagcccacataggaaaataacttgattaaattcaggttatttttaagttaaactttattattaacagtgtttaacccttttcccacttgccccaggactacttgcctgcggtgcttgcagcagcagcatttaccccgagataactttgccacgaaatatctcgcttttattattattttcacattagtctagtatatcaactttggaaacaagtaaacaaaaggcatcattctatttrtagcactctgattttagtagtggtatttccatttacaaaatatatttaatagtagttcttaaattgaaaatgtcaaatcctaaaaaacatggcattcctacgtgtgatgttgacgttgttctcaaagttgttagccaaaaattagtttgatgaatccgatttttctgaaataaacaattctgatgattcagatgattctgatggtagttc

SEQ ID NO: 459556 - DNA, 537 bp, Homo sapiens
aaaaagcatctcagactcccctgtttggggtcatctgtcttcctcagggagccccaagagtcgtgagtaggttcctctcaggtcagaggtgctgctgtcttttacattgagatccctgatckctttgtcttttggggataccaagagtcactttatactgtgagccaacacttgatcctcgatgtgcaggaactaatgagtcactggcaagagctgtaattttaaagtaaatgacagtggttgcaatgaaaggttattactacagtaggcaaaatccagccttccatcctcctcatttgtttgtatatttaaaattttaagtctcagatttctgcttgagtctaacagaaactgacagtaagtggcaatttggtgtaagaaaagtcattagctatgatgggcaagggaatcttggagctgtaaacatgacctgactcttgataggtgtcgtatgcgtacttggaagctatgggagccccaccttgagctcagcaatacagttaagaaacagatgttaaaagtcacctaaataaaatt

SEQ ID NO: 459557 - DNA, 554 bp, Homo sapiens
attctctccttatctctttcagggacacaaatgagtsacagatttggtttctttacatgagttcttatttctcagaggttttgttcattcccttttattctttttttctctattcttgtctgactgtcatatttcagaaagacagtcttcaggctctgagattctttcctccacttagtctattctgctactaatacttgtgattgtattatgaaattcttgccatgagttttttagcactacaggttggttacattcttttctatactggctactttgtctgtcagctcccgcatcattttattgtgatttttagcttccttgggttgggtttcaatgtactcctgcatctcaatcaccttcattcctatccatattctgaattctattttggtcatttcagccacctcagcacagttcagacccttgctgaggagatggtgtggtcatttggaggaatgaaggcactttggctttttgagttgtcagagttcttgcactggtcctttctcatctttaagggctgatgttccttcagtctttgaagttgttaa

SEQ ID NO: 459558 - DNA, 554 bp, Homo sapiens
attctctccttatctctttcagggacacaaatgagtcacagatttggtttctttacatgagttcttatttctcagaggttttgttcattcccttttattctttttttctctattcttgtctgactgtcatatttcagaaagacagtcttcaggctctgagattctttcctccacttagtctattctgctactaatacttgtgattgtattatgaaattcttgccatgagttttttagcactacaggttggttacattcttttctatactggctactttgtctgtcagctcccgcatcattttattgtgatttttagcttccttgggttgggtttcaatgtactcctgcatctcaatcaycttcattcctatccatattctgaattctattttggtcatttcagccacctcagcacagttcagacccttgctgaggagatggtgtggtcatttggaggaatgaaggcactttggctttttgagttgtcagagttcttgcactggtcctttctcatctttaagggctgatgttccttcagtctttgaagttgttaa

SEQ ID NO: 459559 - DNA, 554 bp, Homo sapiens
attctctccttatctctttcagggacacaaatgagtcacagatttggtttctttacatgagttcttatttctcagaggttttgttcattcccttttattctttttttctctattcttgtctgactgtcatatttcagaaagacagtcttcaggctctgagattctttcctccacttagtctattctgctactaatacttgtgattgtattatgaaattcttgccatgagttttttagcactacaggttggttacattcttttctatactggctactttgtctgtcagctcccgcatcattttattgtgatttttagcttccttgggttgggtttcaatgtactcctgcatctcaatcaccttcattcctatccatattctgaattctattttggtcatttcagccacctcagcacagttcagacccttgctgaggagatggtgtggtcatttggaggaatgaaggcactttggctttttgagttgtcagagttcttgcactggtcctttctcatctttawgggctgatgttccttcagtctttgaagttgttaa

SEQ ID NO: 459560 - DNA, 583 bp, Homo sapiens
tttgtcacttattactattaacctgcacacatagctgagatagtgtcaatcagatttctggacaaaatattactctttttttccccctttccaaactatatcctttgaaagaagttacygtgcacagcccacacttaaggagtgaagttattctctactctttgagggcagtgagtctacatacattatttggaattcattggtataggaaatttttctattctattgtttttgttttgtgagccagccttattagtataaccaccttgactactaatatcattattattggactgaatcaatactctaaaatttaaaactttgataggaaaaatagaaacttgaaaaacagtctatgttaaagctgcaaatagttttttaaaatggcaatggactcatttgtcatgcacgggtagcaaagatcatttaaaattgagatctttgagggctatcattctaaggaatggccctgtgtaacattctgtaaaaggttgtccatggtataggcagatgttatggatgagaatttgcaaccagaaccactgatgcattataaatagtatatatttttttctaaataaat

SEQ ID NO: 459561 - DNA, 606 bp, Homo sapiens
ctttcaaaacagtaatttaagtccattctgaaatttttattcttacatcttagttcttttaatttggaaatatatcagttatttctaaatggagtytactttaagcaaatactcctgggaaatctgaaccagttgtgaaatttggatttttaaataaaaattcaagtgagaagtaaacaatttgcttgagatttgacatggccaataaaccagaaatgcctcccagtatgacctgaaatatttcacaactttggtgaactgagtgtaaccttttaataatgattttgacataaagagttaggcccaatttattaactagttgggacatctaatcaatccagctacagaactgtcagagttaagtgacataaatacaaaatgaatttttagctatccaatccagtggcccatcatgtttttcagggtaaaagtcattgacttcactataggaaaaccagatcatgagagaacaacatgaagaccctatctgagaaccctggagggtcagccgaagttgcattcatagccaattctaccatttacaagcacctgaggaggctattcaacttcctcaaatctcagatagattattcacaaggttgttga

SEQ ID NO: 459562 - DNA, 541 bp, Homo sapiens
aggaggctcccagcttggggaaggagatgaatactgaaaaaaawaaaataagcttgataaagtgttattgtgagcagaaaaggcctcatagtgatgggaattcaagataaaaatttgaaaagtcaatgggtatttcctgtgaggatgtaaggactgggagggggagcaagtatgatttagatagagaatgaagcataaacaaagaaactagagggacctctctagtttcctctctctctctccaccctccactggtcccttgctaatgtcatgcccatctgcttgcagtttccttatgaagcatcatcattttttgtttctgctcttttcccatggtgtaatttctacctggatttcctgtccttcccccttgagtgctcctggaacagtagagagctttgtagaccatgttggacaatttgaaccttatctgaaggccctgaggaaatattaaggatgaataagcagaatagttatggtcatatttgattttaagaaagttcactttggttttttaagggaatgagctagaatgtgaggc

SEQ ID NO: 459563 - DNA, 365 bp, Homo sapiens
aatctcagcagcttaaaataaccaaagttaatttcttccttactctactatctactgtaggtcagcaagagtgttttgctcactgcagccactcgcagactcaagctgcgagagcagtcaccattttgaaagtcattggctwttgggccagagggaaaagagaggtctggaaggtcttgtcttggtgattaaatgtttgaccagaaagtgacacttgacatttctgcaaagaactagtcagtggccacacctagtttcagggagccaggagtgcattcctcctggaaggaaggagagctggaaatatttggcaaatagcagtaatgactaccacaggaccagaaataaagacctaggtatgatca

SEQ ID NO: 459564 - DNA, 506 bp, Homo sapiens
ttcagcacatttagcattaatcactaagtcaggtgctctctgacctgcttcctcagagttgtttggtgactgttgcctcaaaatcatcgagatcctattacaagattatctttccccttatctactctatagataatatcttgaacattwtaaaacattacattttccatctgagacattctttcaggtcatgcataccaatgaaactaatgatgtcagctggtctgaaggaccccacaggagctgactcacaaaataatacagtttccacatccagagtatttcatctcctttaccccaaccaatcaatgacccaaattttctagtcccttgccctccatgatccttttaaaaactccagcccagaaatcctcagggagctgatttaacggtcttttcccatgacctcactcattgccctgtgatcattagactctttctttgctgcaaaccttactgtctcagggtaattggtctgttactgtgtgataggtatatgaacctgt

SEQ ID NO: 459565 - DNA, 590 bp, Homo sapiens
gcataaaggacatatggatgttctcaatctgttacacatgtaataacaagaaaaaaaacaacccaatagaaaggtagacaaagtactaaaaagaaaccctttaccagtgttgatcacaagattgatcacctggaaagaggcttagcatcattagttatcaggaacacacaaattgaaaccaaaatgaaacaccattatgtgcgcacaacgtgtctaaaataaaatttaaaaaatgtcagtaatactaaatcttggcaaacgtggaataatgaaaacttttatacattgcttatggcagagtaaaatgttaaaagcactttggttaactctttctttttttctgatamtgttaagcatagatctattctatgacccagcaacccactcctgtattactcaaaagaattgaaaacatatgtctactgaaagacaaacacaatactatcataaaggcgttattcataataattcaatattggaagcagctcaaatgtccatcaacaagaaaaaagacaatggcattgtcatatgtttagacaatgagtgctattcatcaattaaaaaggagtgaaatactgacatacacaaca

SEQ ID NO: 459566 - DNA, 627 bp, Homo sapiens
aattgtcctggtattatctatgccctgtccttatgatttcagcatctggtctggactctccatctcccattccttctttagcccatctgctcttatttcccagcaatttaacctattcatttcctcttctttgcttctcttgttcattctagtttcatctctggcttgactttctttgaattyctttctcaccttctagccatggactaagttccaacctctctgtgcaactctatcacattgtccatagggcaagagccttctgtgctcagccatttctttgatattacttccttcctggtagtcaggcatatgttggttagagtaatctctcatagcaaaaagctaaaccttcactcataaccatttgttggtagaagttgaaaggtgatgaccttttgggaaaagaattcgggattatatatgaagttttattaaaattatcacaacctttgtcctaagacttctacatttaagactgcaccttaatacattgtttcttaataaataactattttactaacacataatctaaaataacgcgaatgtctaaacatgattaaacttttgagcatggttaagtaaactttttgaaatgtaatgtagcctttaaatatgtactgcata

SEQ ID NO: 459567 - DNA, 627 bp, Homo sapiens
aattgtcctggtattatctatgccctgtccttatgatttcagcatctggtctggactctccatctcccattccttctttagcccatctgctcttatttcccagcaatttaacctattcatttcctcttctttgcttctcttgttcattctagtttcatctctggcttgactttctttgaattcctttctcaccttctagccakggactaagttccaacctctctgtgcaactctatcacattgtccatagggcaagagccttctgtgctcagccatttctttgatattacttccttcctggtagtcaggcatatgttggttagagtaatctctcatagcaaaaagctaaaccttcactcataaccatttgttggtagaagttgaaaggtgatgaccttttgggaaaagaattcgggattatatatgaagttttattaaaattatcacaacctttgtcctaagacttctacatttaagactgcaccttaatacattgtttcttaataaataactattttactaacacataatctaaaataacgcgaatgtctaaacatgattaaacttttgagcatggttaagtaaactttttgaaatgtaatgtagcctttaaatatgtactgcata

SEQ ID NO: 459568 - DNA, 627 bp, Homo sapiens
aattgtcctggtattatctatgccctgtccttatgatttcagcatctggtctggactctccatctcccattccttctttagcccatctgctcttatttcccagcaatttaacctattcatttcctcttctttgcttctcttgttcattctagtttcatctctggcttgactttctttgaattcctttctcaccttctagccatggactaagttccaacctctctgtgcaactctatcacattgtccatagggcaagagccttctgtgctcagccatttctttgatattacttccttcctggtagtcaggcatatgttggttagagtaatctctcatagcaaaaagctaaaccttcactcataaccatttgttggtagaagttgaaaggtgatgaccttttgggaaaagaattcgggattatatatgaarttttattaaaattatcacaacctttgtcctaagacttctacatttaagactgcaccttaatacattgtttcttaataaataactattttactaacacataatctaaaataacgcgaatgtctaaacatgattaaacttttgagcatggttaagtaaactttttgaaatgtaatgtagcctttaaatatgtactgcata

SEQ ID NO: 459569 - DNA, 582 bp, Homo sapiens
ttcttatgtcattgctttccccggacttagtggtgtaagtaatttgggattgaacatggggataagagcacaccacacagttcaaaatgaaggtactgatgttcccttctcaaggagctggggccctcatttttsctcggtgtgttataattatagccccactggctgcagtctatttagttaagacggaaatgtgagtttaataaacatttcaaagtgactttattggctgtacattcttgatgatggcgcatcaagagaaagaagattttaccaacataaagatattcaacctcactgaatccatggctatgatcaattcactgtgagttttcacctagaattaaaaactgtggattatcaaggtgagggtgaggataaagatatagaataacatatcagagattccaataagtagccaagaatatttcatcaatttttccaaggggatttctctttctctctcgttctattctagcctttcctcactcctcattcacatcgtatcaaattacatcctggaaatggcttgcctgtccctgctgcctgagcttactaaaggtaatgctgagctgcctggca

SEQ ID NO: 459570 - DNA, 430 bp, Homo sapiens
cctgctatctgatttcataatgttccgggtttgtgagccagtgccattttttgactgtattttgtttgagttttataggaagcacacacacagacacgaatatcaagcaactgatactaygcttgttttaagtaccaatgtaaagtcacaactaaaacctaaacttgcccttctcctgaactatgcctactgatccagctctacaatgtgctctggaaggggccctgggacagccatctcctgtccctccaatgttctatcgagcccagaaacccacatgtaacccctgccaccctgcacgggaggggagaaagcttatctgaacactaaattcattatactcaaaggcaacatttgtccaaaagccaaaaagagcaaatggaacaaaataacaactagtgtctgtgtatcactgtgtaatttgcaaacc

SEQ ID NO: 459571 - DNA, 646 bp, Homo sapiens
gcttttctttggttttgttcttttctccagtgtctgacagcacgtgggcaggggacttgtttcattgtttaggttctctcttctctctgtgttgtcaacggcacccatctacaaagagacagccaagkaatagtttgtttgttaagaaaataaaaaggaaaattcttttgtttcctgtttctgtgcagcttggaaacagccctcacaaagaaagattttcaaagaaatgcttcatcattcagagacaggtcagtccatttatttctgaccccatcaaccttctgatctaggcttcttcccagtgcttcttgcccaccaccaagaagagccacctaaaacctgggctctaaaaaaaaactgtagacagacctcctaacaagatgggctactgcctggcaccaccataatttatttattgattataatgggtaggaacttggcttatttatggcagacttttctgagtatttattgatactgctaattcttggcaaccagaagggagagttggcaggttcagtaatccaaagagtggcgctatgaagctccatcctcagaatagcaccaaggaagcaaatgatttgtggtgctcagaagcaattgtgaatattcaactagagtttaggctgaggtgatttcccaaaca

SEQ ID NO: 459572 - DNA, 610 bp, Homo sapiens
tttcaaatttttattataccagttagcagtcctgaggtctttggcaagttattaaatttcctgagcctcaattttatcaactgaaaatggagataataataggaaccacctcacaattgttttggggcctaactcacatagtgtatatacatagcctgcctgtagacacataasaaattctcaatacacattaactagcattcttcttaaaacttcttccaggtggaagtagatgccttatcattacagtctaatctataagacacgtaaatgtcttgccggacttgcatattcacagagcaacgttgaaatttttaaattgccaaaagcgtagcttttatttttttcatttttaattgatgtataaataacacacataaactgcatgtattcaaaatttacaattcaatttttttgtataaatatataactgtgaaaccatcaccatgattgagatgatgaacatgttcactgtctccaaaagtttccttttgtggcacctctctgtccctctctgcagccctgacactagcccctaggcaaccactgatctttctgtcactcttgattggtttccatgtcctagaattttatgtaaatgaagtcatac

SEQ ID NO: 459573 - DNA, 544 bp, Homo sapiens
attgaatcatgggggcagttacctccatgctgttctcatgatagtgagttctcatgggatctgatggttttgtaagggacttttcccccttttgcttggcacttctccttgctgctgccatgtgaagaaggacatgtttgcttccccttccaccatgagtgtaagtttcctgaggcttcctcagccatgctgaactgtgagtcaattaaaccgctttcctttataaattagccagtcttggatatgtctttattagcagtgtgaggatgaactaatacatcctgtcttcttcmtgtaaaatggggttgctgtgagcactggaatcctttactgcctgcccactatgtgtcctgtagtgtgctgggtccagaggcctctgctctgtagcaacttatagtctaaaggggcaaatagattgcataaacagatagtgataataaatgtccatcagtgctataatagaggtaagtataaagtgatctgggagcaccaatgaggcaaagcgactggtcctcagcaacctcgttacaaggaaacagatgga

SEQ ID NO: 459574 - DNA, 563 bp, Homo sapiens
ttcctgaggcttcctcagccatgctgaactgtgagtcaattaaaccgctttcctttataaattagccagtcttggatatgtctttattagcagtgtgaggatgaactaatacatcctgtcttcttcctgtaaaatggggttgctgtgagcactggaatcctttactgcctgcccactatgtgtcctgtagtgtgctgggtccagaggcctctgctctgtagcaacttatagtctaaaggggcaaatagattgcataaacagatagtgataataaaygtccatcagtgctataatagaggtaagtataaagtgatctgggagcaccaatgaggcaaagcgactggtcctcagcaacctcgttacaaggaaacagatggatagtgttctatcaaaactaatagaatggaagatattgcaaaggcaatatgtgctgaggtgcttggtaaactaaagcaccaaacacatggagagtttatgatttgcacaaaggaaggaattgctatctagaagaacagctatcttgccagcaggggaatatttttaggggaaatacttccctaaaa

SEQ ID NO: 459575 - DNA, 648 bp, Homo sapiens
aaaagctgtgtttctccccaggccatgatccctgaatccaaagaaaaatattttaatgcaattgggaagtaaggaggagagaagaaaaaatgtggtgcaatattctcatccagaagatggggataaaatatcatcatctttatgggtattttgatgattaaattgtaagatccacataaagagctcaacacagaaactggtacctggaaagtgatcaataaatgttacatagaattattatctgctrtaactgttatgcccaactttctgggaagttcactggacatggagggagggagagggagatgaaagggtaggaataaaaataatacaagtgagaacacatttcttgctgagaggcaaggtaatgtagcagagaaagtgctaatgttgagtgctagacgagcctgatatgttgtgggaatgaaaggcaggttaagagggaacactcaatacatgttggttcatttttcttacttctatctttcacttaactgatttgttctcaataggaaatactttttgtctgaaattacttcacaattcttccataactaggttcaaatccacaactattgatttcttctctctcttaagagacagggcctcattctttctcccaggttggaatgtagtggcacaacccta

SEQ ID NO: 459576 - DNA, 556 bp, Homo sapiens
agaagccagtcatggatcccagcagtcagaacttgtgcctgcaaatctcaccacagagggctacagtgctctgtgactccaagtaaacttgaaaggcagtctaaaccataaggactgcaattcttagactagtcctagtgttgaattaggcccagaagcagtggactggggtgggcgtggtggggaggtggcgtggatgcaacctactaaggcaccagctggggcagccaagggagtgctggcatcacccttcccctaaccccaggctccacagttcgtggctccaaaagagacccccttcttccacttgaggagaggagagggaaaagtggataggactttgtcttgcatcttggataccagctcatccacaacaggattggacaccagtcaragttgtgaggcccccattccaggccctagctcctagacaacatttcttaacacaccctgggccagaagggaacccactcccttgaaagaaaggaccaagtcctgggagcatgcatcacctgctaactgaagagccctagggccctaaataacgagcagcaat

SEQ ID NO: 459577 - DNA, 590 bp, Homo sapiens
agaaatcatataattaattttctcatttacttgtagtcctaagacggagggcataacctgcagaagtcaagtttgcctaaaaatatatatatatttattttaatttaattttgtttttttttttggaggcagagtcttactctgctacctaggctggagtgcagcggtatgatcttggctcactgcaayttctgcttcctaggcttaagtgattttcatgcctcagcctcccaagtagctggaattgcaggtgcacaccatcacgcccagttaatttttgtatttttagtagagacagggtttcaccatcttggccaggctggtaactcaggcagtctgcctgccttggcctctcaaagtactaggattatagatgtgagccacgttgaccagccaaaaaatttgtgatactgaattccaatcctctcggaagtgatcatgaagactaatttcctggttctgaaagttttcctttatttgatctttgtatgtcattttactgtcacagagttgctagggagtaatcatttccactctcagcctaccctagacacacaccatgctcattcttaaatccatgagtgtagcac

SEQ ID NO: 459578 - DNA, 590 bp, Homo sapiens
agaaatcatataattaattttctcatttacttgtagtcctaagacggagggcataacctgcagaagtcaagtttgcctaaaaatatatatatatttattttaatttaattttgtttttttttttggaggcagagtcttactctgctacctaggctggagtgcagcggtatgatcttggctcactgcaacttctgcttcctaggcttaagtgattttcatgcctcagcctcccaagyagctggaattgcaggtgcacaccatcacgcccagttaatttttgtatttttagtagagacagggtttcaccatcttggccaggctggtaactcaggcagtctgcctgccttggcctctcaaagtactaggattatagatgtgagccacgttgaccagccaaaaaatttgtgatactgaattccaatcctctcggaagtgatcatgaagactaatttcctggttctgaaagttttcctttatttgatctttgtatgtcattttactgtcacagagttgctagggagtaatcatttccactctcagcctaccctagacacacaccatgctcattcttaaatccatgagtgtagcac

SEQ ID NO: 459579 - DNA, 470 bp, Homo sapiens
atgcttcttttactaaagcttgggaggcagccggggccagttctcaacacctttgagaagagaatttcrcttctttgaaattttagagcaagttttttatagctttggctcctgtgtgttcctcggcgcctgtatgtgacgcatgttgtgttgcttccacatttttgtcagtgtctggaagtctccgaagagttggcaatgtctctcgctagccccagggactcacttttgtttcttcattgactgagtttgttcgctctctttctactcttttcttctctcacttaaaaaaaaaaatagcaaaaggcattttaaatgagtgaggcagtaaggtgccagagttgtgacttccatacctcagtgagtaatgataggattaaaaaacattccatatgtttcattcaggtagctgtccagggaccttgccataaatagaaagtgatagaaagcaggatatcacagtggagcac

SEQ ID NO: 459580 - DNA, 575 bp, Homo sapiens
gtttgttctaggtctgattccagtctattttaccctcttagatatccttctgtgccaggttacctggtgaggcaggaaagtcaggatctgaattctctgaaatcttgttgtcatcccctcagaaagtattgtttgatgcaggtgtcctcctgcctccgttttatttactgtgcagcaagtagagtccctttatctgcttggcacttggcctcatttagattcttaaatgtgctggcraaagagtctgtctttctgtggggagctccttttgttctttcatccttttgactttcttccttcttcctctttctttcttctaaaaatgaaaacaaaggaattttaaatgagccaattcgttgcttacaaaaatggtcttatccatattttggtgagtaattagtagcatcggaatcctgcctgagcaattttttttgcctcctatcccaccccaatcagcctaaaagttataatctctaaaatcagagtaagaggatacttcggctgctttttatgcccaaaaaattatatacatgtacatatgtgtacatatatatgtctttttgtgtatttataga

SEQ ID NO: 459581 - DNA, 575 bp, Homo sapiens
gtttgttctaggtctgattccagtctattttaccctcttagatatccttctgtgccaggttacctggtgaggcaggaaagtcaggatctgaattctctgaaatcttgttgtcatcccctcagaaagtattgtttgatgcaggtgtcctcctgcctccgttttatttactgtgcagcaagtagagtccctttatctgcttggcacttggcctcatttagattcttaaatgtgctggcaaaagagtctgtctttctgtggggagctccttttgttstttcatccttttgactttcttccttcttcctctttctttcttctaaaaatgaaaacaaaggaattttaaatgagccaattcgttgcttacaaaaatggtcttatccatattttggtgagtaattagtagcatcggaatcctgcctgagcaattttttttgcctcctatcccaccccaatcagcctaaaagttataatctctaaaatcagagtaagaggatacttcggctgctttttatgcccaaaaaattatatacatgtacatatgtgtacatatatatgtctttttgtgtatttataga

SEQ ID NO: 459582 - DNA, 575 bp, Homo sapiens
gtttgttctaggtctgattccagtctattttaccctcttagatatccttctgtgccaggttacctggtgaggcaggaaagtcaggatctgaattctctgaaatcttgttgtcatcccctcagaaagtattgtttgatgcaggtgtcctcctgcctccgttttatttactgtgcagcaagtagagtccctttatctgcttggcacttggcctcatttagattcttaaatgtgctggcaaaagagtctgtctttctgtggggagctccttttgttctttcatccttttgactttcttccttcttcctctttctttcttctaaaaatgaaaacaaaggaattttaaatgagccaattcrttgcttacaaaaatggtcttatccatattttggtgagtaattagtagcatcggaatcctgcctgagcaattttttttgcctcctatcccaccccaatcagcctaaaagttataatctctaaaatcagagtaagaggatacttcggctgctttttatgcccaaaaaattatatacatgtacatatgtgtacatatatatgtctttttgtgtatttataga

SEQ ID NO: 459583 - DNA, 575 bp, Homo sapiens
gtttgttctaggtctgattccagtctattttaccctcttagatatccttctgtgccaggttacctggtgaggcaggaaagtcaggatctgaattctctgaaatcttgttgtcatcccctcagaaagtattgtttgatgcaggtgtcctcctgcctccgttttatttactgtgcagcaagtagagtccctttatctgcttggcacttggcctcatttagattcttaaatgtgctggcaaaagagtctgtctttctgtggggagctccttttgttctttcatccttttgactttcttccttcttcctctttctttcttctaaaaatgaaaacaaaggaattttaaatgagccaattcgttgcttacaaaaatggtcttatccatattttggtgagtaattagtagcatcggaatcctgcctgagcaattttttttgcctccyatcccaccccaatcagcctaaaagttataatctctaaaatcagagtaagaggatacttcggctgctttttatgcccaaaaaattatatacatgtacatatgtgtacatatatatgtctttttgtgtatttataga

SEQ ID NO: 459584 - DNA, 527 bp, Homo sapiens
atgtgagtggaagtgaagcatgcatcacctgaatctttacaatgtaacaagtttccctctactctgcctttccttctttctgttccactactgagtgtggtgacatctggagtagccaccttgaccctaacatagaagcctcatgttgacgatggaaacactggagcaacaagccttggtccccgtgtgactctgtggagcagagctgcctgtccaccctgtgcctcccactaagtttctgccttatttaatctcatgtatttaaggttagagcaggttagcctattacatagctaaagcagtgtggtagagctagaaaaaaaagtgcccttctcargagccatgtaacaaaactccctgggccacgaaagactgagaatgtggtactaagtcaataaactcagttccaatttatctgtcaaactggataacagttattctaaaggggtgtgattggtagatctttagattagtagacctctccacagtaagttcttataactctaaacatatggtgaaaatggatt

SEQ ID NO: 459585 - DNA, 597 bp, Homo sapiens
aaacaatgtactctgagcgagaagtctctgcactcaattcatctcagatttagttggtgggagggaagggagaagaaagaggaaaggcctggcatttctaagagtttgtcatggggtamcgttcaagagtctgaaaataaagtggctttgttttctgtggctttgggtctatgccatcatcagggaagagtgatagaagggatttcaagggtccaggatcactcccaaagacccctagagaaataggaagaaacagtgacaccagttattaggaaggacaggccttccaagaaaactgggaattttcttatccagtgttttgcctgtttttgcccatcctgcaaaggcaaaatttcacttgcagactatatcggttgatctcaaatgctggaagctgaatgcttttagatagatggggtgtgcatgctctgttttgccacattccacactatcccttgttacatcacaactggcctgttttagtaacctttgcttctgccttatccccaaggtaattcatgttgccactcctgctcaagttactctggtttggtgttctttttacttttctcttaaagacaaggcctccctatgttg

SEQ ID NO: 459586 - DNA, 474 bp, Homo sapiens
ttgtatagaattaagtagaagataccccaacatgcacatccctttacagcttagcaactgttttactctatcacatccaaatgtccttaactctgggcagtaaagttctgatcagtttacctttatcatcacagcatggcattttcaaggactctgcctggcactttcaatcttcttctcctcttggtatcgattctctggtgtcatgatcgcaaaaggccatcctgaggggtggaagcccttgggaggtagaggagagtgaagtgacagaagagatagatctgtcaccttgaacgtattccagctcagccaatcacagagttggcctgggtcagacctgtataatttggggatgggagaccagtttggaataccaggcactgtagactgagacaccagatgctataggggagccagaactgaaactgctccatcagctggagctgcratttttggcaagtcactcttcctctt

SEQ ID NO: 459587 - DNA, 419 bp, Homo sapiens
ttctctggggtctttctgctctaacattctatgatcttaattttcatttaattattccacaatgcctcaaaaatgaggacacaatcaatggtgtcaaagggyaaagagatataggataaaatgagaataaaaggtacccactgatttttgccattttgaatgagatgatcggggtggaagaacatgttaaattgaggagtgaatagaaagtaaatagaaatagattgcaaagaagaaaaagacatagagaaatggccagagctgtgatgagtctggtgaaatttggaaaggggaaatgatagtacaaaaaatacagctgccccttggtatctgcaaggatgatagggtctttcttcttatttcccaaagttctagaagggattggtcccaggagccacaccgccccctaactccccacc

SEQ ID NO: 459588 - DNA, 568 bp, Homo sapiens
aacatctctagaagaacatctcaatgctaactgataaattgcatgctagataggagttgaacaatgagaatacatggacacggggagggaatcatcacacaccggggcctttccggggggtggggggataaggggagggagagcattaggacaaatacctaatgcatgcagggcttaaagcctagatgacgkgttgataggtgcagcaaaccaccatggcacatgtatacctatgtaaaaaacctgcacattctgcacatgtatcccagaacttaaagtaaaattaaaaaataataatacaataaaataactttaaagagaatccaaatgagggaattctgcatgctgaaaataatgacaggagtgagtgggttggaggatattcaaaaaagaaactaatattgataaaaggaaaaaaagctggacaataaatggaggaagagaggatgacattttaggtactgagaataagaagagcaaaggaagacagactttctggaggaagtggaaaagttctcctctgcttcactgaaagagagtatactgaagttttgagtgtattcacacc

SEQ ID NO: 459589 - DNA, 601 bp, Homo sapiens
tttcacaactctgcattcagtgttgtcatgttggtagactgaaatcagccacaatgggagtatttgtatcatggaaataacaaatgctacaaaccaaggcttcatttgttgctttgcctctgccttgtgtgtaagggaagtactatttaattttacctaccagaacactaagtctcagaaaagttcagtaaatgattttggccctaggattccactgcagggttttctgactttgcaaatccattatcttaagtcttctgttctatacctccctttagcggggttttcctgccactgtactatatacactcataaaaactctcagtggcattaactgctgtttggttggtgtattcattgtatgtcttgggtaaggtataacaagtatgtttaaattgcatatgcgttttttttccaaagaaccagttatacatttaccaacatttcattatccagggttcaagccttgattgaaacaaatctacccccagaacatactgaaaagtactttctggaaataaatatatttctgttcattaaaaaatccaattactagaatttacaagttattaaacktctcattgcttttcttcaaccactc

SEQ ID NO: 459590 - DNA, 642 bp, Homo sapiens
tatagctaaggttggagtgcagtggctcaatcatagttcactgcagcctcaaactcccaagctaaagcgatcttcctgcctcatctccagagtaaccaggacaacaggtgcatgccatcacaccctgataatttattttattttattttattttatttatttatttatttggtagagacaaactcttgctacgttgcctatggtggtctcaaactcctggtctcaagtgatcctcctgccttggcctcccaaagcactgtgattgcaagcatgagccactgtgcccagccccaaggtatttattacagttttatttttttcttttattcctgagacaaaagtaaaataaaataataaaattatgttactaaaaatttggaaaatagagaaaatgagaacaaaatgtgttcataacataacccatgatgaccatacaactgttgatgtyggcctttcacctttttgttccttctctttttacctcgcatttttacataactgcaattattcaaatatatatatatatatacaaattttctgttttacccattctccataagattatatttggatcattcttatgtcattatatgtttcaagaataaaatttaatgactgcatattatttctgagtggattata

SEQ ID NO: 459591 - DNA, 530 bp, Homo sapiens
agctaaataaacctctttttcttatacgttacctagtctcatgtattctgttttagcaacacaaaactaagacagaatgtcatamctaaaatacagttgacattataccgacttgaatgggaattcatgtggtagagctggggttggtaaactttttctgtaaagggccagagggtaaatatttcaggctttacagcccatatgttctgtctcaaacactcaactctgcatgaaagcagccatagacagtatgtaaataaatgagcaaggctagattccaataaaactttatttatggacactgacatttagatttcatatcttttttcatgtatcataaaacattatacttcttttgatttttatttcatttaaaaatgtaaaaactatctttaactcacagggcctccataaacaggcagtgagtcagattgggcccacatggacatagttcaagattcctgctatagggcaatgaaaaatgatacgttgttgactcatttgggtaacatttgataggcaatacaatg

SEQ ID NO: 459592 - DNA, 611 bp, Homo sapiens
aaactataagaatcctagaagaaaacataaaaaatgacattctggacatgggccttggcaaagaatttatgattaagtcttcaaaagcaattgcaacaaaaacaaaacttgaaagagggacctaattaaactaaagagcttctgcacagaaaaaaatatatatatatcaacagagtaaacagacgacctacagattgggagaaaatattcacaaactatgcatccaacaaaggtctaacatccagattctataaggaacttaattcaacaagcagaaaaacaaataacctcattaaaaagttgacaaaagacataaacagacacttctcaaaagaagacatactggcagccaacaaacatatgagaaaatgctccacatcactaatcatcagacaaatgcaaatcaaaacctcaatgagataccatctcacaccagtcacaatgrctagtattaaaaaatttaaaaaacaacagatgctagtgaggctgcagagaaaagggaacacgtacacacagttggtgaaaatgtaaattagttcagccactatagaaagcagtttggagattccttaaagaactaaaaacagaattaccactgggcccagtagtcc

SEQ ID NO: 459593 - DNA, 611 bp, Homo sapiens
aaactataagaatcctagaagaaaacataaaaaatgacattctggacatgggccttggcaaagaatttatgattaagtcttcaaaagcaattgcaacaaaaacaaaacttgaaagagggacctaattaaactaaagagcttctgcacagaaaaaaatatatatatatcaacagagtaaacagacgacctacagattgggagaaaatattcacaaactatgcatccaacaaaggtctaacatccagattctataaggaacttaattcaacaagcagaaaaacaaataacctcattaaaaagttgacaaaagacataaacagacacttctcaaaagaagacatactggcagccaacaaacatatgagaaaatgctccacatcactaatcatcagacaaatgcaaatcaaaacctcaatgagataccatctcacaccagtcacaatgactagtattaaaaaatttaaaaaacaacagatgctagtgaggctgcagagaaaagggaamacgtacacacagttggtgaaaatgtaaattagttcagccactatagaaagcagtttggagattccttaaagaactaaaaacagaattaccactgggcccagtagtcc

SEQ ID NO: 459594 - DNA, 554 bp, Homo sapiens
aattacattttaatgtaattctttcttttcacttaaaaaatacttattgaaagagctgttttcagatttagacagattttgtcactatatcattcctcataccatcaagaggattggtgactcaggaaaaatgctstactattgtctccaatattttcttctaagtcacttatatctatcccctttgcaaattattgttattattattatttttttttagatgaagtcttgctcttgtcccccaggctggagtgcaacggtgccatctcggctcactgcaacctccacctcccaggttcaagcaattctcctgcctcagcctcccaagtagctgggattacaggtgcctgccaccacccccggctaatttttgtatttttactagagacgaggtttcaccatgttggccaggctgttctccaaatcctgatctcaggtgatccacctgccttggcctcccaaagtgctgggattacaggcatgagccaccatggctggcccccttttgcaaattttgatggcaacactttttttactcaattgaatcacgtgat

SEQ ID NO: 459595 - DNA, 554 bp, Homo sapiens
aattacattttaatgtaattctttcttttcacttaaaaaatacttattgaaagagctgttttcagatttagacagattttgtcactatatcattcctcataccatcaagaggattggtgactcaggaaaaatgctgtactattgtctccaatattttcttctaagtcacttatatctatcccctttgcaaattattgttattattattatttttttttagatgaagtcttgctcttgtcccccaggctggagtgcaacggtgccatctcggctcactgcaacctccacctcccaggttcaagcaattmtcctgcctcagcctcccaagtagctgggattacaggtgcctgccaccacccccggctaatttttgtatttttactagagacgaggtttcaccatgttggccaggctgttctccaaatcctgatctcaggtgatccacctgccttggcctcccaaagtgctgggattacaggcatgagccaccatggctggcccccttttgcaaattttgatggcaacactttttttactcaattgaatcacgtgat

SEQ ID NO: 459596 - DNA, 554 bp, Homo sapiens
aattacattttaatgtaattctttcttttcacttaaaaaatacttattgaaagagctgttttcagatttagacagattttgtcactatatcattcctcataccatcaagaggattggtgactcaggaaaaatgctgtactattgtctccaatattttcttctaagtcacttatatctatcccctttgcaaattattgttattattattatttttttttagatgaagtcttgctcttgtcccccaggctggagtgcaacggtgccatctcggctcactgcaacctccacctcccaggttcaagcaattctcctgcctcagcctcccaagtagctgggattacaggtgcctgccaccacccccggctaatttttgtatttttastagagacgaggtttcaccatgttggccaggctgttctccaaatcctgatctcaggtgatccacctgccttggcctcccaaagtgctgggattacaggcatgagccaccatggctggcccccttttgcaaattttgatggcaacactttttttactcaattgaatcacgtgat

SEQ ID NO: 459597 - DNA, 598 bp, Homo sapiens
tactcaattgaatcacgtgatgctagatgctaactgacttctgtccaaagtcagtaagaagtttctggtaatttaatgtgtggtatcctgcacaattcatgagccagttcacatatgttactcattgctttgaaattcctttgatctgttccaagggatttggtgatttctcctgtcttcagttgcattgcttagtgcataayaggcgatccttttcctgtatcttagtgacaacatataacacagtttcagctacttgtaggcatcttccttgtgtaggtcgggtaatgcatataggtatttcttttgctagaaaatataaaattgaagtcccttgtccaatgacaaatatgcctttctgtttagtttttacatacaacttttcttttcaatgaacaatcataatgtaattgtgaggacatcttaagtgcacaaattcagcattcataatgtcagcaatgcactaaatgtaactgatgtaacaaaataggaacagctgtaactattactgcatgtactaatatactaacattacagcatgtcctaataactcttttagtgactgccatctgctaacattaattacaggacacgtttt

SEQ ID NO: 459598 - DNA, 548 bp, Homo sapiens
ggcttggtttccctctcgagcagctctcctattagtaacaagagcacaaaggcagtgcttgaatgtgagcctgcgtcggagcccagcagcttcacagtcactcccgtcatcgaggaggacgagtgagcagtgcctgctgccgatggcggttcacttggagtaacaggcttattccactttccatggggtttgttaatattttgcattgactcatactatcttaactgttgagaacgtatttggtttatattccttagagtttagtccagaggctgtaacacatttgtaatactttagggtccgtgactaccatctgcatgrtttaagtgctttactcacggagtttaaataatagtgttcatttttttaatgacactggtttcatgtagttttcaagaaataaaagaattcattcaagtgaagccatttgtgtgcctctaaatgagtcatctaattagatgttacttttagttttaaaatgaaatcttaggtgccttaggggttttttttttttttaagtattttttaaaaacctgcaaagatataaa

SEQ ID NO: 459599 - DNA, 567 bp, Homo sapiens
cgttaaatgactcgcgtccagctccccatttcctagcctcgggcctacagggctgggggcgacctctgcctcccgtccccagagcttacaaaattccttccagttgtattttagggcttgttttcctagagaaggttgagactagaggaaggattaaagtggtgggggaaggggcaagaccgaggggtccctaccccacgcggctttggaggatggcctcccagggttagcactcgaatgctagagcttcttgtccacactctaccaggtcagtgtcccgcgatccccacctcccggacgcgtatgaaacgggaacagctaagggcttcaarggaaacacacaactggggttcggttttcaaccctcctctccgcaaatcagccttctgggcagagggttggctgctagaacgcctggaggtgcttcccttgaattcatggcaaacaccagaggaaagttttcaggttgcttgcttacttccagggcagtacagagaaaagcggcctccccgaggggacaagggcctctgtgcccatgaggggtcggacattgcagcggacttgcct

SEQ ID NO: 459600 - DNA, 568 bp, Homo sapiens
cacacaactggggttcggttttcaaccctcctctccgcaaatcagccttctgggcagagggttggctgctagaacgcctggaggtgcttcccttgaattcatggcaaacaccagaggaaagttttcaggttgcttgcttacttccagggcagtacagagaaaagcggcctccccgaggggacaagggcctctgtgcccatgaggggtcggacattgcagcggacttgcctacgctctcatctagcatttgattccccaccaggagatgggcttggtgcacgctctcagaagcgcatccaccgaaggctytggaactgccccgcttcgcatagagctattgtgctgccctgcagtgtatccacttgttttgtttgtttgtttgttttttggtttttgcttgtttgctgatgggcagtggggaggtgcgagggtggagggccttctttgtgcatatatagcgatagtctgcactaggccaagcccgctactcctgggagaatgggaacacgcaaataatctaaacaaagttttctgctgtcatcttgtgaaggaccctctcccccaagac

SEQ ID NO: 459601 - DNA, 536 bp, Homo sapiens
tgacataggtatgacaacatcttggtatttgaataaaattgcccatgaccatctaggccttggtctttttggagatggggggtaaatcttttgattaacttttctgtttcttttatggtaatcttttaaaaacaagctttcttcctcagttttggcaatgtgtctttctttaaagagaaatatcaattttccttttcctttttatttgagtcagggtctcaatgtgtcacccaggctggagtgaagtggtgtgatcatggctcactgcaaccccaacctcgcaggtttagttcatcctcctgcctcagcctcctgagtagctgggactacaggcgcgtgccaccacacccagctaatttttaatwttttgtagcgatggggtttagccatgttgccgaagctggtcttgaactcctgagctcaagtgatctgcttgccttggcctcccaaggttttgggattacaggtgtgagccactgtgcctggcctatttttcattttaaacttgatataaaattgcaatgatgatctctcaa

SEQ ID NO: 459602 - DNA, 541 bp, Homo sapiens
tagcgccacaaaattgcaggaactatatatcctgcccttcagaaattattgtttggtgaggagttattcttggtgcaaagttagaggctagtcttcctttgcctagttttgaaactccaacagccttacatgttgatggggatttggctcacccagcactacttagcaggaccttgtgtgcggctcaggtgcataagcctcacaggtgtgctctgcttgttctttcatcatctttgtctttcctttgaacacagtgtaagcagtgctgagctcagctggttggttggtttacgctgaatttgtagatttgattcctgtgacattgtgttagcttttctcatattttggctatagccagacggcacagagacctgcggagagagcatggaggattcggtgtaatctatcaccactccttgacaagtaaccrgaagtgcatgatgcactagcatgtcccagtagcaggggcaaagggtaacacaacaaaatgagaaagtgactttcacagtctgagagttcacaattgctgaacaagctggca

SEQ ID NO: 459603 - DNA, 552 bp, Homo sapiens
tgaggtaattgaagagtgttttaaagtgtatttacttatgtttgccacatatttattgctttgttaaaggccaaagttttggtttttggttacatctgagatacatcctgtattagaagaatgtttctaagtaggcctttaaggcttttaaaataaataacaagtgtaggagaagatggtttctagaaggtgctttgatgaaatttcacaaagttttgttttttggttacacttaagatacacctgtattagaagaatgttcataagtaggcccttaaggcttttaaaatgacaagtgtaggagaagattgtttctagagggtgctttgatgaaatttcaccggctggctatctgtatataatcaggtgtgcccacagagaaggcaacaatgaagctattcaggcagggcagcagaaaacacaggcaaagcaattgtttacaactcaacaactgggtcattaggaattttcatctttcgatcakctaccctggctttgagtagccacagccagcgcgtgtttcaaaaaaggacaaaactctatttgcaaata

SEQ ID NO: 459604 - DNA, 501 bp, Homo sapiens
ctggttgagaaatgattggtggtttaagaaccagaagatctttgacctgaaattgtttctttcactctcaaatcatcagaactcctccatctatctctgtgaggattaaagtattggtcttgtactcttgaggttttcatgacggattttcttgcacttcatctctctgactcttttggttaaaacaataacaagatagctctgcacctggagaaatcatatggaaaggttgtcataggaatctttcctaaaatgacctcataatctttctcccaacctgctcactgtctcacggttcctatttacattgtctgatttgtcctggggttccaagttagaaaccctggcatcaaygttgatgctgcttccccctctctgaggccttgtgttactcaacagatcctgttggttctgcctaagcgctcaactctaagtcagtactttgccttcatcctcaaggcccccacagaattctcaggacacaaagctcttcattaaaaa

SEQ ID NO: 459605 - DNA, 501 bp, Homo sapiens
ctggttgagaaatgattggtggtttaagaaccagaagatctttgacctgaaattgtttctttcactctcaaatcatcagaactcctccatctatctctgtgaggattaaagtattggtcttgtactcttgaggttttcatgacggattttcttgcacttcatctctctgactcttttggttaaaacaataacaagatagctctgcacctggagaaatcatatggaaaggttgtcataggaatctttcctaaaatgacctcataatctttctcccaacctgctcactgtctcacggttcctatttacattgtctgatttgtcctggggttccaagttagaaaccctggcatcaacgttgatgctgctyccccctctctgaggccttgtgttactcaacagatcctgttggttctgcctaagcgctcaactctaagtcagtactttgccttcatcctcaaggcccccacagaattctcaggacacaaagctcttcattaaaaa

SEQ ID NO: 459606 - DNA, 456 bp, Homo sapiens
atggccggggccagaactaagacacagcagtgggggctaggcagtgggttgcgggggcagrgtaagttgtactgcttaattttatactttctgtcataaaaagtttgagccatgcctgaggtcactagtcaaatgtgtgcctatgtgttccacaccagtcaaaatccaaacccatcagtgaatgagctttatcaagctctgctacgtgccaagcactgtgctacctgccaaggacaggatggtgaataaacagtcagacctggtcctcacagagcaaaaaacggagcaggaatgacagaccttgaataaataatcacaaataaataaataatagcaagtctgcagagggcagtgaaggatgttatatccttgttttgcacttactgttagtgcaacaatctgcttcactgtgatgtggctcctggggaaaaacatagctttaatatggtaagaata

SEQ ID NO: 459607 - DNA, 632 bp, Homo sapiens
gagcagccagtcatgttttcaaagtgcatttcacatgtgctaatactagaaggctgtcaaaggatgttttctaactagcttcaaagtccctccttgcaagttactttctcattctttctttggcctagccaaatttyacatttcgaacccatctgccaagttttttggacttcctttttcctatttattgttccttctactcttaaaaatgtgctctgtggttttgagcatgtccttacaaattttgacagtaagtcatggaggtttttattctagcctttgcttttggtaagcagagtcaggatttgaacccaggctgcctctcctctgataacaataactactttataagatgttagattaataaaaagaaatgttagttctcccctatttccaaggggactttgaatgcctgcatatgagctcacataaagaatctattccagaccaaatgtccgtgcagaccatatctggtataatgtatgtcagaggtccacgcggttttggtttatctctctgcaaactttgttgttggcaatttactttttactaatgtcacttaatggtctttaccctgcctgtgcttaacttagatttctagattgaaattttgaattcataatgggaccctg

SEQ ID NO: 459608 - DNA, 632 bp, Homo sapiens
gagcagccagtcatgttttcaaagtgcatttcacatgtgctaatactagaaggctgtcaaaggatgttttctaactagcttcaaagtccctccttgcaagttactttctcattctttctttggcctagccaaatttcacatttcgaacccatctgccaagttttttggacttcctttttcctatttattgttccttctactcttaaaaatgtgctctgtggttttgagcatgtccttacaaattttgacagtaagtcatggaggttttyattctagcctttgcttttggtaagcagagtcaggatttgaacccaggctgcctctcctctgataacaataactactttataagatgttagattaataaaaagaaatgttagttctcccctatttccaaggggactttgaatgcctgcatatgagctcacataaagaatctattccagaccaaatgtccgtgcagaccatatctggtataatgtatgtcagaggtccacgcggttttggtttatctctctgcaaactttgttgttggcaatttactttttactaatgtcacttaatggtctttaccctgcctgtgcttaacttagatttctagattgaaattttgaattcataatgggaccctg

SEQ ID NO: 459609 - DNA, 592 bp, Homo sapiens
gagaggctagcctggattttccttgagaggctttttgtggggctgactgatattctggctgataggctggtccagaggatggctgcatgagaggcttccacagaggcagactgggacgatggcctagagggctgtatgggaggctgtgtgacaggctggctggctgaatgggctagcgactggctgagagaatggctggctgagaatctgcctggctgagagaggctggctgcctgagaggcttgttcagaggatgcctggtggagaggctggcttagagattgactgagaggctggccgaaaggctgactgggaggctgtttgagaggctgggggagaagatgactgtttcaaaggctgtctgactgactggctgagctaattagaggcctactgagaggctggatggctgagaggctggctaggaggttgtttgagacgctgggtgagaaaatgactgtttcaaaggccrtctgactgactggctgagccagagtcttactgagaggctggctggctgagaggcttgctgagaggcaggatggcagacagcctggctgagagctggctgcctaaaaggtcggctgagagg

SEQ ID NO: 459610 - DNA, 504 bp, Homo sapiens
acaagtcagtgtgaaaatgaagtctcgggacacacacagatgcaaccattccataatacattgactgtaagtctcatatcttgcatgtaactatctctttgtctacagaccattcatctgtcgcttcctcaggctcctcttgcctctttcccattcacktcaacactacagtcccaatgtcacttagcgagatggttgtgggaagattggcctgttgcagacaggagaagctactggattggtaggaggtaggaggtggtggttagtggaggtattaagacagctggggtagatgagaacagaaataaaatggaaattgaacagaaatggaatggaaagtgataagaaatggttcttttttggatagggaaattatataacttgtactgatctcagagtgaagacaggaaaatgactgtaattgtcttgagtccatagcaattacactgttgagggttaggtcatgagtcactgtaccactcgcatctcttttagctacccagg

SEQ ID NO: 459611 - DNA, 577 bp, Homo sapiens
aaattgctgaatgtaaattgcaattggaattgactattaaagatcttggtagagtaggttaaacatctgttcaatttattacaattttatttgtacttcagctgtaactggggcaattaagccaatcagagcaagcaaatcaaatctaatttacactgtaatggactaaaaatgaatgaataaacattgcactaccaaatccaaatgattaaatatgtctccaaggatttttttttctatttcagtatacaagatcatggtatttatactataattaaccatttaagaatgatgaaacaaattggaacatctcttcatttttttatatgttttttataaaattgccaaatagcattcaagaatataataaattagaatccttcttaacttagacatgtttacttataaaatcaatttaattcaagttcatgcttcatttgaatgctggaatttaaatggracatatagatgctaatttttttaaataaatttttatatattcagttttttgccttagccatggaccgtaataggaagattaataatggatttagtatgatgagttaaaactttattc

SEQ ID NO: 459612 - DNA, 577 bp, Homo sapiens
aaattgctgaatgtaaattgcaattggaattgactattaaagatcttggtagagtaggttaaacatctgttcaatttattacaattttatttgtacttcagctgtaactggggcaattaagccaatcagagcaagcaaatcaaatctaatttacactgtaatggactaaaaatgaatgaataaacattgcactaccaaatccaaatgattaaatatgtctccaaggatttttttttctatttcagtatacaagatcatggtatttatactataattaaccatttaagaatgatgaaacaaattggaacatctcttcatttttttatatgttttttataaaattgccaaatagcattcaagaatataataaattagaatccttcttaacttagacatgtttacttataaaatcaatttaattcaagttcatgcttcatttgaatgctggaatttaaatgggacatatagatgctaatttttttaaataaatttttatatattcagttttttgccttagccatggaccrtaataggaagattaataatggatttagtatgatgagttaaaactttattc

SEQ ID NO: 459613 - DNA, 643 bp, Homo sapiens
tcacctcacctggtgagctggtaagattccttgtatcaggcatcaggggctacacatctcattttagtgtctcttttgcccaggattcctgaaaactcagaggtgaattcactactcaaatacattattgtccttggcttctattcycgctacatcccacctagctaggagtggctccagagatattggaagtcagtgggaattttagctgtctcctttctaacagtaatcttaaacaaattagtttcctttctgagccctaacttccttatgtgtaaagtgggttactaatttttgtttcatatgcattttatgtgtaaagtgggttactaatttttgtttcatatgcatttggccatagtgctggttcataggaaacactcaaaacgctaattattgaaatttaaattattcttttgatctacaacttattgtaaattgtcttaagttgtatttggaggcaagtatggaattgaagagagaatcaaaatatgatttgagggtagttatttcataggctaacccaagatgggtacgctgacgttgccttttgtctatagttccttcaaaaggtaaaatttatatgtggtgaaatgtacagatcttaagtatacaattcaatgagttttgacaaatgcatatt

SEQ ID NO: 459614 - DNA, 643 bp, Homo sapiens
tcacctcacctggtgagctggtaagattccttgtatcaggcatcaggggctacacatctcattttagtgtctcttttgcccaggattcctgaaaactcagaggtgaattcactactcaaatacattattgtccttggcttctattcccgctacaycccacctagctaggagtggctccagagatattggaagtcagtgggaattttagctgtctcctttctaacagtaatcttaaacaaattagtttcctttctgagccctaacttccttatgtgtaaagtgggttactaatttttgtttcatatgcattttatgtgtaaagtgggttactaatttttgtttcatatgcatttggccatagtgctggttcataggaaacactcaaaacgctaattattgaaatttaaattattcttttgatctacaacttattgtaaattgtcttaagttgtatttggaggcaagtatggaattgaagagagaatcaaaatatgatttgagggtagttatttcataggctaacccaagatgggtacgctgacgttgccttttgtctatagttccttcaaaaggtaaaatttatatgtggtgaaatgtacagatcttaagtatacaattcaatgagttttgacaaatgcatatt

SEQ ID NO: 459615 - DNA, 448 bp, Homo sapiens
gagctgaatttatagatcaagttggaaaaaaattacaactttacaatactcagtcttcaatccatgaacaaagaacatccatttacttaaatcttctttgttttattcatcagagttttatagtttctgcttattgatcttgtagatattttgttagatttrtacataaatatttcattttttggtactattgtaaatgagatcgtgtttttattctcaattcaaactgttaattgctggtatataagaaaaccattgagttttatgtattaatctagtatcctaagaccatgttataatcacttattacgtctagactattttctttggattttttacactttttccaattatggcatctgtgagcaaagatagttttatccttctgagtctgtatattttttgttttcttgggttttttgtttgtttttgtttgagagatgatgcc

SEQ ID NO: 459616 - DNA, 518 bp, Homo sapiens
tcaatgcagtaaagagcagtattgtctccagcatgtctcacctccagccataaggcagttttctcctatctcagttaatagaatgtatgatcgggttttacaccgagacattccattcccagggatgagcaagagacagatgccttcctcttatctcaactgcaaagaggccttcctctttcactaatcttcctcagcacagaccctttatgkgtgtcgggctgggggaaggtcagggctttcccttcccatgaggccatatctcaggctctctcggtggggagaaaccttggacaatacccaggctttcttgggcagaggtccctgcggccttccgcagtgcattgtgtccctgggtactcgagaatgcagaatggcaatgacttttaccaagcatactgcctgcaaacacatttttaacaaagcacatcctgcccagccctaaatccattaatcctggagtcaatatagcacatgtttctgcaagcacagggttggggctagggttacagattaac

SEQ ID NO: 459617 - DNA, 583 bp, Homo sapiens
tccaggctttatctacagttacacaggctgagcgataactgaactgaaaattttactaatcagcctggtggtttaagccctgcaggaagattgtaacttcaaattggtggattgtgagggaattcagggagtgcacatctgcctgacataggaggaaacccaagtctggatgaactttttctgctttgctatgagacccaagatatatcaataaagttgttaatcgttcatgataaaaatagaaagctattctgaaatatgtgaggrttcatagaggaaacacacctgtgctctttctaaaaataaggcgtattacagctaaccaaataatgaatatgacaagaaatattccaatagaaaaacaggcaagaagcctgaataggcaattcacagaaaacaaaaataaacatatgaaaaaatcttgtttcactaaagaaatgtaaatttaaacaatgagatgccaactttttgcccaccatttttgcaaaaatttttaaaagtggaaacattgaaaaacatatgaggaaataggcatttatattcttctggagaaattgtagggaatttagaatataatctgaga

SEQ ID NO: 459618 - DNA, 583 bp, Homo sapiens
ttggtgtttggttgatcaaagctggagttgactggccttggctctaagatgcagactgagctcaagttttctcttcttctctcaccctcacaacagccaaggcrcaagaaatcaagccctgaggcaaagacacatttcaaacctctgcctagatgatgtctgctaatatcccattgccaaagcagcctaatgggcagagaagcgtattctgccctcactaaggggaggtgggaatgtacatttgctcaacaatcattccaattatcctagaggttagccagagagtggatgtaggaatctcagataaaactttcatgttgttagatctttgagtatttctgtcataaaccaatgctagtcacatcactgtctatgattcaaagacatgttttggtcacggtaacccaagcatccaagcaataaagactattctctttattggatggatggatctaccacaaatagatccatccataaactgcataataacacaaagagaatagtctttaagctacccagggagtatcattatggattgtgtccccctgaaattcatatgtgaaagccccaacccctaatttga

SEQ ID NO: 459619 - DNA, 606 bp, Homo sapiens
agaaaacaagttacctgcttgtaaaatacaatggtgacacaggcatagtgtaasagttacagacatttgcattccaaaaggtagaaaatgaaggaataaaggggtcatttgtcccaagcaatttcaaagtctagtaaacaaattccattgggtttcaagacctgaaagcaatgccctgagagttcctggctctggtttatttccccgtgattgcagcaccagcctctagacccaaagctcttccctccgtcattcttcctttttctttagtgtagcatatgcttgtagctgaatagttttattagcctgtttccatctggtagttactttagtcccaccagacagtgtttcttctggcatagcattcttaaaaattccgtgggtctcttatgtgtgttatggggattcatgccattaatcaagaggttcatatacaaatcttccctggaaaatcacatctctattctcagcttctgctgagatgtttgaagtgatccatgagttacatggccagtctcttcagcactatctaatgttatccaaccccacttttggtttttctgaagcacactttcttaacagtgactcttcctattttagcatctt

SEQ ID NO: 459620 - DNA, 606 bp, Homo sapiens
agaaaacaagttacctgcttgtaaaatacaatggtgacacaggcatagtgtaagagttacagacatttgcattccaaaaggtagaaaatgaaggaataaaggggtcatttgtcccaagcaatttcaaagtctagtaaacaaattccattgggtttcaagacctgaaagcaatgccctgagrgttcctggctctggtttatttccccgtgattgcagcaccagcctctagacccaaagctcttccctccgtcattcttcctttttctttagtgtagcatatgcttgtagctgaatagttttattagcctgtttccatctggtagttactttagtcccaccagacagtgtttcttctggcatagcattcttaaaaattccgtgggtctcttatgtgtgttatggggattcatgccattaatcaagaggttcatatacaaatcttccctggaaaatcacatctctattctcagcttctgctgagatgtttgaagtgatccatgagttacatggccagtctcttcagcactatctaatgttatccaaccccacttttggtttttctgaagcacactttcttaacagtgactcttcctattttagcatctt

SEQ ID NO: 459621 - DNA, 606 bp, Homo sapiens
agaaaacaagttacctgcttgtaaaatacaatggtgacacaggcatagtgtaagagttacagacatttgcattccaaaaggtagaaaatgaaggaataaaggggtcatttgtcccaagcaatttcaaagtctagtaaacaaattccattgggtttcaagacctgaaagcaatgccctgagagttcctggctctggtttatttccccgtgattgcagcaccagcctctagacccaaagctcttccctcsgtcattcttcctttttctttagtgtagcatatgcttgtagctgaatagttttattagcctgtttccatctggtagttactttagtcccaccagacagtgtttcttctggcatagcattcttaaaaattccgtgggtctcttatgtgtgttatggggattcatgccattaatcaagaggttcatatacaaatcttccctggaaaatcacatctctattctcagcttctgctgagatgtttgaagtgatccatgagttacatggccagtctcttcagcactatctaatgttatccaaccccacttttggtttttctgaagcacactttcttaacagtgactcttcctattttagcatctt

SEQ ID NO: 459622 - DNA, 530 bp, Homo sapiens
tcatatacaaatcttccctggaaaatcacatctctattctcagcttctgctgagatgtttgaagtgatccatgagttacatggccagtctcttcagcactatctaatgttatccaaccccacttttggtttttctgaagcacactttcttaacagtgactcttcctattttagcatcttttgcaatctggataggttgagaatttcccaaattaccgagttctggttccattttgcttaatatttcatttctcaatttatccctttcctctcacattttagtgtaaacttcaagaagaaatcagactgcaccttyaacacatcacttgaaaatattctcagataaatgtccaggttcatccatgtagaaggtacaagttctactttctacctgatggtggaacacaatttggctgttatctgccacttgataacagttagcatctttcttcccttttccaataacatgctccgtattttctttggaaacttaacaacagtgtcttcaacattcacatgtctacaaacatt

SEQ ID NO: 459623 - DNA, 594 bp, Homo sapiens
aggatactgtattgttcatcacagctttagaaaaactctcataggtgtataaagacatgtctggaaaaatggacaatgctgcattttccataagagctataaatgggaaacattgtaaataaggaaacaartaaatctgggtactcatgggcagttaagttgaatgaactagaactatacttactacactgattggggtgaacaccaagctgctgtaacaatgagaacctaaaattctctggcagaaataatttaagttcacatacctttctcacataactaagtctgtgtaacggtccagtttggtgggatagatctgtcatttgagaactcagtctcttctatcttttgttctgccataacctaggggcatagtcctcatctccatgatcaaagctagatgatgagcgagatcacatgcaagatggcaggaaaagaaaagacaggaggaatcagatatctatttccttttaagaaagtgagcaaggagttgcacgtgttatttctgctagcattctataaaaccctagtcacatgcgagctgcaaaatgtagtcacaagaaagctatgacttctgaaagaaaaagcgtattt

SEQ ID NO: 459624 - DNA, 232 bp, Homo sapiens
aaagacatgtctggaaaaatggacaatgctgcattttccataagagctataaatgggaaacattgtaaataaggaaacaagtaaatctgggtactcatgggcagttaagttgaatgaactakaactatacttactacactgattggggtgaacaccaagctgctgtaacaatgagaacctaaaattctctggcagaaataatttaagttcacatacctttctcacataacta

SEQ ID NO: 459625 - DNA, 594 bp, Homo sapiens
aggatactgtattgttcatcacagctttagaaaaactctcataggtgtataaagacatgtctggaaaaatggacaatgctgcattttccataagagctataaatgggaaacattgtaaataaggaaacaagtaaatctgggtactcatgggcagttaagttgaatgaactagaactayacttactacactgattggggtgaacaccaagctgctgtaacaatgagaacctaaaattctctggcagaaataatttaagttcacatacctttctcacataactaagtctgtgtaacggtccagtttggtgggatagatctgtcatttgagaactcagtctcttctatcttttgttctgccataacctaggggcatagtcctcatctccatgatcaaagctagatgatgagcgagatcacatgcaagatggcaggaaaagaaaagacaggaggaatcagatatctatttccttttaagaaagtgagcaaggagttgcacgtgttatttctgctagcattctataaaaccctagtcacatgcgagctgcaaaatgtagtcacaagaaagctatgacttctgaaagaaaaagcgtattt

SEQ ID NO: 459626 - DNA, 510 bp, Homo sapiens
atagcctcaacagtgcaaatctaagagttattggccttcaagaggaggcagagaaagagaagggggtagaaactttattcaaagagataatatcggagaatgtcscaaacccagagaaagataccagtaccagaagattatagaacaccaagcagatttaacccaaagaagactactacaagcatttaataaactctcaaaggtcaaaaataatgaagggatcctaatagcagcaacagaaaagaaataagatacaatggagctccaatacatctggaagcagactttagagtggaaatctttacaggccagagagagtgacatgatatatctaaagtgtggaaggaaaaattttttacactagaatagtatgtctggtgaaaatatcctttaagcatgaaggagaaataaagactttcccagacaaagaaaagctgaaagatttcatcaacaccaggcctgttctacaagaagggctacagggattaattcaattagaaaagaacatgc

SEQ ID NO: 459627 - DNA, 550 bp, Homo sapiens
acagttgcatgccatgacacctgactagtttttgtcttttttgcagatataaggtttwaccatttcacccagactagtatcaaactcctggactcaagcaattgacctgtgtctgcctaccaaagagctaggattacaggtgtgagccactgtacctggccaaaataaatcttaaaattttcaaaaaattgaaataatatcaagcatcttctctgcccacaatggagtaaagctagaaatcaataacaagagaaattttggaaactatacaaacacatggaaattaagcaatatgctcttgaatgaccagtgggtcaatgaagaaattaagaaggaaattaaaaattttcatgaaacaagtgataacggaaacacaatataccaaaacctatgcaatacagtgaaagcagtattaagagggaaatttatagctataagtgcttacatcaaaatagaaaaaaaacttcaaataacttaataatgcattttagagaactagaaaatcaagagcaagccaagccccaaattagaagaaacaaaataataaaga

SEQ ID NO: 459628 - DNA, 619 bp, Homo sapiens
gataaaaaccctcaaaagagttggtatagaaggaacacacatcaacataataaaaaccatatatgacagacctacagttagtatcatactgaatgaggaaaagctgaaaacctttcctctaagatctggaatgcaacaaagatgtgtccacttttaccactgttattcaacatagttctcaaagtgctagctaaagcaaccagaaaatagaaataaagagcatccaaattggaaagtaagaagtcaaattatccttatttgcagataatatgattttatatttggaaaaacctgaagactccaccaaaacactattagaactgataaattygataaagttacaggatacaaaatccacatataaaaatcagtaccaattctatatgccaacaatgaacaacctgaaaaagaaataaaaaatgtaatctaatttacagtaaccacaaatgaaattgaatacctaagaattcaccaagtaagtgtaagatctgtatagtgaaaactaaaaacactgatgaaagaaattgaagacacaaaatagaaaggtattccatgttcatggattggaagaatcaatattgttaaaatgtccatagtacccaaagcaatctacagattc

SEQ ID NO: 459629 - DNA, 563 bp, Homo sapiens
tgagggactggacaccccatttcccatgatgtgattattacttactgcatgcctgtatcaaatatctcatgcacctcataaatatatacacctactatgtacccacaaacattttaaaaacaaaaaatgtaagaacttggatggtatgtatatacatcaatttcaagataatgttaacctcaaggaagggaaagaaaataggattcttggtggactcaactgtatctccagcattttatttcttaaaaaacttatatttgaaataaatataaaaatattaagcttttaaaaatctgggtcagcgtaggctatctagtatattacgtaatttctgaatatttataatatttcataactttaaaaaaactcaaaacattaaaagcatatgtataatgcatatgtatttgtgtgtatatatatgtatatgtatacacacataaatgtgtttcagtatgcatagagtatttctgaaaatatttacaagaactggggaaggagatggtggtactagkctactggaagtttagggagacaggacctttaaaattttgtactatttgtat

SEQ ID NO: 459630 - DNA, 539 bp, Homo sapiens
tctgcttgttaatgtaactgtatttttgaagacagaattacttatccaaataaacaggaataagtagtcaccaaagactaactgaagtgctgattatagaatgagagagtgagttccccgaatgtctcctgagtctaatgttgagggcacagtgtcatgaaggtgctgacacacatctgtcatcaacaatatgaaggatgagaaaaatggagagaaagtgtcaagaagtaaaataagcaagtagaatttaaatagagactgaacataacaaagcaaatgggaaaacaaagagaaaatgctttccctctgctcagaaatgcagtgtctgtatgaaagatctggtcttcatttagtaatttttcaacgttgacaaccaaactggataattgaggcccaaaatagaaaaacacacacccttgattgtaattagccagttttctcctgaattatgtaggtctttatcttcyctctctactcaatcttgcatagcatgtcttaacagagaacaagcaagagggacagatcagcccttctgtggg

SEQ ID NO: 459631 - DNA, 602 bp, Homo sapiens
ggtttattgagtaccgtggaaaagcaatgtatattttattccacctaaagttacytactcagctgagaagaagaatgccagtttgaaacttaacactgaattctaggcactaaaggtaaccaaatagtcaaccattgtggcaacagaaggtcctcttgctattcttccatccgggctgcctctatttacctgggccttgagtagctcattgctggcatagattgagaataccaccagtagtttgacttgtctgggtaaacaaggaagactcataggtcaggccctggaagtgtatttgtatttctaatacaaataccaaatacaagttttgtatttgcacgaggagctgagtagcctcttgggaaagatcccatgttgagggaagagagagacttgcatattaagtttggctaataaggtgtctcagccattggagagcagggtaaattttaatacaagatgttgtttgttgcttatattttcccaagccaattgaccttgagacctagaaaggggtgaaccatttgagtaaactgaataagctattttcttgcaagctcgcgagagtcactggaaaccaaaaggattttagactacaacaa

SEQ ID NO: 459632 - DNA, 602 bp, Homo sapiens
ggtttattgagtaccgtggaaaagcaatgtatattttattccacctaaagttacctactcagctgagaagaagaatgccagtttgaaacttaacactgaattctaggcactaaaggtaaccaaatagtcaaccattgtggcaacagaaggtcctcttgctattcttccatccgggctgcctctatttacctgggycttgagtagctcattgctggcatagattgagaataccaccagtagtttgacttgtctgggtaaacaaggaagactcataggtcaggccctggaagtgtatttgtatttctaatacaaataccaaatacaagttttgtatttgcacgaggagctgagtagcctcttgggaaagatcccatgttgagggaagagagagacttgcatattaagtttggctaataaggtgtctcagccattggagagcagggtaaattttaatacaagatgttgtttgttgcttatattttcccaagccaattgaccttgagacctagaaaggggtgaaccatttgagtaaactgaataagctattttcttgcaagctcgcgagagtcactggaaaccaaaaggattttagactacaacaa

SEQ ID NO: 459633 - DNA, 602 bp, Homo sapiens
ggtttattgagtaccgtggaaaagcaatgtatattttattccacctaaagttacctactcagctgagaagaagaatgccagtttgaaacttaacactgaattctaggcactaaaggtaaccaaatagtcaaccattgtggcaacagaaggtcctcttgctattcttccatccgggctgcctctatttacctgggccttgagtagctcattgctggcatagattgagaataccaccagtagtttgacttgtctgggtaaacaaggaagactcataggtcaggccctggaagtgtatttgtatttctaatacaaataccaaatacaagttttgtatttgcaygaggagctgagtagcctcttgggaaagatcccatgttgagggaagagagagacttgcatattaagtttggctaataaggtgtctcagccattggagagcagggtaaattttaatacaagatgttgtttgttgcttatattttcccaagccaattgaccttgagacctagaaaggggtgaaccatttgagtaaactgaataagctattttcttgcaagctcgcgagagtcactggaaaccaaaaggattttagactacaacaa

SEQ ID NO: 459634 - DNA, 519 bp, Homo sapiens
tgacagggacctccagcaagagcaaggacaagggctcagctccaagagcactaaagaactcagagcaggagggaaggagagagggagatgcctgttgctagctgaaaggatttgtctgtgagtacatataacagaccctcaggggctcctagaaatagttggaaggaggaagagaccttgaaggaaatgaaaggagctccagaggtttcacagttggaggaataaaccctgggaattactgttaagtggcccccttttacttttagaatgatgtgaattgagatttttttaaaaagccttagaaaggcagtagsgtagtcctttgaagaaaacaaaagggaaccacgtcttctgtatttaacctttgctttgccactaccagataccaaaaagatgactccaattttttgtagtccaccatattggaattgggcattcaggtctgttttggaactattcttaaaagtcccatagttgtagttatattttgtttactctccaagagggccttcatgttcc

SEQ ID NO: 459635 - DNA, 625 bp, Homo sapiens
ttgcatggcccttgggtatttgtakctggatcacttctctcctatgtccccatcttggctcaatgaataagtttcatttcaggtccttgctcctgcccacctgacttatattattgtaatctcattaagctcttttattgacctctgaagtcttttgagaggaacatttagtggcctctgtgtcagattttaaaagaaatattataggcattatttattgtaaggcttttaacatcctatgaagtggagactttgcaaccctcattttataaattagataactgtagcccagggaaattatgtcacttgtccaaagacacaaggcagctgtgtgcttttagatcttgtactctttcttctgtaccatgccgagggtcaatggtattaatgaaataccttcataaagctttcagggaacaatgtaaaatttaattcgacaatttggtaatgtaacatttagctgaaatttgatatgattatgaagtattatggtaagccacaccaaaatattttgggaaccattaaaaactggttttggtgagtcttttaggaaatattttcaaaatttgtacttgtgcttttttatgtgtacatgatttttgtttcaattagaggtatttttctt

SEQ ID NO: 459636 - DNA, 609 bp, Homo sapiens
cctgacatagttgcataatgattattggtttatgtcaatctgagtatgggactgttagggaaggtgggtctattgtttactaagagccttttagttccacacacagcaggttcctatccctttcccaaggcacaccagcccacattcagaattgcagccattgggtaatatgttctggggcagtgcagtctgcttgtctctacaccaagagggtcaaagtggagattgctgcccctactccggcccccccccccgcccccctcattcatagcactctagggacactttgttcactaaccayttgaaacatgattcacatgcgcaagatcaccttttcaatggtgtgttagttttctattgctgctgtaaaaaaatggccataagtttagtggcttaaaacaacacaaacttatgattttatagttctggaggccaaaagtcccaaatcagtttcactgggataagttgaaggtgacagcaaggcttcgttctccctggaggcaatgaggaagaatccatctccttgctttttccagcttctagagtaaacttgtccaacctgcagtccatgggtcatatacagcccagaatggctttaaatgcggccca

SEQ ID NO: 459637 - DNA, 405 bp, Homo sapiens
tgtgcactcagtgaagagatgatgcctgaatggatgactccacttagtttccgcttcctcctctataatagtagaataatgtacctacctcttagcattgttgtgaggattaaatgcacaaatatgtataaaactgcttagcaccaygccaggtatatgtgttcaataaatagtaacctaaaattatcattaattgtctatggacttaacaacttataagttattgattattttatcaaatgtattattttgtggagtgataggagtggaacagaggaagggaaatatatgagtataaaatacttttatagaagcatagttgtgaaaagagaagattagagttacaagggcacatagggtagcagtgagattgtgtgtgtgtgtgtgtaatttgtttatgtgctg

SEQ ID NO: 459638 - DNA, 572 bp, Homo sapiens
tcataaatgaacctgggcaacgtggcaaaaccccgtctctactaaaaatacaaaaattaatcgggtttgatggtacatgcctgtagccccagtcactcggaagcctgaggcataagaattgcttgaacctgggaggtggaggttttagtgagccgaaattgcaccatagcactccagcctaggtgacacagcaagagtctgtgtcaaaaaaaaaaaaaaaaaaaagagagagtgagagaaagagacccataaatgacctaagagtttctaagtgtcctctgaaggagggcattatcacttgtagccacagggtggaaattgctgaaaattaagaacttcgtcctgcaattggctgaattwtaatgcgagatgaagtcccagctctacagggtgactgctgttaaagtgagggcaacttattggggaaaaaatgtaagttgggatgggggcctgtggaaataccctgacgcagctggggacactaagcccctgaattatgatgaatcttctttgacattgaaagcagtctccccacaccaatggaagtggctgccctaccccaggtggaattg

SEQ ID NO: 459639 - DNA, 417 bp, Homo sapiens
ccagctctacagggtgactgctgttaaagtgagggcaacttattggggaaaaaatgtaagttgggatgggggcctgtggaaataccctgacgcagctggggacactaagcccctgaattatgatgaatcttctttgacattgaaagcagtctccccacaccaatggaagtggctgccctaccccaggtggaattgggtccccgctaccacagtggtatcagcttttccgccaccatctgagagtactaatactgaggaaaagggtaatggcctcccctgaggcagctgccacgtaagataatgctgattatcctcagtatccaccctgctaccrctcttttcttctagacttgtaacaagactcaagtctcagcagacccctaaagataaggtacaaaatatgacttatgcggagat

SEQ ID NO: 459640 - DNA, 595 bp, Homo sapiens
cagcacttcatagtttggtgcaattctttaaaggttaaaaaaagtcttcaagcttttatataaagaaaacttagtttcagggcattaaaatcaggactcctttcaacctcatcacaaatagagtatcaatcaatggcctggtctctgaaaggaaaaagatctcaaccaagacactcaggaaatgtgtcatttgtgtgtgaaaacaataggaagacattcttcgaactacggactcccactttcccacctagaaattctttctgcaaaatacacarcaggatataaaccagaactccaaaagactgaattacatgtaagctctccaattggattatggattggaaaaaaacaaacaaaaacgtttgatggccattaaaaccatgttcccattacagagcagtcactaaagtgtatgattattgtttgataatagtaagtaagggtctaacaagggaagacgtgctgtaagtctaaataactggagtaaattttagaaaaaaaagtagaacaaacattttaaataataaaataaaagtttatttaaaggttaaaaaatgggatttcagattccaaaatttagataatgagctaggag

SEQ ID NO: 459641 - DNA, 513 bp, Homo sapiens
tgtctctctctttctttctttctctttccttccttccttcctccctccctcgctccctccttcctcccttccttctttcctttcttccttccttcctcctcctccttttctttctttctttccttcctttctcctcctccttttctttctctttccttccttccttcctcctcttctttctctttccttccttcctttctcctcctccttccttytctttccttccttccttcctccctccttccctcttttctttctttcttccttccttcttctcctcctccttttctttctttctttcctccttccttccttcctttcctttcctttctttccttccttccttccttcttgataggatctcacttgttacccaggatgaaacgcagtggcagtcactgtggccttaaactcctgcgcttagatgattctcccacctcagcctcccgaatagctggggctacaggtgcactaccatgctcagctaattttttgtagagacagggtttcatc

SEQ ID NO: 459642 - DNA, 513 bp, Homo sapiens
tgtctctctctttctttctttctctttccttccttccttcctccctccctcgctccctccttcctcccttccttctttcctttcttccttccttcctcctcctccttttctttctttctttccttcctttctcctcctccttttctttctctttccttccttccttcctcctcttctttctctttccttccttcctttctcctcctccttccttctctttccttccttccttcctccctccttccctcttttctttctttcttccttccttcttctcctcctccttttctttctttctttcctccttccttccttcctttcctttcctttctttccttccttccttccttcttgataggatctcacttgttacccaggatgaaackcagtggcagtcactgtggccttaaactcctgcgcttagatgattctcccacctcagcctcccgaatagctggggctacaggtgcactaccatgctcagctaattttttgtagagacagggtttcatc

SEQ ID NO: 459643 - DNA, 593 bp, Homo sapiens
caattggaattttctttatggtcattttaragactattataagctgttactatttaccagcttttcagaattaaagaacttgaagtttttccttttatctttgaaaggaggcaagcatctctattgtcacaatcagcctccacacagcatgatggggatggccatgtttttctccctaggagtattgcattgtcacttgagctgttcaagatttgggatgtgatatttttaatctgaacttccaagaacccataaatataattaaatgattctgatgaagccagtcccaaatatctgggccatgacatttacttcatcatttaattgggcagagaaacaaacattaatagaataaattggaaatcttaatcatacaaacatgcagatatggagaaaatcttcacattcccttgcacagctcatcctcgttgttgcctctgtcttctttccctctgttattattctaccgctaacctgaaaatatcttcttacgttctttccattattcaaatgcatccatcatgcaaaataataatttattcattcattttctgagctcagtaacctacaagggaatgcttaattgttggcta

SEQ ID NO: 459644 - DNA, 593 bp, Homo sapiens
caattggaattttctttatggtcattttagagactattataagctgttactatttaccagcttttcagaattaaagaacttgaagtttttccttttatctttgaaaggaggcaagcatctctattgtcacaatcagcctccacacagcatgatggggatggccatgtttttctccctaggagtattgcattgtcacttgagctgttcaagatttgggatgtgatatttttaatctgaacttccaagaacccataaatataattaaatgattctgatgaagccagtcccaaatatctgggccatgacatttacttcatcatttaattgggcagagaaacaaacattaatagaataaattggaaatcttaatcatacaaacatgcagatatggagaaaatcttcacattcccttgcacagctcatcctcgttgttgcctctgtcttctttccctctgttattattctaccgctaacctgaaaatatcttcttacrttctttccattattcaaatgcatccatcatgcaaaataataatttattcattcattttctgagctcagtaacctacaagggaatgcttaattgttggcta

SEQ ID NO: 459645 - DNA, 591 bp, Homo sapiens
gaattgtattgatgggttgaacataggggtaagggggaatttagaactagatgaaaccaatttgacttgatctctccattttacaagataattttgtttgcagtaaatactaacaaagtagctagagattttagagaaaccaagaagtggtctttaaagaggccacggaagaaaagttattgagtaaaagtcattccctagaaaataacacattaattaacatatccaggcatagacacttgacagtttgacaaaggtgggctcgraaagaggagaaggcaaatgaattaaatgacaaattctacacggttcctgcagtgatgcctttgcttaggcagtaatacagattagaattttaaaatgaagaaaacgaactggaccagcctccctaaaattatcaataataaatttatgcttcattcagactcaatatgactgaggttagacagttctccgttataaaagaaaatgtatctattaacttgttatcttcaagaactgggattttgcattttcaatggttttgagttaaaagtttttgtagattccttttaaacatttactgcttatttataagtatgtttatcattt

SEQ ID NO: 459646 - DNA, 568 bp, Homo sapiens
aggtcatgataaatgattacatttatagacattttcrtgccttaatattagcaagcgttgcagaatgagtttcaatatgaatgcattccagagatgtatagacattctagttatttataaattttaggaaagaagcctagtagcagatgctggctttggataatagggaagtctaattacttataaattcctcagataaggaattttgcctctggacggtctgcttgatggccaccaagtgatcttggctctcctctgtatgtaaagaaactagaaactatggttcatacgtaggaaaaaaacgtggccattagaaactgtctctaaggaagtccagacaatgatttcctaggtgaagtctttgaatcagctattgcaaatatgttcaaagaagtaaagtaaaccatgtcttaataactaaaggaaagcatgagagtgatatctcaccaaatagagaacaccagtacagagtcagaaactataaaaaagaactaaataaaaattttgaagttaaaaagtaaaataattcaaatgaaaatttcaccaggtagtctcaacagcctatttg

SEQ ID NO: 459647 - DNA, 613 bp, Homo sapiens
taaagacttgaaatcagtatgtggaagaggcatctgcattgctatgttcattgcagcattattcacaataacccagatgttgaatcaacctaagtgtctatccatagatgaatgaatgaaggaaatatgatctgtatacataatgaaatactattcagccataaaaaagagtgaratcctgtcagttgcatcatggaactgaaggacataatggaatactatttagcctgaaaacagaattcatactccaagccccacaatacgcaatatacctttgtaacaagcctgtacatgtacccctgattctaaaataaaacctgaataagaagaagaaaatcctgtcattttttgacaacatgactaaatggctgaacctggaggacattttgataagtgaaataagcgaatcacagaaagacaaaagccatgttttcacttatacgtggaatttgaaacaaactcataatagcagcaagtagaatggtggttgcagaggctgggagtggaaggcatggggaggtgatccaaggctagaaagttgtggttagacaggaggaatagatgatgggtatttaaggggatggatatgttaattagcttgattcaatcatcc

SEQ ID NO: 459648 - DNA, 577 bp, Homo sapiens
gagcaacgtggaagtcattcttgaccttagaaaaagcttatacagayatttttgggcagaaggcaattggcaatggattaaggtgagtatgggatatattacagagggcacttttactgtgggctactgttcccagtgatttaactaacagaagaggtttataatggtaggcagatgtcacaccaagtgtcaggttctagcccaagctgaggtctgagggaagtgggtgggtgagtggtgggtagctggaaaaacacttgagaaatcctaggcaaccatggcatggctttattctctttctgggtgcaagccgtatgtacagcatcagcagggtagttatgccttctacagacaacagtggctccaagccaagcatgagctcacgtgagtgttcacctaatgcacctcacatggcatggttacataatgttcagggttgtgcgcctgcgctccaaaccctctgagtcatgctgcatgggaaggccacctcggcctgctcttgactaaagcacagccatttcccttacagcagagtgcttcctgctacccaaacacagacccagaccaggtttggtga

SEQ ID NO: 459649 - DNA, 508 bp, Homo sapiens
ctggccaacatggtaaaagctgactctactgaaaatatgaaaattaccctggcatcttggcatatgcctacaatctccactagttgggaggctgaggcaggagaatcaccttgaacctgggaggcagaggttggagtgaatcgagatcgcaccactgcattctagcctgggcgacagagtgagactctgtctcaaaaaaaaaaaaaaaaaaaaaagagtgcctgaaaagatccacctatatctttagatgttcaagactataatctacctcaggaagaatatatagtacaacctacacagaaattaactttattgaaagaacatttaaaaaaacaatcatgcttcaggagttgaaatatcattacatttatcttaaatatttatttacttcaaaacaagtttaaaggcaaccaccagaatctgctcagttctggtcttttacatgtttactatccaacacctgaggcacatgaaggytcaaccctcctcctactcctgttcccaaggc

SEQ ID NO: 459650 - DNA, 562 bp, Homo sapiens
ctcctcagggcattcttgtttgcttgctgttgtttttacccaaaccaatgttccagattttagatcctgactaactcctcctcctttaggaggttagcttttttggtttaggaatacatcattgggacatctttcccaaacttcagctctatacttctagaattctattatacatgttcctctgtgtgtcctgacaaatcagatcttttccaccagtctcctcttcctcgttttcttatatctattaatggcaacaaaaatctaccctgtcaaaaatctatcctgtggctcagacatagaaatttgatagccatgtttagtaaatgtccaattcctatcatttctaccaccacaagttctccacatcacytgaatccaattcctatatataactctctcgtcatatgacatcttatctcactggacttctgttaccaaggaatcgatccctggatgtcaactttcattttcatcccatagacaattaccctagaggaaagttcttaatatcttgtcaactccaactctgttacttctcctgaacgtggctggttataactca

SEQ ID NO: 459651 - DNA, 559 bp, Homo sapiens
atacctgggcccttcccactatatactaaaggtgccctaaggtaggtgggagccaactctgaggtggagatcaatatgcaggactttattaaaaagtgttcttggtttcaacacagtggaagggaaggaagtaagattgggcagagagggaaattagtctccatgaagtcctcagattatcccatgggacattctgaagtgaggagccttccagcatggacagagtattgggccaggatacccccagatcagttattggatgtgggctgctctgggaatagggtgggttcttggacaaggtggctgttgtgagcagagagartcctgaagagagctgacagctgagagctatcagacggcagcacagccagcagctggagtgacaatcctccacgcctgaagggggagctgggtacagataacaaagtccactatacattcctaagaagtatgacaataaaagtaaaagccaatgttttaatctatataaaatgtaactgtattttccaccgaaagtgtaggacactcttaagatttttttaaatttttgtaaagatga

SEQ ID NO: 459652 - DNA, 565 bp, Homo sapiens
ccttatttgcaaatgatattagtattaacatagaaaatccaaaataatccataaggattataattaataagtacatttaataagtaaattaataagtaatatttctatttacaaatttattatataaaaatcaattatggggggagggataaaagactataatttgggttcagtgtatactgctcaggtgataggtacaccaaaatctcacaaatcaccactaaagaatttactcatgtaaccaaacaccacctgttccccccaaaacctatggaaataaaaaaataaaaataaatacaaattaaaaaataattttaaaartcaatttcatttctatgtaacacaaaatagaaacgtaaaatttaaaaacacatcacttataatagcgtcaaacaattaccaatagttggaataaatctaacaaaagtcatgtaagatcactacaaaaataactataagacgttgataaagaaatttaaaacctcagaatcaaagagtgtactatgtacgtgaattggaaaactcaatcatgttaccatattgattctctgcaaatttatctata

SEQ ID NO: 459653 - DNA, 583 bp, Homo sapiens
actaacacaaacttatttcctttagtccctttccttaatgaaaaggaaaagaaatacacaacaccaacagtccaagcctggttatcagctgcattgtagaagaaatggtcagatgaataggtcttttgcttgttagggagttttattgagcacttcggaaaaaaactcagttctctgtgtattgaaatggaaaaayagtgtccaacgtcaaggtctctcttgaaagaaaatgtttcaaatattctgaaaaaatgtttctgaggggtcagtttctgaagctagctgatttagtttcttttgacctaaaaacaggcaaatactatggggagtaaggtattgcacacactgcttttaaaaacatagttttgttgtggcctaactcatgttggccaaataattcctatttataaacagtccaccaagtcccatctataaacaatctaccaaagttgtgactagatagaaagactaagcattatcatttttatggtcctccttgcaatattccctcttttccccattacaaccaattattcttctttttagaaaaattttctgtaattaacattttcaaggaaagtct

SEQ ID NO: 459654 - DNA, 586 bp, Homo sapiens
agtggttcacacctgtaatcccagaactttgggaggccgaggcaggcagatcacctgaggcaaagagttcaagaccagcctggctaacatggtgaaaccccatctctactaaaaatacaaaaattaaccgggtgtaatggcgcatgcctatagtcccagctagagttcaagaatcacttgaatccaggaggcagagattgcagtkatccaagattgccccactgcactctagcctgggcgacagagggagactctgtctcaaacaaacaaacaaacaaacaacaacaacagaaagacttccaagagattgtaaacaaacatgtaaagtagaaaattagaccaatgagaattcttgaagtatattttgaagagttaaaaaagcccaaaaaacaaaaaggagaaaataaatgatttaaatgtctatttttaaatgtaagacaaaggcaataaagctgttcctgtaaccaaatttctgtttagtagctctgtattgttaccacaacataccaatgagaactctggttccacggaggaaaaccttttctatgaccctctagaatagcaaactcaatgccaatgggggaat

SEQ ID NO: 459655 - DNA, 586 bp, Homo sapiens
agtggttcacacctgtaatcccagaactttgggaggccgaggcaggcagatcacctgaggcaaagagttcaagaccagcctggctaacatggtgaaaccccatctctactaaaaatacaaaaattaaccgggtgtaatggcgcatgcctatagtcccagctagagttcaagaatcacttgaatccaggaggcagagattgcagttatccaagattgccccactgcactctagcctgggcgacagagggagactctgtctcaaacaaacaaacaaacaaacaacaacaacagaaagacttccaagagattgtaaacaaacatgtaaagtagaaaattagaccaatgagaatycttgaagtatattttgaagagttaaaaaagcccaaaaaacaaaaaggagaaaataaatgatttaaatgtctatttttaaatgtaagacaaaggcaataaagctgttcctgtaaccaaatttctgtttagtagctctgtattgttaccacaacataccaatgagaactctggttccacggaggaaaaccttttctatgaccctctagaatagcaaactcaatgccaatgggggaat

SEQ ID NO: 459656 - DNA, 555 bp, Homo sapiens
agttggatgagcaaatgcttaatgtccaaaacaagaacagcagctactttgttgagtgaatccccaactatgtgaaaacagctgtctgtgacatcccactcttggggctataaatgtctgccaccttcaacakcaacagcgtggccatccaggagctgttcaagcacatctctgagtggtcatgtttcagtgcaaagcctttctgcactggcacatgggcaagagcatggactagatggagttcaccaaggctgagagcaacatgaacaacctggtgtcccggtaccagtaataccaggacacctcagccaaggaggagagaaaggttgagaaggaggccaagaagaaggtggcctagagccttcagacatggacactgggtaaagtggggaagcagtgggaattctatttactcacaatcttttctctgataaccaggtctcactgtgtgtacacttggagctcttcccgacttcatagcacacactgtaccgacaccatcattaacagcattttcatagtgaaaagaaagtgcatcccccaagaaccatctca

SEQ ID NO: 459657 - DNA, 555 bp, Homo sapiens
agttggatgagcaaatgcttaatgtccaaaacaagaacagcagctactttgttgagtgaatccccaactatgtgaaaacagctgtctgtgacatcccactcttggggctataaatgtctgccaccttcaacagcaacagcgtggccatccaggagctgttcaagcacatctctgagtggtcatgtttcrgtgcaaagcctttctgcactggcacatgggcaagagcatggactagatggagttcaccaaggctgagagcaacatgaacaacctggtgtcccggtaccagtaataccaggacacctcagccaaggaggagagaaaggttgagaaggaggccaagaagaaggtggcctagagccttcagacatggacactgggtaaagtggggaagcagtgggaattctatttactcacaatcttttctctgataaccaggtctcactgtgtgtacacttggagctcttcccgacttcatagcacacactgtaccgacaccatcattaacagcattttcatagtgaaaagaaagtgcatcccccaagaaccatctca

SEQ ID NO: 459658 - DNA, 610 bp, Homo sapiens
gttaggctttcaagctggtcaacatttatggagacaagaaaaaaaggggttacaacgactggccacaaacaccacactttgattggaaaggaagaataatgtccaagaatgtggtgaaattagcacacctagagtactgggaatatccagcttcaacctggaggatcacaagaaagattttcctgggcgacaagatgtcaagggaagcacctcatctgactacagaaaacaaygacatctggagaagttatttcctgcataatcgggaaaaagaaatgaatcaatcacttttaaaacaggttcttccttttctactgtcatctatgcatcattaatgattcactcaaactactgagtttaagttgagtaacatttagatgaacttatatggactatggcatattcagtcacaattattcacttatttttcttagcttgtgttaatcttcccaaatctcacttaggtatgatcagatatgtttaatcatttatgaataaattgtgtagtttttaattttaaaatattttgtcagttatacatgcacgtattcagtcaaacagttctacaaaatcatatatatttaatgagtcaaatcgttgtacatgactt

SEQ ID NO: 459659 - DNA, 474 bp, Homo sapiens
ggaatagaatttttcaaattaaggaaaagaactctaacaatatctgaaaaccgctataaaaattctatgcaaagctataagtattgactcacactgatgctaggcgcgaatgttctttggaattttaactacactaatattattactaggattgttagttttggttagtgctccagtgacaaatttccacaggtttttttttttaagtggtttgtctttaaccttatttttctataagccctgctatttttagctcttggttttgtacaacctgaggaatacatatacagtgtcacaacaaaaacataaacacctaagtctgtatacataagtatgaaaaatttcaaaagttaaatgattgctcttacatatgaatgtcttatcaccaaagtagcttgctgaatgtcttatcaccaaatcatcgaagtataatgcaragaaccaagctgaaatccaaggtacagctgccacaca

SEQ ID NO: 459660 - DNA, 619 bp, Homo sapiens
ttgaaacccaagatagccactggaacaagatacacagacattgtactccgcacaatttttgcgtgccatccattatcaagttttccctttttaagcccttggcttgcccctcaaaattgaagtggttgctttggatgggaatctggccatgtctccattactacttttgtttaataaaatgactttctaccagaccttactcttgttaattggattttgcgagtgggaagcaaccagacttgcatttggttacattggtccctgcagtccctgaagcctagctattgaatatctctctttccttcataggtaatgaaatctttattggaatctactagataccacaatcaccttttataaaattttcatttttatataaacaacattagattaggtcacaataacttgctgaaaagatttctaaccaatacagggattcaatatatactgctttatttctgaagctgataaattgagaaatatgtgtctaagcatattatctgaaattatattagcaactgctggcaaaattaaatatagatgatctcttttgggaaaataggcatgtagacaaataaagcayaggttatacaacaaatggtagaaacagaaaataata

SEQ ID NO: 459661 - DNA, 580 bp, Homo sapiens
agcttcttaaggtcttggctagatcatgagaataaaattactatgcatcttatgtatgtgtgtgtttatatataaattaagatttagtattatatattgtatattaagaaaaatattggagatatctatatctatttctaaagtctcccagagagattggataacttgcataaggtcttatactgtatttatgtggtggagctgggattcaagcaagggcagtgcagctccagaacacctgtcttagccattacactatgctccctctatgtacaataatatgatcatactatttgcttgtgaaggaatgttcactctccactgtctgtgaaagggatctaggwggggaacaaggcatcatctatttcattcaaaatgctattaagtcataaaagaacaagttattgtgaatgaaagaataaaccctcttatttactactagaaatcagtaactgctctttcaagacctggtataatgcatatgttgtttaaggtttcacaattaagaggcatccagagcagctaatataatagctgtatctcttcatttagtcaatgactgttgaagtgtaggaagtat

SEQ ID NO: 459662 - DNA, 542 bp, Homo sapiens
aaacaggtgtagctttagggccaaggaatgggttgaagaagcctaaggtgaggaaccaggtggcaaagttggagaccagctggaacaactgaagaacaaagagagggagggagacatgtggcctccagggtcagggcaggcctccatcctgcccccgtgctccattctaggacaaatctcaaagttaccaagcttcggtcccagggcctctttgaaactggttttaacrctaagtaggatatagggtccctggcaggctcttcccaggcaaaccatgactatacacaattcaaggccattgtaaagtaatggtgagtatatattttcacaggccacagagtaaaatgaacacaaaaatttgtttttaaaaatgtttacctctgccaggtgcagtggctcacacctgtaatcttggcggcatgggaggctgaagcaggaggatcacttgagctcaggagttggaggctgccttgagctacagttgtgccactgccatccagcctgggtacagagacagactccaagtctaggggaaaaaaagt

SEQ ID NO: 459663 - DNA, 602 bp, Homo sapiens
tttatttcttcctcctgtttaactgtgactttctatcctttgactgacattgccccattccaccacccttatcctctggtaatcacccttctactctctgcttctatgaattcaattgttttagattccacatataagtgagaacatgtggtttttgtctttctcagactcacttactttacccagtttaatgttctccaggtccatccatgctcctgcagatgaaaaaattttcttcctttttgtggctgaataatattccattgcatatataatatggtttggctgtgttcctacccaaatctcatcttgaattgtagctcccacaattcccatgtcatgggagggaccaagtgggaggtaactgaatcaggsggcgggtcttaccccatactgttctcttggtagtgaataagtctcacaagatctgatggttttataagtggtttccctttctgcttggctttcactctcgctttgcctgctgccatgtaaggcgtaactttgcttctcctttgccttccgtcatgactatggaattccccagccatatggaactgtgagtcaattaaaactctttcctttataaatcacccagtctc

SEQ ID NO: 459664 - DNA, 549 bp, Homo sapiens
gcaaaagctttttattttaattaagtctcatctatttatctgtgtttttattgcatttgcttttgggttcttgatcataaagtctttgcctaagccaatgtctagaagggtttttccaatgttatgttagaatctttatggtttcaggttttacatttaagtctttgatccatcttgagttgattttttaataaagtgagaggtgaggatctagtttcattcttctacatgtggcttgccaattatctcagcaccatttgttgaatagggtgtcctttctccacttgatgcttttrtttgctatgtcaacagtcagttggctgtaagtatttgggtttatttccaggttctttattctgttccattggtctatgtgcctatttttataccactaccatgctgttttggtgacaatgaccttatagtatagtttgaagtcaggtaatgtgatgcctccagatttgttctttttgtttagtcttgctttgggtatccaggctcttttttagttccatatgaattttagaatttttttttctagttctgtga

SEQ ID NO: 459665 - DNA, 425 bp, Homo sapiens
ccaaactgttttgtaaaagaatgatttggggttttgtttcattttgtttttgtttttttgggttttgttttcttttttgatatttagagaaaagaagagggggggaaagagcaatacaaaagagagaaagaaggtatgaacctgggtaccactcagagagcaacaggcagaaagcaaatctgaaagctgggacaattaaagaacttttaagaactggagtgactaaygttgaagttgaagctgtgttgtaatgttgaccactcctctatcctcctctaccaaattatgatcacatctataatatttctaaaggccccgggaatagtttggagggaggagccatagatagcatcattatataagtttcacgtgtgactctatgtgttgcccaaatacagggagagcttctgggatggttaggtgat

SEQ ID NO: 459666 - DNA, 580 bp, Homo sapiens
ccgtcttcatcctacttgactactcttcagtgaatctcatactttgtcaagcttgcccctcgctcagcatctagaacttcattcacttgtatctcttcacacttccaagattattggttttttgtctttttggggagcccttcttgagtttaagctaactaaagtagaaacaatatcttctcaatcacaatataacctaccacttacaatacattttcgaacaaaataggtgtgtttatttaaatgaatggatttttaaaaatgaattaatatcagaaataaaaggaaatggtttctcatctagctcattgttgaggtatagaaatgagattgatggaaattcagtgactagtccatggtcacagagtcaattaccaacagaaatggaacaggagctgaggtctccttcatgcaaattctacattctcttcttataccaccacaaaataaatgcaaatattttttccctagtaaacctccacasagttaaagtcatgcctattttatctgaaatcccataggagactagaaattgaaaaaatccaaagctgccatgtcatctaaatcattctttattcat

SEQ ID NO: 459667 - DNA, 570 bp, Homo sapiens
tccatgcttagtaataccacttctgggaatttactctaaagaaacaaatcatgagaagtaaaaagtcattctgacaaagaaatttataatatttacaatgataaactgaaacaatctaaatatcatagtatatatcaaccagatggaatgttatgtggcttttataaaattcaaggctttgcagtaacaaaaaactgagtgaaataatattatggaaaatatataatgtaaaattatattacatataattagaacaatttcatttcacagaaaaaatattaatgctagtataagcaccttaataaggttgtacycaaatagtttgccctttttttcatgttaatttctgttgataaaatattgatgcctaatactttcatctattatgagtcaggaatttttctaaggcctttccataatttttacatctcatttaatcttcataataattccctaatgaaagtgacaaaatatgtccattttacagatgaattcaaagaagatcaggcacaaagaactaacttgttcaactagctaatttagaatttaatccaggtagtctatcaccag

SEQ ID NO: 459668 - DNA, 462 bp, Homo sapiens
tcaactagaaaccctcctaactactttaatcactaagttagctagacctcttctcatcatactattaagtttaatttttaagccttatatattaaattaatttcttaattttataaaacaatgcatagcttctgtcaaacttatgtatcttaagactcmatataacccccttgttataactaaggaatcaacgttttgattccccaaaaacacaagtgaggaatgtaatgcccaacctggtttttactaactctgtttttagactctcccttttcctttaatcacctagccttgtctccacctgaattgactctcccttagctaaaagagccagacagactccatcttggctctttcactggcagccccttcctcaaggacttaacttgtgcaagctgactcccagcacatccaagaatgcaattaactgataagatactgtggcaagctatatccacagtt

SEQ ID NO: 459669 - DNA, 470 bp, Homo sapiens
ggttattggggatgggaagcagagacagtttccttataatcatcatctgagcttagatactattatattcaccattttacaacatgttactgsacttggtgcccctggcagacctcaagatgttgagaaacatattttatgtttcttatacattgatgctggggaacatattttatggatccttatatctccagaacttgcatagcattagaattggatagattcttcataaaggttgatctatgggactccctcccccaaagtgtctcactcctgtatcctagagatgttgctctcttctcttagccttcccgtgctttaccctatgccccatggcactttctctggctcttcactctccttaatactttctcttccgccaaaggtcttgccccaagctggtagatcccctactggaagcttacagcctggtgggctacagatcatgtgggctatacagagtaataact

SEQ ID NO: 459670 - DNA, 609 bp, Homo sapiens
cttcataaaggttgatctatgggactccctcccccaaagtgtctcactcctgtatcctagagatgttgctctcttctcttagccttcccgtgctttaccctatgccccatggcactttctctggctcttcactctccttaatactttctcttccgccaaaggtcttgccccaagctggtagatcccctactggaagcttacagcctggtgggctacagatcatgtgggctatacagagtaataactgtcagagagatgtgtttgtatgacataagctttagttttgagtgtgctttgcaatgtgctttgcacagccattttatctgccttcaagacccgttcttccttcaggtgtcgcactagatatccccctcccctcactgttgcctgtgcctcctcaacacccagcccgtgtttctgtcatgacaccgactgctctctgctggatttaatgttctccttgtctgagccaatcccygtgagctccttgaggacgaggactctgttctctgtgttccacaactctgtaactccagtacaagcatggtgcgtaaccatgttccaaaaatactcccttgttaaatcaatggaagcaaggttctcatgtta

SEQ ID NO: 459671 - DNA, 587 bp, Homo sapiens
aggtcccattatctgctgaacatctccatctaggtgtcccaggtatacctcaaactcaacgtgttcaaaaggtcgtcatcttctttattacactgggtctctgttcatgttctctatcacagcagatggcaccatctagatactttagttataagttactcttgacttctctctctcctttgctctccacagccaactaatcatcaagttctgctggctatacctctcaaatagttctgacttttgtctctccctctttatgtttattactgataatgggtcgagtgatagttcttaaaagataaatccacaccaaatccctggaacttgtgttccttatawggaacaagcgtctttacagatgccattgttaaggatcttgagatgagattatactggattttctgtgtagaccctaaatccaatgacaagagaaaggcagagggagaactgtggcatagagaaggggggaagatacagacacacgaaggagaaaacaatgtggaggtgcagacagaggcagtgattgcagtgatgtgggcacaaactaaggaagccaaggaatgatgacagcctccagaaggcaa

SEQ ID NO: 459672 - DNA, 577 bp, Homo sapiens
aatgagtaggaattatccagtggcaaggaggtatgcatgggggatggtgtgaatggaggagatggcacaaagtgacaggagttcagaagaggtaacaaatcaagcaaaagcataggaagcacaggagtgtgaagaagaaagttgcagggagaagatggagaggtagacaggggccagacctcagagtatcttgcatgccctggaagggtgcttcaaccctagcattctggatgttcatcttataatacataagattcattcattaaactcatcagcactgttcaaaaccctggggatcagatgtaaacaagacaaagctgctgccctcttggaacccagtgtatcacaggagacagataacatgagtaatcacaatggtaatcacattgtaatcacaatgagaggaggcattcrgggtagctcacaatccaggctgaaggtccaaaaagatttccttgaagacacaatatctgctcgggaggctgaggcgcacacacacacacacacaaaacaatgtaatctctgaactgagtctaaatagatgggtgggattacccaggatctttttttttttttt

SEQ ID NO: 459673 - DNA, 594 bp, Homo sapiens
tttaagtcttctctttttatacctctgccttctagggtatgttcaaggtggggtgccatgtggggtctacctttaataaccagacaagtttgttaatatgtttttcccaagggagaaagagcctactatgtggaagaagtggggtttttttttttkttgttgttgttggtttgatttcacagcaattggtctactctatgaagatatttaccttggttgcctcacagtcggtgctccacgcagtaggcagagggactattctcaatgcaagtgaggttgtgtctcctccttttcttaaaacttttaatagctcagagtaaaattccaagtttcttatgtggccttcagggccctaactgctgctgctttctttccccatctgacctgtgacctgccataacccttccctcactatatttcagccacagtggcttcttgggacccaccaagctccttaccacctcagggcctttgcatttccctcaggtagcctgtaacttctctcacttcctacaggtctctgctcaaatgtcttggaatcagggagaccttctgtgaccactctgtaaaattgtacctctccactgttctttg

SEQ ID NO: 459674 - DNA, 594 bp, Homo sapiens
tttaagtcttctctttttatacctctgccttctagggtatgttcaaggtggggtgccatgtggggtctacctttaataaccagacaagtttgttaatatgtttttcccaagggagaaagagcctactatgtggaagaagtggggtttttttttttgttgttgttgttggtttgatttcacagcaattggtctactctatgaagatatttaccttggttgcctcacagtcggtgctccacgcagtaggcagagggactattctcaatgcaagtgaggttgtgtctcctccttttcttaaaacttttaatagctcagagtaaaattccaagtttcttatgtggccttcagggccctaactgctgctgctttstttccccatctgacctgtgacctgccataacccttccctcactatatttcagccacagtggcttcttgggacccaccaagctccttaccacctcagggcctttgcatttccctcaggtagcctgtaacttctctcacttcctacaggtctctgctcaaatgtcttggaatcagggagaccttctgtgaccactctgtaaaattgtacctctccactgttctttg

SEQ ID NO: 459675 - DNA, 594 bp, Homo sapiens
aatttttatattttcaggtcttgggtttaaatccttaatccatctcgagttgatttttgtataaggttagagaggaggattctttttttttttttttcttgcatgtggcttgctaattatccgagcaccatttgttgaaaagggtgtccttttcccactttatgtttttgtttgctttgttgaagatcagttggctgtaagtatttgggattatttatgggttctctattctgttccattggtcaatgtacctatttttataccagtaccatgctgttttggtgactatggcttatagtatagtttgaaatcaggtagtgtgatgcctgcagattcattctttttgcttagtcttgcttgggctatgcaggctcttttttggttccatattaattttaraattttttttatacttctgtgaagaatgatggtggtattttgatagggattgcattgaatttgtaaattgcaaatttttattcttcttgagagataatcaacttttaatatgatgtctttcaatgaaactttgaacaataatgttaaagatttgttttttaaaaattaatacagaatgaattttcttattataaa

SEQ ID NO: 459676 - DNA, 586 bp, Homo sapiens
cccccgtgtctcctgactgggagacaccttctagcagaggctgacagacacatcatacaggtgagctccagctggcatctggtgggtgcccctctgggatgaagcttctagaggaaaaaacaggcagcaatmtttgctattctgcagcctctgctgctgataccaaggcaaatagggtctggagtggacctccagcaaactccagcagacctgcagcagatgggcctgactgttagaagaactaacaaacagaaaggaatagcatcaacatcaataaaaaaaagtccactcagaaaccccatccgaaggtcaccaacatcaaacaccaaaggtagataaatccatgaagacgggttcagcgcaaaaaggctgaaaattccaaaaatgaaatgcctcttctcctccaaaggatcacaactcctgtccagcaaggaaacaaaactggatggagaatgagtttgatggattgacagaaataggcttcagaaggtgggtaataacaaactcctctgagctaaagaagcatgttctaacccaaagcaaggaagctaagaacgtggaaaaatgtttagaaaaattgctaact

SEQ ID NO: 459677 - DNA, 508 bp, Homo sapiens
attttttgtcaggattcagtaagatataatgcacttagtaaagtggctggtacatgctaagttttcaataatatatgttgaaatagtattattattctttctatagtgcaatctctcaccactgtccatccccagcccaactatayttcagctaaaccaaacttcttgtaatagttctccatattgtgacccattctgcctctgtgccttctacctgaaataccctttttttcttctcctgtatagaatctgctcattctctaggacccaggaactcattgtcacttccttctggaagactcctttgatgtttggtttgtcagcctcatttagtggctgctaccttggactgtcagtcagtgtttgatgacattacaataaattatatttttctgttaccttcttaattccccccactatataaatgtattagtcaggattctccatagaaacagaaccaataggatatagatgtataaagggagatttattgtggggattggctcat

SEQ ID NO: 459678 - DNA, 563 bp, Homo sapiens
cctgctcttgaccactctccttcctctaagaaaggaaagaaagacgaagaaagtatatttaatttcagaaatgaacaaggataatattgaagaaatgctcttctgatggccttgatgttctgagtcaagaaggaaacaccatctgctaagctgaaggtcaaggatgaggctagggattcataaaaaaaagagtggtttacaaaagccttttaagactggaaaagggacgctgctacrgatgaataaaagaattgctaagcatcatcggtggcctgagtgagtttggaacatttgcactagtaatgacaccatcagcatggttatgcaactttcttgagcacttctcagaaacccagaagcagaaatcaagaaaacagatcgttgatctacagctgggggcctggaaacggggtgatgtggacagtgactgtcttaagggaattgaggatgttggttgagaatagttgaagtaattgatcattgggtccaggccaaattggaaaggaagcaaagctaatgaatatctgtggggtcaaatcataagaatgaaagatacttccttt

SEQ ID NO: 459679 - DNA, 563 bp, Homo sapiens
cctgctcttgaccactctccttcctctaagaaaggaaagaaagacgaagaaagtatatttaatttcagaaatgaacaaggataatattgaagaaatgctcttctgatggccttgatgttctgagtcaagaaggaaacaccatctgctaagctgaaggtcaaggatgaggctagggattcataaaaaaaagagtggtttacaaaagccttttaagactggaaaagggacgctgctacagatgaataaaagaattgctaagcatcatcggtggcctgagtgagtttggaacatttgcactagtaatgacaccatcagcatggttatgcaactttcttgagcacttctcagaaacccagaagcagaaatcaagaaaacagatcgttgatctacagctgggggcctggaaacrgggtgatgtggacagtgactgtcttaagggaattgaggatgttggttgagaatagttgaagtaattgatcattgggtccaggccaaattggaaaggaagcaaagctaatgaatatctgtggggtcaaatcataagaatgaaagatacttccttt

SEQ ID NO: 459680 - DNA, 563 bp, Homo sapiens
cctgctcttgaccactctccttcctctaagaaaggaaagaaagacgaagaaagtatatttaatttcagaaatgaacaaggataatattgaagaaatgctcttctgatggccttgatgttctgagtcaagaaggaaacaccatctgctaagctgaaggtcaaggatgaggctagggattcataaaaaaaagagtggtttacaaaagccttttaagactggaaaagggacgctgctacagatgaataaaagaattgctaagcatcatcggtggcctgagtgagtttggaacatttgcactagtaatgacaccatcagcatggttatgcaactttcttgagcacttctcagaaacccagaagcagaaatcaagaaaacagatcgttgatctacagctgggggcctggaaacggggtgatgtggacagtgactgtcttaagggaattraggatgttggttgagaatagttgaagtaattgatcattgggtccaggccaaattggaaaggaagcaaagctaatgaatatctgtggggtcaaatcataagaatgaaagatacttccttt

SEQ ID NO: 459681 - DNA, 601 bp, Homo sapiens
tagaaattaattacaaaaaattacttttctctctattccattccacaaccttcttagccaaaaaggcaggggatgggtgwggcttttctttactttctctatgtcatagcctcctactacctgatgctaatctgagagttaagccttactatgcacaggggtgtcttctctacataggaggagaacttctatggtaagagttttctgggctcagctagcaatgtgggaaatagtaaataaggtaatttagcaaactctctttctctctctctctctctctctctctccaacacctaagaggtcaagagacaagagctcatcttctctctccccaggacaatgaacctcatgctgcccccttagaggcctgctgtttgcacacacacacacacacaaaaaaaaaaaaaagacttaagaggaaaattaaaatgcatctattaaacatttgcaaaaattttaagccaaactcaacaacagaaaacaaacaatccaactaaaaagtgggcaaagggcttgaatggacatctctccaaaatagaaatacaaatgtccagtaactacatgaaaagatgcatcagtaatcattacagaaacgaaaatc

SEQ ID NO: 459682 - DNA, 601 bp, Homo sapiens
tagaaattaattacaaaaaattacttttctctctattccattccacaaccttcttagccaaaaaggcaggggatgggtgaggcttttctttactttctctatgtcatagcctcctactacctgatgctaatctgagagttaagccttactatgcacaggggtgtcttctctacataggaggagaacttctatggtaagagttttctgggctcagctagcaatgtgggaaatagtaaataaggtaatttagcaaactctctttctctctctctctctctctctctctccaacacctaagaggtcaagagacaagagctcatcttctctctccccaggacaatgaacctcatgctgcccccttagaggcctgctgtttgcacacacacacacacacamaaaaaaaaaaaagacttaagaggaaaattaaaatgcatctattaaacatttgcaaaaattttaagccaaactcaacaacagaaaacaaacaatccaactaaaaagtgggcaaagggcttgaatggacatctctccaaaatagaaatacaaatgtccagtaactacatgaaaagatgcatcagtaatcattacagaaacgaaaatc

SEQ ID NO: 459683 - DNA, 551 bp, Homo sapiens
agtaaacactagctatctagagaattcagttatgtggaaaattccatttcccaggagccaytgcaaatgatgatgatttaggcatctccatgaattagaggttactccgtgcaccagctccccaccctgatcttgttattatctacaggtttattctcctgagtgggagtattttctcattcctccacagctccagggaggctgaggctttctcctcaggcagaagcttcagcctcctgggaaggagatgaaacagggcagtggaggagtgagatgactattgcctcctttgggcccacaggtgaacttctttctgaccaggtgagaatctgcaaagaaggtaaggggctggagtcagtagccacaaatcaccaggcgttcttgtcctgtgagaggtggccatgtaaaggaggtgaccagctagggaaagctgaatcaattctagacctgcctgtgaccaagaccctgcttaccccaccaaggaaactgcctgagagacaaaagaataaagtaaagcatgtgccagcccccatcaaccagaggcaagaatg

SEQ ID NO: 459684 - DNA, 627 bp, Homo sapiens
tgtcaagaagccctggttcaataccaactaagcaatagaggggagtcagacgaatggaaatcaaaacatcagcctttttttaaaattaaagttggatggatgacatgtctcaggtgtgcagcccaaacacggtacctgcaacgaaacagggttttccacacaggcacargcagaattggaaaactgccagcctctcccataaaaggaggccttccctataaaagcttcacttggcagggagtccatgagagcacagctgtctgcaagcagacagatcccaaagtggaagaatggagagagcagagccctgactcatcaacgaaacaagttacttcttttcccctggagagaattgtgtggtggaagtgggttcagaagcattacagaagtggctattcttccacacagaaacagggtgccagacaaaaggaggtcacttacccagtatcattccataaacaatgttgcagtgaatatcctataatgtatacatgtgtgcatttgtcctataattttttagaataaatttctagaagattccagaggcaaagctaacagcatttctaaaccttttcacatatactatcaacttgcagagaaagactacagatttacactcccaaaagc

SEQ ID NO: 459685 - DNA, 597 bp, Homo sapiens
aacctcttttttacattttttattggcagttttatttcttcttgttggaaacatctgtttatgaattttaccccctctttctattggattgttcatctttcttatagcttttttgatgtcatttatatattttgggtagaatccgcatttgcttactttctcttggctagaaaaaataaatggtgagctacagtgaagaagattcccttgtcaagggatctaccgtattttcctggctgctacttcccttttccatctacttattgcttcattgaggwgattagtgaattttcccaggactttgtcaccttaccttttgccccacgtactgcttgagaatgggtttggtggattggcgaggttaggaggagagtgtagtgggaggaaacagcttgatttctggaatctttctatttctctttgactagtcattgttttaaatgttgacttgaagttgtgtcccttgttttgagtgtgcctggtttttaacatgtatttggtattcattttgttaggtttgactgggcaatggcctgtattctggctttattcttccatttgaccctggaagtctctgggactacttttgaggctgcc

SEQ ID NO: 459686 - DNA, 597 bp, Homo sapiens
aacctcttttttacattttttattggcagttttatttcttcttgttggaaacatctgtttatgaattttaccccctctttctattggattgttcatctttcttatagcttttttgatgtcatttatatattttgggtagaatccgcatttgcttactttctcttggctagaaaaaataaatggtgagctacagtgaagaagattcccttgtcaagggatctaccgtattttcctggctgctacttcccttttccatctacttattgcttcattgaggtgattagtgaattttcccaggactttgtcaccttaccttttgccccacgtaytgcttgagaatgggtttggtggattggcgaggttaggaggagagtgtagtgggaggaaacagcttgatttctggaatctttctatttctctttgactagtcattgttttaaatgttgacttgaagttgtgtcccttgttttgagtgtgcctggtttttaacatgtatttggtattcattttgttaggtttgactgggcaatggcctgtattctggctttattcttccatttgaccctggaagtctctgggactacttttgaggctgcc

SEQ ID NO: 459687 - DNA, 327 bp, Homo sapiens
gcctactatgtgccagactggtctaggtgctgggatataagagatatatagtctctgcccttactgagcttatattctagttcagcggttctcaaagtgtaatcgggggaccctgagggtctctgagaccctgttaggtgtctgccaagtcaaaatgatttgttatgatgttatttgtcattttctcattaaaaaaagtatgtacagtgaagttttccagaggctacctgacatgtgatatcacaaacagaytgaatatagaagcagacataggaaaccagttgtcttctatgaagccagacattaaggagcatcacaaaaatgcaa

SEQ ID NO: 459688 - DNA, 534 bp, Homo sapiens
taggtggaaatagccacatgctgttgctcatctctgttggctttggcatcccagggtggatactttactttgcccattcctcttaaagaacagatttattcaataatttccctttactttcttgggtgtgtcacctctttcttgctggaatcctgtctccatcctgtcctctcttgtccaagcaaaagagccacttgctattcctcgaacatagcactttctcttctctgtgacttttcatttcccagctttcttcatctagtcccaaggaaactcaggtttggagratcctactcagtaatcaggtccagtaatcagatgcttcaattctctctgcatctcccactaaatgattgtctagtctttgtttaaatatttgtaaggcaggaattcattgcctcttaaggcatcagtatttattcattcagttcgttcagtgaatattgttgttgcctcctaccatgtgccaagtgctatgcatggtgtctctcctcaagaagctcaaaacagtgaggagatgaatgtatgaataag

SEQ ID NO: 459689 - DNA, 528 bp, Homo sapiens
ctgtttaaactttaactggtataagtattaatataataatataatggaaacaaaatatctttcatgcttatttagtagcaagttaacttttagggaaattagctaaagagccttcatctcaattattattcatctaattaaaaattctaaaacgattactataattctgcttaaaaccaagcatgaaactttggtagtaaaaaacacaattgttgaatgtcttaagaagaaaatgacaaagtgaagattattccataattaaagctaacctttaattactggkcttttaaaatcaagttattctgaagaggtaaaataaatcatcaaaagggtcttggcagtgcatcactgcatgtaatactcttctacatgttattggtggtggctcaatttttttttctctttattaactcaagagacataatagaagcagggaatgcttaggcagaataccaaatacacagataaataggtaccatgcatctaaaggagttttcccataatttataaacaataagaagacaatat

SEQ ID NO: 459690 - DNA, 581 bp, Homo sapiens
ttatttatgccttcttcaatgtctttcatcaatgctgtatagttttcaatgtacaggtctttcacctccttggttaaatttattcctaaatattttactttttatttgtagccattgtgaatgggattgttttcatggtttctttatctgataatttgtgttagtgtatagaaatgctattgatttacatatgtttattttgtatcctgcaaatttactgaatttgtttattagttctaacagctttttggtgaagttctttagggttttctgtatatgagattacattgtctgtaaacagagtcaatttaactgtttcatttctgacttgaatgccttatatttcttcttcttgtctaattgatctggctaggatttccagtactatgtcaaatagttgtgatgagtgtgggtatccttgtcttatttctgatcttatcttacacaaaagctttcaacttttcactattgaatrtggtgctagttatgggctttcataaggcatttttttgttgttgttgaaataaattccttctatacctaatttcttgaaagtttttttatcgtgaaagatgtctaat

SEQ ID NO: 459691 - DNA, 262 bp, Homo sapiens
tttcttcagatctattagtatttcctttacatatttaggtgctccaatgttgagtgcctttatmattgttataactttttgatgaattgatccctttatcattatataatgaccttttttgtctcatattacagattttgacttaatgtctattttatctgatatataaatctagcaactcttggggggctaagagagattgcagctcctttcttgaaatggctcaacaaaggctgtttcttgcagcaggggattatgcagc

SEQ ID NO: 459692 - DNA, 592 bp, Homo sapiens
cttttatgaatataatatgcartcagttggcttattatctctcttctttaagcctcttgtcttacataaccttatcttcatatcctgccagaatattactgtcttgtttttcataagagagaacctccctctctgtgcagtctctatgtagttccaactctacctgacactcttcagtactccctgaagtatcctgcagttagaatgtttgttcattatagtcatcattgaaaatacgtgaccatgaacaagtagtgctgtaaagcggtctacgtaacattctatcactcttcattgtgtttattttttaataaaaagcacaatattcaaaatttcaaagaaaagatataggctaaatatatgtcccccaaacaaggcatttccaagtgtgaacagcaattcataataaaaaaagaaacctgcacgttgtgctcatgtaccctaaaacttaaagtataataataataaaattaaaaataaaaaaatttaaaaaatttttaaaaatctaaaaaaaagaaaataaacctcatatttgtactgtagatataccctcttattttattgtcagaacaaccatgcaaggttgctatta

SEQ ID NO: 459693 - DNA, 567 bp, Homo sapiens
taatatgcaatcagttggcttattatctctcttctttaagcctcttgtcttacataaccttatcttcatatcctgccagaatattactgtcttgtttttcataagagagaacctccctctctgtgcagtctctatgtagttccaactctacctgacactcttcagtactccctgaagtatcctgcagttagaatgtttgttcattatagtcatcattgaaaatacgtgaccatgaacaagtagtgctgtaaagcggtctacgtaacattctatcactcttcattgtgtttattttttaataaaaagcacaatattcaaaatttcaaagaaaagatataggctaaatatatgtcccccaaacaaggcatttccaagtgtgaacagcaattcataataaaaaaagaaacctgcacgttgtgctcatgtaccctaaaacttaaagtataataataataaaattaaaaataaaaaaatttaaaaaatttttaraaatctaaaaaaaagaaaataaacctcatatttgtactgtagatataccctcttattttattgtcagaacaaccatgc

SEQ ID NO: 459694 - DNA, 647 bp, Homo sapiens
gatgagccacacagttgtctggggaagaggattctaggtagtgggaacagcaggggcaaaggccctgagcaggcacttgctagagtgtttgagtaacagcagagaggcagaatcaaagtgagtaagtagagagtataagatgaggtcacaaataccatcagggtctacgtgacataaagtccaaagacascattttacaaattttggcctctactctgaataagatgggaatattggagggacttcagtagtaaataatacaatttgacatttttaagcttcactctggttgttgctgtacaaataaccgactgcagtggggaaaataatagaatcagggagaaatttaggaggctaatgcagtcatccagaagaaagaaggtggtgtcaaatcaggacagaagcagagaagatgttgaaaagtggtcagatcttaaatacaatttaaagataatgcatataggatttgctgttggatcaaatgtgggatgtgagagaaaagacgtgaagcataactccattaagatctaggtatagcagattgcatggaaaaatcaggagtttacattctgaaaagttaaatttgagacacttagtagatgtttcagtacagatgttgcaatggtagttggacttcagtggagaga

SEQ ID NO: 459695 - DNA, 584 bp, Homo sapiens
gaaaaactttgtgacattggtctgggcagtgatgtgtatgaccacaaaatcacaggcaacatgagcaaaaatatgcaaatgggattacatcaaactaaacagcttctgcacggcaaagaaaacaatagagtgaatacacaacccatagattagggaaaacatttgcaaatcwtgcatcagctaaggggctaatatccaaaacatacaaggaattcaaactacttaataagaaaacaaatagctctatttcaaaatgggcaaaagacttaaaaataagacatccaaatttccaaaagatatctgaaaaaaatgttcaacatctctaatcagagaaatgcaaatcaaaaccacaataagcaatcaccacacacctattacattggccattatcaaaaagatgacagataacaagtgttggcaaagatatggagaaaagagaaccctgatatactgttggtgatactgtaaattagtacagccatttaaacaaaacagtatgaacgtttctcaaaaaattaaaaatagctccagcatgactgtggacgaaggcctcacttcaaatgagggggctatgaggtgtcagt

SEQ ID NO: 459696 - DNA, 566 bp, Homo sapiens
aaattagtacagccatttaaacaaaacagtatgaacgtttctcaaaaaattaaaaatagctccagcatgactgtggacgaaggcctcacttcaaatgagggggctatgaggtgtcagttgccagcactcagctactggtgaataaatgcttctgtcctgaaggrcaggatgtggtagctcatcacaggagccactgcaatgcacttgaggggaggcttcacatactctcctcctacctatacacacacacacacaaacccctagctttgcttttgcaattttaatgtccttgaggattaggagttggaaaaattacattctactactgactcaaagacaaagctgtttaattggaaacaagtctgataacatctctaggtctgttttctttttacatgtaaaattaggagactggagattttagatgaggtaattattattattcctgctctcagactttgggatggtttgaaatcatatgaactaagtttataaattataagacttgtgagttttataaagtcttataagaaaacttgaaagtgttctacctaacatctcctaac

SEQ ID NO: 459697 - DNA, 593 bp, Homo sapiens
aggccccacctccaacactgggaattacatttcaacatgagacttgggtggggataaatatccaaactacaacacaaaccaactacagaagaattttttaaaaaaataactggggagatttcaatataaatagatggtaggtaatattagtaacttgtttctttggtttgtcatgtgcaataatggcattgtggctaattttttctaaacatctttatatgttacagacatattaagcatttatgtgaaatgtctgagatttgtgaaatatactataggaaaaaaagtgaaagtatagctgtccttgaatcagaaaggggataataattattgaagctgggtgatgaatatctgggagtttatattattctctttacctttgcatatatttcaaattttccataacaaaacattttttaactattttaagcatacacaggagaaacgcattaaatgtaacttttcttcccctttcataaatttatatatattttggaaacagtaaatagcctttcatttctattaaagagaaaaatttcccccccmaaaaaataaatttttgttcaacatgtattactgtcacccactgagta

SEQ ID NO: 459698 - DNA, 521 bp, Homo sapiens
tacatataacactgtcttgcatacagtaagtgctcaatagaagtttcttgatttaagaagtgagttttaaaaatctacccctataatggaggcctggcaggtgtctgctgagacttaattaaactgatgagctaagatttgaaagatggaaagtggtaggtagctagacagtagggtttagcaaggcttggcaatcttacagaggtgtcgtgccaaatcctcattcatccactgcctcccaaggtcggatacatggcaactactttgggagaggggagcatggcagattctcacaaataattcacctacctgccctaacagagcccactgtgatatgaaaaggttctgatgagtttctcaggacagaaatgccaaggacaygaaggacaaaagttcgcaggccttcaattcacagaatgaccagggaagaggaaaaatttggacatttcttcctaaacacctgagttccttttaccatccaagcacgcgaaagccacagtcttaattatcagttaagaaac

SEQ ID NO: 459699 - DNA, 519 bp, Homo sapiens
ggaatttttaaaatagatatgtgaataaatcattgagtatgattcatatactcttttaaaaaggttctttgagtcactgtccagacacattctttacaagtagtcaagtggactaagtaaaatcccatactgagaaatagtgcattagctccatttatgcttataaaaktatgtttgaaaccattttcaaaccatttgtataccattttcagcagctcccagaaaagccaatagataatcaggtagcatataatagatgaccactattcaacatgaaacctgaaggagtcgagtaagcagtcatgatgacaaaagtgtgacgtcaatttgtagtcaagacagatattgaagaccccagaaatgaagagagataataaagagatagctaattgctgctcaaggttactaggttagaagttgctccacatgaaataaaatgttgatagaattagttaaattcctatatgtatttctcaaaaattcaaagaacaagataaactaaaatcctttgcttattca

SEQ ID NO: 459700 - DNA, 498 bp, Homo sapiens
gggtaagaagagaagcagtgtaattctgtgctgttagctgttccaagcgatgaaactataattcacaaagtgatagataacagaaggtaattttatggttactaagaatgaggttgcatttgtttgtgtagttactatacaaatttatagatgcattttgtttrtatcgcatttaaaattttagtggctgagcaggaagacgattgaagtagtaagaggagtatgttcatgaactccttctttagcagccacttgtaaaggtggactgtaattcaacatgaaataggttcagaatgttcccacaaactcattataaatcaagctgcttcgaaggtatggtgttattaagtttgttttttgattttctcttgcccttcctccatcatcttatctacagaaagagtttaaaggcaggaaaagtaattcagcaaggacctacttttagtagctgaaataaacaaagtgttgttagtacatttcactaagccataaatgtag

SEQ ID NO: 459701 - DNA, 578 bp, Homo sapiens
ttcaattattcatacatttccaaatcagttacttcccctgatcacgcaagttgttttttggaaacaaactgacattaaaaactgacctacttttggaggacaataataagaatccctaatacaatctaagaaataagagaataattcctcaatggtcactgacatagacaagcaaattttcagtcttgaatgaaaaggaatggtcattttctaatctaaaactctgtcttaagttcagccaatggctaaacatagccaccacacagaacagaggagggaaaaatgtctaaagttgyccaaaaaagcaaatgtctgaagttgccccgctgtcccatcttatttgcaccatcagaagagagaatgggaagggtctgtggacaaatattcccaaaaggaggatttcaccctcaactccctcctggatttaatcaactgcatatgttgtttattgctgcagccccatgaacattaccacttaataaaattgtttcactctttggttgtcataaatgccacatctatttaaagccatgttttatttagttaaagtttgctttatcatccgcagaaaggattat

SEQ ID NO: 459702 - DNA, 585 bp, Homo sapiens
tgctttatcatccgcagaaaggattattaaattgaacaggtgacgattttagctaaagttaaaatcaataatatttagctgggccttaggtgctaaattctaaaattccatgtttttcactttgccacagctctatatctaagcatcgctgacggttcttgctccgtgttcacctgtgatttatggctgttctagtaggtgggacaaaagcttcaaggcctcttgcagtgtttaagcttctaataatcagaggagttttmttttcttactctttgaactgagactgctgttctcagttttagaaactcattaaaaaatggaattttaaaaagttcagggcttaatctgttttctaaaatatttaatatctgacttttagaaagaatgtaattctataaaacatgccctcaaatttcatctaaaacaaaatcaatttaagtctttggataaggatttttagctcttccttatttcttcattaccctaagataatgtgatgagaaatgaagtctttgaatgccctagagtggttccaaacagtaaaatttttctaacagcaaacttcttgttcatggaactataact

SEQ ID NO: 459703 - DNA, 585 bp, Homo sapiens
tgctttatcatccgcagaaaggattattaaattgaacaggtgacgattttagctaaagttaaaatcaataatatttagctgggccttaggtgctaaattctaaaattccatgtttttcactttgccacagctctatatctaagcatcgctgacggttcttgctccgtgttcacctgtgatttatggctgttctagtaggtgggacaaaagcttcaaggcctcttgcagtgtttaagcttctaataatcagaggagttttattttcttactctttgaactgagactgctgttctcagttttagaaactcattaaaaaatggaattttaaaaagttcagggcttaatctgttttctaaaatakttaatatctgacttttagaaagaatgtaattctataaaacatgccctcaaatttcatctaaaacaaaatcaatttaagtctttggataaggatttttagctcttccttatttcttcattaccctaagataatgtgatgagaaatgaagtctttgaatgccctagagtggttccaaacagtaaaatttttctaacagcaaacttcttgttcatggaactataact

SEQ ID NO: 459704 - DNA, 332 bp, Homo sapiens
aaataaaccaggtgttataatgaaacatactggttaggacaggtttctctgagaagatattcaagctaagatgcaggagragcagctagctgattatctgaaaactagaagcaagctgtttcatgctgaggaaacagcaagtgcttggaaggttctagatgtttagaagccagtgtaactgaggttttaatgaccaagacatagtccacaaaatgaaatggaaggatcagccagaatagatcaagcattataggcctgaaaagagtctggattttgttctatagtcattgagaattttaagcagcctttgataagacatggtgagattaaat

SEQ ID NO: 459705 - DNA, 552 bp, Homo sapiens
actgcctagggactgccaaaaactccggggtattccacatctactttcattattctttcattcaaaagtaatttatcaaagagttactgtctgccaagcactgccctagacacttgagatatatcagtaaacaaaaccacaaaggatccctgctctcagagagcttggattctatcaagaggagatcaataaatattagcctgataaataagtcatatagtagattagaagatgataaatgccatagaaaaagacaaagtagaacaagataagggagatckagacatgagacaggaagcaggttacaattttaaacagcatgatcagtgcacaccttcttgagcaggtgacttgtaagcagaggcttgaaggaggtgagggatttgctgggcatctgggaaaagagcattccaggcagggccctagggaagacaggcccggtgttttgtaagaagagaaggggccagagtgacaggagcggcaaggtagaaaccaattttgtactctccagtacccatgaaggagaagtcctggaattttagcaaaggagca

SEQ ID NO: 459706 - DNA, 552 bp, Homo sapiens
actgcctagggactgccaaaaactccggggtattccacatctactttcattattctttcattcaaaagtaatttatcaaagagttactgtctgccaagcactgccctagacacttgagatatatcagtaaacaaaaccacaaaggatccctgctctcagagagcttggattctatcaagaggagatcaataaatattagcctgataaataagtcatatagtagattagaagatgataaatgccatagaaaaagacaaagtagaacaagataagggagatctagacatgagacaggaagcaggttacaattttaaacagcatgatcagtgcacaccttcttgagcaggtgacttgtaagcagaggcttgaaggaggtgagggatttgctgggcatctgggaaaagagcattccaggcagggccctagggaagacaggcccggtgttttgtaagaagagaaggggccagagtgacaggagcggcaaggtagaaaccaattttgtactctccagkacccatgaaggagaagtcctggaattttagcaaaggagca

SEQ ID NO: 459707 - DNA, 533 bp, Homo sapiens
tagtagattagaagatgataaatgccatagaaaaagacaaagtagaacaagataagggagatctagacatgagacaggaagcaggttacaattttaaacagcatgatcagtgcacaccttcttgagcaggtgacttgtaagcagaggcttgaaggaggtgagggatttgctgggcatctgggaaaagagcattccaggcagggccctagggaagacaggcccggtgttttgtaagaagagaaggggccagagtgacaggagcggcaaggtagaaaccaattttgtactctccagtacccatgaaggagaagtcctggaattttagcaaaggagcagcttcgagcagcaatataggaaggaagggagggagggagggagacttaacgttgaatttgcatctttgtggcaagcytactgtttaacctagaatttttgtcagaaataagaatatcaaagaattctaaagatcactgtagtcacacttcatgtttagagttgtcttttttcttattataatcattctttaaagatgg

SEQ ID NO: 459708 - DNA, 533 bp, Homo sapiens
tagtagattagaagatgataaatgccatagaaaaagacaaagtagaacaagataagggagatctagacatgagacaggaagcaggttacaattttaaacagcatgatcagtgcacaccttcttgagcaggtgacttgtaagcagaggcttgaaggaggtgagggatttgctgggcatctgggaaaagagcattccaggcagggccctagggaagacaggcccggtgttttgtaagaagagaaggggccagagtgacaggagcggcaaggtagaaaccaattttgtactctccagtacccatgaaggagaagtcctggaattttagcaaaggagcagcttcgagcagcaatataggaaggaagggagggagggagggagacttaacgttgaatttgcatctttgtggcaagcctactgtttaacytagaatttttgtcagaaataagaatatcaaagaattctaaagatcactgtagtcacacttcatgtttagagttgtcttttttcttattataatcattctttaaagatgg

SEQ ID NO: 459709 - DNA, 652 bp, Homo sapiens
ctttctgggcaattaaatcaatcattcattcattcattcattcatatattccacaaatatttttgaacggctactatatgccaggcactgtgtttggctctggggaaggattatttgctgttatggtatttataatcgagcagaagatatggctatcaaataagygattacatgagtaactatttaattatgattgtgagagatgtaaaagaaaaagtagaggctgctctgagagtgtgttaaggacacctagagaggatggggtagttgaggagttttctagacagaacaacctttgcaaaaaccctgtggcagagaagagccactcctgggccagacaccctttaaaggcaagaactgagaatgcccctaattcctacttgcatctccagcacttacaaaaaatttggaacagaatcaacactcaacacatttttcttaagcaaatactttcagtaattagtgaaggggaaaaataaagccagtaagaaatctattggaacaattgtgaaattagcaaagagtacatacagtaaaatttatataacatgacttgctaatgagaatctgttaattcttttgttaggggaaaaatattatttaaagacaagtgttaactttatgagtaacccatgtgctgtacagaactaaa

SEQ ID NO: 459710 - DNA, 652 bp, Homo sapiens
ctttctgggcaattaaatcaatcattcattcattcattcattcatatattccacaaatatttttgaacggctactatatgccaggcactgtgtttggctctggggaaggattatttgctgttatggtatttataatcgagcagaagatatggctatcaaataagtgattacatgagtaactatttaattatgattgtgagagatgtaaaagaaaaagtagaggctgctctgagagtgtgttaaggacacctagagaggatggggtagttgaggagttttctagacagaacaacctttgcaaaaaccctgtggcagagaagagccactcctgggccagacaccctttaaaggcaagaactgagaatgcccctaattcctacttgcatctccagcacttacaaaaaatttggaacagaatcaacactcaacacatttttcttaagcaaatactttcagtaattagtgaaggggaaaaataaagccagtaagaaatctattggaacaattgtgaaattagcaaagagtacatacagtaraatttatataacatgacttgctaatgagaatctgttaattcttttgttaggggaaaaatattatttaaagacaagtgttaactttatgagtaacccatgtgctgtacagaactaaa

SEQ ID NO: 459711 - DNA, 552 bp, Homo sapiens
aatatctgcaataatgtgtatgactagtacacaaatatttatgtttctttttgacagtccaagatgcattcatgcagcccccttttctggactctggggaatagaaagtaaacatgtctacttgaatggattgggtttaccctacagttaacaaaaggcaacaaaactcagacacaaaattcataggcaacatctgtaaaagcaaaacaaaaacagtgcagctcttaattacccatacatgtaagtctgcctttccwgtgcagattcttaagacaattttgcaaggagtttaagaggacatgtcagaatcatcctttctgactgtattctggctctggcattccctcactagaggatcacaggcaagttatttaacttttctcaacttcttcatttgtataatgaggttgttttgaaaattcaataagaagatattgatacagaacctagaacagtacctagtaaacactaagtaaatattagttatttttcataccacttattgtgctccaagtaatctttcctggtatatggcctttctatttcttctaa

SEQ ID NO: 459712 - DNA, 384 bp, Homo sapiens
ccacattttctccaaaaaaaaaaaaaaaattctgggcacaggaaatatactagagaaaatatatgaataaaggktaaaaaaatcaaaaatttctcatttggctaattttttctaatgactttccgtaagaccacagaataacatacaaataaaacagtaagatggcttcagaaaaattccaagtatagtacaggatctgcaaacacaaatttttaaaaatgcagtctctttatgacagttaaaattttaacaaagccacacactaaaaattctacaaatagttatctataattttcactaaatggcttattttaaacaaatagttgctattctaaggtgaattaattaggaactatatttgttgtctttggatgtacaactgca

SEQ ID NO: 459713 - DNA, 384 bp, Homo sapiens
ccacattttctccaaaaaaaaaaaaaaaattctgggcacaggaaatatactagagaaaatatatgaataaagggtaaaaaaatcaaaaatttctcatttggctaattttttctaatgactttccgtaagaccacagaataacatacaaataaaacagtaagatggcttcaraaaaattccaagtatagtacaggatctgcaaacacaaatttttaaaaatgcagtctctttatgacagttaaaattttaacaaagccacacactaaaaattctacaaatagttatctataattttcactaaatggcttattttaaacaaatagttgctattctaaggtgaattaattaggaactatatttgttgtctttggatgtacaactgca

SEQ ID NO: 459714 - DNA, 633 bp, Homo sapiens
ttgtagttctttatactgaagattctacctctactttctctacttctctcccatgccttaccactctatcaaagtaatgaagcacaatcagtgtctagctggagtaaaccacctcaattttacccattgcaaactgacattttgttctcaaacagtaaaacaaactaggatatcttaatacgcccttgcaaaacttgctgaaacttggcatttgtgctttcagcacaaatatgacaatcaagaacccattctcctggcctccacttagagatgcccatcacccagcacccatttcacgtcaggtcctgccaattgygccctatggctgacacattagcccacacacacacaaccatggcacagtctctatgaaatcagaagacttcttttttatttttttctggcttcctcatcctccaagcaagaattcaaatgtcaatcacctttagttagattgcataaagtagcatcataaaaatggtaaccaatccaattgcaaatcacttgatgaatcttctttgaagagttgccaataatgctaatcgtcaaatggttgaatcccgctttgtaaagatgcgtttgtgaagaacagcaatctctgtgactttgacaaaggaactgctgacttgcatc

SEQ ID NO: 459715 - DNA, 609 bp, Homo sapiens
agaggcatttaaattggttgctctaattactgaaaactgtatcgaagacagcagtaaaaagattttaattttggaaatatcaaaattacattttaagtgatcagatgatctgattaaaacactttacaggaccagatgcggtggctcaygcctataatcccagcactttgggaggctgaggcaagcagatcacaaggtcgggagtttgacaccagcctggccaacatagtgaaattctgtctctactaaaaatacaaaaaattagccgggcgtggtggcgggcgcctgtaatcttagctacttgggaggctgagacaggagaattgcttggacctgggaggcagaggttgcagtgagccaagactgtgccactgcattacagcctgggtgacagagcgagactccatctcaaaaaataaaaaacaaaaaaacaacaacaacagcaaaaatgctttacagaatacattaactttaataaaagtacggtaaaagatagagttaaggaacatttattagtatgtgataaactaagacctcatcaccatttcctgctctcagctcatgtttcaagagccaagagagacaaggtgagagaaagtgaggggaaaa

SEQ ID NO: 459716 - DNA, 559 bp, Homo sapiens
attaataataattagattgggtgtcaggggtgggtgaaatccctgaaaatgtgaatcttcagtgctttatcgtgtgtgagtgcttggtagccaatggatgttacagtcaggatcaagctatctaataaaactcatttaaacctaactgaattgccagggcactagtaaggtttggctgaatttgctgtgtcttcagaaaataaagatttttcttctgtgcacacatctaatttggaattttcttgggtatgatttatgaactttgagacagaaaaataaaaattgagtcaaaggcattttaaaaggtccaagcctaactctacccatgagagagccacatgcagttgtgccatttattctgccacygagagatggccatgcatccacagcatcgccacagagctgctattgacacttcgttcatgggtgctctccagagataaacctgttagtgcccaacacactcagccaaagtacaagctaggctcaaccagcccacctacttttttagggaaagctctccatttagattcctatcctaataaaactgtccagactt

SEQ ID NO: 459717 - DNA, 506 bp, Homo sapiens
agcccctgctagtttctaagcctactagattgcaggacaaaaagcagaaagacagcaaggattggagcaactgaacagatcaccggtccaaatatgagaaatgaaatgaacctctctctcttgctgcctttggaggtaaatgtttgaagccctcttcactgcagcagctgcttgctgtgagatgtatgaacacaagtgtctgcaacctttgcctttagaatggttgaccaaaacttggctttggacattttgggctgaagaataggggccaagaatgctggacagtggtaactgcctgtaatcccagcactttgggagtcagaggcaagaggattgcttgagaccaggagttcgagaccagcctaaacaacatagcaagactctgtctctacaaaagagaaattagaataattaaaaaaatgaaagaacaggggccagggaatygtgctaaattgttaatggtgattgttagaaaaggcagccatagaaatgaaggggtagattga

SEQ ID NO: 459718 - DNA, 533 bp, Homo sapiens
ttccatactcttgggagacagaagaaggcacctttaatgtaaactttattactgctattgaagcaggatatttccctcctttgtgggactcatgacaggggtgcctggtttactcagcccaccactctcaactcctcataggagggagtgcaggagtaaacaaggcaagaactggagtgcacaagcactggaatcggccagccacttcratgctggtgagatcaaagttcactagctcagaccctctgcattccacccctcacaggagggagcacacaggtgagtgggtgcagaaatcagggcaagtgcttttaggcactggcaggagcaaactttgtgagggccatgtagcagtgtctaggtgggggtgctgtggccctgaaagcccctaagggcatgttatagtgctcttttagttctgccatccatggatggcttaagtgttaatagctcagtgggccctctgccttttagcatagggcagctgccctccaccggcaagggcaaagatccagtgtgacagcattttgtat

SEQ ID NO: 459719 - DNA, 533 bp, Homo sapiens
ttccatactcttgggagacagaagaaggcacctttaatgtaaactttattactgctattgaagcaggatatttccctcctttgtgggactcatgacaggggtgcctggtttactcagcccaccactctcaactcctcataggagggagtgcaggagtaaacaaggcaagaactggagtgcacaagcactggaatcggccagccacttcaatgctggtgagatcaaagttcactagctcagaccctctgcattccacccctcacaggagggagcacacaggtgagtgggtgcagaaatcagggcaagtgcttttaggcactggcaggagcaaactttgtgagggccatgtagcagtgtctaggtgggggtgctgtggccctsaaagcccctaagggcatgttatagtgctcttttagttctgccatccatggatggcttaagtgttaatagctcagtgggccctctgccttttagcatagggcagctgccctccaccggcaagggcaaagatccagtgtgacagcattttgtat

SEQ ID NO: 459720 - DNA, 590 bp, Homo sapiens
ctttctctaaaggcctcaaatgccccacattctcaattcacacatcttgccttctggaccacttttgacattaagaattggtaatattttcatgtgttcttgttttaaaatcgtggtgtcccttctaggcaggtgggcacaaatccatatctcttagagtaatagctattgcctcactttctctaaatgcccaagacaggaatttacatctttcttctcaggatgtacagaatagatttcatytcccactccaaatgaagttttatctttctgtccacagtgacactcagaggaaagctaagatcactttgcttttcatgtttttcatgcatttatgcttttctcaaagataaatcttatcaataccttttaaaatacaactcacataatgaaacaattcttttggcataacttcacgttacaagttctacaatctttcaatcagacaccaaattctaggaaattgcagtttaggtgagggctagggataaagaaagcaaagaagaacaaagacctttataccaataaggcaaaggactttggtctgcagccaagtaggatcttgctgaggattcatcccttcagttgca

SEQ ID NO: 459721 - DNA, 536 bp, Homo sapiens
cagctttctgtcacagttatataggtctataatttttgttttctatttgaatataactatcaaagcaagacttcaaaaaatattctgtatctaatatccagtagaaggtataatacaaacaaatgctcagtaagtcttcaccaaaagaatcactgcaggcgattgctggtcatggtatatcatgtccatggagactgagctaagagtcaagagaacaaacagtgacaaaacacactagcaggtatatttggcatctgttcactrtctagaagtagataaagtggttgtaatggaaagtgaactccacatatattacatgcatatatgcaacacttacttttcccatattacagctctttcaacatatgaagcatattagagaaagattcagtagataagatgtttccatgacacacgctgataaatagaaatgactccaagtaataaagtgaaatctgaaaagtagcggtaacttggaaacaatcaagaaaatgaaaggaatgttgtgatctcattgagatatgaataaatacgtg

SEQ ID NO: 459722 - DNA, 534 bp, Homo sapiens
  misc_feature (1)...(534): n = A,T,C or G
nnnnnnnnnnnnnnnnnnnnnnnnnnnnnnnnnnnnnntcggtcctcccaccctccattgtttcaaaggccccagtgcgggttgttttctatatgtgttcacttgttctcattatttaactcccacttataagtgagaacatgcagtatttgkttttctgtccctgcattagtttgctaagaataatggcctacagctccatccatgtccctacaaaggacatgatctcattcttttattatgggtacatagtactccatggcatatatgtaccacgtttccttcatgcagtctatctttgatggtgatttatgtggatcccatgtctttgctactgtagataatgctgcaataacacatgtgtgcatatgtcactataatagaatgatttttattcctttgggcatatacccagtaatgggattgctgggttgaatgtggttctgtctttagatctttgaagaaacaccacactgtcttccaaagtagctgaactaatttacattcccaccaacaatacataagaattccttt

SEQ ID NO: 459723 - DNA, 621 bp, Homo sapiens
gttaactgcagaatgagcaattactggtcatcttaaagggcatttctttctgcacaggtgtttcccctcctccctgattatatatagcctgcatattttggatggtctctggggtgtgaaatatttcttacttcattttttcagaggcttytcctcttgctcatgtcaagctatctccctgttctaacattctaacaaaagactggcctatctcagggtcagatcctgaagtgaggaccttgagagactgcattagtccattttcacagtgctgtgaagaactacctgagactgagtaatttatgaagaaaggaggtttaattgcctcgcagttctgcaggctgtacagaaagaatggctgaaaggccccaggaaagatacaatcatggtgaaaggcaaaagggaggtaagcacatctcaccaagttggagcaggagagagagaaaaagcaaaggggaagtgctacacacttttacacaacaagatctcatgagaactcactcattatcatgagaacagcaaggggaaaatcccccccatgagtcaatcactgcccaccaggttcctcccccaccattgtgaattacaattttacatgagatttgagtagcaacatagagc

SEQ ID NO: 459724 - DNA, 638 bp, Homo sapiens
gtttttcataggagaaaaagttgcaaactactcatctggccagcaactaatatatagaatatataaggaattcacacaacttaacaatagaaagaataatccaattaaaayataagataagaacacgcatagtcatttctttaaaaaaaaacatgcaaatggcccacaggtatatacaaaaatgctcaacatcacttatcattagtaaaatgcaaatcaaaaccccaatgagatatcaccttaccatagttagaatggctgttattaaaaaaacaaaaaaaatagcagatggtggcaatgaagtggtgaaaaggtaactcttatacacccttagtgggaatgtatgttaatacaagcactgtgggaaacagtatgaaaatttctatgaaaagcaaataaaagaactaccatacaatctagcaatcccactcccaattatctattcacaaaacaagctttcttatacaggtatctcaaagaggtacgtgtacttgtccctcccctgacatgtggggatgacagttcaagatgagatttgggtggggaaacagagccaagccatatcagtgagtgagtcaaatttatagctgtatagaagcaataaaataagtcctagtgtttaatagaataatagagtg

SEQ ID NO: 459725 - DNA, 675 bp, Homo sapiens
gtgtgtctgactgtccctaaactgtttgcatacgtggtgtgttttgtgctgaacatgcttttcttctttcttcgatgtgctaggcagagggcgcctatgtgagtgggctcaaataaaaaccttggaccctaagatcgcatttagctaacctactagccaacactttgcagacgttgtcacatatttttttcagagaattaagtactctgtgtgaagcaactgggagaggacatgtaaaaccctgtgtttggttttctccagacattactctacctacctttccttttgcgaattttgctttgcatttatttaccgtaataaactgtatgagcataatggcttctgagccctgcgagtccttataacaaattgtaataatttctataragagtagcctagaataataaagcagagagtcttgtgaggtcaaatttgatttggaggttaagttaagctttttgaataccttcgcacattaaatttcttagtgtatgaaaaattacaattctctggattccattttctaaatggtaggaaaaaagcatggcattctcctgttaatgcagatattggagaataataatatttctcattggttctatttttcctgttgagctaggcctactttttctacactatattgctcacgtccctgcttatttctgtaaaacctcc

SEQ ID NO: 459726 - DNA, 675 bp, Homo sapiens
gtgtgtctgactgtccctaaactgtttgcatacgtggtgtgttttgtgctgaacatgcttttcttctttcttcgatgtgctaggcagagggcgcctatgtgagtgggctcaaataaaaaccttggaccctaagatcgcatttagctaacctactagccaacactttgcagacgttgtcacatatttttttcagagaattaagtactctgtgtgaagcaactgggagaggacatgtaaaaccctgtgtttggttttctccagacattactctacctacctttccttttgcgaattttgctttgcatttatttaccgtaataaactgtatgagcataatggcttctgagccctgcgagtccttataacaaattgtaataatttctatagagagtagyctagaataataaagcagagagtcttgtgaggtcaaatttgatttggaggttaagttaagctttttgaataccttcgcacattaaatttcttagtgtatgaaaaattacaattctctggattccattttctaaatggtaggaaaaaagcatggcattctcctgttaatgcagatattggagaataataatatttctcattggttctatttttcctgttgagctaggcctactttttctacactatattgctcacgtccctgcttatttctgtaaaacctcc

SEQ ID NO: 459727 - DNA, 598 bp, Homo sapiens
aatattgttagactttgattatttttttatttgcttaattttattttttcttctgttttaatcactatccacttacaagatttccctcagcatctgctcacatgcgatcagtctccaggcccttcatgtagtaggatttttttttttgtctgyattttatagttttatgtttgttttatctgcgtagttcagttgaagaggagactacccagacactcataactactatgtctcaactttatttctaaggatatatattttttttttactgaggataaagttgatatttgaagtgtttcatttgttttattttgccttacacattaaatatattgttccattttcttctggatttatatatttctcaagaaaagttatcatttacttaatgcgttgttctgttccactgtgcataatacgtatttttatgttgaatatttcaagattttctctaagctttggttttaagatttttttattatagtgtgcatagatgtgattttcttcacattttaaaaatcatgatatttaaacaatttgttgtgtaaactaatccttactcttgaagcctcaattgtagatctaaataattgaagaa

SEQ ID NO: 459728 - DNA, 591 bp, Homo sapiens
ggcacttcatttgttcacaaaatgcataagcatttttttctatgaatcaattttttgaattctgaggttttaaaggaaagaaattctttagacaccaaagagatcataaatactcgggtagtgatgtagaaagaacacttcattgaagtcagaagaaccgggttgatgaaccttaggtgaaaatgaaagaattgaactacagtatctttaagggccctttcaaattttgttccacaaaatcaaatgtcttccacagaaaattgagaaatttttcaccactggttttccatagctttagtaacttagttacagagcaatcatttcctcttcttaattttttatatttagaggcaatgctctttatctggctctgtctttttctaccagtcatttacagtaaacttctattctttaaaaagaaattaacactgacaaaattcaactgaaatgatgtacaattctcctgatcaggrattgagggggaaatgtataggctatgggagcacatgtatgaaaagtctagattctagaataagtatggagatactagatattaaaggtgatcttttaaagatcaccactagaggaatg

SEQ ID NO: 459729 - DNA, 613 bp, Homo sapiens
cagctgtccatggcccaacaatgaaaatgtactttgaaatgacgattatgattaatcaaccctttccgtttgagattctcaaaaaaaaaaaatacaaaaaataaagtaaaataagtacaggaacaaatcaatcatggcaatctctctgctgcatgaaatccctgcatgaaatcctctgaaaacatctgtttttcagagctctgtgccttacagagacctttcccatctaagcaagtttagactctcgacgaggaggtggaagaggtctaagrcagatgtttgaaacactcatcccccctgtcagtcatttccaggtgactcacagctgcatcattctccctgtcagttagaagtaacttgttcccagagatgtgtcatagcccgacaatagaaaatacttgagaaaataaatattattaaagctagtgatactttttcacctggcatcctaagggagtcaaggtcttctgcaaataaatgttaacataaaaagaaagctgtcccttcaaatgctcaagctaattttaatcattttgcataaaaatctttattaaaatgtatcacatatttctgtgacttctattacagagaatactgggggaaagcataatct

SEQ ID NO: 459730 - DNA, 613 bp, Homo sapiens
ttaagccactgcacctggctcaacagcctggtatttaagtgggcccccttataaaattgtctagttcctttggttccctaatactttgcttatggtatatatatatatatatgtgtatatatatatatatgtgtgtgtgtgtgtgtgtgtatatatatatatattttttttttttttactgagaagcccaaagtaataaatgatggttcactcctgccagtctgcaaggtcaagaggactgcccagctgtggatttaatacatgttggtttttttaatgttggtaaaatatactataacctaatatttatcattttaatgatttgtaagtgtgcaattcactggcattaaatacagtcataatgttgcataatcatccccaacaaaaactctgtgcttgttaaatattaactgcctctttccccttccccarcccctggtaacctctgtcctactttctgtctctgtgaatgaatgtacattgctctttttttcattttactttttttattgtggtaaaaaacagataacataaagtttaccatcttaaccattttcaagtgtacagttcagtagtgttaattatattcacattgttatgtgacagatctcaa

SEQ ID NO: 459731 - DNA, 615 bp, Homo sapiens
tacgttgatacagagtaatcagcaaccacttggacaaaaagcagccatttcaaaataggaacatgcaacagaaaggccttgggtttcctcactcaagggcagtcttgaaatttacaaatacacataaagttgtacacagtcaagcctaagggaaccatggagggaaatctaggaattgtggatatgctatacttcagcacaaactggaacatgcaaatatagattatagccaggcaaagagatwttttatgctgtcagtcactaccctggagatagtgtacatgctgtcctttttggaaaattattacataaaatatgacattaaaaaaatttcattacaagaacagaaaaacaaaacaagaataatcttcaccttgtcagtgtatccctcagagcaacagagttatagattaactcctaacaataatgttgtcatctacagcgatttcatgtttccatgaactaaattagtaaaatgctttaaaactacaattgatttttactgagttcaaaaagaaaacgtggctgggtacagcagctcatgcctataatcacagcactttggaaggctggggcaagaggattgcttgagcttagaagttcaaaaccagcctg

SEQ ID NO: 459732 - DNA, 615 bp, Homo sapiens
tacgttgatacagagtaatcagcaaccacttggacaaaaagcagccatttcaaaataggaacatgcaacagaaaggccttgggtttcctcactcaagggcagtcttgaaatttacaaatacacataaagttgtacacagtcaagcctaagggaaccatggagggaaatctaggaattgtggatatgctatacttcagcacaaactggaacatgcaaatatagattatagccaggcaaagagattttttatgctgtcagtcactaccctggagatagtgtacatgctrtcctttttggaaaattattacataaaatatgacattaaaaaaatttcattacaagaacagaaaaacaaaacaagaataatcttcaccttgtcagtgtatccctcagagcaacagagttatagattaactcctaacaataatgttgtcatctacagcgatttcatgtttccatgaactaaattagtaaaatgctttaaaactacaattgatttttactgagttcaaaaagaaaacgtggctgggtacagcagctcatgcctataatcacagcactttggaaggctggggcaagaggattgcttgagcttagaagttcaaaaccagcctg

SEQ ID NO: 459733 - DNA, 568 bp, Homo sapiens
atactatagtgttatgggctgaactgcatccctctaaaattcatacgttgaggtcctaatccccatactttagattgtgactgtattttgagatagggcttttaaagagttaaaatggccctaggcctatatgactgctgtctttctaagaaaaggctgctaagacacagatgcacatagaggaacaaccccgyatacatacaccaaggaggtagccatttacaagccaaggggagaagtctcagaagaaaccaaacctgctgacaccttgatctcagacttccagcctccacacagtgagataataaatctctgttgtttaaaccaccaatctgtggtattttataatggtagtcctagcaaactattacatagggtaactaaaatttgtcattgagggactggtgtttaactatatccagtgatgggaatgtgtacatatggaatggtgcaaagcaacgctgctcgtaggcacatataacacacccctcggagtaaacgatggcaggctttatctttcctgccatcctataatctaagggaaactgccccacccacagcatctgct

SEQ ID NO: 459734 - DNA, 568 bp, Homo sapiens
atactatagtgttatgggctgaactgcatccctctaaaattcatacgttgaggtcctaatccccatactttagattgtgactgtattttgagatagggcttttaaagagttaaaatggccctaggcctatatgactgctgtctttctaagaaaaggctgctaagacacagatgcacatagaggaacaaccccgcatacatacaccaaggaggtagccatttacaagccaaggggagaagtctcagaagaaaccaaacctgctgacaccttgatctcagacttccagcctccacacagtgagataataaatctctgttgtttaaaccaccaatctgtggtattttataatggtagtcctagcaaactattacatagggtaactaaaatttgtcaytgagggactggtgtttaactatatccagtgatgggaatgtgtacatatggaatggtgcaaagcaacgctgctcgtaggcacatataacacacccctcggagtaaacgatggcaggctttatctttcctgccatcctataatctaagggaaactgccccacccacagcatctgct

SEQ ID NO: 459735 - DNA, 596 bp, Homo sapiens
tccacaggatagttgtggggattcagtgaaatcagcatggaaaacatttcgtctagcacctggaactgggttcctggactctaatgctttgaagcattcttcacacttgttcagttgccatcatgaagtactgcttgtagtctaagtctgtataattaaaagagtcaataaaagttccttgtatttaaagaaagcaaagaaacaattcagggttagaaggaaaaaggaatccctaagttaaaataggtagaggcattttgtggaggacgggaaatctggccaaatctctgggtcttgaggcaaaaaaggcaaaaacaaggcacccaggagctgagcagcacacggtgtggggctcgtcagccacttacagccttctggttcccaggtgcttgttgtggctgcacactggaatcacatgagaatgttgaggatggcccaggacattctggtttaattggttgggtgcagctggagccccaggagtggttgaagttgccartgattctaccgtgtagcagtgtctgtttaggtatccagacaggaatcctctctcctcctcagccactgcaagcccagttctgaaattccactggaca

SEQ ID NO: 459736 - DNA, 552 bp, Homo sapiens
tgttcactgaagaatcccagaagctgggaacagtatcaagcacaggacaggcactcaagacaatraaacaaccttaatagtaattaggaagaaaaagtaagttgaaacaccaagattctgtgccacatcaatcaagttactggtgtctgaaggaccagaaattcaacagagattcagagaagtgggcacatatatgtattgaaaatgtgtgaataaatggtgccataattttggaaatttccaccattagaggaatagataagatgtggcatgtacaaaagaatgtttataccatagctttcattaataaaatgtatccaaatgattaaaacctgaaaacttaacagtgagtagaaataaacaagtagtaaaagtatatgagcactatgataccatttgttttaatttaaaaaaacttaaaaaattgacaatatatataaatttgtttaacatgtagacatttatataaattggtgtgtatttatatgtaatacattttgatgggtgtataaattaatagcaaatgtatagaacattgttcagaagaatcct

SEQ ID NO: 459737 - DNA, 552 bp, Homo sapiens
tgttcactgaagaatcccagaagctgggaacagtatcaagcacaggacaggcactcaagacaatgaaacaaccttaatagtaattaggaagaaaaagtaagttgaaacaccaagattctgtgccacatcaatcaagttactggtgtctgaaggaccagaaattcaacagagattcagagaagtgggcacatatatgtattgaaaatgtgtgaataaatggtgccataattttggaaatttccaccattagaggaatagataagatgtggcatgtacaaaagaatgtttataccatagctttcattaataaaatgtatccaaatgattaaaacctgaaaacttaacagtgagtagaaataaacaagtagtaaaagtatatgagcactrtgataccatttgttttaatttaaaaaaacttaaaaaattgacaatatatataaatttgtttaacatgtagacatttatataaattggtgtgtatttatatgtaatacattttgatgggtgtataaattaatagcaaatgtatagaacattgttcagaagaatcct

SEQ ID NO: 459738 - DNA, 499 bp, Homo sapiens
aatacacaagccttctctgtcaaataaccttaagagtattcctcattttcctccataaaatcttttcctgatgttatgatgttctgatgttatgccaattgcgaaagcagaaaacaaagagtcacccttgacctcaacatccatataattgatatttcttattagtttctatatctattaccaccatatatacatatatgtgtgtgtatatatatgtgtgtgtatatatatatgtgtgtgtatatatatatgtgtgtgtgtrtatatatatatatatatatatatatatatatattgcattagacaaatatacatagatttgaaacattgaacttaggagttgaattgactaaagaatgatttgcaaattggacatcctcccaaaccagattaggctcagagaggctgcagcatagccatgtggtggaggaagatgtatggatggttaaaaaaagagagtgagtatggaaaatagaaatgaggtgtagaaacagccaga

SEQ ID NO: 459739 - DNA, 634 bp, Homo sapiens
ttagtactataaatttaagtattgctttagctgtatatcacagctaaacacattgtgttttcgttttcagtccattcaaaatactttctcatttccctttgatttcttctttgatccatggattaatatttagtttccaagaacttggggattttccatasatctgtgtttttttaatttcatttccttcaaagagaaaatgttttacagtacttaaatcctttaaaattcatggagttgttttgctcaacatatggtacactgtgataaatgatctgtgaccttgagaaaaataagtgttcttatgctgttgggtagcgtgttccataaatgtcagttagatcaagctgactgatagtattgcccaagttgctatataaccttaccaatttctctccaattgctgtatcaattatttgaagatggatattgaactgtccaatagtaactgtaaatgtgtctatttttccttatattagtttttgcttcaaatattttgttttgttattagatgcataactaagacggttaatacttcttgatgaaatgactcccttaattattatgaaatgttcctccttatctccagcaatattacttgctttgaaatctacttcatatgatttaatatagc

SEQ ID NO: 459740 - DNA, 635 bp, Homo sapiens
ttttacatcattcatttcattagaagttcgttagcttatctagagcagatctgatcttcccttataaatggatctttatctacttgagtccacagaaaatgggaccccgctggatataattttgacctttatttgtagactagggatcacgaacataaaaagcaatcaaaaaacacccaactccaccaacaaccaaagaaaacggaattaatacacactgaggaaaaacattgttttagcttttgcagcactttattcctrtgttctccagaaatcagcacaaccatgttattgtacccatgcaaagtttctcagtaaaatttaataagcaatggagtaatcaagcaaagaatagagataaagcagatgtatgcatgtcaaattagaaaaccagaatgcaaaccgagagttagaagcctttttctctcacttactttttacttaagtgtatgtatgtgtgtgtgtatgtgtatattatctatatatctgcatctctatagtgacataaaatgcaagtgattacatgtatataggcattttatatcatacatatttttcaaggtttgaacctttcagggataaactaaattctaaaattgtgagactaagtctttatcttgtgagctatgatgcct

SEQ ID NO: 459741 - DNA, 635 bp, Homo sapiens
ttttacatcattcatttcattagaagttcgttagcttatctagagcagatctgatcttcccttataaatggatctttatctacttgagtccacagaaaatgggaccccgctggatataattttgacctttatttgtagactagggatcacgaacataaaaagcaatcaaaaaacacccaactccaccaacaaccaaagaaaacggaattaatacacactgaggaaaaacattgttttagcttttgcagcactttattcctgtgttctccagaaatcagcacaaccatgttattgtacccatgcaaagtttctcagtaaaatttaataagcaatggagtaatcaagcaaagaatagagataaagcagatgtatgcatgtcaaattagaaaaccagaatgcaaaccgagagttagaagcctttttctctcacttactttttacttaagtgtatgtatgtgtgtgtgtatgtgtatattatctatatatctgcatctctatagtgacataaaatgcaagtgattacatgtatataggcattttatatcatacatatttttcaaggtttgaacctttcagggataaactaaattctmaaattgtgagactaagtctttatcttgtgagctatgatgcct

SEQ ID NO: 459742 - DNA, 491 bp, Homo sapiens
aactaataaataaaattactaatttccccatctcagttctaacctttgctgactaaactatattataggttgacaaaatattctatttgtttagtcatttgaaaaatagcttgactgcttagttgtggcagttgaggaacacaactataaatcctagcataatactcactcctctaaattagaaagacaaaaaaattattttataaatctataaagataaatataaggcttagtcataacatatactaaaactattttctaatggcatttgaattatatctttttttagcttggttcagtaaaggcaaataataattaaagtgtatttttcttagactttttatcatataaaaacacaaggtattatgataatagttatttttctttataytttataaacttctttatgttagatcattataattatatatttattaactataagctcaaagttcctaaatgttataagattgcatgtaattatattatac

SEQ ID NO: 459743 - DNA, 613 bp, Homo sapiens
agacgtgacacaggaagagaagaaagtcaacataggtgaggtactactactgtgcatactgctrctgaggataaccagaactccgttatgctccagaccttttggaaatgctgttaaaaagaaaatgcctctaagttttgtcactcaaaagacaagataactggtttatttattgactgttccatttgtcattgataagtgagaaggattgtttggccaatgaaaacctcaggcagagatttaaagtaaaaacactaacaacagcaacagcaaaaagaaacacgagtgtgaaattataaaattataaaaatctataaaattaaagagatataatttactagaacccagcgttaatcactctacttacatccttctctagtatataaaatggctctacacactttaactccagactctatgttccaaattattttattattatcatgtatttcagctctatctcattttaatacccaaaggcattattattattactctctatagttaatatcaatggatatttgtcccatatttactactttttaaattctttaatctttatttttatttagtttaccatatcagttcaattcctttcaacttagtgtattct

SEQ ID NO: 459744 - DNA, 613 bp, Homo sapiens
agacgtgacacaggaagagaagaaagtcaacataggtgaggtactactactgtgcatactgctgctgaggataaccagaactccgttatgctccagaccttttggaaatgctgttaaaaagaaaatgcctctaagttttgtcactcaaaagacaagataactggtttatttattgactgttccatttrtcattgataagtgagaaggattgtttggccaatgaaaacctcaggcagagatttaaagtaaaaacactaacaacagcaacagcaaaaagaaacacgagtgtgaaattataaaattataaaaatctataaaattaaagagatataatttactagaacccagcgttaatcactctacttacatccttctctagtatataaaatggctctacacactttaactccagactctatgttccaaattattttattattatcatgtatttcagctctatctcattttaatacccaaaggcattattattattactctctatagttaatatcaatggatatttgtcccatatttactactttttaaattctttaatctttatttttatttagtttaccatatcagttcaattcctttcaacttagtgtattct

SEQ ID NO: 459745 - DNA, 632 bp, Homo sapiens
ctacttaggataagagtattttacacaccacagttgcagtgttaaactattctgtgtttttctgtgtgcttttgtatcttcagatgattatttattgctcattagtgttcttttctttctgattgaagtactccttttagcatttgttgtaggatgggtctgatgttgataaaagccctcagcttttgtttgtcagggaatatatttatttctccttcatctttgaagaatatgttcactggatattttactctagcatgaaatattttttcgtccagcacttcaaatatgtcatgccactctctcctggcctgtaagatttccactgaaatgtctgttgctagatrtattggagctccattgtatgttatttgtttcttttctgttgctgcttttagggtcatttctttatccttgacttttggctatttgaatttaaatgccttgaggtagtcacctttgggttaattctacttagtgttctgtaactttcttctacttgaatattaatatatttctctaggtttgttctctgctattattcctttaaataaactttctacccctatctctttctccacctcctctttaacaccaatacctcctagatttgcccttttgaagctattttc

SEQ ID NO: 459746 - DNA, 526 bp, Homo sapiens
cagagtcacgtcaattaagttatagtgaattggaagtagagatttcaaaacttctaatttgttgattgatggtggcttcttacatgcttaaactttgtaggactaggaattagatttcactgatctatttagaatatgacactaacctactactaaattattctttttaattaatgtccagtaatttaggtagtaaatattttcaaagaagttttatactgaaagacaatgattcaagtgttctctttccacaggtcactcccaagggtgaacactctggagagaaagatttgctctcagtgctgatttatgaactgcagcgtcacaaaccagcattaatttgkagttaatttttccccaaagcttttcgtttacttacagtcatctcttatccctgaaaaaacaaaacacgtatattattgtgctttatactttcctaaagaagaaaaaaattctaagaaaattatatttagtaacttattgtcttaagaaaataactgcaaaatatctgtctagtgtgataaat

SEQ ID NO: 459747 - DNA, 631 bp, Homo sapiens
tttgggccacattcaaagctgtcctgggccacatgcagcttgcaatttgcaggttggataagcttgccataaagcatcagtattttatatagtgaatatccctggcaatacttttaatcaagctagggtagaataaacctccatatcaccacaattcctgatgggaattattctgtgatgaactctgaaggccaacattcctgttccatagggacaaaagagccaagtatgtctgaattccatttgttcttgttgcatttagtcccattgtgcctcaatgggacccatcaatatctcactccctaaagaaatttagaagttgtctctagtcccagaaataataggaatcttattcatccattccatgagcattccttaaaatgctataaacattttctgtagggatattacactggtaaatcagcaaattctttgtataccactcatctggatttttgcaaggtatttgacagtcactcttgacctctctggggtaacgacaggatgataatagagttgggtgcctgtgtaactgaactgctattccsaacatatgtagtttagtaatgtgtaattctggtagaaaatatctatctgtaagttgttaaattttaataaattcatttattta

SEQ ID NO: 459748 - DNA, 633 bp, Homo sapiens
taattctggtagaaaatatctatctgtaagttgttaaattttaataaattcatttatttaaaacaataggttgaaaataaagattgaaatgctaatgaaattatttgaagacataacaaacacttcagaaggtcaagtcaacttttgagatcatctgaatggtagaaaatgcagttctgttcaattaagtattaaatagaagattgataaatgaaaacagcacttaggcataaagaaagactaaaacaaaaatatcaactgaggaaatacaagctaaagaattaaaaactttaaggattatatgcaattttctaaatagagtacaatctggaagttttgaagttggggaaagatttgttgttgatgagtacctgactggtttgcgtgaccccacaatttgtagaactttatgtttcttagcttcctcttcaaagcttattaatytgtatcttcaccggaaacccacttttataagttccccttgaataatatctgagttttcatatatttaattttctacattttttagatcttaaggccctagcgatatttctctgtggctgggattttttttattgaaagatttttgttggtaatgttttatatattccttatatatacatactgagtaca

SEQ ID NO: 459749 - DNA, 589 bp, Homo sapiens
aaacacccaatatgtgtacataggttcataatgacagttctgtttctccaatttcctctgattttgtcctacttttttttatgttctgaccataggatgataggatgatgttaagtaagttagaaagcccttctcaaaacatctgcaaatctaaaaatgcaaggcccatgatatcagaagctgataaatagctctttgacagagmtattatttgtttatttgacaattttcaatgaataagtacctaatctgaaggggggtaggaagtaatattatgcatctcacaatatttgatgaagtccagttaggttcaataatatgttaagaaatgaaaatgcctattggttttatttaaagtctctccagtttgcagtgctctgaatactaagatagatgaggttagaagatatgtgttattcttgtctccagggaaattgcttcactttacttataagatgtattggtgtttcctactttttttcttttactttattccaactctcacaataaaatataattggattttagaccctgaagcagaatagaagttttgtgttgtgtttttgttatttatactaaacttttatta

SEQ ID NO: 459750 - DNA, 599 bp, Homo sapiens
ataaactgcttacttttacaggtaaattcattcttcccaggtattttggattactcattagtgtctcatattatgagcactaacatctgagatccctcacagatcttcctaccgatgaataatatacataatattcaatgaagtaaattaagttgcaccaataaacrccaaattagagagtatatctatataataaaatatataattctcagcactcactacattctaaacagtttatatattgactcattgaatcttcattataatattatgagatagcttctattgtcactattagtttacagatgaggaaaatcatgcacagataggttaagcaagttttttgagtcgtagtacatggcaaaacaggatctgaaccaaatttctagatctcttgtccttaaacatgatgccacacccactctcatacattctagatttggtccaatatagcattcaaaaataaagacagaatagtataggtacttcttggtcacagttcctttcaaatgaaaacgaaaaaaattttcagaacactcctaacagagtcttacaaaagaagatggcttgtttaatcctaacccaatcaccagcaaatg

SEQ ID NO: 459751 - DNA, 544 bp, Homo sapiens
  misc_feature (1)...(544): n = A,T,C or G
ggaacaggaatttatgttgaagtagttggctaaatatccaagttcagtaagctatatgagtcatgaatatttatgaaaggagaaatatgtgcacgtgcaattgaacttcatgcaacttcatgggtcacattttcaaaaactggcaatgtttgcatgattgaacgggggagttttcagtcttctgatgtcaacaggtgaagcagaagacacataaaccctccttgtgcatcccttgagagttttgaccaaaactggagatagtggctagtttttaggaagggatgcatcctgaaactggtaagctgtcctatcaanactgttaaaggaagggggagscccttggcagtctcagatgattggctaaaggtgataaaggaatagcttgtctgtttcctcttctccagagcttgtttctgcttactctttaagaaagaattctggttgaaggttagtaaaaaaggggcatactgaagcatatccaatctcttgttccatcatggccaggaactcagtttttaatgttgcttttggattctccttggcc

SEQ ID NO: 459752 - DNA, 560 bp, Homo sapiens
ctgttgttgagtcacgtagggttaatttagtgggaagaatagtttcaaaacagtaaataaacattagtctctgtcctaagtcaataattacttttttaaaaagttctaagtagagagctttttccctttttactgaaaaataaaaacatcttcaaaatcgcttatatgaatcacttttcaaatgtaaaatcttaatgtttctcataaaacaccaagtacrgatgctgacaggtatgaaattcaaaagttatttgggatttgatgctcagaaggtaattgcatgctgtgtatgttgaactctaaattgggttgggctcatctgtatagattcacagacaagaattaaagtcttgaaggtaaactcattgtcctctatcaataaccagaaatatgccttctttgaatctgatattccctgacattctcctgcattaatgtgttgaagtcagataaatctttaggttatttgttttgaactgttggattctagagtactgcttcagatttcattttttttaaccatagttctttttttatcagaaggttattttcttagaaaa

SEQ ID NO: 459753 - DNA, 485 bp, Homo sapiens
tttatcagaaggttattttcttagaaaaatatatgcaagcattgtcctttgaaatttttctcgggtgttgaatgttaagtacatatttttaaactaataaagctgttactaataaaagtatagcagaagatgttattccaattaaaaggaataaaattgatttggagaaaagtcaaagtttaaggaaggtttgattttgttggaattagaaacaaacaaagtacttcatatctgtaaatgtgttatatagtgcatgtctaaaagagttattatttcggtttggtaagattatgagtttttatttggtggaggagaatattaaagtgtgtgactccatttttattattgccaatggctttcaagcccyagtatttacccttccttgctgccccacatccgggagaactgagaagaaaactcaattggtttcctttggtgctggcagggaattcaaaccatgtgatcttccttaacactaatgtttc

SEQ ID NO: 459754 - DNA, 601 bp, Homo sapiens
tgtttatatccactatgggatatttaagggcaataggtgatatgaccatggagaactcaggcaagggagtagttcaggtaaggcatagctatttttcctctattttatatgctgcaactcccctaagattaataggcattacgttgtttaagtttatggagtccctaggtataactgtaattctagccccagtgtattgattaagtccatgaaggtttgcaagttgatgyacttcaacagattttgacattaaatctacaacctacattataagggagaaaaagcctgcaaccaacagtgatcttttatctttttgttgtataaaattttttaagatttattttattgctgattgacacataaaaattatacatatttatggggtctaatatgatgtttcaatacatgtattcattgtgtaataattaaattagagtaattcatatacccattacatatttatttaacatttatgatttcttcatgatgagaacattcaaaagcctctcttctagttattttgaaatacacattattggtaaatatattcacccaactgtgcaataaaaatccagaacttatttcccctatctaattgtag

SEQ ID NO: 459755 - DNA, 628 bp, Homo sapiens
atgctgattaattgagaatactaaatattgttttaacttttggtgtataccactaacattttgcaaaaatgtaattcattcagtgacataaaaatatattttggaaacaaatattctttgatttttttttttgtttttggtctgacataatgcatgcaaattttcaagcaattaatacccagaatagtcaagaaactcaaacagctcaatagcaaaaacaaaaagcaaagaacaacaaataatccaactggaaatggacaaatgaactgaatagaaatctctcaaaagaagacatacaaatagaaaataaatatacataaaaatgttcagcatcactaagcatcagaaaattgtaaatcagaaccacaatgagatagtatcttctatttcaaatgactcttataaaaaatgtagaagttaacaagttcttgcaaggatgtgtagaaagaagtactcgtatacattgttggtatgaatgtaattagtagagccattacaaaaaacagaaagaagtttcctcaaaaaactaaaaaaaactaatatataatccagcaatgccagtactggatccaatctcayactctttccaaaaaaaggaaattagaatgtcaaaaaaattagtatgtga

SEQ ID NO: 459756 - DNA, 554 bp, Homo sapiens
acgggacaagaatttttaaattgggtaaaggcttaaaattttttgrtatttataatagctttattcttaacagcatcaaactggaaacaacccaaatgttctccaacaggtgaatggctaaaccaactagtacatctataccatggaatactactccacaacaaaaagaatgatgactgatacacacaacaacctaaatagatctcaagggcattatgctgaatgaaataagtcagtctcaaaaggctacatgctatatgaatctatatacattaacattcttgaaattatgaaataatagaataaataatagattcatagttgtgaggggttaaggaggtggtaggcatgggagaggagtgggcgtggctctaacagggcaggtgacatccttaaaaataccatagaaagaacttccatctaatctcacttaagacaaaatttcctaacctttaacaatctataaataatacttatgatgcaaatgttttgtattttggctaataaatgtcaatatcctggttgtaatatagaactacagttttaaaagatta

SEQ ID NO: 459757 - DNA, 541 bp, Homo sapiens
tggtaaataaaatagaaatttcctacttgtgtggagaataaaaacaaatgggagaaatagaaaaagtatatgctcttctgtaggaaatgtagttttatttttaaatgcttttagttaatgtgtgattggcatacaattaaataataacaatataattaatatgtagtcttaytggtccatacatagcccatcccccactgccataccaatgtttagaggtgagcaaggtgagctttctcaccatctaagggaaagcctgaagaaaaagcttaagctactgtagaagctcttttcctagatgcaaatggttgattgttttgttgctggtttacagtccagaaaaaaacctataaagctattttcctctgtttaaaaaaatattgatggagatgttttttttctggattggaattttaatttttgataaaactgatacgtattgaaaacaaaagccatcagttagctatctcgaaggagaaaaattaacatcacatgtcttaaggctgaaaataatcagctgattatgatgctgtgtccacat

SEQ ID NO: 459758 - DNA, 523 bp, Homo sapiens
tgagcaaggtgagctttctcaccatctaagggaaagcctgaagaaaaagcttaagctactgtagaagctcttttcctagatgcaaatggttgattgttttgttgctggtttacagtccagaaaaaaacctataaagctattttcctctgtttaaaaaaatattgatggagatgttttktttctggattggaattttaatttttgataaaactgatacgtattgaaaacaaaagccatcagttagctatctcgaaggagaaaaattaacatcacatgtcttaaggctgaaaataatcagctgattatgatgctgtgtccacatgctagtgtagacttaaatatgctactctttttatttgttttcacttgtttatttgttttagtgctctggttacaaatgctcgtgtttaactacaagacgatttacagggtgcaattttgtctcacataaaaggcttttcatgagcatatatgtagtatgggaagagaaacatgtgcataatatatattttgatcaagtctg

SEQ ID NO: 459759 - DNA, 541 bp, Homo sapiens
tggtaaataaaatagaaatttcctacttgtgtggagaataaaaacaaatgggagaaatagaaaaagtatatgctcttctgtaggaaatgtagttttatttttaaatgcttttagttaatgtgtgattggcatacaattaaataataacaatataattaatatgtagtcttattggtccatacatagcccatcccccactgccataccaatgtttagaggtgagcaaggtgagctttctcaccatctaagggaaagcctgaagaaaaagcttaagctactgtagaagctcttttcctagatgcaaatggttgattgttttgttgctggtttacagtccagaaaaaaacctataaagctattttcctctgtttaaaaaaatattgatggagatgttttttttctggattggaattttaatttttgataaaactgatacgtattgaaaacaaaagccatcagttagctatctcgaaggagaaaaattaacatcacatgtyttaaggctgaaaataatcagctgattatgatgctgtgtccacat

SEQ ID NO: 459760 - DNA, 565 bp, Homo sapiens
gactctttgtggcaagaagatatctagttataaacaagacctcaggtgataccaggcaaggattaagtcattcacctctacgcttaaagaataaactatgttctaactgccacaaggttttattgctgctgctgttttgttgttgttgttttctcctctaatagctaaacaagcactggctttgagataagcaatattaaaacaaytgctgctcaccaccagacactcgctaactgacccctgtttcataaaccactaactacagctttggttgaacaggacactgatttctgcaactttctcctggtaagagaacaccgcctatagactggttctagccagttttacagaggctgtgcatgtgaatgccttcatgtccctgctttacctttcgatatatagggcctaattttaatacctttaaatggtttctccactgacaggtgaacatgggtcatgtgtaacatacatgtctatttactatgcatgtattatgactaccttcatagacagtcgtgtttcctcctgtaacctgttaaatatttatacttgaccaacccgttta

SEQ ID NO: 459761 - DNA, 592 bp, Homo sapiens
aacatgttaaaaatctgtctgattcttaaatgataaaatatctaggtttccgaataaataaattttaactccccaacacaagtgtttccatgaaaaagttttatttataaatggggatacatttggacaaaagttaagatctcgttttgattttggagttacttgttctactacctaatatttatataattagttatttcaaaatattagaaagctcacaagttttgtatgatttttacaaaacaatcttmaagccagatttattgagacaatatgtacagaaatgtaaaattcaacctttttaggttcacgttaattctgataaatgcataagttatgtaaccaccactgcaatcaacatacagaatacttccacctttccaaaaagttccccttgccccctttatagtcactccctttcctactttcttgacactcagctcgtggaaaccactaatttgttctctatttctaaacctttacctttttccagaattttatatacatgaactatttgggtttctgagctgtgccatttttcttctctctaaagaacttttaacattcctttcaaggcagggctactggtgac

SEQ ID NO: 459762 - DNA, 557 bp, Homo sapiens
  misc_feature (1)...(557): n = A,T,C or G
cgggtggatcacctgaggtcaggagttcgagaccaacctggccaacaaatcaatcaaagttattttggcctaataactgtgttccagagactggattgcataatgaaggtgaacccctgtttggttagtgtgctatatacacttcaggtgtccacattattctttgaaaggacatcactaaaattgaagaggtagaatggagggcaacaaaacagacttaatatgtgagagatcagagtattatacatgaagaatgattatncagctctatcaaatgtggcttcaaaaagatgactaagaagagaactgccagaggtttgttaggaacagcaaggaaaggctggattgacaacaaccctgaaaatgaaaggggaaaaaygcaacttaggaaacaccgcctcattgtcaatcaaatggaaaagcttcccaagggaggttgttggagtaccgttactaaaggtagtcaaaaactgattaacttaaaattttaatctttccattggtaaaactttataaaagaatctagaaccataatgttgataatggcaaactgagta

SEQ ID NO: 459763 - DNA, 557 bp, Homo sapiens
  misc_feature (1)...(557): n = A,T,C or G
cgggtggatcacctgaggtcaggagttcgagaccaacctggccaacaaatcaatcaaagttattttggcctaataactgtgttccagagactggattgcataatgaaggtgaacccctgtttggttagtgtgctatatacacttcaggtgtccacattattctttgaaaggacatcactaaaattgaagaggtagaatggagggcaacaaaacagacttaatatgtgagagatcagagtattatacatgaagaatgattatncagctctatcaaatgtggcttcaaaaagatgactaagaagagaactgccagaggtttgttaggaacagcaaggaaaggctggattgacaacaaccctgaaaatgaaaggggaaaaatgcaacttaggaaacaccgcctcattgtcaatcaaatggaaaagcttcccaagggaggttgttggagtaccrttactaaaggtagtcaaaaactgattaacttaaaattttaatctttccattggtaaaactttataaaagaatctagaaccataatgttgataatggcaaactgagta

SEQ ID NO: 459764 - DNA, 567 bp, Homo sapiens
aaaatttccaatagcagatggcttgaatcagtgagcaaaagctgtggatgaagcccatggtaataaaacatggttcaagtcagagaatatgctcaaatcaaatgagatgcctatagacctttaaccatagcagtgctagcaaaacctctrtaacccttaatgcataaaataaattatattaatattttgaagattaccacacaaataataatgctatagaaatactcatgaaaacaaaatatttgactacaataactatatgaaaacaactgatttttccttaaataaccatataacccatgcatggaggctatcatgctatttagtgattaagctcaagaagcaatgtcttttagtcgtctgaagctggggaagaaaacaaaaggccaatttcttgttttaccctgtgtataggtgatagtgagggcaagaagtttgttgtgtgtgggtggggcaggggaaggaaaggaggaacaaacttctctttaatttttttctcaagataagaaagagaaatttctttgatgaaacacacacacacacacacacacacacacagaagcagta

SEQ ID NO: 459765 - DNA, 567 bp, Homo sapiens
aaaatttccaatagcagatggcttgaatcagtgagcaaaagctgtggatgaagcccatggtaataaaacatggttcaagtcagagaatatgctcaaatcaaatgagatgcctatagacctttaaccatagcagtgctagcaaaacctctgtaacccttaatgcataaaataaattatattaatattttgaagattaccacacaaataataatgctatagaaatactcatgaaaacaaaatatttgactacaataactatatgaaaacaactgatttttccttaaataaccatataacccatgcatggaggctatcatgctatttagtgattaagctcaagaagcaakgtcttttagtcgtctgaagctggggaagaaaacaaaaggccaatttcttgttttaccctgtgtataggtgatagtgagggcaagaagtttgttgtgtgtgggtggggcaggggaaggaaaggaggaacaaacttctctttaatttttttctcaagataagaaagagaaatttctttgatgaaacacacacacacacacacacacacacacagaagcagta

SEQ ID NO: 459766 - DNA, 507 bp, Homo sapiens
gaggtttgggaacctctacctaggtttcagaggatgtatgcaaatgcctgaatgtccaagcagaagtttgctgcaggggtagagacctcatggagaacmttttctagggcaatgcagaatgggaaagtggggttgaagcccccacacagggtccctcctggggcactacctggtggagctgtgagaagagggccaccatcctccagaccccagaataatagatccaccaacagcttgcactgtgcatccagaaaagctgcagatactcaacaccagcccatgaagacagatgagagtggggctgtgccctgcaaagccacaggggcagagctgcccaaggccatggatcagcatgacccagatgtgagacatggagtcaaagtatatcattttggagctttaagatttgactgccccactggatttcagacttcctcagggcctgtagcccctttgttttggccaatttctcccatttagaaatggtgtatttactcagtgcctgca

SEQ ID NO: 459767 - DNA, 507 bp, Homo sapiens
gaggtttgggaacctctacctaggtttcagaggatgtatgcaaatgcctgaatgtccaagcagaagtttgctgcaggggtagagacctcatggagaacatttkctagggcaatgcagaatgggaaagtggggttgaagcccccacacagggtccctcctggggcactacctggtggagctgtgagaagagggccaccatcctccagaccccagaataatagatccaccaacagcttgcactgtgcatccagaaaagctgcagatactcaacaccagcccatgaagacagatgagagtggggctgtgccctgcaaagccacaggggcagagctgcccaaggccatggatcagcatgacccagatgtgagacatggagtcaaagtatatcattttggagctttaagatttgactgccccactggatttcagacttcctcagggcctgtagcccctttgttttggccaatttctcccatttagaaatggtgtatttactcagtgcctgca

SEQ ID NO: 459768 - DNA, 507 bp, Homo sapiens
gaggtttgggaacctctacctaggtttcagaggatgtatgcaaatgcctgaatgtccaagcagaagtttgctgcaggggtagagacctcatggagaacattttctagggcaatgcagaatgggaaagtggggttgaagcccccacacagggtccctcctggggcactacctggtggagctgtgagaagagggccaccatcctccagaccccagaataatagatccaccaacagcttgcactgtgcatccagaaaagctgcagatactcaacaccagcccatgaagacagatgagagtggggctgtgccctgcaaagccacaggggcagagctgcccaaggccatggatcagcatgacccrgatgtgagacatggagtcaaagtatatcattttggagctttaagatttgactgccccactggatttcagacttcctcagggcctgtagcccctttgttttggccaatttctcccatttagaaatggtgtatttactcagtgcctgca

SEQ ID NO: 459769 - DNA, 568 bp, Homo sapiens
ttgaccaaaaatgaccaaagaattgatggattctgggtgtttcaacatcactgattagctaaggaccaagtttaaggttaataataatttaaaagtaaacatttaaagcttagatcttttaaaataaatagttttgccaaaattttggagtttttacattatctgtgtacaaaatagaacccacaaaaatattgaactgaaatcaagtgttctcatcaattctatttccagaatttaatgtattcactgcaccactagaattatttcagtagcatttttccacttgtggcaattgtcataagaattgtgaaattacaactccttatcaacattaatagggattcatagggcacaygctagcatattggcttctataggactaatgttgcacaactttagtgtctcagtatttgtgtagacaccatggatgttatattgcccaagagtcatgaagcttgcaattatttggctagtgtatgtagcacttgcgatatgagtttttttatatgtgtacaaatgcaagagattctcaatctgaaactcatgcatgcctaggaataagcaattt

SEQ ID NO: 459770 - DNA, 615 bp, Homo sapiens
tgtgtctttagtctaatgcaatgaaccctaataagaatcacaggagatccataaaattttaacaagaattatattcacagaaacattgtcagcttaaactgaaaggtacccagacaatacaaaatgaaaagagagctttcaacccccagaattcaataggcaggaaggaggctgaggaaactacatagctgtaaacacaggctactttcttgtaaaaggaaagatgagtcaaagggtggaatcaagagcccagaaagtagagctgatagccttggagaattattcctgtgaaggaaaagggctgagtcaagggactttgatcatttgcctggctccatttcagaaatgttgtagactagtgacccctttgtgcttcttgtctttcccctttttaaaatagaaatgcccrtagtggttttcttatgcttgtcccatcattatatgttacatgtctgttggacatataacctgtctctttagttcacaggtctcctgataaacagaaactgtacttggggagctgtagctatggaacttaaggcactgtattcaaggagcctcatctgcagctacacccagtctagttgacaagattctaggcttcaagctgatgct

SEQ ID NO: 459771 - DNA, 596 bp, Homo sapiens
ggctgaggaaactacatagctgtaaacacaggctactttcttgtaaaaggaaagatgagtcaaagggtggaatcaagagcccagaaagtagagctgatagccttggagaattattcctgtgaaggaaaagggctgagtcaagggactttgatcatttgcctggctccatttcagaaatgttgtagactagtgacccctttgtgcttcttgtctttcccctttttaaaatagaaatgcccgtagtggttttcttatgcttgtcccatcattatatgttacatgtctgttggacatataacctgtctctttagttcacaggtctcctgataaacagaaactgtacttggggagctgtagctatggaacttaaggcactgtattcaaggagcctcatctgcagctacacccartctagttgacaagattctaggcttcaagctgatgctgtgatgggattagacttttggggcctttgggagagagtaaatatactttgcttgtgggatgaataaaaacagtatgtgaccaaatggtcaattttgtttcacataggttcacaaattatttaatactcttcctttcagaagatggagtca

SEQ ID NO: 459772 - DNA, 463 bp, Homo sapiens
tagcagaaatgtgtctcaattttcagcatcaaaattattctgagttatctctgaatacaatttgctttgtgtgacttaaatgtaaacatgtttgccaacaataagcattttctctgaaatcactctgaccacagaaatgcctaggcatttaatttttatctttgcatgcacagtattttggagagtttctacacaaaatgctcaagtgtttggctttgccttatttgaaacaattcaatktccatctaaggaatccctgaacaaggcagtttcaaagttccctcagtgactgagcacacccgcccaggagtgtatcatcagcataaagatacacacaacactcagaaccctgccttgtcagctcatttataaagatcataaataacaatggtccaaggattgatccctgaggaacccccataatgacatccattaaatctgacatgacactgtttaataacac

SEQ ID NO: 459773 - DNA, 638 bp, Homo sapiens
atttattttctcaaaagaatataaatttaatatgatctcaaaaatacaacaacagctatttttctggacctagacaaatttattctaaaaatcatacaggaaaaaaaatgcaagaaattctagtaaaaataaaacctaacaaagaagaaccctactgctacttcactttcactagatgagctaaaattaaaaagacttacaacgtcaaatttgaagcaactggaacttgcacttattagataaaagaatgatagttccctattgaactaaacattcacttaccctgtaccccaataattctactcttagatatttacccaagaaaaatgaaaacatacatccacaaaatagttrttcaagtgtgttcataacagcttaatacataatagaccctaactggaaacagctcaagtgtccctcagcaagcaataaagtatagtttatttataaaacggaatactactcagcaattaagagaaatgacacacacacaatatggatgactataaagacgtactaactgaatgaaagaaactttacacaaaagtgtacttacttagtgtatgattccatttacatgaagtcctaaaacaagcaaaagtaatttatgataagaaaaaaaattaaaatagcattta

SEQ ID NO: 459774 - DNA, 580 bp, Homo sapiens
ttccaacataaacatctacgtcattactcttacttcaatctctgtcagaagatttgctactgtcatcactgaaaaatgatgtcgaacattccagcaatttcaattcctcaaaatgccggatgttatattattaatcatatatatatataaatatacatgtatttacatatgtgcagcatgagatatgtatgttcaatggtgctagataaattctttcagagaataagctttttagtgggagcatttccatgataaattagttaaatcctacatgtaatccacagctatactctaggcaacctagcagtcagtctttktgtgactactatcatgaatttgagctaggtgcttaatacatctgggtaacatttctaaggaaaccattcccttggtatctttgtattcatgaagctttgttttgttttgtggctgactttaggatactatgtatttaagataggattaacataaaatgttattattttaaaatcccaaagagaacaaaacctaaaattacctgcattttcaattaactcccctttaaaacgtgtatcagtgtaaaagtttaggcaaagattga

SEQ ID NO: 459775 - DNA, 544 bp, Homo sapiens
ttagcataaggcccacatggtgtatttacagatgttaagctcgaaatgaatgcttcaaacagartcacagaattttgttgccaaaaagaactacagattatgttgtctactacaaaatcctcactttattggcaaataaactgaggcttagaaaaccaaaatggtttatctatggtcatatatctagcaggtgacctcggaaccagatcttttaatgtctggaggaattttactcccagtgtgtcacttttcccaaactgtgttctgaaaaccacaggtgtcccaaaaaacattactaagtgtttgttgggaggaaagaggacgggggaggacatataacggtttgaatatatatattgaatttccacaaggggtaagtgtggacagtcttttctaagtatttcactaagtgcaattattgtcactttcacagagactcataggacactttgggaaatcacctctatcctttgtggctaaattctgtctgtttttctatgtagtcgtcctcatggagaatatggtgctaaatcatgttaattca

SEQ ID NO: 459776 - DNA, 508 bp, Homo sapiens
atgagaagtacttagctactggctccactaaaggaactggactatgagccaagaattgcaggtggcctttagaagccagtaaaagccctcagaaagccagacaaaaaaggggatcctagtcctattaggaaaaacaactggattctgctaaccacctgaatgaacaaggagaggaatcctcccacagaacctccagaaaggaactcagtcctgtctataccttgaattaatattaacaaattaacattaatatttcacatgcaattaaatatgtacatatatatacattatatataattatatttaaggtgtttaaaatgtaatagaagtatagaaaatattgataaatttataaacaaagaacatcatgctattaatattatacaatcctcaaatatatrtgatacaaattatgttaagaaaaggaagaaaatgcaagaaaaaaactagagccacttttaagttatctactttttgtacaataatccactttaatagtggaccaaat

SEQ ID NO: 459777 - DNA, 334 bp, Homo sapiens
atgagtaatggattacaaacagagagcatgtstgggccgtacattcaaatactgtttctctcttttcgagggccacaaattcccaccggaaagatggggtggaacgaaaattatcaatgtattattccaaatatttcttccttatttatatgctaatgagtgttctgacctctgcacttttagtttgttgccctcttccaaagaggattttctgctcataccaggtggttctctgggtttctgtaatgcaaaatcagtataaagagagagacagaattttggaaatggcagattaaggagacaaggaggaagtacatggacaatatacagatgg

SEQ ID NO: 459778 - DNA, 348 bp, Homo sapiens
atcactactcttcatgcatctagttcccaatccctgtccccttgcctcataaaacatgagtaatttttgtttgtttgatttttgtttctcagagaagagaaatgagagcagagccttgaagaactgaggcatatggtggacaatagaaacattttgctgaagtgagatctayaggtagttataataattgtaattacaataattatagctgtcagggaatatagaaattaaatcaagaaatctgttttggcttttaatgctaacctttctctgcttttccattttacatgtgccactttttctggtactagtaatctgaactgagaaataggatggtgttcaaagcat

SEQ ID NO: 459779 - DNA, 590 bp, Homo sapiens
aattgatatgaaaaactcacaaagtaaacctaccactttggggactccctgactgacttcaataggaaacttttagctgtaaaatagcattttcagtttaacacttggacactcaacctgcgtgaactgctttatttcttcctcaaacaaccatattcacattttctagataattattcccaatacccagttcactttgtgtttggaggcactgcttagaatcatatcattttagagtcagagaggatcagatagaacatatgccccaamcttctcattaatagatacaaatccaaagctccaaaaacatactcaaggttacacagctagtgagtctttaagaaaggactaacattccatatgctctgactttggttccagtactctgtccctaattatgcttttctgtttgtgttggagattgccagcccttcttaccactcatctgtgtttctagtctcagttttgccattaattatcttttacaaccatgaatacattacttacaggcctcagttttgtcatgtgtaaaatgagtgagtctaattaaatatctataatctagtcaagctaagagatagcaggattct

SEQ ID NO: 459780 - DNA, 422 bp, Homo sapiens
ggctcagctgaaggctgctttmtcctataagtctttcccacctagttgttactaaacacttgccctcttccaagctaccacagctgcacaagctcaccctgatggtgtgcagccattactgtgacctatgtgagttgggtctacctgaacatctctgtctcctccttctctttgtctcttaatgagtgtctcctggcataggactgtacactcagaaaacatgcctcacagaccacccaggggcttgagtctgcttgagaaatggtcccaggtgccaaatccctgttacaaatgacatagggacctgggtgagtcctggattcctgaatgacttttctcctctgggccccagcatcttattagtaaaatgaggctgtgctatggtttgaatgtggtttgtctttgccgaaattcatgttgaa

SEQ ID NO: 459781 - DNA, 494 bp, Homo sapiens
gtaaaatttttattttattttacttttttatgtttagatatgttgagatacacaaatatttaccactgtgttacaattgcctacaatattcagtacagcaacatgctgtacaggtttgtagtctaggagcaataggctatatcagacagcctaggtgtgtaaaaggctacaccacaccttctaggtttgtgcaagtacactctataatgttggtacaactatgaaatcatctaacgcktatgcgtgtcattaagtcatgcatgactctatacctgtggaaaataggtaagaaagcaatacattgacatggtaacaattatttcagaatgatttttatattatttgtacttttctatttctacaataaatttacattgaacaactagaacaaaaagttgtttaaaagagacagctcatttagatgtcatctataacttgttcttaaggaggccaagaagggccagaagtgagagtggggagaccccagagtccaa

SEQ ID NO: 459782 - DNA, 494 bp, Homo sapiens
gtaaaatttttattttattttacttttttatgtttagatatgttgagatacacaaatatttaccactgtgttacaattgcctacaatattcagtacagcaacatgctgtacaggtttgtagtctaggagcaataggctatatcagacagcctaggtgtgtaaaaggctacaccacaccttctaggtttgtgcaagtacactctataatgttggtacaactatgaaatcatctaacgcgtatgcrtgtcattaagtcatgcatgactctatacctgtggaaaataggtaagaaagcaatacattgacatggtaacaattatttcagaatgatttttatattatttgtacttttctatttctacaataaatttacattgaacaactagaacaaaaagttgtttaaaagagacagctcatttagatgtcatctataacttgttcttaaggaggccaagaagggccagaagtgagagtggggagaccccagagtccaa

SEQ ID NO: 459783 - DNA, 494 bp, Homo sapiens
gtaaaatttttattttattttacttttttatgtttagatatgttgagatacacaaatatttaccactgtgttacaattgcctacaatattcagtacagcaacatgctgtacaggtttgtagtctaggagcaataggctatatcagacagcctaggtgtgtaaaaggctacaccacaccttctaggtttgtgcaagtacactctataatgttggtacaactatgaaatcatctaacgcgtatgcgtgtcattaagtcatgcatgastctatacctgtggaaaataggtaagaaagcaatacattgacatggtaacaattatttcagaatgatttttatattatttgtacttttctatttctacaataaatttacattgaacaactagaacaaaaagttgtttaaaagagacagctcatttagatgtcatctataacttgttcttaaggaggccaagaagggccagaagtgagagtggggagaccccagagtccaa

SEQ ID NO: 459784 - DNA, 494 bp, Homo sapiens
gtaaaatttttattttattttacttttttatgtttagatatgttgagatacacaaatatttaccactgtgttacaattgcctacaatattcagtacagcaacatgctgtacaggtttgtagtctaggagcaataggctatatcagacagcctaggtgtgtaaaaggctacaccacaccttctaggtttgtgcaagtacactctataatgttggtacaactatgaaatcatctaacgcgtatgcgtgtcattaagtcatgcatgactctrtacctgtggaaaataggtaagaaagcaatacattgacatggtaacaattatttcagaatgatttttatattatttgtacttttctatttctacaataaatttacattgaacaactagaacaaaaagttgtttaaaagagacagctcatttagatgtcatctataacttgttcttaaggaggccaagaagggccagaagtgagagtggggagaccccagagtccaa

SEQ ID NO: 459785 - DNA, 552 bp, Homo sapiens
acttacaaataataattatcattctagtagttctcacttttcaagacacactgtcaagtgcctgatttgtcttatcttacccactctttacaacatccctatcagctctctgcctccatatmcccagcttgtaggccaggaaacggaggttcagagatactaaataccttgtccaaggccacacctgggttaagcagcagagttgggacttaattctaagtcaggcttctcccagagcccttggtcttgacattgtctcaaaattgagttctctagctcaaaatgctggtatttgagttctgtagctcaaaatgctggtattataggcttgatgttcaagttcatctcagtcatcatcagaattttagttccactgaaactcatacctcttggcaacaagacagagacataactagggggtagggagtagaaaaagaaggctgagacaagacagctggaggagactcagggatggaaagtaagtgtggccctgaatatggatgtgtcttggggcagcttctctgagatcttagaaggaccaagagcctgaag

SEQ ID NO: 459786 - DNA, 567 bp, Homo sapiens
gggcctcatagtctggctctgccaaggkgtccacactccatggaggactgagtatgaatgggtgtgtgactgtagggtggggagggcgaggatgcagcacgggcctcgctggggctgccagggatgccacccagactctttactccctgtaatgccatctatcccagcaagctccccaaactcagcctccggctcacagggtgtgtaatggaggagacagccagggaattccccagctcatcagctcagggctccggaaacatgaatgcatcagggaaatctgcaggcagtgccgaagacacgcttgatttctcaaatcgagaggcacattttcagcatctgcatgtgctctgcagtgggaccacctaggttggaatgcctctgtctgtgtggcccatggcaagacccttatctctctgctctgcatgcagggcctttaaattgctgggacatgaaacatttggggtggagctggccaagggagctcctaaaagatccttttttgaaagaagcatttccctcccttgagattcacagcacctgacttgtcttgtttgtgttgaggtc

SEQ ID NO: 459787 - DNA, 494 bp, Homo sapiens
ggttcctgcaggctctgtgaggctctgagtctgtctgcagcttgctggctgcttttgggcacttcattaacttctctgaatcttctgtttcctggtcagtaacccaagagtgttgaacaatagtccctagggtcagttacwgctgataggtttagatattcacttccaagtcatccactgaagaagactaagtccctttggtgacacttgtaaggagacgcagtgtaaaccacaaatggtcagtgctggaaagacatggctatcgactgatgcagtcacatggctgacagatatgatggctgacgcccagaagagtaagggacatactgagggccacacagggtattcagcacactggggcctgaccaagaagagaggaggaaatggagaaatgagcaggccaatcagagggtcaaggctgagccctaaatactcctgagacgaaacgggagagatgtccaggcaggggcgaaagctggagctccagctggctt

SEQ ID NO: 459788 - DNA, 602 bp, Homo sapiens
catgctctggtttggtttaaattagatctcagaggacacagtttgtcctaaggagtaagtgtttctctcagagttcaagagatggagcttttctttctctgagcacttactacatgccaagcataggctaagcagtttacaagcattattttgttgaattcttacatccatttacaagtatcattatcctttcttacagagacaagaaagaaatgtctgaaaagtctaagctgccatggtgcaggaggagagggattaaagaagaggctggtatatatcttcctttatttatatctttattttctttcaatacattttgtagttctaggatagaagaattatacctcttctgttcaacttttccctgtgtcattcatataagtgtgatgcaaatgttataatcatttaaatgttatgctctatttgtttttgataygtagaaatctaattgacttttacatgtggacacagtatcaagtgactttgctaaagtcacttgtttattcttataattcgtttttgatattttaggtaaatcatatgttatctacgaataataaaaaggaatcattccttctcaaaaataaaaagaagaagaggct

SEQ ID NO: 459789 - DNA, 578 bp, Homo sapiens
tcactccctcaaaaaaaaaaaaaattcatgttcctcccagaacctcagaatgtgaccttatttggaagtatggttttgcagatgtaattagttaagactaagtcatactggagtaggttgggccctaaatccaatatgactggtgtcctgaagaacaccatgtgatgacagaggtagagggtgacatgtctacagggcaaagaatgccaaggatggtgtgttagtctgttctcgcattgctataaagaattacctgagactgggtaatttacaaagaaaagaggtttaattggctcacagttccacaggctgtataggaaacatggctggggaggcctcaggaaacttacaatcatggcagaaggtgaaggggaagcaggcatatcctacatggatggggcaggaggaagagagcgaagggagaggtgctgcacactattatagacaatcaggtctcatgagaactcactcattattatgagaacagcaagggggaaatccaccctcatgatccaatcrcctcccacaaggcccctcttccaacattggggattacaattcgacatgagatttggccg

SEQ ID NO: 459790 - DNA, 601 bp, Homo sapiens
caggttttatcaccatatatgatttttctaataggcaagaaaagcttaattttgttttcaaaaatatttcaaataaaacattgaaaattttttaattcgtatgtcatctgtagcagcctgatatccagttccactccctaggatcccctattttatatacttctacttatattatttataatgactttctgtaagttaagaaaataccattttatttatatttatttatcaatgttagagaacagattgacttccactgaattatcagggatacatgttcttacagccatcttcttctgcatctaatgtttttattttatcccacattaatccagaagagaaagtcaatatttggattgaaaaaatcctctatgcaaagcttctataaacaatgtataytcctgaagaaggctggagaggcttattttgaaacaaagcaaacaattttaatagtcacagaagacattctcatttttaaaagctccatcagctgcctgctgttaaagatggcaaacaaattctttgtcattatcctcattagaagacacagtttatttcctcttcttttgagtctggcctggcctcacactgcttagccaat

SEQ ID NO: 459791 - DNA, 601 bp, Homo sapiens
caggttttatcaccatatatgatttttctaataggcaagaaaagcttaattttgttttcaaaaatatttcaaataaaacattgaaaattttttaattcgtatgtcatctgtagcagcctgatatccagttccactccctaggatcccctattttatatacttctacttatattatttataatgactttctgtaagttaagaaaataccattttatttatatttatttatcaatgttagagaacagattgacttccactgaattatcagggatacatgttcttacagccatcttcttctgcatctaatgtttttattttatcccacattaatccagaagagaaagtcaatatttggattgaaaaaatcctctatgcaaagcttctataaacaatgtatattcctgaagaaggctggagaggyttattttgaaacaaagcaaacaattttaatagtcacagaagacattctcatttttaaaagctccatcagctgcctgctgttaaagatggcaaacaaattctttgtcattatcctcattagaagacacagtttatttcctcttcttttgagtctggcctggcctcacactgcttagccaat

SEQ ID NO: 459792 - DNA, 568 bp, Homo sapiens
cataacaaaggaattatttctttttgatgcagctgggaaaatgcagtgtagggcatccatttgcaaactgtgttctgcataactgtgttttgtagaggtatttcaaagattctgaaaacactgattcaaattttctttgaaaatatatttaaaagtcatcacatacactcaactatggtacacatcacttacgaacactagtgtacagcttgtgcttctagaacaagtttttttccagaccaggaataaaacttcttatgccacctccacgtatatattcaagtttcttcttagtaagttatggttttaaatgaytgtagctttatacaggtctttgaattcaagctgtgtgcttgactgcacaagtgtagaaatgagtgggtccctggagcttaatttcaagtgaccagacacctctgctcagggagagctcccaccctgtcctgtggctaaccaagtatggaatatcaatgggacagtattgcatataaaggatgacatttcctataaggtttgggtaccctatcattcaaaattcctcatgttgcaagtgacagaagcccaactc

SEQ ID NO: 459793 - DNA, 582 bp, Homo sapiens
aatgcagtgtagggcatccatttgcaaactgtgttctgcataactgtgttttgtagaggtatttcaaagattctgaaaacactgattcaaattttctttgaaaatatatttaaaagtcatcacatacactcaactatggtacacatcacttacgaacactagtgtacagcttgtgcttctagaacaagtttttttccagaccaggaataaaacttcttatgccacctccacgtatatattcaagtttcttcttagtaagttatggttttaaatgattgtagctttatacaggtctttgaattcaagctstgtgcttgactgcacaagtgtagaaatgagtgggtccctggagcttaatttcaagtgaccagacacctctgctcagggagagctcccaccctgtcctgtggctaaccaagtatggaatatcaatgggacagtattgcatataaaggatgacatttcctataaggtttgggtaccctatcattcaaaattcctcatgttgcaagtgacagaagcccaactcaatctagttgaagtgaaatggggattttcttgcctactccacagagtgtttct

SEQ ID NO: 459794 - DNA, 625 bp, Homo sapiens
taagcccaggatccttctgatgtctcagtttgtataaagtgagggcaagacattctctagggctaaccaggtcacattcataggcataaccctaaagccggcagcagctagaaagctccagataactgtaccagtgacagccacagaggcctacctaccttgaccacagtatcaacttcggaaagaatctggagggatggaaagtgctagtaacagaagaatcaaattaaaatgcacttctataataggtgtgaactgctcrgttcccaaggcatccttcccaatgcaagatgatgttgactttggggcgctaaccctccctatctgccaggaacctgagccaaggtttcctctggtccacactgcacttccccatctgaggccagggagtgtccagacagctaaaatagctgatcatgttcaatcggcccagttttgccagaaaccaattggaaagcacaatcatctagaagagtttgctagacagctcttttaaaaagagaaaagaaaaacgaagccacccaaatcctatgcagtgtctgatcctggcagggctcccgatctgcctcctaaatgccaggtttccctcctgctgctgcttccgctcttgcttggcaagggggaa

SEQ ID NO: 459795 - DNA, 569 bp, Homo sapiens
tttcattgacgcatagttccgcatggctggggaggcctcaggaaacttaaaatcatggcagaaggcacctcttcactgggtggcaggagagagaatgagtgccagcaggggaaatgccagatgcttataaaaccatcagatctcctgagactcactcattatcataagaacagcatggaggtaaccgcccccatgattaaattacctcccacagagtccctcctatgacacgtggagattatggaaactacaattcaagatatttgtgtggggacacagccaaatgctatcaaaaatgaacaatttttttccatatttgataaaaactataaacctataagaatctcaataaactgtaagcaggatgaacacagagaaggctgcaacaaggcatattataatcaaattactaaaaaaaaaaaaaaamacacacacacacagtgaaaatgagaaaatcttaaaatcaaccagctcccctgtaactgttctctcctgcaagtttttcttgcctagtcatgtagagttttatcctgcccagacacaggatcatagaaaaaaggcatgttaca

SEQ ID NO: 459796 - DNA, 413 bp, Homo sapiens
gaatattgatgcaaaaatcctcaataaaatactagcaagccaaattcaacaatatatgaaaaagatcattcatcctgaccaagtggaatatatctttgggatgcaaggatggttcaacaaatgcaaattaatcaatatgatgcrtaatgtcaccagaatgaaggacaaaaaccatataattatttcaatggatgctgaaaaagcatttgataaaattaacatcccttcatgataaaaaccctccaaaaactggggatagaaggaacatacctcaacataattaaagccatgtacaacagactcacagctagtatcacacttaatggggaaaagcagaaagcctttcccctaagatctgaagcataacaaggatgcccactttcatcactgttactcaacatagtactggaaat

SEQ ID NO: 459797 - DNA, 461 bp, Homo sapiens
acactggctccaaaaaagtctgaacccaacttttgaagagggatgcaccttccatgtctgcctctccttgggtaagctccctcagccctagagtacctttagagttctctttatatttttatagtctcctactatagcttaataattatttatttaaacctatctatttaaaataatgatgatgaagatgttgatgatgatgacyataataataatgatagttacaaaaggctttgagcatgataaatactaagttttaaaattatcctgagatacctattcatcataatatttgcagattcaaaatactgggacatcatgacctttgtagattcaaagaccaactctggtagtgaaagaacgtcatccttagattttgaaataaatagccttacattcatccctcttgggagatctgtgctgaatccccaaatgccaaaatttcctctgtatttcacaaa

SEQ ID NO: 459798 - DNA, 608 bp, Homo sapiens
agcaaccagcttataaacttcctaaggaagcaaatttcaaaagaaaccccaaacatcacgaatcacaagctgctttgttttcttattcatgaccttcatctaccttccctttcatcaagtaaatggaaatgtgtcattctgattaacggtgattgcttccttgtcatacatcaactaaaatgagatgtttcaccatcagatttaaggggacatgggcatatatttaagaggtatttttttaaaaggcattcttgattatccatatcacttaaaaaattcttgtcttcttcccacctcatccccttttcctgcagatctttaaaggtagakaaatgatatgacattcagtggtggttgattatagccttgttggtatagctgtattgtttacaaaattggtgcaataatggtgactcgtaacaggattataataagccagaaaataattctagctggcaagctctgcagtgattttcctacagaaatcacacctcaagctcctctttttaaggagttttaatgcaacttattatttcccttctcggaggcaacttatctatgtagaaagaaaaagacaaagaaaacaatctacatggatcgtgattgca

SEQ ID NO: 459799 - DNA, 592 bp, Homo sapiens
taaaaaatatttattgactacaccttatttcagacatggttgtggtgctgagtaaagcagtgcataaaaccaacacagcccccactggcataatcttgccttgagtttggaaagaaagacaacaaaccgataagcaaattcatgtatgtgatcatgtcagataacgatgtacactccaaataaagaaagaaagccggagtgaggtgaggtaagaccgggtccttggatcatttcttcttctacttatattcacatctttgatgatctcatccaatctcatgattttaaaaatcaattatacatagatgattccccaaattgaaatccagacttgcatatccattttcctattccaatgtctcttcttgcatgtctaataggcacctcaaacttggcatttccaaatcccaactccttaagcccacgccaaatctgctcagaccaccatcttcactcttggtaagtggccacctccatcatcccatttgmtcttcacacttgtgtgtcccacatatgatgcatcagtaaatcgtgttggttcttaaaaatatgcctaggctcctgacacttctactgctactgtgctaatctg

SEQ ID NO: 459800 - DNA, 612 bp, Homo sapiens
tgtgaagcatgtgcatcaggagaatagaacgtcttgttgcaaaagcttcaaagcaagttctgataccaccattatctgccatcagccagcatgggccctccttggcctgtccattttcagccatttgtgaaccaccccacagcaggtcttgtgtggccctctagctcttgatcgtctttgatctttcataagcttagtaatctaagtcctaagatgtttttttctcagatattagaatgtccctgggcattctagaatgttccaactcaccaggattctaaaatggccaggatacagatgaagtgaaaggggcgctcacccagcccccaaatttaaaggggtgccaaaaaactcggtaatcaagataacattttaaaacaatatatttttgattaatgcaaaaatagttcacaaggtacaaaatatcaaaatttgaaataaagacaaaataggtgagtgagtgagtgagtgagatcatattgtgcaagtgtagggttaaattctgccttcatttcaagttttgatattttgatcatcacagcaaagcttygaaaaacatgatgctcgggttgggaggggacattcagaatcactacagcaaaagggttcagc

SEQ ID NO: 459801 - DNA, 464 bp, Homo sapiens
acgatatttacaaactacccatctgacaagggattcataattagattttataagaagttcaaacaactctgtaggaaaaatatctaataatctgatttttaagtgggcgaaagatctaaatagacatttctcaattaaaaaaacttaccaatggcaaacaggtatatgaaaagatgctcaacattcttgatcatcagataaatgcaaatcaaaactacaatgagatatcatctcactccagttaaaatggcttttatccaaaagtccrgcaataacaaatgctggcaaggatatgaagaaaagggaacccttgtacattattgatgggaatataaattagtacaaccactatggggaatagtttggagttttctcaaaaaactaaaattagagctactatacaatccagcaatcccactcctaggtacatacccaaaaggaaggaaatctctatgttaaagaga

SEQ ID NO: 459802 - DNA, 464 bp, Homo sapiens
acgatatttacaaactacccatctgacaagggattcataattagattttataagaagttcaaacaactctgtaggaaaaatatctaataatctgatttttaagtgggcgaaagatctaaatagacatttctcaattaaaaaaacttaccaatggcaaacaggtatatgaaaagatgctcaacattcttgatcatcagataaatgcaaatcaaaactacaatgagatatcatctcactccagttaaaatggcttttatccaaaagtccagcaataacaaatgctggcaaggatatgaagaaaagggaacccttgtacattattgatgggratataaattagtacaaccactatggggaatagtttggagttttctcaaaaaactaaaattagagctactatacaatccagcaatcccactcctaggtacatacccaaaaggaaggaaatctctatgttaaagaga

SEQ ID NO: 459803 - DNA, 392 bp, Homo sapiens
cctacttcctaatcctatgacattggtgattaattttagggggacacattcagagcatagcaccctatattcaatttcttaaaaattattttgttgttttgcttttctgtttttcaaatggcttaaagtgcacaaaattggattaatcataatccttggctcatagcataccttggctccatttcatccttgtctgtgcctgggcctctgtgtaaatgtatttgaacaacatggtaattacttgtgaacttacaacacaaccaaagaactagggttctgaccctaacatctcctcytctgtcctttttcccgattttcacccttcagcccgagggtaactactaccctgaatttatgtttaggattctcttcctttaaaaaaaaaattgttt

SEQ ID NO: 459804 - DNA, 534 bp, Homo sapiens
ttggaaattttacaatagattttgtaataactgatgaagaagaactcatccataattaaaatgaagattaaaaattattttaatatttgtggcatgcagctgaagttgcacaatggaaaaggttatagccataaatgtacatatatgaagcatttgactcaataaggaaaaaaaaaataacacaaatataaagaaaatggaagaaaagaaattataggccaggcgtggtggctcacgcctgtaatcccagcactttgggagtctgaggtgggaggatcacttgagcccagggagagcctgtctctacagaagaaaaaaaaaattagctgggtgtagtagcacgcacctgtagtcccagctacttgagaggctgaggcaggaggattgcttgagcccaggtggttgaggctgcagtgarctgtgattgcaccactgtactctagaatgggctacagagtgagaccttgtcaaaaaaaaaaaaaaaaagaaaagaaagaagaaaaaaagaaattataagtgcatacagaaatgaat

SEQ ID NO: 459805 - DNA, 534 bp, Homo sapiens
ttggaaattttacaatagattttgtaataactgatgaagaagaactcatccataattaaaatgaagattaaaaattattttaatatttgtggcatgcagctgaagttgcacaatggaaaaggttatagccataaatgtacatatatgaagcatttgactcaataaggaaaaaaaaaataacacaaatataaagaaaatggaagaaaagaaattataggccaggcgtggtggctcacgcctgtaatcccagcactttgggagtctgaggtgggaggatcacttgagcccagggagagcctgtctctacagaagaaaaaaaaaattagctgggtgtagtagcacgcacctgtagtcccagctacttgagaggctgaggcaggaggattgcttgagcccaggtggttgaggctgcagtgagctgtgattgcaccactgtactctagaatgggctacagagtgagaccttgtcaaaaaaaaaaaaaaaaagaaaagaaagargaaaaaaagaaattataagtgcatacagaaatgaat

SEQ ID NO: 459806 - DNA, 455 bp, Homo sapiens
actataaatggcatcttttttttttttttttccaattcttgttaatgtgggttttggcattgtctgatgaccctaacttttcatctttttaccatggtaatctgccagttgactctttattttcaaatcatctagttcatttccttttctatgcgttttctcctctgactcaaagatcaagtgctttcagctgtctagtatatttattcattactacaactgcattattttcctaaaccgcagcttctttctgagacttgagatcttatctgatttgctcactgcctcagtaggtaggggctggggcaggagcagttaggggcagaaagagaccacagccttctatttactgcagcctccccatkcccctccaaacaatctgtactgccacctctttctcttcttttaactcctatcttccatctctttcttcacctcaatgcttacatctctga

SEQ ID NO: 459807 - DNA, 455 bp, Homo sapiens
actataaatggcatcttttttttttttttttccaattcttgttaatgtgggttttggcattgtctgatgaccctaacttttcatctttttaccatggtaatctgccagttgactctttattttcaaatcatctagttcatttccttttctatgcgttttctcctctgactcaaagatcaagtgctttcagctgtctagtatatttattcattactacaactgcattattttcctaaaccgcagcttctttctgagacttgagatcttatctgatttgctcactgcctcagtaggtaggggctggggcaggagcagttaggggcagaaagagaccacagccttctatttactgcagcctccccattcccctccaaacaatctgtactgccacctctttctcttcttytaactcctatcttccatctctttcttcacctcaatgcttacatctctga

SEQ ID NO: 459808 - DNA, 536 bp, Homo sapiens
tatggttcaaaagcactatgttaagtaaaagaagccaggctcaaaaggctataatattacataattccacttatatggaatcttagaaaaggcaaaagttagggacagaagataggtcagtggttactatgggctggggagttgactgcataggtgaaatataaggaaattttgaagggtaatgaaaatattctatatcttacttgtggcagtagtcacaggactatgtgcrtagaaatgtatgccaaaagagtttaattttaccacatgtaaattatacttcagtaagcctgatacatatgaagtatgtgtgtgagcatataaactacacatgcctacatgacacttttgaggtacatgcttccttttttgtctgaatgcatgcaattgaactataactgcccaaaggaaactgcttagtgataggataaacacaattctgcttatacccagctactatcgtcctgctgtttgctgttctccagtgatgcttagctgcccaaaaacaaacatggtgaagccagttagctgggttc

SEQ ID NO: 459809 - DNA, 536 bp, Homo sapiens
tatggttcaaaagcactatgttaagtaaaagaagccaggctcaaaaggctataatattacataattccacttatatggaatcttagaaaaggcaaaagttagggacagaagataggtcagtggttactatgggctggggagttgactgcataggtgaaatataaggaaattttgaagggtaatgaaaatattctatatcttacttgtggcagtagtcacaggactatgtgcatagaaatgtatgccaaaagagtttaattttaccacatgtaaattatacttcagtaagcctgatacatatgaagtatgtgtgtgagcatataaactacacatgcmtacatgacacttttgaggtacatgcttccttttttgtctgaatgcatgcaattgaactataactgcccaaaggaaactgcttagtgataggataaacacaattctgcttatacccagctactatcgtcctgctgtttgctgttctccagtgatgcttagctgcccaaaaacaaacatggtgaagccagttagctgggttc

SEQ ID NO: 459810 - DNA, 536 bp, Homo sapiens
tatggttcaaaagcactatgttaagtaaaagaagccaggctcaaaaggctataatattacataattccacttatatggaatcttagaaaaggcaaaagttagggacagaagataggtcagtggttactatgggctggggagttgactgcataggtgaaatataaggaaattttgaagggtaatgaaaatattctatatcttacttgtggcagtagtcacaggactatgtgcatagaaatgtatgccaaaagagtttaattttaccacatgtaaattatacttcagtaagcctgatacatatgaagtatgtgtgtgagcatataaactacacatgcctacatgacacttttgaggtacatgcttccttttttgtctgaatgcatgcaattgaactataactgcccaaaggaaactgcttagtgataggataaacacaattctgcttatacccagctactatcgtcctgctgtktgctgttctccagtgatgcttagctgcccaaaaacaaacatggtgaagccagttagctgggttc

SEQ ID NO: 459811 - DNA, 524 bp, Homo sapiens
ggcttttaactttcatctcaacacagcttagctatattccttatgatttgttgtgttttcattttctctgaatattataattttggtttgtatttcctctttaacaaaaaaaaaasttgcttaaagagaagtgatggtgatggtgatgtttctaatacccaggggaaaagatccttttgagtttcattgttattattaatttcttctttgtttccttcttttttttttcattgtggaatttattaaggttttatttgagggctaatatatggtcattttctcaaatctaccattgtcacttatattcacagggataatagattcataaatgtccatcacatctatcttactacttttgttattaagacttctacctctttgcttttttgcctagtactactgtattttgatctttattttctttcatatcctgtaatttctgtataataaatgttggtgttgtgttatttgtgcacagatattcattacctttgtatcaattgcatactagcattatataaaga

SEQ ID NO: 459812 - DNA, 530 bp, Homo sapiens
tttgcccttcttcccacccttcctcctttctttttatcatcttttctgaaaaaagcaatcgggatgtggcataatcatgtcatgaaagccacaggtggccctcaattctgggcagtcctctggaaaggaaagaaaatgcaagtggtaagttgacatgctgcagcccacttgccccttcatatctgcatggyatcacaggaagtcagacatgcaaacgggtatagagtttgcagaatgaagggtagatgcaggtcaatattttgaaagcagaataggtcttcaattctttcactcagctccctcacaaccttgagcaagggtctgttcttcccttggtataaagaactcaacatgggaagaacaggagacaagctttgaccttgactgtgcacccaggacttgaaccctatgtgagaataacacactggcttcagatatcaaaactccaaaggaaaataatgatcagtctccagatctattatatgaattaaggaatgggatgtttaatatatacttaagaaagaaatttc

SEQ ID NO: 459813 - DNA, 530 bp, Homo sapiens
tttgcccttcttcccacccttcctcctttctttttatcatcttttctgaaaaaagcaatcgggatgtggcataatcatgtcatgaaagccacaggtggccctcaattctgggcagtcctctggaaaggaaagaaaatgcaagtggtaagttgacatgctgcagcccacttgccccttcatatctgcatggcatcacaggaagtcagacatgcaaacgggtatagagtttgcagaatgaagggtagatgcaggtcaatattttgaaagcagaataggtcttcaattctttcactcrgctccctcacaaccttgagcaagggtctgttcttcccttggtataaagaactcaacatgggaagaacaggagacaagctttgaccttgactgtgcacccaggacttgaaccctatgtgagaataacacactggcttcagatatcaaaactccaaaggaaaataatgatcagtctccagatctattatatgaattaaggaatgggatgtttaatatatacttaagaaagaaatttc

SEQ ID NO: 459814 - DNA, 530 bp, Homo sapiens
tttgcccttcttcccacccttcctcctttctttttatcatcttttctgaaaaaagcaatcgggatgtggcataatcatgtcatgaaagccacaggtggccctcaattctgggcagtcctctggaaaggaaagaaaatgcaagtggtaagttgacatgctgcagcccacttgccccttcatatctgcatggcatcacaggaagtcagacatgcaaacgggtatagagtttgcagaatgaagggtagatgcaggtcaatattttgaaagcagaataggtcttcaattctttcactcagctccctcacaaccttgagcaagggtctgttcttcccttggtataaagaactcaacatgggaagaacaggagacaagctttgaccttgactgtgcacccaggacytgaaccctatgtgagaataacacactggcttcagatatcaaaactccaaaggaaaataatgatcagtctccagatctattatatgaattaaggaatgggatgtttaatatatacttaagaaagaaatttc

SEQ ID NO: 459815 - DNA, 562 bp, Homo sapiens
gtaatgcatactagggcctagttaacatgaccataacttatttataagaatctagtgagttagttgaatcaacctgaacacagaaacttttgattgattggtaagttagcatccyggtactggaagaagagatagactaagagatctgccagagaagtagagttgcatgatgcttaatggttggagtgtggcagagagggctctttcatttattttgggcaagtttccaaacttcctttagtctcagtttcctcctcttgaaaatgagaataatcatagttaaattctttacacatttcggggggattcaatggctggtatatgaaaggtgtttagaattccgattgtcattgtaagtgctcaatgaacataagctattgctactactttaacaaacattaataaaaagagtagcatcgacttccaggaaattactaattcttcgtagtgcaacattgttaggacaatgttattccccccttgcaatgagagaatgaatactgttctcatgaggagagccatacatggaaagccatgctctcagagacctggcaacagtttt

SEQ ID NO: 459816 - DNA, 522 bp, Homo sapiens
cctggcaacagtttttgttggaaacttatctaatagtactcgtatttcacttttactcattaaggagacagttgtggatgaggaaaagagtagcaaagaagaaaacgtttatctgatgagttttttccatgtcttggccaactccctcgccatctrctctttatgtggaattgctttgttttcttggcggtgatgggatcccaggaaggtttcacacaacagagtatcagctgatatggaggtaatggaggataaagactgaatatccttttctgaagatgaatgctatgtgcaaacatagaaattacaccaattctgcaatagaaaccaaattagaaaaagcctggataatcctatatcctaaaataattgggtaaaatttttgaaaatgcattaagaaatagataaggctgacataattagcataattttttctataaaatacttagtttaagaatgctgaaggggagttattctgtagagtaggttaaacggcttccctttaatctcatttacactatt

SEQ ID NO: 459817 - DNA, 522 bp, Homo sapiens
cctggcaacagtttttgttggaaacttatctaatagtactcgtatttcacttttactcattaaggagacagttgtggatgaggaaaagagtagcaaagaagaaaacgtttatctgatgagttttttccatgtcttggccaactccctcgccatctactctttatgtggaattgctttgttttcttggcggtgatgggatcccaggaaggtttcacacaacagagtatcagctgatatggaggtaatggaggataaagactgaatatccttttctgaagatgaatgctatgtgcaaacatagaaattacaccaattctgcaatagaaaccaaattagaaaaagcctggataatcctatatcctaaaakaattgggtaaaatttttgaaaatgcattaagaaatagataaggctgacataattagcataattttttctataaaatacttagtttaagaatgctgaaggggagttattctgtagagtaggttaaacggcttccctttaatctcatttacactatt

SEQ ID NO: 459818 - DNA, 608 bp, Homo sapiens
gagtggcctgcacagttattataagaagtcactcttggagcacacatgatgggatctaatcccaggggcccagtccagccccgcagatttccaggttgtggaaagcagcttaacccctatccacaagactctctggcctcccaacccttccatgtcctggcccccaattatttttttttcctttttgagacagagtcccagttttcttttcgagacagtcacccaggctcgagtgcartggcacgaatatgtcttcatactgccttgacctcccaggcttaaatgatcctcaagcctcagcctcctaagtagctggaactgtaggcacgcaccaccacgcttggttaatatttgtattttttgtggagatggggtccccccatgttgcccaggctggtcttaaactcctgagctcaagtgatctgcctgcctcagcctcccaaagtgctaggattacaggcataagccaccatgcctggccagtggcgcccaattttttggctgagtgagagaagggggccctcatttttcactccaggatggtccatcatgggaatatccttcgagtagtcttttaagtagaaaacactttatcaaactacagagtg

SEQ ID NO: 459819 - DNA, 608 bp, Homo sapiens
gagtggcctgcacagttattataagaagtcactcttggagcacacatgatgggatctaatcccaggggcccagtccagccccgcagatttccaggttgtggaaagcagcttaacccctatccacaagactctctggcctcccaacccttccatgtcctggcccccaattatttttttttcctttttgagacagagtcccagttttcttttcgagacagtcacccaggctcgagtgcagtggcacgaatatgtcttcatactgccttgacctcccaggcttaaatgatcctcaagcctcagcctcctaagtagctggaactgtaggcacgcaccaccacgcttggttaatwtttgtattttttgtggagatggggtccccccatgttgcccaggctggtcttaaactcctgagctcaagtgatctgcctgcctcagcctcccaaagtgctaggattacaggcataagccaccatgcctggccagtggcgcccaattttttggctgagtgagagaagggggccctcatttttcactccaggatggtccatcatgggaatatccttcgagtagtcttttaagtagaaaacactttatcaaactacagagtg

SEQ ID NO: 459820 - DNA, 608 bp, Homo sapiens
gagtggcctgcacagttattataagaagtcactcttggagcacacatgatgggatctaatcccaggggcccagtccagccccgcagatttccaggttgtggaaagcagcttaacccctatccacaagactctctggcctcccaacccttccatgtcctggcccccaattatttttttttcctttttgagacagagtcccagttttcttttcgagacagtcacccaggctcgagtgcagtggcacgaatatgtcttcatactgccttgacctcccaggcttaaatgatcctcaagcctcagcctcctaagtagctggaactgtaggcacgcaccaccacgcttggttaatatttgtattttttgtggagatggggtccccccatgttgcccaggctggtcttaaactcctgagctcaagtgatctgcctgcctcagcctcccaaagtgctaggattacaggcatragccaccatgcctggccagtggcgcccaattttttggctgagtgagagaagggggccctcatttttcactccaggatggtccatcatgggaatatccttcgagtagtcttttaagtagaaaacactttatcaaactacagagtg

SEQ ID NO: 459821 - DNA, 193 bp, Homo sapiens
ttgtatatagaaaattttaaggaatccactgaacgatagaactagtaaattatttcagcaatattacagcatacaagataaatrtacaaaaatcagttgcacacatctacaatgaaaaccccaaaatgaaattaagaaaacaatttacaatagcatcaaaaaaagaaataataattaatttggaaaatgtggt

SEQ ID NO: 459822 - DNA, 193 bp, Homo sapiens
ttgtatatagaaaattttaaggaatccactgaacgatagaactagtaaattatttcagcaatattacagcatacaagataaatatacaaaaatcarttgcacacatctacaatgaaaaccccaaaatgaaattaagaaaacaatttacaatagcatcaaaaaaagaaataataattaatttggaaaatgtggt

SEQ ID NO: 459823 - DNA, 302 bp, Homo sapiens
aattgcaatacatcatgctttataatgtgactgtcaaaaggaaaatatgattgtaatcttatactacatctatcaatgtctttgattcataagamtatagagtaagcccctagttttcaaagtcaacttatgaggcagcaacatcttatgcaagtttgctgctttctgccacagtggccattggtcagctggcacaaattgttttacaaacaccactaggtctaaaaatagtttggatcacaatgaacacagaaacaccttcatcccttcagaaatacctatcaattacttccaatacagaa

SEQ ID NO: 459824 - DNA, 302 bp, Homo sapiens
aattgcaatacatcatgctttataatgtgactgtcaaaaggaaaatatgattgtaatcttatactacatctatcaatgtctttgattcataagaatatagagtaagcccctagttttcaaagtcaacttatgaggcagcaacatcttatgcaagtttgctgctttctgccacagtggycattggtcagctggcacaaattgttttacaaacaccactaggtctaaaaatagtttggatcacaatgaacacagaaacaccttcatcccttcagaaatacctatcaattacttccaatacagaa

SEQ ID NO: 459825 - DNA, 302 bp, Homo sapiens
aattgcaatacatcatgctttataatgtgactgtcaaaaggaaaatatgattgtaatcttatactacatctatcaatgtctttgattcataagaatatagagtaagcccctagttttcaaagtcaacttatgaggcagcaacatcttatgcaagtttgctgctttctgccacagtggccmttggtcagctggcacaaattgttttacaaacaccactaggtctaaaaatagtttggatcacaatgaacacagaaacaccttcatcccttcagaaatacctatcaattacttccaatacagaa

SEQ ID NO: 459826 - DNA, 312 bp, Homo sapiens
tatttgacaatttcaaacatgacagaactgcagaacacagacatcaagactcccctgtaattccatttggagtctaaagcttagattttgtttsgtttaagcagtggcaaacattatgtatagatatagatgtgggatcataaaatgtgtttaaaagttattgatgtgggacaactttgcatatcaatatacaagcatttattttatttgttttaatagctgcgaaatatcccattgtatgaagagactaaaatctgtccttctattgtggatatttggaatgatgaaccattggaacaaaacagagagggc

SEQ ID NO: 459827 - DNA, 312 bp, Homo sapiens
tatttgacaatttcaaacatgacagaactgcagaacacagacatcaagactcccctgtaattccatttggagtctaaagcttagattttgtttggtttaagcagtggcaaacattatgtatagatatagatgtgggatcataaaatgtgtttaaaagttattgatgtgggacaactttgcatatcaatatacaagcatttattttatttgttttaatagctgcgaaatatcccaytgtatgaagagactaaaatctgtccttctattgtggatatttggaatgatgaaccattggaacaaaacagagagggc

SEQ ID NO: 459828 - DNA, 312 bp, Homo sapiens
tatttgacaatttcaaacatgacagaactgcagaacacagacatcaagactcccctgtaattccatttggagtctaaagcttagattttgtttggtttaagcagtggcaaacattatgtatagatatagatgtgggatcataaaatgtgtttaaaagttattgatgtgggacaactttgcatatcaatatacaagcatttattttatttgttttaatagctgcgaaatatcccattgtatgaagagactaaaatctgtccttctattgtggatatttgraatgatgaaccattggaacaaaacagagagggc

SEQ ID NO: 459829 - DNA, 312 bp, Homo sapiens
tatttgacaatttcaaacatgacagaactgcagaacacagacatcaagactcccctgtaattccatttggagtctaaagcttagattttgtttggtttaagcagtggcaaacattatgtatagatatagatgtgggatcataaaatgtgtttaaaagttattgatgtgggacaactttgcatatcaatatacaagcatttattttatttgttttaatagctgcgaaatatcccattgtatgaagagactaaaatctgtccttctattgtggatatttggawtgatgaaccattggaacaaaacagagagggc

SEQ ID NO: 459830 - DNA, 589 bp, Homo sapiens
aaattctgtgtcctatggagtacattcttaggtcactgaagggaacacttttccattctgttccttwaagtgggaacaaagaaagaggcttgggataggtaatttattatgactatcttcaccctttctctagtgttaggtatgtcgcagtgatgtcatcctctggactgtgaatgacaaattgatgatgtcactgaggccccatctcccctgtataaacagtgtggtacggattataacagacaattaatctcaccggtcactcataaattgtgccaattcttttttatcttctctgggcctcagtttcttcatctgtaaaataaggataaatgtaatctatctcctaggattattaccagggttaaatagatgaataaatgtcatgaacttggaagagtgcctgacttacagtgagctctccatcagtagtactattattagctattatttataacttatgcttctcaatgggtatgatttaggaaatagcaaaataatatattttgggttttgtaattcttaatttcaaatggactggcagcttatataccaagaatcataccagacaactcataccattgagttt

SEQ ID NO: 459831 - DNA, 589 bp, Homo sapiens
aaattctgtgtcctatggagtacattcttaggtcactgaagggaacacttttccattctgttcctttaagtgggaacaaagaaagaggcttgggataggtaatttattatgactatcttcaccctttctctagtgttaggtatgtcgcagtgatgtcatcctctggactgtgaatgacaaattgatgatgtcactgaggccccatctcccctgtataaacagtgtggtacggattataacagacaattaatctcaccggtcactcataaattgtgccaattcttttttatcttctctgggcctcagtttcttcatctgtaaaataaggataaatgtaatctatctcctaggattattaccagggttaaatagatgaataaatgtyatgaacttggaagagtgcctgacttacagtgagctctccatcagtagtactattattagctattatttataacttatgcttctcaatgggtatgatttaggaaatagcaaaataatatattttgggttttgtaattcttaatttcaaatggactggcagcttatataccaagaatcataccagacaactcataccattgagttt

SEQ ID NO: 459832 - DNA, 589 bp, Homo sapiens
aaattctgtgtcctatggagtacattcttaggtcactgaagggaacacttttccattctgttcctttaagtgggaacaaagaaagaggcttgggataggtaatttattatgactatcttcaccctttctctagtgttaggtatgtcgcagtgatgtcatcctctggactgtgaatgacaaattgatgatgtcactgaggccccatctcccctgtataaacagtgtggtacggattataacagacaattaatctcaccggtcactcataaattgtgccaattcttttttatcttctctgggcctcagtttcttcatctgtaaaataaggataaatgtaatctatctcctaggattattaccagggttaaatagatgaataaatgtcatgaacttggaagagtgcctgacttacagtgagctctccatcagtagtactattattagctattatttataacttatgcttctcaatgggtatgatttaggaaatagcaaaataatatattttgggttttgtaattcttaatttcaaatggactggcagcttayataccaagaatcataccagacaactcataccattgagttt

SEQ ID NO: 459833 - DNA, 529 bp, Homo sapiens
ttctatggaaataaaacaacttgctcctgaatgactttgggtgtacaatgaaattaaggcagaaattgagaaattctttgaaactaatgagaacaaagatacaagatatcagaatccctgggacacagttaaggtagtgttaagaggaaagtttatagcactaaatgtccacatcaaaaagttagaaagatctcaaattaataacataacatcacaactaaaagaactacaaaagcaagagcaaaccaactaccggaagacaataaataacaaaaattagagctaaagtgaaggaaattgagacatgaaaaaaccacacagaagaccaacaaatccagcagcrtgttttttgaaaaaaataataagatatatggaccactggctaggataatacagaaaaaaagagagaagagccaaataaacacaattagaaatgataaaggggatgttaccactcacctcacataaatacaaaaaaaaaaatcaaagactatgatgaatacctctacatacataaactagaaagttt

SEQ ID NO: 459834 - DNA, 621 bp, Homo sapiens
atgaagcagagccggggcatgctgctgctctacagcctgaagaaccccagcttccctgagtacatgttcagcagcaacagcggcgtcatgtgtctcgacatccacgtggaccacccctacctggtggcagtaggccactatgacggcaacgtggccatttacaacctcaagaagccccactcccagccctccttctgcagctcagccaagtctggcaagcactcagaccctgtgtggcaggtcagcaaccaggctgggaggggtggggatgggagcagcatgtgggcctggagccactggagagggagggagcttggggaggagaggaccacaggcaaggagatgaggatggcaggtaccatcaggtcaggatctgggtgtcagaaaagggcagaaggtgaaaatcaggaggcaagagggtctccagtgagagctggggtctgctgcyccagagcttccctcaggagggcccccacctgtttgctaaagatctcttagatgtggcgatcagtaactcagaagacatagctggaaggctccagggcctgacaggctccagctgagtacagtgggcccttagacaatgtgggaatgagggacactgacccccacacagtcaaa

SEQ ID NO: 459835 - DNA, 621 bp, Homo sapiens
atgaagcagagccggggcatgctgctgctctacagcctgaagaaccccagcttccctgagtacatgttcagcagcaacagcggcgtcatgtgtctcgacatccacgtggaccacccctacctggtggcagtaggccactatgacggcaacgtggccatttacaacctcaagaagccccactcccagccctccttctgcagctcagccaagtctggcaagcactcagaccctgtgtggcaggtcagcaaccaggctgggaggggtggggatgggagcagcatgtgggcctggagccactggagagggagggagcttggggaggagaggaccacaggcaaggagatgaggatggcaggtaccatcaggtcaggatctgggtgtcagaaaagggcagaaggtgaaaatcaggaggcaagagggtctccagtgagagctggggtctgctgctccagagcttccctcaggagggcccccacctgtttgctaaagatctcttagatgtggcgatcagtaactcagaagacatagctggaaggctccagggcctgacaggctccagctgagtayagtgggcccttagacaatgtgggaatgagggacactgacccccacacagtcaaa

SEQ ID NO: 459836 - DNA, 520 bp, Homo sapiens
gggagcccctatgttctggactctagaacccttacctggcctcctgggaaggagcccacctgctctgggaagggcactgaggagcatgtgtgacagctatggctgcagttcaccccccacattcagaggcaagatcccaacctccaggagaaagcrtcatttcaccttttgttctccaggcttcactgtggcctctccatccatctcagtccagaaacaagatccaggtggacttttcttctccttatgagatgcaggtgtttggacgacttctagttgctctcctttaaacctggagactgagaagtcaaggtggtattttggaaagcagctggagctagcaacggaaggtcggggtgcaaggcgtagctctgccactcacctcaagtcacttctctttggattttattatttataagaggaagccagtcctaatcccttgtcattcttactgtcacttattcctgaagaacttttccaggagtggtaacagtagcttcaaaaaagaaaacactgatcc

SEQ ID NO: 459837 - DNA, 520 bp, Homo sapiens
gggagcccctatgttctggactctagaacccttacctggcctcctgggaaggagcccacctgctctgggaagggcactgaggagcatgtgtgacagctatggctgcagttcaccccccacattcagaggcaagatcccaacctccaggagaaagcatcatttcaccttttgttctccaggcttcactgtggcctctccatccatctcagtccagaaacaagatccaggtggacttttcttctccttatgagatgcaggtgtttggacgacttctagttgctctyctttaaacctggagactgagaagtcaaggtggtattttggaaagcagctggagctagcaacggaaggtcggggtgcaaggcgtagctctgccactcacctcaagtcacttctctttggattttattatttataagaggaagccagtcctaatcccttgtcattcttactgtcacttattcctgaagaacttttccaggagtggtaacagtagcttcaaaaaagaaaacactgatcc

SEQ ID NO: 459838 - DNA, 542 bp, Homo sapiens
taactctgtgggtcaggccttcttggctgccaatccaaccccattgctcattgtaataacttcatccacctggcttctgcagttaagtgccaccacctggcttctttagctctgggcctatcatcaccattggtgtcattgagtcaaattctctacctggttgggtgcagtggctcgcgcctgtaatcccagcactttggtaggccgagaggggcggattgcctgaggttaggagttcgagaccggtctggccaacgtggtaaaaccccatctctactaaaaatacaaaaaaaaattagccaggcatggtggcgtgcacctataatcccagctacttaggaggctgaggcaggggaatcgcttgaaccaaagaggtggaggttgcagtgagctgagattgcaccactgcactccagcctgggygacagagcaagactctgtctcaaaaaaaaaaaaaaaaaaattctctacctacctttctaatcatcaatcctggcttaccaaggagattcccaactgatcttttcagtcatgctattgtc

SEQ ID NO: 459839 - DNA, 544 bp, Homo sapiens
aataaggtcatgttcttctcttcctctgctcctattccagctatttcccccatagccactgcttccttctaatccagggtttcttaccctcagcactattgaccttaggtcatatagttctttgtgatgaggggctgtcctgtggcccataggatgtttagcagcattcccagcccattccactagataccaatagcacctcccagttatgacaaccaaaaatatctccagacattgcccagtacagaygggcatgaagtatgaagtatgaagtatgaagtatgaagtcaccttatttagatcccctaaaccagtccttcctcccttcatctggagctcttgtttattaaacatttaccatggagaagacactgaattaaatctttcatgcgttttatgctgatggttctcaaaatttaatgaacataagcatcaccttggaaggttcttaaactacatattctaattcagtcattttttcggggaagggcttgagattctactttacttttatttatttttttcgagacagggtcttgctctg

SEQ ID NO: 459840 - DNA, 491 bp, Homo sapiens
atcatttattaatagagcactggctacaaaacctgtcccatccagctgctctgctccacccttactagtcttatggagtttcccctcaccctgtccttgtcgggcagtttgcctgttctccttttgcagtgagtgagtacctctcccaatatatccaaaccaattcccagagacagctgtacagagataggtgcaaactaccattttaaaatggatttcattataaaagtaataatatcatttcacagttgtatattcaaaaatacacaaaaaccaaagaagtaaatttaaatgtacccataaccccaccacatcaagacacacagttttaatatctcaaggtttatgtctcacacatattttcccactaaattaraccaatctgtaagtactgtttttcaacccatgttttttcatttcccaatatatcaaagcttatttactgatgttattaaccttctttaatatcacttttagtggttacaaagcat

SEQ ID NO: 459841 - DNA, 595 bp, Homo sapiens
gtctctgcccctccagtcccctccttatctcctaggaggatctggacccctatgaaccagatgtctggctcactagggatctctcctgttttccccccagtgttctgcccctccatacctgccccttttaagagactcctcccaagcagaagaggagctccttggggctccatacttgccagctctatagggatggaaagctgactcacccaacccagcccaaacttgactttggcactggaagcaattattaccagaggcyaagaggacatctgccctggcatccaaagcccaagcctccagatctcaaatagatcacgttttcttctaggacattttacctagtgttgggagggttggaaagatgaaagaaaatataggatggcattataaggaaaatatggatttagaatcagacaaactttattctaattctggctctcctccaactctctgtttgatcttggaactgtcttttcatcttaattcttttagaatttcattttaacatagcagactcacttctggcctgccatctccagtggagtatttcccacaaacagccacatcaaaatccttgggactttcagaggga

SEQ ID NO: 459842 - DNA, 595 bp, Homo sapiens
gtctctgcccctccagtcccctccttatctcctaggaggatctggacccctatgaaccagatgtctggctcactagggatctctcctgttttccccccagtgttctgcccctccatacctgccccttttaagagactcctcccaagcagaagaggagctccttggggctccatacttgccagctctatagggatggaaagctgactcacccaacccagcccaaacttgactttggcactggaagcaattattaccagaggccaagaggacatcygccctggcatccaaagcccaagcctccagatctcaaatagatcacgttttcttctaggacattttacctagtgttgggagggttggaaagatgaaagaaaatataggatggcattataaggaaaatatggatttagaatcagacaaactttattctaattctggctctcctccaactctctgtttgatcttggaactgtcttttcatcttaattcttttagaatttcattttaacatagcagactcacttctggcctgccatctccagtggagtatttcccacaaacagccacatcaaaatccttgggactttcagaggga

SEQ ID NO: 459843 - DNA, 593 bp, Homo sapiens
gggtaggtttcctgggcctgtgcagtcacacaggaccccatactcagaaggtacttggcttaatgctctgctgttgccatgttgaaattcttaataacttttgaacaagaagtcctgcattttcattttgctctggcacccacaaactgcttaactgttcctggcaataggattatattaggccatttttacggtgctataaagaaatacctgagactgggtaatttataaagaaaagaagtgtaattttgctcacggttctgcaggctgtacaggaagcatggtgccggtatctgcttgacttctggtgaggctttagggagcgtttgcttacaggggaggcaaaacgggagcagcacagcacatggcgcaagagggaacaagagaaggggtggggggaggccccagatctcatgtgaactgagaaataactcatttagcaccaaggggatggtactaaaccattcatgackgatcctcccccacaacccaatcacctcccaccaggccccaccctcaacattgggaatcacatttcaacatgagatttggaggggacgaacatccaaaccaaatcaaggatattaaactga

SEQ ID NO: 459844 - DNA, 532 bp, Homo sapiens
atctggcaaaggtcactcggcaattagaggcagaatcaggaacaaaacaaaggtgttccacagtgacttatgctgagtcccagagtcaggaaagtccagtgagaagctgttcttctgctggtatattttcttgtatgattactttaaaagaagcagggagggttgagcagatgaagtgttgtaagtttggaaagtataatcactgctgttatcatcattattattgatttgggcaatggactctcttggcctgtccctcctcccccagggctgagaaatagtactattttagggccactgggttccagatggggaaaccacagtgcgagaggggaagcaagtgagtccaatcacaccaccggcgtgtggctgagcccaraataggacgtaggatttttgactccctgcctcttcccagggctctacttctcattttcccctttctgtaaactggatcagtaggatcagtgggctccaggtatgtggggtgtgtgtgtgtgtatgtgtatgtgtgtgtgtctgacatgggtca

SEQ ID NO: 459845 - DNA, 571 bp, Homo sapiens
gtgcctgtggctggtgtctagaacctgggacttccctttgccccagcagggtctgtctgtaccccctccaatgcccacatggacagggatgggacgaggaagaggaggggtgcaaagtgtctataggagagttttgggaagagaccgctyaggcaggcctcaactagaacccgagagcatggagggctgaccttgggcatacacgtggccccggagtggtcactgtctctaaccagaggtcacccaggagtgcagcttgctagtggggctggggtgtagcctgcaatgatacaggagaaattggtgaactcccccaaaggaaaaaaaggaaggaggggatgaaaccagataactcatcccccaggccatgtaggaaggagccaggaagctctttttctatcatgtcatgctgtcgcatatcaaatattgttatgaatttctgtactatggagaaaataaagtgcagtggttaacagcagggactctggcatgtcagtgtctgggttgaaatcccaactttgcaacttactcgctgtgcgactcagcttcctcctgtgtgaaacggggagac

SEQ ID NO: 459846 - DNA, 380 bp, Homo sapiens
ccctgcctgggtccccagaggccaggtagaacccacctcacagggaccagcaggccctsgcccaaggccccaagctaaagccccctgccttggcatgtttaaaaccttgagtgatgaggagtctcagcttcaaaaaatgtgggggaagataagaaaaactgcagggcccatggtggagaccaaaaattcttcctcctggtgaaaacaggctgaggtgtaaataactcagagggttgcaccgctcaggggatttgccttttgagaaatcactccagccaaaagcaatgcttaacgctgcaggctataaaccccactgggacagggactgtgaattcatctcagggtccccagtgcctggcaagcacctgttacctagaaag

SEQ ID NO: 459847 - DNA, 496 bp, Homo sapiens
gatattttattttaagtgggaaccattgcaaggtcttagcaggaaagcaacaggatctgatttaagtttctcaaagtgtactctggctgctgtgtggagaatggattgcagaggcaagagaattaggaaggaaggcaggtaggaggctcttctggggacagggtgggagttgacggtggttaggaggtggaggagatggagcaggaggcaggatgtctaataggtcctgatcattgagggtgaggaaagggaaggatcaaggacacttcctgggtgacttggagacccggataggtggtgatgtcttttactgctaaggggaagaacacggtgggacgtgggaaggaacagttaacaaacattaattgaagaccccctgtatgcttggygctgagggacacatagagaggtgtggagagaggccccactctgcctggctatggacagtccagctacagagatgagatgctcacatgaagcaagagaaaaaggtgtg

SEQ ID NO: 459848 - DNA, 299 bp, Homo sapiens
ctacaaagccctctcacacattatctattcgatccacatcattaccaaataagataggtagtattatccccattttacagatragaaaaccaaggcttggagaggctgtgactagccccagctcagccagccaggttggatgcaaatcagcagaagctttagaatttctatacaggcatctgctctgcagtagggtgggacggggacttgctttgaagcctcattttatatcaagcacactggttttacttggtttgggctttggcagtggctgagaaaggggtgggagaagccaatgg

SEQ ID NO: 459849 - DNA, 532 bp, Homo sapiens
accttcatagaaaggtactcaccatccatgtcaacagcgaagccaacacgctgttgctccaatacrtaaaaggcacttctgtagggctggcatgagtcagtcagttcaagacaacctgaaggagttgaataacatctatccagtgagtcctgcaagacttcaggccctttctcatccagcagctccctgctgagcctggaaaagtgggaaaaagtaaagaataagccagggggaatcagaaaccacacagccccagctagatttcatggctaacgtaaggaagagtttgaaaagaaaaaggacagatccattaatgaggtaacaaattattgcctttatgttgggatagaacagggccaggtagaaaacaatgaaagagaaagacagagagagagagacagagacagagacagagacagagagaaagtgacctagtgaattggccaggtgacatactggtaagggagtcaaaggacactctgacttagtgccctcatgacacacagcaaactgtgatcatgaaaagagtgag

SEQ ID NO: 459850 - DNA, 639 bp, Homo sapiens
cgctgggtccgggactccaattgcacacagccagtggcatggagggtctgtgaccacgattgggcaatttcccccattctgcttatggagcaatagagaggaacctcactggaattatacagaaaggtcccagtgagacttgaactctgatcactgtattcagagtccaaagtgctcaccattacaccatggaacctcacactagcttataactggaggtaactgagttcatacttagcagccatagttcccacacacctatgttaaggcatttcttctgatccctcaagcaacaccaaggaaggtggacctgcgagagaggagtcatcctctttctttctttctctctgccctctcctttgatcaacttttatcatttcatttgcacctcagaaaatgaggcaaaatccagtttgggcttagggccagagaagagcccttgaggcctccctctggaaaacacactctctcagtttaccagagtttcctgtaccaaggggaaatttccgcaaacmgtagtgttatattctttttgccttccctcttttccctttgcccagggaggccagatgattgtgagaacaggacttgggacttcctgggtgtcttgcccccttcctccatgtgataaataatggc

SEQ ID NO: 459851 - DNA, 639 bp, Homo sapiens
cgctgggtccgggactccaattgcacacagccagtggcatggagggtctgtgaccacgattgggcaatttcccccattctgcttatggagcaatagagaggaacctcactggaattatacagaaaggtcccagtgagacttgaactctgatcactgtattcagagtccaaagtgctcaccattacaccatggaacctcacactagcttataactggaggtaactgagttcatacttagcagccatagttcccacacacctatgttaaggcatttcttctgatccctcaagcaacaccaaggaaggtggacctgcgagagaggagtcatcctctttctttctttctctctgccctctcctttgatcaacttttatcatttcatttgcacctcagaaaatgaggcaaaatccagtttgggcttagggccagagaagagcccttgaggcctccctctggaaaacacactctctcagtttaccagagtttcctgtaccaaggggaaatttccgcaaacagtagtgytatattctttttgccttccctcttttccctttgcccagggaggccagatgattgtgagaacaggacttgggacttcctgggtgtcttgcccccttcctccatgtgataaataatggc

SEQ ID NO: 459852 - DNA, 529 bp, Homo sapiens
ttcatttgcacctcagaaaatgaggcaaaatccagtttgggcttagggccagagaagagcccttgaggcctccctctggaaaacacactctctcagtttaccagagtttcctgtaccaaggggaaatttccgcaaacagtagtgttatattctttttgccttccctcttttccctttgcccagggaggccagatgattgtgagaacaggacttgggacttcctgkgtgtcttgcccccttcctccatgtgataaataatggctgacaccaagcaagtgggattgggaggcagggaatctttcattttcttcttcatatacttctacgcatttgtttggttggttttggcaagattttctcaccagaaatggagatttgttggatttaaaataaaaagtaatcagccatgttttacatttctataaaacactcaaaccaggccatactcccctgctgtgcctcaaaatcaaccataaactgtcgaggtcaggaggcagggccctcacacttaagcacagtgtgtttcctc

SEQ ID NO: 459853 - DNA, 639 bp, Homo sapiens
cgctgggtccgggactccaattgcacacagccagtggcatggagggtctgtgaccacgattgggcaatttcccccattctgcttatggagcaatagagaggaacctcactggaattatacagaaaggtcccagtgagacttgaactctgatcactgtattcagagtccaaagtgctcaccattacaccatggaacctcacactagcttataactggaggtaactgagttcatacttagcagccatagttcccacacacctatgttaaggcatttcttctgatccctcaagcaacaccaaggaaggtggacctgcgagagaggagtcatcctctttctttctttctctctgccctctcctttgatcaacttttatcatttcatttgcacctcagaaaatgaggcaaaatccagtttgggcttagggccagagaagagcccttgaggcctccctctggaaaacacactctctcagtttaccagagtttcctgtaccaaggggaaatttccgcaaacagtagtgttatattctttttgccttccctcttttccctttgcccagggaggccagatgattgtgagaacaggacttgggacttcctgggtgtcttkcccccttcctccatgtgataaataatggc

SEQ ID NO: 459854 - DNA, 420 bp, Homo sapiens
tcagcgtctacaatcctcgctaccatgaacaatctgagtatttgatgagacagggctgaatagtgcagtttttctcctagcarccatttgggggcatttgctttaaatcgattggaaaaatatggcataaccatttgcacaaacttgggacaaatgatattgggataacgatctaccagaatagggaattttacccacagtttctgggacaaaaaccaaggaatctctatggtgatcagccttcaggcctcctgaagactatctctcacagtgtcctattctcatgctgaggagcctgaagtccctgtgtgaggattagacagtggattgttatgtgtgtaggagaaccagcttaatatgtctgtccatgtctgaacttattgcagaaattgaaaagtaccaagaagtggaagaagacca

SEQ ID NO: 459855 - DNA, 550 bp, Homo sapiens
attgctgttggttttcattgcagtagatgtttaggtttccatttcttcctccccttatcatttcctaacgtaccataggttgaccatacttcaaaagctgtactctcatggccactgcatcgaattttgagcatattttatggaaaactattgagctcactcttttcatgatcacagtttgctgtgtgtcatgagggcactaastcagagtgtcctttgactcccttaccagtatgtcacctggccaattcactaggtcactttctctctgtctctgtctctgtctctatctctctctctctgtctttctctttcattgttttctacctggccctgttctatcccaacataaaggcaataatttgttacctcattaatggatctgtcctttttcttttcaaactcttccttacgttagccatgaaatctagctggggctgtgtggtttctgattccccctggcttgttctttactttttcccacttttccaggctcagcagggagctgctggatgagaaagggcctgaagtcttgcaggactcactggat

SEQ ID NO: 459856 - DNA, 550 bp, Homo sapiens
attgctgttggttttcattgcagtagatgtttaggtttccatttcttcctccccttatcatttcctaacgtaccataggttgaccatacttcaaaagctgtactctcatggccactgcatcgaattttgagcatattttatggaaaactattgagctcactcttttcatgatcacagtttgctgtgtgtcatgagggcactaactcagagtgtcctttgactcccttaccagtatgtcacctggccaattcactaggtcactttctctctgtctctgtctctgtctctrtctctctctctctgtctttctctttcattgttttctacctggccctgttctatcccaacataaaggcaataatttgttacctcattaatggatctgtcctttttcttttcaaactcttccttacgttagccatgaaatctagctggggctgtgtggtttctgattccccctggcttgttctttactttttcccacttttccaggctcagcagggagctgctggatgagaaagggcctgaagtcttgcaggactcactggat

SEQ ID NO: 459857 - DNA, 550 bp, Homo sapiens
attgctgttggttttcattgcagtagatgtttaggtttccatttcttcctccccttatcatttcctaacgtaccataggttgaccatacttcaaaagctgtactctcatggccactgcatcgaattttgagcatattttatggaaaactattgagctcactcttttcatgatcacagtttgctgtgtgtcatgagggcactaactcagagtgtcctttgactcccttaccagtatgtcacctggccaattcactaggtcactttctctctgtctctgtctctgtctctatctctctctctctgtctttctctttcattgttttctacctggccctgttctatcccaacataaaggcaataatttgttacctcattaatggatctgtcctttttcttttcaaactcttccttaygttagccatgaaatctagctggggctgtgtggtttctgattccccctggcttgttctttactttttcccacttttccaggctcagcagggagctgctggatgagaaagggcctgaagtcttgcaggactcactggat

SEQ ID NO: 459858 - DNA, 550 bp, Homo sapiens
attgctgttggttttcattgcagtagatgtttaggtttccatttcttcctccccttatcatttcctaacgtaccataggttgaccatacttcaaaagctgtactctcatggccactgcatcgaattttgagcatattttatggaaaactattgagctcactcttttcatgatcacagtttgctgtgtgtcatgagggcactaactcagagtgtcctttgactcccttaccagtatgtcacctggccaattcactaggtcactttctctctgtctctgtctctgtctctatctctctctctctgtctttctctttcattgttttctacctggccctgttctatcccaacataaaggcaataatttgttacctcattaatggatctgtcctttttcttttcaaactcttccttacgttagccatgaaatctagctggggctgtgtggtttctgattccccctggcttrttctttactttttcccacttttccaggctcagcagggagctgctggatgagaaagggcctgaagtcttgcaggactcactggat

SEQ ID NO: 459859 - DNA, 604 bp, Homo sapiens
cacctcctgccttctgctctcctgcctgtgctggccctgggcctctgtcactcttgtcccaacgccactgcctccttccttctcctgccctctgtcttacagcatcacgcgaaaaagtctgtctacccggcttctccttcacacagctgtactgacttcagctggactctgtcttttcaccatcctcttccctgaatgtagagaccctgggctggctggctgggggaatttttcccccaagtcctttatttcctcctttggtgtcagggacatcttgtccaaactgcagggagcactccctctgcgtggggctgtgtgcggaagagcagtcaggggagtccctgggaagcgcgatgagcggtgatgactggtgacgtcaaggccttctcctcgaggctcaggatgggtgcgggactcggggtgttttccacctgtgggtgctcaggctctgattgcgtttcccrcttgtttgctgccttcctgcacatggtcctgtgttccagggctgggcactggggatgtggcaagggagtcccatggtcagctggtgagatgagtcccatggcagagcagagctctgcaggcacccagcaaggccacccag

SEQ ID NO: 459860 - DNA, 510 bp, Homo sapiens
tttgtttctatcagcgtgtatttgcatgcgttggggcagtgctgtctgggttggttttagtttgatgttgatcatgatggtggtgataatgatggggatgacagtgatcgtggtggagaatgtgtgtgacagttgcccctgtgtacagtgcatgatggttttcttrcccgtcacctttgtgaacattgctgagagcccactcctggatggagagtggggtcagattagaagtttagaggaacatgcaggcggaggcgtaactccctctgcccgtgttgtgtgctaatctttgcctgttctgggtcttccctgctggtctccctaagaaggtgatttcatttgtgcagacttgctcccctgagttctgtcatttaagtgatttctccgcccctacactccgcctcacactcactgtttttaatcctgcactgacacgtttctgagcagctgacctgctgctggcagaaggaatgaatcagtcacctcgggctggtgacagttggcacttgg

SEQ ID NO: 459861 - DNA, 555 bp, Homo sapiens
ccatttggggcagctccatcttgtacacacctgacatgccacaatcccaagaaggggaaccgtggctggtgagaaatgaaaggcagacttcccatcagtcctggtgagtggcatcacatcggaatttccttgttgcctggcaacagctgctgctgagagcagggtgccctctccctcagtctggggaggggattactctgcagctggtgagacttaaggagcttgagggtgaaaggagggattgccactgaccccaccccccggggggatgtcctggtccacagtcccctttctccagggtcataagggttaagaaggattctgtggatgggcctcatcacctaaccgcagctcagagcattgctttgaatggggaaagatgagcaagttaagtaatgacttcygagcatgctttcggaacatgacccaattatgagatgatggcttcctgcaccatgagcactgcaacacatggcacctactgaaatgctaaagtgtggcccacctggagatgtcacctttgggttaaattaggctctggatgctgtcatctgt

SEQ ID NO: 459862 - DNA, 528 bp, Homo sapiens
tggcttcttcaaatgcacctgtccctaggaccccttcctagagataccagcatttagaacagaccagtctaaacaaggtcttctcaagtgaactgaagatactaggcctgcaaacgctcatctgcacttcacttacgatgtggcatttataaatgcattcaccgtaggtgtttgtagattctttttatgttttaagttttaagtttgcagcattgaggcctattttgattgcaaattgcataaacctcaaataagatctaaatcaaaggaaaggtattgcatgcttataggtgactcaacattaagaattcagttcttcccaacttgatctacagattcactgcagtcccaatcaaaatcccagcaagtttttttgtggctattgaccaactgattccgaagttcatgtggaaaggcaaaagacccagaataatcaacacaatatttatggagaacaaagtcagaggactggcactactygacttcaagtctgctggaaagctccagtagtctaattacagaaaccca

SEQ ID NO: 459863 - DNA, 581 bp, Homo sapiens
ctggtggaatggggccaggcaggtaggggcaggatactccatacctccattttagccaaagcaccrctgctttgatacatattgggtttgacataatattatatttgcaaaaaggattatattgaaaaaaatgattttaagaccactggtctggtgtaacttactttcggtccagaaatttcttttacaaattcttaggccagagataattcattctcaatttacttagctccagcaatgggggaccatatcattcagggtccaatgaagagactggaatcacaccagtcattttaacagagagctcactataaagaattgtgaactaggtatcagaaaactgggaaagtaaaaaagggaagaaagtgactgcataaaatagctattccctcttgagataggaacaaaggaaagagattggaattattaaaacttagaagctcagaggaaggtatggagctgggaaccagatttctgaggaagagactgctaaggaggctggttctgggagtgttggcaaaatgacaaactggaatccactgctgctgccaagatgaagaacctttagtggagggacgctg

SEQ ID NO: 459864 - DNA, 581 bp, Homo sapiens
ctggtggaatggggccaggcaggtaggggcaggatactccatacctccattttagccaaagcaccactgctttgatacatattgggtttgacataatattatatttgcaaaaaggattatattgaaaaaaatgattttaagaccactggtctggtgtaacttactttcggtccagaaatttcttttacaaattcttaggccagagataattcattctcaatttacttagctccagcaatgggggaccatatcattcagggtccaatgaagagactggaatcacaccagtcattttaacagagagctcactataaagaattgtgaactaggtatcagaaaactgggaaagtaaaaaagggaagaaagtgactgcataaaatagctattccctcttgagataggaacaaaggaaagagattggaattrttaaaacttagaagctcagaggaaggtatggagctgggaaccagatttctgaggaagagactgctaaggaggctggttctgggagtgttggcaaaatgacaaactggaatccactgctgctgccaagatgaagaacctttagtggagggacgctg

SEQ ID NO: 459865 - DNA, 611 bp, Homo sapiens
tcttttgcattgttatggatacattcttgtggctctyttgaaattctcagggtgacttttaaaatgatatattaggaaaatgctttaaaattataaaaccaccttaataatttttctcccaaagaatgaaaatggcaaattagaaattgtgtgtttcaaggaggatggcaaagggaaaagtgagttttgtccttctttcctctgattttagcagttctgggaacagacatgtaatagtaagagctcctaaagggtaccaatattggcagctgccattttaagcttttgcatagtattcttttccttagcatttagcagatattcatgcactccttttaaaactcaaaatctgatatccagggtagaaaaataaacattgatggagttttcaaggtcatgggtgaattagaaatagtttatttcaaatccttattctaatctaaccccatcatatctcattggcaaagttagtgtttagtttggcttcaggagagttaattgataacattttctgtttctctaggatcattttggaatgttgaaagtgttcctctgtaccttgaaaaatcgggagagagagagagagagactgcaaggttttgattaaggac

SEQ ID NO: 459866 - DNA, 611 bp, Homo sapiens
tcttttgcattgttatggatacattcttgtggctctcttgaaattctcagggtgacttttaaaatgatatattargaaaatgctttaaaattataaaaccaccttaataatttttctcccaaagaatgaaaatggcaaattagaaattgtgtgtttcaaggaggatggcaaagggaaaagtgagttttgtccttctttcctctgattttagcagttctgggaacagacatgtaatagtaagagctcctaaagggtaccaatattggcagctgccattttaagcttttgcatagtattcttttccttagcatttagcagatattcatgcactccttttaaaactcaaaatctgatatccagggtagaaaaataaacattgatggagttttcaaggtcatgggtgaattagaaatagtttatttcaaatccttattctaatctaaccccatcatatctcattggcaaagttagtgtttagtttggcttcaggagagttaattgataacattttctgtttctctaggatcattttggaatgttgaaagtgttcctctgtaccttgaaaaatcgggagagagagagagagagactgcaaggttttgattaaggac

SEQ ID NO: 459867 - DNA, 611 bp, Homo sapiens
tcttttgcattgttatggatacattcttgtggctctcttgaaattctcagggtgacttttaaaatgatatattaggaaaatgctttaaaattataaaaccaccttaataatttttctcccaaagaatgaaaatggcaaattagaaattgtgtgtttcaaggaggatggcaaagggaaaagtgagttttgtccttctttcctctgattttagcagttctgggaacagacatgtaatagtaagagctcctaaagggtaccaatattggcagctgccattttaagcttttgcatagtattcttttccttagcatttagcagatattcatgcactccttttaaaactcaaaatctgatatccagsgtagaaaaataaacattgatggagttttcaaggtcatgggtgaattagaaatagtttatttcaaatccttattctaatctaaccccatcatatctcattggcaaagttagtgtttagtttggcttcaggagagttaattgataacattttctgtttctctaggatcattttggaatgttgaaagtgttcctctgtaccttgaaaaatcgggagagagagagagagagactgcaaggttttgattaaggac

SEQ ID NO: 459868 - DNA, 611 bp, Homo sapiens
tcttttgcattgttatggatacattcttgtggctctcttgaaattctcagggtgacttttaaaatgatatattaggaaaatgctttaaaattataaaaccaccttaataatttttctcccaaagaatgaaaatggcaaattagaaattgtgtgtttcaaggaggatggcaaagggaaaagtgagttttgtccttctttcctctgattttagcagttctgggaacagacatgtaatagtaagagctcctaaagggtaccaatattggcagctgccattttaagcttttgcatagtattcttttccttagcatttagcagatattcatgcactccttttaaaactcaaaatctgatatccagggtagaaaaataaacattgatggagttttcaaggtcatgggtgaattagaaatagtttatttcaaatccttattctaatctaaccccatcatatctcattggcaaagttagtgtttagtttggcttcaggagagttaattgataacattttctgtttctctargatcattttggaatgttgaaagtgttcctctgtaccttgaaaaatcgggagagagagagagagagactgcaaggttttgattaaggac

SEQ ID NO: 459869 - DNA, 567 bp, Homo sapiens
taatacaacaaagttaaacatatctctttactgtaagtcttcaggagcctttaaaaatgtaaatgcatgtgataaatctcccagaagaccaaataatatttaaagtacatttgtttagggaggtttttcccaagggactcatctaagactggcattctaaggaataccctttagaaaagaataagctaaaacatgaaggaagaatgagcacacaaatgagaaggaagtagtagggtgtagacacagaaacgaaagggaggaggcacaatgtgtcctggagaaacaaagatgagctagggctgcctacaagaggagaaagggagaagacagagyttagagggttggttcaatcagccctgaagaactgatttaaaagctggacattacttatccaacagtggttcaaacctggctacatattggcatcaccagtgaagcttctcaaatgcaaattcctaagctccactgcaaaccaactaaaccaaatgatgctgatataactagtcacctgatgtgcatctgggaccttgtgctataggtagtggcgcatcccattagaagcagagt

SEQ ID NO: 459870 - DNA, 619 bp, Homo sapiens
tgggggaagccgtaaagaatgagacactagggccagaatagcttcccttaccagctgtgtgaccttgggcaaatgccttaagctctctgtgcctctatttccttgtctgggaaatggggatgataattgttcccaccttcataaggctgtttggagtatgaaataagtcacgtatgtagaccacttacaacagtttccagcacacagtaagtactctataagctgtaggcattcatattcttactaagatgttatcagattgcacacaaccyccaaaaccaggcaccccaaagagctacagtagacttgcaagcatgggtatgttgtaaggagggagcaagaagataacagtctatttccagtacatttagaagcagagcaaaggctgaaggcaggaaaccaagctagtaagatgttgccataatctcagggtgagaccaggctgggaagagcaaacggagcaaacagggtaaagcccaacttatcttattaagaaaacaagtaagatggttgctgaagtgcctttaaggaatactagattcagaacctttcttccataaatcaaggttgtatatctctcaacctgctttttcccctgccccaagccaaacaaaagcag

SEQ ID NO: 459871 - DNA, 575 bp, Homo sapiens
tctggggtatagcacagcttccctacagtgtgtctcaaactatgaaaagtcttttctctctggggtccaaaattaaatgtccaaatgcagctgttcttacttaattttgttctttcatgagcatagtgggatatttattattctgtataaaccatataaagctgttatcatttgtcagtgtctattattgctactagttgttctaaacaaaatatcccaaaactcagtctagattcaagtctcctgggtagaacacgttagctaaacaatcttataatttagaaattatttttctagggtaatacatgtaaccaccaataattatacctactatattcctgattaagrttcagaaagctgtttgtttttaaactgtttccaattagctggtttcaaaaaaagtttaatcttataagcactgccggcttgacatagttgtagatctcaagcttctttttggcttttcttatcaaagttgggtcatgatggaaagataactctttcctgttaatgagtcactgtatctcatgccatcttgcaccaaaagtgcaccctttccacaacttattccaatc

SEQ ID NO: 459872 - DNA, 608 bp, Homo sapiens
gttgcttaataaatagtcaaatgagtgaaatagagatagttgttagaggccttgctgttttgcacctgaaagtcacatttggagaccaagagaacatgcacacctataattagatgaacaattcagtattaaaatgtaagccaaatatttaaagatctaaaatatctataagtgaaataattatgttaataaccttagaatttttccwtatgaagacaattttatttcctttcctcttttaaatttcatatcatacctatctgagtgaaaatgaaggcagaaacaaaacaaagtgatttagagatggtcagtaggatgttttttagaaatgcatggattctgtacttaagaatttgaaattatcccccattggagacaccttcaattaagcctattctaatcttggctaagtgagaatccaacttcataatttcactcccaggcacagctgtttgacaagtgcagcaggagcctgtcaagacacttggcagcatcattcctttggaacacaatggactttatttttcctttttggcaacccctattactcactgatggcaattagcaaaccatctttggaggaaatgtataatcaggcaactaaaaat

SEQ ID NO: 459873 - DNA, 534 bp, Homo sapiens
atcaataacaacagtagcagttaacatccattaagtacctactgcgtgcttgatagtgtgctgagtcctctatgtatgttgttaatactagatgcacaacaaccttatgaggttgtattagtccgttctcacattgctgtaaagaaatacttgagactgggtaatttacaaagaaaagaggtttaattggttcacagttctgcaggcttaacaagaagcataacagyatttggggtggcctcaggaaactttcaatgatggcagaaagtgaaggtgaagcagtcacatcttacatggctggagcaggaggaagggagagccatgggcagtgccacacacttttatacaaccagatctcatgggaactctaacacgagaatagcagcaaagggacagtgccaaaccattcatgaaggctctatcccactgatccaatcacctcccaccaggccccacctccaaaattgggcattacaattgaacatgagatttgggtggggacacagatccaaagcatattatatcaccctgacc

SEQ ID NO: 459874 - DNA, 483 bp, Homo sapiens
caacagtctccaaagtcttaactcattccagcattaactcaaaagtccaaagtctgaagattcatctgagacaaggctagtgcttccacctatatgagcctgtaaaatcaaaaaacaagttaattactgctaagatacaatggaggtacagacattgggtaaacattcccattccaaaagggagaaattggccaaaataaagggrctataggtcctatgcaagccccaaccccccctagggcagtcattaaatcttaaagctcccaaataatctcctttaactccttgtttcacatccaggccacactggtgcaagaggtgggctcctaaggccttgggcagctctgcttctgaggctttgtggggtgcagccctggcagctgttttcatgggctggcattgagtacctgtggctttgccaggtgcagggtgcaagctgacagtgcacctaccattttggggtctggaagatggtgtccctct

SEQ ID NO: 459875 - DNA, 483 bp, Homo sapiens
caacagtctccaaagtcttaactcattccagcattaactcaaaagtccaaagtctgaagattcatctgagacaaggctagtgcttccacctatatgagcctgtaaaatcaaaaaacaagttaattactgctaagatacaatggaggtacagacattgggtaaacattcccattccaaaagggagaaattggccaaaataaagggactataggtcctatgcaagccccaaccccccctagggcagtcattaaatcttaaagctcccaaataatctcctttaactccttgtttcacatccaggccacactggtgcaagaggtgggctcctaaggccttgggcagctctgcttctgaggctttgtggggtgcagccctggcagctgttttcatgggctggcattgagtacctgtggctttkccaggtgcagggtgcaagctgacagtgcacctaccattttggggtctggaagatggtgtccctct

SEQ ID NO: 459876 - DNA, 354 bp, Homo sapiens
cacattttcaggtatcatggtaatgccccactccttggtattagtctgttctcgcattgctataaagaaatacccgagcctggctaatttataaagaaaagtgatttaattggctcatggttctgcagacttaacaggaagcatagaagcttctggggaggcctcaggaaactttcaatcatggtggaaggcgaargggaaacaggcatgtgttacatggctggagcaggaggaagagagagagggggaggtgccacacactttgaaacatccagatcacatgagaactcttatcatgaaaacagcaccaaaggatggtgctaaaccatttatgaaggatccaccccccatgat

SEQ ID NO: 459877 - DNA, 354 bp, Homo sapiens
cacattttcaggtatcatggtaatgccccactccttggtattagtctgttctcgcattgctataaagaaatacccgagcctggctaatttataaagaaaagtgatttaattggctcatggttctgcagacttaacaggaagcatagaagcttctggggaggcctcaggaaactttcaatcatggtggaaggcgaaagggaaacaggcatgtgttacatggctggagcaggaggaagagagagagggggaggtgccacacactttgaaacatccagatcacatgagaacwcttatcatgaaaacagcaccaaaggatggtgctaaaccatttatgaaggatccaccccccatgat

SEQ ID NO: 459878 - DNA, 457 bp, Homo sapiens
aaaaggctttctccaattccaatgacaaagccataacgctataatagaaacctttccataatcagcactcatacaaaatgtgcttaaattttactccttctatgtagaagtgtccagttatattaaaaatcatattttataatatccttacctaaagggttaaggtggtaagtagatgggattgcctgtatcaaaccaagttttttcctagaatagctaatatcttgaatcacccagcaagraaagttgacactactggaaaaaacctgtttaactggtttacttcattccaaatctgtacttccaaaaagtcccttcacaaggatgtagtctggctgtgtctctctactcttgattttttttctcctcatctcaacacattgtcattggacatctactcaattttttaaaatatcaggatgagagagttgtaaacaaaatgctcatttgaaaaaca

SEQ ID NO: 459879 - DNA, 614 bp, Homo sapiens
taacattcttcccaagagccccccaaaacaatagaacaaacaagacattggagcagtcactgtttccatcagtgcagccctatctcaaaaatgctgggggagtcacagcatcattagctgccaggaatcctggtctagtgcagacttatgggacactaaaatccaagtggtaattgacctgcacaaaatcacacagggatttaaagggagaamagaaactgattctacgagaatgtatttttatgacacctgtgtgcttaaatttaggctctgatatgcctagtttcttccttgtacactttccaagatcatttgctccaaaagaaatttctctgattttctttcccagatacataaaccagaacctctccttgacccctcccattgcagtttatatctgatccatcttcttgtgccttaaaagatcagttatagatattctgttttcataactcataaagcactgtattatccgggcttcatcttgacaccaagaatagtaggtacacttttatgtaactgcatcataaattcaatatctttaaaaatctcaataagctacatgcattagcttttcatattccctttttaccttgaaaaaaaggcaatgtgat

SEQ ID NO: 459880 - DNA, 614 bp, Homo sapiens
taacattcttcccaagagccccccaaaacaatagaacaaacaagacattggagcagtcactgtttccatcagtgcagccctatctcaaaaatgctgggggagtcacagcatcattagctgccaggaatcctggtctagtgcagacttatgggacactaaaatccaagtggtaattgacctgcacaaaatcacacagggatttaaagggagaaaagaaactgattctacgagaatgtatttttatgacacctgtgtgcttaaatttaggctctgatatgcctagtttcttccttgtacactttccaagatcatttgctccaaaagaaatttctctgattttctttcccagatacataaaccagaacctctccttgacccctcccattgcagtttatatctgatccatcttcttgtgccttaaaagatcagttatagatattctgttttcrtaactcataaagcactgtattatccgggcttcatcttgacaccaagaatagtaggtacacttttatgtaactgcatcataaattcaatatctttaaaaatctcaataagctacatgcattagcttttcatattccctttttaccttgaaaaaaaggcaatgtgat

SEQ ID NO: 459881 - DNA, 569 bp, Homo sapiens
agctctggaaatctctctgtatcctagacttctggagtagttcctatccaggtgcagctgttgttgttattagatgtgtgttttctttcttgcattgtgtgtttgtgtgatagtttgctcagacatcattggtgtgtgtctgaactgctatttggttagaacctcaccatttgttcttagccctctctgtatgtccatggtgttcagtccagattgaggtctgctgacttggttggatccccaaataatttcctgtcctgccacgtgttggtgactatttcaaagtgaaagcatgcagtagggtcactggcattccagagatggttgttaggaggtctacattgcctgtttctagaaaagcgctcaaatgttggaagtaactaagttgttggtcagatatttgtgcaggaatcctaacaggtgcataggctaggcctagtcacctgatgggtggctggaaagacagcccttgagaggsgtgaaattactgagaaaatttgcttcatctgagccccacagagaggacttcagtgctggaagagatgctgccacctattgatcatggtctt

SEQ ID NO: 459882 - DNA, 612 bp, Homo sapiens
attcccagcagcagttggcatgctttatgtactcatgggttaaccggaagcagctctcagaatatccattttaatgaagatagcttaggtttagtctatgtttggctgacagttaacactgttcccakttcacttctctattctgctgacccttgggcttgataatgtttacatcttggatacttgcaaatgaagaatcaaggctggccatgggaattactagggtgtcagagtgaaattttggtacccaaatctctccactcatccttccttccttcaggaagctcctgaccaagagattgttgactaaagaaaaaaaaaacaaaaacccaagcttttgaaatgattaacgtgcgttctattcagaaatcttattgaggactgtagatgaggcctgtagcttgagagttgctctcttgagaggttctgtcagcacagtttcagctcactgcgtatatacaggtggtggaggttcaggacatgcaaaatcacatcaaacttgtccagaattacactaaagcagagtcatatcaaggtttgggcataagagtacacctggatataggttacagaagcataatcactaagactgtcagatattgtcttatgtgc

SEQ ID NO: 459883 - DNA, 535 bp, Homo sapiens
caatgtagcaggttttttgttttttgttttttttaccttgtgaagtaaaatgttttgtaattcakacatattatttaaaatgctttgaagtttgcaaaaccctttgaagaccaaggctgtgatttacatgtccccatttatatttttattaaaatcaccacccctccataaataaaggtattaatgggtaaatatttggccagttaagtaccaggactgtgtagggggctttcctgcagatgggcagaggatgtaatttcattaaacaggaggtctcagttaccctctgtttggaatccactgaagtaggacttctcttggctctcctcttaagactcaaatcttcccaaacagttttggcctccacatttgtgatgcactggccttgggcttggcattgacccattggccttgtcgatcctccaatttatactgtgcacttaaattctaaaatgatacttttgctccatctgcttctaacttgagtgctctaactcctgtagtacttgaccattgtgacattatactgtagtag

SEQ ID NO: 459884 - DNA, 597 bp, Homo sapiens
tactgtgttggtgagatgtaggagaaattgacatgctcatatatggctagtgagagtgcaaatcagtacaatctcctatgttagtgaaatctgccaacatttcctctgttttaatttttgtttttttactctaaataaaatatacttactagttsctatttttagagacaggttacgtgccagtgctataaaggtcaaagtgggataatatgatcctcaacaatttagattagtaacattttacaatcctcagcctataacaggaatgttccattactaccatggcaaatacaattgaacattcataaataactgaatgaaagtcataaaacctgtaagggtatttatgtgcacatatcaaaatccaaatactctcatttctcaactagccagtgttaaaggaccatgcctgtacatttcttctattctaagacaacatgttctcatttaacattcctaaaattaggaggtcttaaaattaatgatcttagatccgatggcttattttaatgtagccacttgaagttatttggctcacaaactaggacaaaattttaaaatcacaatgcaaagatatttgctatatatcaaatgaag

SEQ ID NO: 459885 - DNA, 622 bp, Homo sapiens
ttgacatgctcatatatggctagtgagagtgcaaatcagtacaatctcctatgttagtgaaatctgccaacatttcctctgttttaatttttgtttttttactctaaataaaatatacttactagttcctatttttagagacaggttacgtgccagtgctataaaggtcaaagtgggataatatgatcctcaacaatttagattagtaacattttacaatcctcagcctataacaggaatgttccrttactaccatggcaaatacaattgaacattcataaataactgaatgaaagtcataaaacctgtaagggtatttatgtgcacatatcaaaatccaaatactctcatttctcaactagccagtgttaaaggaccatgcctgtacatttcttctattctaagacaacatgttctcatttaacattcctaaaattaggaggtcttaaaattaatgatcttagatccgatggcttattttaatgtagccacttgaagttatttggctcacaaactaggacaaaattttaaaatcacaatgcaaagatatttgctatatatcaaatgaagtatttttaattgcttaattttatttttatttaacataataatcgtacatatt

SEQ ID NO: 459886 - DNA, 521 bp, Homo sapiens
aagagtctgggcctaagaaaggaacatatgagttctaatgtttcctctaccaacaattctgtcctcttgaacaasacaacactactcatccgtgaatgatgaaagtgagcgagctataaatttgcttcatgtttaatgatccatctgtactacagctaaactgagctaaacccacacaaaaggaaaaaggaattaacacttaagaagtgagttcttactaattgtctgccattgtagttctccaatacgtctcttaaccctgccaacaactccacaaggtaagtattattctctttttacaggctaggaaactgacattcagagaagttgctgtcctggtttcaaagccaacaagttacagagcaaggaatcaaacctaaatggttctgcctacaaaaatgggctccttgctctttgttgtattttctctacacccagtaacctatacaaaaaaaaaaaaaaaagtctctatcacagattttgtcacaatagaaacacatctaaatacaaagaagagagat

SEQ ID NO: 459887 - DNA, 509 bp, Homo sapiens
ggggtgaaagcattctgtggctccttgggaaaaaaaggtaccagtctatgtgttgaagagacactcctggaactcgatgacagtaacatatatatyggagcccctcttggtgctctcacaaaaacttgtgaataaaataacttcgtaacaatattcttttggtattctcatccctagctgaggtcttagaccaacatgccatataccaaattccactacatggtaatttatactggtaagaaagacattgaaaatgcatacaaaataattgggggaaaaaaaaaacccacactagtctatccaggcttcttgcaaattttctccccatagctccctaaataaggaagctatggccgtccttcttcttactctgtatatacagcaaagcgcaatctagttcctgaaaaagtaactgttatattgcctgctacctaatatgcccatcagagcttctcatcccttgctattggtagcagttcttgcttttatcagcttcccacagaggaaga

SEQ ID NO: 459888 - DNA, 509 bp, Homo sapiens
ggggtgaaagcattctgtggctccttgggaaaaaaaggtaccagtctatgtgttgaagagacactcctggaactcgatgacagtaacatatatatcggagcccctcttggtgctctcacaaaaacttgtgaataaaataacttcgtaacaatattcttttggtattctcatccctagctgaggtcttagaccaacatgccatataccaaattccactacatggtaatttatactggtaagaaagacattgaaaatgcatacaaaataattgggggaaaaaaaaaacccacactagtctatccaggcttcttgcaaattttctccccatagctccctaaataaggaagctatggccgtccttcttcttactctgtatatacagcaaagcgcaatctagttcctgaaaaagtaactgytatattgcctgctacctaatatgcccatcagagcttctcatcccttgctattggtagcagttcttgcttttatcagcttcccacagaggaaga

SEQ ID NO: 459889 - DNA, 509 bp, Homo sapiens
ggggtgaaagcattctgtggctccttgggaaaaaaaggtaccagtctatgtgttgaagagacactcctggaactcgatgacagtaacatatatatcggagcccctcttggtgctctcacaaaaacttgtgaataaaataacttcgtaacaatattcttttggtattctcatccctagctgaggtcttagaccaacatgccatataccaaattccactacatggtaatttatactggtaagaaagacattgaaaatgcatacaaaataattgggggaaaaaaaaaacccacactagtctatccaggcttcttgcaaattttctccccatagctccctaaataaggaagctatggccgtccttcttcttactctgtatatacagcaaagcgcaatctagttcctgaaaaagtaactgttayattgcctgctacctaatatgcccatcagagcttctcatcccttgctattggtagcagttcttgcttttatcagcttcccacagaggaaga

SEQ ID NO: 459890 - DNA, 509 bp, Homo sapiens
ggggtgaaagcattctgtggctccttgggaaaaaaaggtaccagtctatgtgttgaagagacactcctggaactcgatgacagtaacatatatatcggagcccctcttggtgctctcacaaaaacttgtgaataaaataacttcgtaacaatattcttttggtattctcatccctagctgaggtcttagaccaacatgccatataccaaattccactacatggtaatttatactggtaagaaagacattgaaaatgcatacaaaataattgggggaaaaaaaaaacccacactagtctatccaggcttcttgcaaattttctccccatagctccctaaataaggaagctatggccgtccttcttcttactctgtatatacagcaaagcgcaatctagttcctgaaaaagtaactgttatattgcctgctacctaatatgcccatcagagcttctcatcccttgctattggtagcagttsttgcttttatcagcttcccacagaggaaga

SEQ ID NO: 459891 - DNA, 577 bp, Homo sapiens
  misc_feature (1)...(577): n = A,T,C or G
gaggagcagcaggtactgctcttcagcccgcacacccatctcaggtgacaggtcccctcctcagtgtgggatgacgaggtgggggtaggttacgggagtgtagcagagtggggggaaacccctggtgccctcctgctgagcatctgaccttgannnnnnnnnnnnnnnnnnnnnnnnnnnnnnnnnnnnnnnnnnnnnnnnnnnnnnnnnnnnnnnnnnnnnnnnnnnnnnnnnnnnnnnnnnnnnnnnnnnncacaagacacacacccttcccaacacccaggtatgcagatgcacactcccccacaggaggagccgcccggaaatccctgaatcagcttttctgcagtccagggtctgtgacaagcgagctgctgccsttctgaagagaggctccagcccggccaggagcagcgggtgctgcagcacttcagtccccggcttcttcgggagtgaggtctatgtcctggggcaggggatgcctggaggaggggaagaagggggattcactgcgggtattgggaatttcccggttccccagactctgtggggatgagaagccctggaaagccctgag

SEQ ID NO: 459892 - DNA, 545 bp, Homo sapiens
ttgcccaggggccatcggtcagtgcctcgccaccctgtctttgaggagatgccttatggagtggtggttgggccttggagtcagacagattcaagcccaaatcccagctctgtcccttggtggccatgagctcttatgcaagttacctgcttttattctggaaaatggrcagagtaatgcctgcctataagaaatacttcaaggcaaggaattattattctcctaggtagcataatgcacataaaatggctagcacaggtctggcatgtagtaagcacttgataaatgaatgttgtcattatgttctcttccccaaataaaggatttctctctatttgccccagagcttttaaaccctgtggatcttatagtaattctacctataaacattgctagcagttttcactcttaacaaactacagaatgaaaatataatctcgattatatttttgcatttatttgagtaatatgctatcaactttataaagcactttcacatatactgttctatttatctcccacatcacacctgagaggtttagacc

SEQ ID NO: 459893 - DNA, 491 bp, Homo sapiens
aacaatctggtcaatgttctataggaagcagtattgaaaacaaggcaaggcaaggaggagaggagaaggggcagggcccagcgcaggatgggcaagggcagggctaaggagcagggtcagctagtaatctttccaaagaaaaataaaaattccaggaccaatctaaaaaggaattggttgctgggtccctctcatgcaaggacctaggaaaggaaggggagaaggtctgacaaggaggctgatgctgagtggaggatgcagtagagaagtaatcacatctgatgtgggygccaagaccaggtgcaggcctggcacagctcacactgacatgcacacctgtcagaagttggcatataatcctactccaatctaggatctgggtggagtttctcttgaggagaattcataaatacttacctttccaataaaagtccagaaaggcacaacacatctcataaccacagagccacatatacatctgggttagccca

SEQ ID NO: 459894 - DNA, 573 bp, Homo sapiens
aaaccacttacttctctaggcttaatttgttatctctctgccctaggtttaatagggtcttgcttatctctctccaagaggtgaagtgtagataaactgaactgaaacataatgaacaggacaagaggaactgtctaggactagctttgtagtgctggtttatgcttttctactaataaataagtagatgatgagccatagtattaattattagcattcagaccatcaggaattrttcactgaattatcagttttcctttttaagttaaacactgattgaaacctaaaataaattagaatctaagaagcttctatctcattgccccgagaaggcctgatcttgactctatcttacttcctgtcccttagatccctagtctagtttgcttccttacatcaacccttggttctcatcttttttcttcttcttccgtcttacctgggccaccttctcaagcttggactttatatctgctagctctagctgggcttcctgaagttttgttttcagtttttggttttcagtcagagcactctcatagagctagaggagagggaaaaaagaggatcagc

SEQ ID NO: 459895 - DNA, 547 bp, Homo sapiens
actgtggctcaaattttacctagatctaatagagtatatcttttctccaataatayttagtgcgtcattctccattttcaaggagaaagtggaaacatataaattgtaggcttgatatccatctattgtattaaaataaccatacctgtggcatgtaaaacactacgagagggtgggaaagagctagaatcaaggctggttgttcaggcagggcctgatggtcctccacatcttggtgcaattgttctagtcttggaatgggttctcagcatgcaggctcagaaatctgattttagcagaccactcagaaaaaattcagacctaaacccaaccctacacacaatacttggttgatacatcaactagaatgacaactaagtaatatgcaatgcagaggtgaaggattctctttctgtatctggaacatttgatgtcatgacccagtactttacttgttggggtcaaggggctagaaatgggggaccaaccaaacagaaggttgactgtgaacgtggagaaagatcaggatgttcacaggaaactgccc

SEQ ID NO: 459896 - DNA, 557 bp, Homo sapiens
tgattttttaatataagcctagccatttgggggtattttattataagaatctaggtcatatttaaattttctgttttcactgttcacatcaaactctgctccaggtagagaagaggcatgtttctactatgttattgccaggttggtgtggaagcctaaattctccatttagcttccattgacacttgtaagtggaggacttctagttattgctggatgggggaggatagagtttcaccttctagtatgctcaatcgataccatcctgactgatagagagaagtgtagagaaagaagtacctcattactgctccctctgtggcctctatgttttggagggacacttattgctggttagtagtaaaattcctgwctctccactaggccaccttgacatcaccccagtggggaaagagaagatgcccaattaccttccaatgggaacttcttacatgctttccactgtcaccatgggaaagagggtaacttattactgcttagcaaggaataagtctttgtattaattttctagcactgtgataagaaagtactacaga

SEQ ID NO: 459897 - DNA, 626 bp, Homo sapiens
agtgaagatatattgcaatgcatatggcttgagggaataggtcagtcagaggttagctcatatgtatagacttttaaaaaatatggttctttattttccacctagctttagtcactgcattatttcctaagtttgaatacttgcttaggatagtattactaaatttagtgcagtgtgtatgtgacttcttgcatttcagtcaatgcaaagataaattttgttcttaatgcataagtattttcccttcattgtttttgcaaacagtgagagaataagatgcttgataatatcaattagctttatctttgttgttgatattgctataaaccattgttgatggtatgagattctcttaratgatggattgcagggatataccatgaaaatgaagctctggaggcaactttgttgaattatagcagaatcctgttaaagcacaatgattcagatatacccaaattcccagaggtgtgaggaataaataactttgaaagccatacaatattacgtaaacctaatgtggtatttttcttaccgtcgttactgttatttgtttttatttttattacattgattttcccttataaaagcatgtgtctagaaccatagttaatatgtctaaattt

SEQ ID NO: 459898 - DNA, 624 bp, Homo sapiens
tatttagggaggaaggtgggatattggttaagaggggacagacagggatgccacactactaaggtgctagcctatttcttgktaagagtcaccattaaaaaaatgagttcaattagtagtaactcattggctctatacttaccttttgtgtgcaattcaaaaatttttaaaaactctttaagaaacattacatgtggatattacgtgtactctttgatttagttctggtttgaaaaacaagctgcagacacattttgattaccaatagaggaatttgaataaagatttttgcattctataatgttaagaaattactattaattttgtcatgcataacaatagtgttgtggttgggtgaaaatgtccttattttcttggcaatatatactaaaatatttagagttaaaaatacatagtttgtaattttctttagaatgtttctgcaaaagaatttttagtacacaaaatatggcaagactttaactgctgttgaaatttatttatggctatttgttttctcattacaatatttggtatacttgaatgcacaaaaaattgtataataataataataattaaattagaatgtggactagattagttccctgcagaattagcaaccaa

SEQ ID NO: 459899 - DNA, 659 bp, Homo sapiens
cattaatatattcagcaacccagaatttcctctgagttttggagtgtttagacttttaattgagattccattacacaggcataattgattaaatcactggccttgtgattgaactctctctctacctccctattcccccagaggttgggctggctcaaaattccagagatctaatcatgtggtttgtttttctggtgaccaaccacagcctgaagctatcttagaggcctactatgagtcacttcattagtataaactcacctgtgacccaagggcttagtaataacaaagacaraaagccccttccaggaaccaaagtcaaaaaccagtgaaatccactattataaaacaacatcctaccatcagcattataaataatttgttctgtttaaatacagctgtgcacaacataatgatgtttcagccaatgatgaaccacacatagaagacagtggtccaataaaattataatacctatttttactgtaccttttctacatttatatatttttagatcaataaattgtttaccattgtgtttataattgcctgtagcatgcagtacagtaacatgctgtacaggtttgtagcatatggacaataggctatgatatattgactaagtgtagtaggctataccatctaggtttgtgtaagta

SEQ ID NO: 459900 - DNA, 629 bp, Homo sapiens
aatttggtttgtttttgctaagtttgggatggcttcaaggcatatgagctatgtgcagacacaaatggtaaatacgggtatgtatcagttaatattgttcatcatggtttaatagaaaatccacagtctatggcttatgcacatggtagcttatttttcttacacagcattcatctagagatgaggagctgctgtcattgcttcaactgatcaatcatgttaggaccaacatctcttttattaagttagttttattctcattctgtttgcccagtggtcacaagaygactgttacatctctattctacactcatattttaagcaagattaagaggaaaataacaaaatcagaaacaaccctcagcacattgtgatggaagctccaggtgcatatgacaaagaagatggggctcccactgttccaagctacagtcaaggactacagtacaccttcaggcaaagtattccaccagcatttctcattctccctagtgctatgttgcaaaaactaactccacacaagtgcataaattccacttatttccttaatctcactagtgagaaaaaagctctacctaagggacagtaaaccaagaattgttaggactccaatcactcttgccccagtt

SEQ ID NO: 459901 - DNA, 587 bp, Homo sapiens
tattgttaacctataaggggaaaaaaagcctacctgtgatgaagattacatgttgtttaaacacagaagtctcattaaaaaatataacagtttgaaataataatgtcagagggaaattacgttagtttgctttagagttttcatttaaatttctaggatgtttaccattaaatagtgaagttacttaaagtaaaattaaaagatgagctgatgtttgtttatgtgttttatttatgcaaatgaagatttaaagctgtaagatcaagaagtaaactcatccataatcaagtgggatttattcctgagatgcaaggatggttcaaatatgcaaatcaattaatgtggtacaccacattaattggatgaaggacaaaatacataatcatctaaatagatgaagaataagcwtttgacacaattcaacatcctttcatgataaaaactcaacagattaagtataaaaggaatgtacctcaacacaataaaagctatatataacaagcctatagctaatatcatactcaaccacaattctagtttccacttccatgagcttgacttctttagattccacatatgggtaagat

SEQ ID NO: 459902 - DNA, 547 bp, Homo sapiens
aatattgacatcttaacactattaatgcttctagtccaagatcatgggctatgtttccatttatttatgtygtaattttttttaacagtgttccatagttgtcattatgcaagttttttacctctttggttaaattgatttctaaacatcttattcattttcatgctactgtaaattaaattgcttttgtaatttcctttacagatggttcattgtcaatgtattagaatgcaactgatttgggtgtgctatttctgtgtactttaaaatttcttgtgtgcctaatttcttccattaccgtcttcatttgtgttttattggttttttgcagtgaaatgtttttaattttttctaatttccttttgtgtatattccacaaatattttctttgtggttataatagggattacatttaatatcctaaagttgtaacattctgaattaacttataccagctgatatggcttggctctgtatcccaacccaaatatgtcaaattataatccccacgtgtcaggggaggggcctcctgggaagtgattggatc

SEQ ID NO: 459903 - DNA, 562 bp, Homo sapiens
aaatctcatgttgaattgtaatccccatgtgtcaaagaagctgcctggtgggaggtaattggataatgacaatggacttcccccttgctgttctcatggtagtgagtgggttctcatgcgatctggttgcttaaaagtgtgtggcacttcccaccttcatagttcctctctactgccaccattagaaggtgctttctttacctttgccttctgccatggttgtatgtttcctgaggcctctcagtcatgcttccttttaaaatgtgagtcaattaaatctcttttcttcataaattacccaggctcacttagttctttatagctgggtgagaacacatgaatacagcaacctaacttaaatagtacacaaaaagtctgcttctttctagatctttccccaccagtttgggttgttgattgtcacaagaytagatcttcatacattgcatgtcaaaacacataaactaataataattttagatacactatctcttaaatatttaaaaagaaagttaaaaaccaaaatagtgatactactggcttttagacaaataattgcttt

SEQ ID NO: 459904 - DNA, 516 bp, Homo sapiens
tgctgccagtaacagggagacaaatttttgaagcttcctatttctccatcttccagaacttgaattttaaaattaaagcaattacatacaagtgctgatattactatgaatatatattattatttattttataaccagatgatatagtttaacaacattttccatggaaaccaaagaataaaattgcactttatttcttcttactgtgtttgtctttatttgtttactcatttttttttcaattctctgygcaacttttttttctgactacctcccactgccctctgtcccttggtcttttgtggactcactgctttctggtcccactttatcactgatatcttaggacctctttctacttttgttcttaggtttggataagccattttttctactctgctttattatgactaatttccacatttgctgaagcaccttcccagaagagagcaaggagtacatattctgaatttttcactataaaagtgaactacagaagtaaggaaaagttttatt

SEQ ID NO: 459905 - DNA, 577 bp, Homo sapiens
tttatttttgccaatattacactctttttattaatatcatcttacattaagtcttgaaattaagttatgtgaattcttcaactttattcttcttcagtataccgggctatctgattctatagactttccatgtaaactttatgacaagtatgtccatatctccaaaataaattgaaattttgattaatattgaattgaatacgtgtagttgggaaggtttgctatcttcacaataccttgtgtctgttcacaatatcttcacaatattgagtctttcaattactgaacaaataatatctcttgatttacatagattttctttgattatttaaaaataagtgtttgcacrtttgattgagatatatatatatatatatttgtcctatacattttttgtttgatatatacctacttattttattttggaggtaccttagtaaattatatggctgtcatttaaatttcaaatctcatgtgtttagtcctggaagatataacaacaattgaattttgtatattagccattacaatctgtgaacttgctctactctgttattagttctgggaactttttagt

SEQ ID NO: 459906 - DNA, 598 bp, Homo sapiens
tacagctctcttttgatttgtttagcgtgctttatttttttccacctttctactcctaacctattagagtctttatatttaaactgcagattttataaataatatacagtttgaatttgcttttacccactctcaatatctctgcttttaaaagtggtgtatttaaaccactcatatttaaagtgattatttatatatttggattaatagcaactgtatgttaaaatattgtctacttattgacaaaggttattttcttgcacgctctggttttaattgagtccttttgtgattgatttttatcttctctcttagcataatttttttacctcttctttgaacattttagtactttgtgtacagtttacgttatacattcattcactaataaacattttttaccagcctaagtccactttcaaataatcttattctgctccatgtgtagtgcrggtgtcttatatcagaatattcccaatttttctctcctatccctgtgaaatttttgtcatttatttcatatgttcatacactataattacccaaagcactatcacaattattatttgtattctaaatcacctaaagataagaaaaa

SEQ ID NO: 459907 - DNA, 463 bp, Homo sapiens
cagtctctgactgtatgttcttatctctttcctggagtcacaatcttaacttctctcattttatcttacatatatattccattttaattcatctacctacgtaactctttatagatgatttggaaaaaaatttcaaaacctaattttctgccacaaacttttaaattacctattaagtctctatttgcaaaaatctaagtactcaaagtttaacatgattaaaggagaactctatctttttcactcayggttgctccattccttgtatttcctattttggagattgatctcattattcattcttcctctcaagagacaacttggaatccagcctgcattcctatcattctcaatctctatatcctgctaattgtactttatgatactggccctttcttcctttctcttctctgtctttccgcctaacttttggctgtcatctttctttcctggatgacatcca

SEQ ID NO: 459908 - DNA, 557 bp, Homo sapiens
aacattatgtaacattatctattaagactgcacatttgcagactctagttctctaaatgtgtctagatttgaccacaaagaaccatttttgttttgtttttaatttgaacttcagaggttttttttgtgtgtgtgtttcttcaatgtccatcttgctacaacaatgtatatttagactttaagtacttatattgcttatctaaggctgatagttaaatacttcacaatcagtagtgcacactrtctgatatctgctaatttacaattcaagtcccaggaaagaatataatttcactgctgttgagcatagaaagaaacatctgttgcctcccaccttacattttaaatctacatattttacatatctacaatcctagaggcttttgagataatctaccttcatcacattgttggtgttttaaaaaaatatttctctggaatactatcgatgtcaatttttatgctcttttcaggctctaaaattaactttttctgagtttatgatttttggtcttttaaaaaagctttttattttaaaataattatagattcacaag

SEQ ID NO: 459909 - DNA, 561 bp, Homo sapiens
ccatttgtggcatattcctgattataagtagttttatacattgaattggacaaactggcctggatggaaaaacaggatttatgcattcaacaaacactcattttctactgtgtattaagcatcatgctaagtcctagagatatagttactgccctcccacagcttatattctaactaggaaaggaccttaatgatgtatgtattgaaagccacaaagtaaaatragaatattttaaatctaaatgttggtaaaagcaaattaatctacagtgaacaaagatagtttagtagattacaaggtatcaaaatcattcattttcatggaagtgaaaatataaggacataaaggatagtttaatgctgtttaatattaaactaaatactgtcacataaattcataattgaatttttagttgaataagtcctgtacctactggactagcccaaattgggcctgcttagttggtaacaaaatgttgagttacctttcagatataataaaaccaaaatctgcagttcatgtagcctaggcatgcacaatagaaaaagctttgatctcta

SEQ ID NO: 459910 - DNA, 578 bp, Homo sapiens
ttaatatggtggttttaagcctagagccattattataactccaagtctttcacawacaatttgcaaaccaagcagttgctgaccaaactcgtatgctgctccttatgattactccaatttatgttttatgtggacttatctaagacacacaatcctatatatgtagtcattgacatttcatctacaaagattaatgtgatggattaaatattatgcattaagactaaaagtatatcctatgaagacaaaaataattccattagtgaacaaaaactatcagttcggaaattatcctttcatatgctctatcatagttgtcaaacagcggcaattgtctcagtattactcctttattctttgttatttttatgagttgaaatcaattatttgaggtcattgttcatattttcataggcctttctcttaaaaaataacaagtgaaaatttggggaaaaatgaacctgaaattaaaagtaagccactgagaaataacataaattaaacaggctatagaacaaatattttgaagctatacaaattcaaatattttatcattgaactaaaaaatgcataaacat

SEQ ID NO: 459911 - DNA, 580 bp, Homo sapiens
tggtacagggcccaacgtttcaaaggactctgcttttgggttttctgctctgctagtgtccttttgaaattcttagtacttgttcaacaagagatccctcattttcattttgcacatgggatagaaattatttagctggtcaaatatgcagtcaagacagrtaactatggagttaaagaagtggcgtagatggaaatactttgaagagggaaaatgactcatgtggatgatggaaagtataaatagttctgtaggacttaagtgaagaaaagtgtggagcaagaaagacagggggatacaaggacatgaaggcctaagttaggaaaaatctttacccccacaaactctgacaaactatccagatataattattgctgattaccactctttgaattcatatcctgcttagaatggcattccatttcctaaaattgttttaaagcatctacctaaaaccaattttggtgtaataaatgaggttgaattttttttcttcaatattctctttatgtatttttcactacttaaagatcgaataaatttgaatgtatgaaagaaagatggagccaatcgaaaaatg

SEQ ID NO: 459912 - DNA, 587 bp, Homo sapiens
ttaaattgttaatattttcccagtttgctcagttttgatggatttattcataagatatcctatcaatcataatctcaggacacagctcagagcaagtgaggaggggatgggcctgtcaaatattcgtccctcttcctttatccattgaatcacttatgcattgacaatttcttgagcacctatcacaggccattgattgcattatgtgctcaggggaaacagatgactagaacattcaggtcctcaacatatcctgttataaaagttaagatctgaacaaataattaattagaataaagtggatttagtaatatgcttattttcttacaggaactccagccttgtcaaactctattacttctgttactctcaagatctacttgggcatcgcaacattcataatatattttttaaatttctcctttacttctgccctayagaaatcaatcacttctcaggacacacctaaaacttttgtgtcttttatattaaacttctgctataatgcaattatctgttgacatatttgcattacctaaataaattgttttcttccttagctaaacaatttgttaaaatacaaagta

SEQ ID NO: 459913 - DNA, 590 bp, Homo sapiens
aaatttatatggtgacattatgtgaaaatctatgttaataaatttgaatacctggttatatatcagtgcgcaatataaaattgattcaaaaagawacaataaaatgaaaaggccaataagcataaaataaattatgaaagctactgaagcatttcttccagaagaaaaaaatactttggaatttttatttttcacctaatataaaacaataaaacaacctcataatccaaaaactgctttagaccatagtaaatgctctgaaaccagttcatcttcatttaaatgaagttagcataaccctgatataagaaactagcaaagtagttaaatattgtaattattgagcagtcactagtgaatatacctaaatataatagagcaaacaaaatatagcagttcatgagaatattttttaaccattaccaataatagcttattgctggaatataagtatttttgccattcaaaaattaattaatatattaatcataataagtacaatttgaaagttaatgacaatctctgtagattatcaagttattcatttgtatttagtgcccattcaaaaaaaataatttattgaaaaagta

SEQ ID NO: 459914 - DNA, 590 bp, Homo sapiens
aaatttatatggtgacattatgtgaaaatctatgttaataaatttgaatacctggttatatatcagtgcgcaatataaaattgattcaaaaagaaacaataaaatgaaaaggccaataagcataaaataaattatgaaagctactgaagcatttcttccagaagaaaaaaatactttggaatttttatttttcacctaatataaaacaataaaacaacctcataatccaaaaactgctttagaccatagtaaatgctctgaaaccagttcatcttcatttaaatgaagttagcataaccctgatataagaaactagcaaagtagttaaatattgtaattattgagcagtcactagtgaatatacctaaatataatagagcaaacaaaatatagcagttcatgagaatattttttaaccattaccaataatagcttattgctggaatataagtatttttrccattcaaaaattaattaatatattaatcataataagtacaatttgaaagttaatgacaatctctgtagattatcaagttattcatttgtatttagtgcccattcaaaaaaaataatttattgaaaaagta

SEQ ID NO: 459915 - DNA, 521 bp, Homo sapiens
gttcaccaatgtttcaagaaaggaatttactgatgtcagagtaatatatcttaagggaggattcggcatagtgactatcattcatgcttgtattaagaaaaaacgtcattttttttaaatggtatgctattaaattccttcagttggttgttactatctttctgctgataatttctattttggtcattaaaattttgggtagtttaatttacaagggaaagatagtaagaaaraaaaagctgaagtttgaatcaatcaatttttctatttcattgtggttccagtaaaaggtttgatgggaaaggagactgtacctattagctaatctccaaacagcatttcatctctgaatctaatttattatccccttacataaataatcaagatttgactgctcaaaagtcattgccaacatctccatacatacttgagtatcattcatcatctcctttcccaccatccccatcacacgctgtggcagtgctatcatccctgcttctaggcttttaacctttacgtct

SEQ ID NO: 459916 - DNA, 609 bp, Homo sapiens
acattcacaattgataacaataatataataatatacatatatgttatatcatacacaaaatcatgtacctaattatacatatatgtgttagcattgttttattatatatcatgtatctataatcttatatatgatgttatatgtgtaatkatatagtatgtatatattatacattaatgaaatataattatgtatatattatatatctacatttaaagtctccagaaattgttctaagatatacagcaaattatatgtatttttttttcaagaaacacaaatctcagtaacaatagcaagcatctatgtaatttgaaccttaacccataccctccttcccattagctccagagcagtggtgcatattttgcccaagaagagagccaggtaataagaactgagaactctgaagttctgcccaaaagagttaactttatttagaaaagaatgtaggcaagttcaagttgaagggtactctctgaaataatggaaattttattggtaagcaattaagtggagactgctagctccatgatgtattgttgggtttgcagcatatataatgatgtatggttgggtttggagcatatatacatataatatgtacaa

SEQ ID NO: 459917 - DNA, 601 bp, Homo sapiens
aatgttaatttatcaaaaaaggaacaattataaatatatatgcaccaaacaacataaccccaaaatatgaagcaaaaaattacagaattaaaatgtgaaatggagaattagcaaaaagagttgaggacttcagtagctcactttcaataatggataagacaaataagcagaagttctattaggaaatagaagacttgaacaacaataggatagatagaactaagaagtctttatggaacactccacccaaaataaagcaaaatatacacccttctcaagtacacatggtactccaaggtagtctacattccaggccatgaaacaagcctcaatacatttgaaataattcaaaggccacagagcatgtgccttgctacaatggaataacattacaaattaataacagagttgaggtttttttttcaagatggctgactagaggcattgawtgccagttttcataaagaagaaccagagttgccagttagtaatcacatcctgagtggaataccgagggaagagtgccacagtctattaaagaacccatgggaaaaagctggggcacacaaaaagaaggaagcaagagtctggcagagattga

SEQ ID NO: 459918 - DNA, 480 bp, Homo sapiens
ggttataatgattgcagtttagatgatactttcacatatatgcaaatacattttaaagcattaaagattatgtatttccagttttaaaaggtgtttggatgactgcactcaatgatttctctactaacatcacagtaaaatatattaatatggtaagacacaacaaatgacgattcacaacagaacattggaactgacacacaacttcttgctgaagtctgaaataaatgtccttaactacaatgaygcttaaactttattaaaaataaaatctatggcccgcccttgcttgaagtcaaatgctactaccatgttgaaaggtgttaggcataccattgtttctttgtctacactatgccacctataagttctccctgatccagtacacttagcagttatccttcacctttgtagatattaattttgaatccagtggaatgtgtttcctggctcccactactgttagtacttgtattctgt

SEQ ID NO: 459919 - DNA, 595 bp, Homo sapiens
tccctttccatcatggatagccagaagaaatgatgagacaagatagaacatatacattatttttatcataaagttaaactgttgataatttatgaatcaatgggtgtgtatatttgaattaataaaataagcaattatyttaagtggtgggtttatattttcagaacacaaatttaaacagtgggtgtgctacgactggaggaaattacacatttgatgaatagtcaagtaactgccatgtcaaaattctgtaaatgtgcccaggtgcaaattaaatttgccctgagtttgcctcatattggcaatttgatatctgtttatttactttctttaataaataaatgaaatttgattgttttcttgttttgctttaaaaccctttttaggccaggcacagtggctcatccctgtaatcccaacgctttgggaggctgaggcagcaggatcactttagcctaagagttcaggactagtctgggcaacgtagtgggaccctgtctctatttaattaaaacaataaaaaaaccttttaacattttattctgggtctgaaaaatctgcttgcatatatattgtatcatatatatgtgtgtat

SEQ ID NO: 459920 - DNA, 606 bp, Homo sapiens
atatacccaagttgtttcaaacaaatttccaataattgaactaagtactaaaagcaattttcctgtaatatacacaacatgttggtaaaacttgttcatctttcttaactttttaagaattaatttggcttcaaagcacatattcttgttcaaaagttatgtctgtttatctttccaagtgaagtaatttactaatgcttacatcaactaagaattattaacactgaagtcaaaggaaaattgtataaactgaaaatctctaaatttatcaatctcaaaacaaagtttttaaattttacatgtagtttttgaractacaagtttgctataatactgctgacagcaactaaaatctgtatattgactctttaaaaaaatgtgaaaaatcacttttattgacctttattatgataatttcctattataacgaattattacagctttctagataaaaaatatttttttcttttgaaattcaatttagtttgcttttgttcagtgtgatattagcacaaaaaacataaaacaaactattatttttatctttgattattgaatatctagaaataatttaatttcatgcatctttgagtaggaatagacaat

SEQ ID NO: 459921 - DNA, 643 bp, Homo sapiens
caaatttccaataattgaactaagtactaaaagcaattttcctgtaatatacacaacatgttggtaaaacttgttcatctttcttaactttttaagaattaatttggcttcaaagcacatattcttgttcaaaagttatgtctgtttatctttccaagtgaagtaatttactaatgcttacatcaactaagaattattaacactgaagtcaaaggaaaattgtataaactgaaaatctctaaatttatcaatctcaaaacaaagtttttaaattttacatgtagtttttgaaactacaagtttgctataatactgctgacagcaactaaaatctgtatattgactctttaaaaaaatgtgaaaaatcacttttattgacctttattatgataatttcctattataaygaattattacagctttctagataaaaaatatttttttcttttgaaattcaatttagtttgcttttgttcagtgtgatattagcacaaaaaacataaaacaaactattatttttatctttgattattgaatatctagaaataatttaatttcatgcatctttgagtaggaatagacaatacagtaaatctttgtattctttgactcaaccaaagagcaatttggcaaaaaattacaa

SEQ ID NO: 459922 - DNA, 531 bp, Homo sapiens
tacaaactggcaatgagtcatagcacttacacatatacactaaataatattaacaactgtgtctatgacacttgtcacagagtctgcttcagaaaactgaacacaaataatttcagtgtcatatagtaaagctaaaaggatttattagttcattttcacacttctataaagaactacctaaaaatgagtaatttgtaaagaaaagaggtttaattgagtcaaagttctacatggctagggagagctcaggaaacatatgatcatgatggaaggtgaaggggaagcaagacatgccttacatggtagcaggagagagagaaggggtaggtgccacacactttaaaattatcagatctcatgagaactcacttatgagacagcattgggaggacggtgctaaaccattaaaaaccrccctcatgagccaatcacctcctgccaggcccctccttcaaaacatggggattacaactctacatgagatttgggtagggacacagagccaaaccaatcattccaccctttcccctc

SEQ ID NO: 459923 - DNA, 531 bp, Homo sapiens
tacaaactggcaatgagtcatagcacttacacatatacactaaataatattaacaactgtgtctatgacacttgtcacagagtctgcttcagaaaactgaacacaaataatttcagtgtcatatagtaaagctaaaaggatttattagttcattttcacacttctataaagaactacctaaaaatgagtaatttgtaaagaaaagaggtttaattgagtcaaagttctacatggctagggagagctcaggaaacatatgatcatgatggaaggtgaaggggaagcaagacatgccttacatggtagcaggagagagagaaggggtaggtgccacacactttaaaattatcagatctcatgagaactcacttatgagacagcattgggaggacggtgctaaaccattaaaaaccaccctcatgagccaatcacctcctgccaggcccctccttcaaaacatgggrattacaactctacatgagatttgggtagggacacagagccaaaccaatcattccaccctttcccctc

SEQ ID NO: 459924 - DNA, 426 bp, Homo sapiens
gcctgggcagctttgcttctgtggctctttagggtacagcctctgcagctgcttttacgggctagtgttgagtgtctgtggctgttccaggtgcaagatacaaactgttggtggatctgctattctagagtctggaggacagtggcccttctctcacatttccattaggcagtgccccagtggagactctgtgtgggggctccaaccccacatttcccctccacacctastgcaggttttccatgagggcttcacccctgcagcaaatttctgcctggacagccaggtgtttccatacgtcctctaaaatctaggtgaagattccaaacctcattcttgccttctgtgcacccacaggcccaacaccacatggaagctgccaaggtttggggcttgcactctctgaaacaatggcctgagctgtac

SEQ ID NO: 459925 - DNA, 548 bp, Homo sapiens
agtcatctcccatcaggccgctctttcaacacatggggattacaatttgacatgagatttgtgtggggaaacagagccaaatcacatcaaggaaaaacatcagtcttttgttttaaaattataataaatctgtgkttttttttaacctaacatagctagagcatccatcatcgtgaccatcttgtaataaactaaattttctatttctagctgaaattaatatttaatagctgtaagagatacaaaaaaaacctatgccactagttctttatttatttcaaaaattgaaatttttctcctaaatctgggagtcatttgaggaaaaaatgtacccaaagtattaattggacagtttctcatattgtatacttcattctaatcttaaaaaaggcactggtttgccatttttaaaaattaggatcaactgatttttcctattgttagaaagctattgtaaactatgggcaattttttagttgattaattaaagatcttttgcttatttacaatatttcttttaatctcatttttacaactttgtaacaaac

SEQ ID NO: 459926 - DNA, 548 bp, Homo sapiens
agtcatctcccatcaggccgctctttcaacacatggggattacaatttgacatgagatttgtgtggggaaacagagccaaatcacatcaaggaaaaacatcagtcttttgttttaaaattataataaatctgtggttttttttaacctaacatagctagagcatccatcatcgtgaccatcttgtaataaactaaattttctatttctagctgaaattaatatttaatagctgtaagagatacaaaaaaaacctatgccactagttctttatttatttcaaaaattgaaatttttctcctaaatctgggagtcatttgaggaaaaaatgtacccaaagtattaattggacagtttctcatattgtatacttcattctaatcttaaaaaaggcactggtttgccatttttaaaaattaggatcaactgatttttcctatkgttagaaagctattgtaaactatgggcaattttttagttgattaattaaagatcttttgcttatttacaatatttcttttaatctcatttttacaactttgtaacaaac

SEQ ID NO: 459927 - DNA, 584 bp, Homo sapiens
tttgaggaaaaaatgtacccaaagtattaattggacagtttctcatattgtatacttcattctaatcttaaaaaaggcactggtttgccatttttaaaaattaggatcaactgatttttcctattgttagaaagctattgtaaactatgggcaattttttagttgattaattaaagatcttttgcttatttacaatatttcttttaatctcatttttacaactttgtaacaaactaatcataattgaaataacatatgttaccatctttccatccaaaaatggtctctttgtttaaaaatccaagccattgtataacagtccaaaagtgtaacttcagactctgtcaaaacatatttttaaatgtattgaacatttgactctaactttggttaacttccttgtttcttttttttactattaagaaaaamaaaattgcatatcaaattcagtttgtattttctgagaatgtatgttgataatgaccagtttaatatcttaaaaatatatatgtgacaaacaacttttccattttgctttgttgcagcaaattgcaatgttcattcattgtgaaaccagttaacat

SEQ ID NO: 459928 - DNA, 606 bp, Homo sapiens
tgtattacatgtgctctataaccacacatgttttattagaagccataagaaaataaaaatctagtttattccttagccttacatagtaaaatytcttggaagagttttagagtacactagtacttttgatactttcgaagtttgtggaattcaaagaagggaaataagacaaaatactaaagtgtttctctaatggctagtaaaagtaaatcactgcaacctcatttccaggacacagcaggggcaacacattaggcctgagattaggaaagaaacatcacccagaataaagatgagtgagaaaggtagacgtgacagctattacatggttactaacaatgcagaaaaaataataataataaataaagatgggaacaggttagccactatttttattttcaaaatgcaatagatttacttgtttcagctgtaagagtttgactaaaatgattatgtacactctggcattggtaataaaaatcaatgaaagggccacttgcaattgttaggcccccagggaaacagcagtcctgaaagtaaagcctggaagacttgatgctactcataagctgcttcattaaaacaaaagccacaaacagtgatctc

SEQ ID NO: 459929 - DNA, 606 bp, Homo sapiens
tgtattacatgtgctctataaccacacatgttttattagaagccataagaaaataaaaatctagtttattccttagccttacatagtaaaatttcttggaagagttttagagtacactastacttttgatactttcgaagtttgtggaattcaaagaagggaaataagacaaaatactaaagtgtttctctaatggctagtaaaagtaaatcactgcaacctcatttccaggacacagcaggggcaacacattaggcctgagattaggaaagaaacatcacccagaataaagatgagtgagaaaggtagacgtgacagctattacatggttactaacaatgcagaaaaaataataataataaataaagatgggaacaggttagccactatttttattttcaaaatgcaatagatttacttgtttcagctgtaagagtttgactaaaatgattatgtacactctggcattggtaataaaaatcaatgaaagggccacttgcaattgttaggcccccagggaaacagcagtcctgaaagtaaagcctggaagacttgatgctactcataagctgcttcattaaaacaaaagccacaaacagtgatctc

SEQ ID NO: 459930 - DNA, 606 bp, Homo sapiens
tgtattacatgtgctctataaccacacatgttttattagaagccataagaaaataaaaatctagtttattccttagccttacatagtaaaatttcttggaagagttttagagtacactagtacttttgatactttcgaagtttgtggaattcaaagaagggaaataagacaaaatactaaagtgtttctctaatggctagtaaaagtaaatcactgcaacctcatttccaggacacagcaggggcaacacattaggcctgagattaggaaagaaacatcacccagaataaagatgagtgagaaaggtagacgtgacagctattacatggttactaacaatgcagaaaaaataataataataaataaagatggraacaggttagccactatttttattttcaaaatgcaatagatttacttgtttcagctgtaagagtttgactaaaatgattatgtacactctggcattggtaataaaaatcaatgaaagggccacttgcaattgttaggcccccagggaaacagcagtcctgaaagtaaagcctggaagacttgatgctactcataagctgcttcattaaaacaaaagccacaaacagtgatctc

SEQ ID NO: 459931 - DNA, 563 bp, Homo sapiens
tctctttaagaataagacatttaccatcaatgtttgaccaagtttaatttcttaaaacagtatttttgaggaatttattatattcagtttgcagttatcaacacttatgaacaagcaccaaaatttattttgtccttttcctgatctatctggagttaaggggaagaatgtaaaataaacagagatgatttataaactgtgcttcatccttgcaaatatgcatgataaagtggtaagattattgagcatcagaaggrtgcatcacttgacatcttgcttgctcccaaggggaaaaatagtacagtattatctttaaataagagtctaacattgaagatggcagtagcagcaaataatagtaaatctccttttgcttcataaagaaagaaaaaaaaacttaactagtatgtggtatcttcaatcagctcttaataacaaacaacaaagtgatattactgtttttagaataatgtggcttttggaaagagacaggaaaacaaatgaacaaatgaaaattcagctgaccaaagatgctaattagtctaaaatgcctttgcaacaaa

SEQ ID NO: 459932 - DNA, 563 bp, Homo sapiens
tctctttaagaataagacatttaccatcaatgtttgaccaagtttaatttcttaaaacagtatttttgaggaatttattatattcagtttgcagttatcaacacttatgaacaagcaccaaaatttattttgtccttttcctgatctatctggagttaaggggaagaatgtaaaataaacagagatgatttataaactgtgcttcatccttgcaaatatgcatgataaagtggtaagattattgagcatcagaaggatgcatcacttgacatcttgcttgctcccaaggggaaaaatagtacagtattatctttaaataagagtctaayattgaagatggcagtagcagcaaataatagtaaatctccttttgcttcataaagaaagaaaaaaaaacttaactagtatgtggtatcttcaatcagctcttaataacaaacaacaaagtgatattactgtttttagaataatgtggcttttggaaagagacaggaaaacaaatgaacaaatgaaaattcagctgaccaaagatgctaattagtctaaaatgcctttgcaacaaa

SEQ ID NO: 459933 - DNA, 570 bp, Homo sapiens
cgatatttcaacaccattaataaaggaaaaataatttgggagcgttaggaaaattatatgactataaaaatctttactgcgatatttcttccagacttctagaaaaaaatgtctgatggacaatgaagarcacagcaacatgaacaaacaaaaatttcattaacaatattaaccattaacctaaccttactgcccagatacattggtgatcaaccacatcaagcttttatgttttgtttaactcattaaagcacaaagaaaaaaaaaagattatctataaacttcaatatgtgagacaaacaaaaaattaaaaataaagtttctatgtgtcctaaacagccatagctatttcctaatcagtaatttgtgagcaagttggcaagaatagtttttggcttagaagcctaagtatattaggtatttcatcttccaagtcagaacagtatgtcatgtttgaggaacattttgttttagtttagatctgcaaaggaatattgaggggttctcaagtaacacaaagcaatatgtaaattagaattgtgtactaatttacttttgccagttaaaata

SEQ ID NO: 459934 - DNA, 570 bp, Homo sapiens
cgatatttcaacaccattaataaaggaaaaataatttgggagcgttaggaaaattatatgactataaaaatctttactgcgatatttcttccagacttctagaaaaaaatgtctgatggacaatgaagagcacagcaacatgaacaaacaaaaatttcattaacaatattaaccattaacctaaccttactgcccagatacattggtgatcaaccacatcaagcttttatgttttgtttaactcattaaagcacaaagaaaaaaaaaagattatctataaacttcaatatgtgagacaaacaaaaaattaaaaataaagtttctatgtgtcctaaacagccatagctatttcctaatcagtaatttgtgagcaagttggcaagaatagtttttggcttagaagcctaagtrtattaggtatttcatcttccaagtcagaacagtatgtcatgtttgaggaacattttgttttagtttagatctgcaaaggaatattgaggggttctcaagtaacacaaagcaatatgtaaattagaattgtgtactaatttacttttgccagttaaaata

SEQ ID NO: 459935 - DNA, 670 bp, Homo sapiens
gttggcaagaatagtttttggcttagaagcctaagtatattaggtatttcatcttccaagtcagaacagtatgtcatgtttgaggaacattttgttttagtttagatctgcaaaggaatattgaggggttctcaagtaacacaaagcaatatgtaaattagaattgtgtactaatttacttttgccagttaaaatagcgctttttttcacaacaaggaaaggagmagaagtagttcactaaatattatagggtagtaaaataagctcaggcaagaaaactacatgaacacaaatctcaaagctcttgctcagaacccaattcaatataaatctatagagtaggccaattaataccatgtccttaatatcacttaaaagtcatctcttcttaattcagtctccattaggtaaacacaaagtctcatgtacaattctcccaagtctcaaatatggacctttatgctttcaatccccatgatagaaaaacctacgataaaggtttacaaagaaaaggtgaatgttcattcctcaggtccctgagaacatgtattttctcaattttcacttagacatacaaaataaaatacaactctgagaaacacaagtgctcaaaagggaaaagactccctattcaactcaaaataaataaaaatgacatgagaaaaagcta

SEQ ID NO: 459936 - DNA, 548 bp, Homo sapiens
ggataactgtgtggaatttgacaaaagtaacaaggtgctgcaataaagaaaagctgtggcattgatttagggcacacatagcagataataatcaaatcatcatttggggaggctgggaaaataggaatycatgaatacaggggaaaatattatttttaattacacgttgtagttgtagtgacttgaaagatagaaaatgaactaataatcttttggatttagccaaaagatagccaaacaaaatgacaaaatgttcaaagtatcagctggctagttttagctacatgtaaggtaggacaagaaagagatagacgagtaatcagtacaacagcaaggagatggagaaggaaaaagaggaggaagaggaggagaggaaaagaaaatttaaaagtactgaccactttgcaagctgaatttagaggtgatgtagaggggataaaacttgcatggttggataacaaacgtatttctaatcttctgccagcaaaagttcttaaaattttctcaacgtggccacaaggcttaattaagaatcaaattaagcgtga

SEQ ID NO: 459937 - DNA, 548 bp, Homo sapiens
ggataactgtgtggaatttgacaaaagtaacaaggtgctgcaataaagaaaagctgtggcattgatttagggcacacatagcagataataatcaaatcatcatttggggaggctgggaaaataggaattcatgaatacaggggaaaatattatttttaattacacgttgtagttgtagtgacttgaaagatagaaaatgaactaataatcttttggatttagccaaaagatagccaaacaaaatgacaaaatgttcaaagtatcagctggctagttttagctacatgtaaggtaggacaagaaagagatagacgagtaatcagtacaacagcaaggagatggagaaggaaaaagaggaggaagaggaggagaggaaaagaaaatttaaaagtactgaccactttgcaagctgaatttagaggtgatgtagaggggataaaacttgcatggttggataacaaacgtatttctaatcttctgccagcraaagttcttaaaattttctcaacgtggccacaaggcttaattaagaatcaaattaagcgtga

SEQ ID NO: 459938 - DNA, 480 bp, Homo sapiens
cttttacagtataagtagattcagttagacacatttaaaggttaagaagaaattgtactggtaaaagcactgtcaccctggtgtagaaggaactgagtctgtaaatgtagaaacttgggctctcaagttyctgtgagaaggacagctgacttggaagataaataaaggtttatgttacatgtcactaagtttttggctgcttgttaagcaatattctggtggcaattaataattaacacaagctcaagacatgtaagttcagtgccaagaactagagatacaaaaatgaatgatatagattcattcaatccctattctcctgctgtgcagtagagtatggaaacatacaggaaccaagaaaacatatcttggattagtaatttaacaataatgtaagtttaaaaaaaaaaaacttcaaagaatgtaaaagaggagcactgtacccagactgggtagattttggtatgaaaagggtcagga

SEQ ID NO: 459939 - DNA, 480 bp, Homo sapiens
cttttacagtataagtagattcagttagacacatttaaaggttaagaagaaattgtactggtaaaagcactgtcaccctggtgtagaaggaactgagtctgtaaatgtagaaacttgggctctcaagttcctgtgagaaggacagctgacttggaagataaataaaggtttatgttacatgtcactaagtttttggctgyttgttaagcaatattctggtggcaattaataattaacacaagctcaagacatgtaagttcagtgccaagaactagagatacaaaaatgaatgatatagattcattcaatccctattctcctgctgtgcagtagagtatggaaacatacaggaaccaagaaaacatatcttggattagtaatttaacaataatgtaagtttaaaaaaaaaaaacttcaaagaatgtaaaagaggagcactgtacccagactgggtagattttggtatgaaaagggtcagga

SEQ ID NO: 459940 - DNA, 568 bp, Homo sapiens
ccaaacttaaaaaaaaaaggcaagtgacaaggtaatgctaatttggttatttaggagagaaatggaaaacaggtaattgctacactaaaaacccatatacgttaaaaactttcacagaatgactataagccatgttttcaggctcaactctggatttttttaaaatcatcctacacttcagctatgctcaacttttcagcattatttaaatgagccatgtgctttttcaacataggtgatcaggccagtttggtgccaacacaagtgagcatggatccactggtgtgtttggcattttcttgagaagcagaatgtggaaatggacttcatagttgtgtctcsagtacgaaagaaaatagccagaaatgagagagtatttttagaaattggatctagatggactgagagttgctagggtaactctacttctagggtatgaaattactattagtttaacccataaatggcctgaggagggccagttataactactatcatacttggcagaaaattagattaaatgtcaggaagaaaggaaatgaggtctctacaggcttatcagataata

SEQ ID NO: 459941 - DNA, 635 bp, Homo sapiens
atcaaattgaaaaaaatctccataccaaactgacaacctgtctatattcaaccaatgtggcaggtaatccaagcattgtcccacaatccagattagaattcttaaaatcatctatctttttcttaaatatccacatctagtatatcaccaaagtttattgtctatttttttcaaaataatttctgtttttgcctttccatttttatttcacgctccccttattactacaatttttggtgggctctaattacctccaaaccaacacatctccctatcttttgattctctcacctatatctcttttgtcttttctatttatgactattaagtaaatcttctcaaactttaataytttttattcattgatcaagaatctgcaagaaaccaatatttcttttctataaactctaacctcttctgcccaatattcaaggctttagaaagctgagtcatatcattttttctactatgctctaacaagagtcttatggtttatctaaatagatcaaaaatatctcatacatgacactcatataacatcttacatagcattcatattaagatctccttactttgttaatgttctttctcccaggaaaaatgttcctttattacagctcattaatattctactt

SEQ ID NO: 459942 - DNA, 547 bp, Homo sapiens
aactgatgacattcatatttaactatttggcttctatctcctttcactttaagaatggaagaatatattttttcttatgttattacttatggccaaagcaaacattagagagtataataatagtaaattagtaacaattgacgcaaatttaaaatcaakatttaaaaaaaccaaacaaaatcccccagtcacatgggccatattgctagatagtcataaaaatgactgtttaattataatattttaactggcagataatagtttttagtgcaaaaactgactaaactgtttagcatatacagcatgtttatgcatttgattataagcagacattctatttttaatgtagaaacatataccactgccaatatttattaaatgtttctgattctttataaagatatttaaaataatttaagtgattctgtttaatactcaaattctataactacatatactaagagttttaataatacattatttttaaaacaattactaaataagagattttatacattacaacacttctatcagtttatctgttctc

SEQ ID NO: 459943 - DNA, 547 bp, Homo sapiens
aactgatgacattcatatttaactatttggcttctatctcctttcactttaagaatggaagaatatattttttcttatgttattacttatggccaaagcaaacattagagagtataataatagtaaattagtaacaattgacgcaaatttaaaatcaagatttaaaaaaaccaaacaaaatcccccagtcacrtgggccatattgctagatagtcataaaaatgactgtttaattataatattttaactggcagataatagtttttagtgcaaaaactgactaaactgtttagcatatacagcatgtttatgcatttgattataagcagacattctatttttaatgtagaaacatataccactgccaatatttattaaatgtttctgattctttataaagatatttaaaataatttaagtgattctgtttaatactcaaattctataactacatatactaagagttttaataatacattatttttaaaacaattactaaataagagattttatacattacaacacttctatcagtttatctgttctc

SEQ ID NO: 459944 - DNA, 602 bp, Homo sapiens
aattataatattttaactggcagataatagtttttagtgcaaaaactgactaaactgtttagcatatacagcatgtttatgcatttgattataagcagacattctatttttaatgtagaaacatataccactgccaatatttattaaatgtttctgattctttataaagatatttaaaataatttaagtgattctgtttaatactcaaattctataactacatatactaagagttttaataatacattatttttaaaacaattactaaataagagattttatacattacaacacttctatcagtttatctgttctcaaaactcataacatttctgattttatcagatttttatttctgatagtgctgcattatattattttacataattaaaattttttattctctacatgtagatgttaaaaattgcattatttcttaatgcctttgagaattgtttatgaattctggytaatgagaattaatctatatatatctattcattgtgttctgtattatacaatgcatatatatctgtatgtgtgggtatgtccacagataggcagacacacacacatacacacattattatttttttcaaaaa

SEQ ID NO: 459945 - DNA, 615 bp, Homo sapiens
agatgttaaaaattgcattatttcttaatgcctttgagaattgtttatgaattctggctaatgagaattaatctatatatatctattcattgtgttctgtattatacaatgcatatatatctgtatgtgtgggtatgtccacagataggcagacacacacacatacacacattattatttttttcaaaaaggcaatgaacatattttatgcatttcmcaaggatgcttttttcttcttcattttttattcatttgaagagctttacttatccaaagccaataaaacaggaaatgtgctcacgaaagaaggccaagaagtccatctgtgactactcatttctttgagctatcagttatttaatttctcaaaatattttttcatctcaagcttgactatctacttcactaaacaaatagaactgttccaacttcttatagcagtagacacttttttccctaaatcccaaatgatctttaaaaaaaaaaaaaaaaacaacaaaaaaaaaaaccctatcttccttcagcatccaaaaattttttactcactctgaaaccctcattgcaggcatttaaattattccttcctgttcctatttatagagatttataggacat

SEQ ID NO: 459946 - DNA, 556 bp, Homo sapiens
cttttttcttcttcattttttattcatttgaagagctttacttatccaaagccaataaaacaggaaatgtgctcacgaaagaaggccaagaagtccatctgtgactactcatttctttgagctatcagttatttaatttctcaaaatattttttcatctcaagcttgactatctacttcactaaacaaatagaactgttccaacttcttatagcagtagacacttttttccctaaatcccaaatgatctttaaaaaaaaaaaaaaaaacaacaaaaaaraaaaccctatcttccttcagcatccaaaaattttttactcactctgaaaccctcattgcaggcatttaaattattccttcctgttcctatttatagagatttataggacattataacaataatcctgtttatatatttttttcttatttggtgtacttcagtaaaatctgtccaaatatttaccatcaaaatctcttttatactgattatgaggtcaattatttttattaataatattttatccctgtgtaacagctggtagtaccttaataaaagt

SEQ ID NO: 459947 - DNA, 556 bp, Homo sapiens
cttttttcttcttcattttttattcatttgaagagctttacttatccaaagccaataaaacaggaaatgtgctcacgaaagaaggccaagaagtccatctgtgactactcatttctttgagctatcagttatttaatttctcaaaatattttttcatctcaagcttgactatctacttcactaaacaaatagaactgttccaacttcttatagcagtagacacttttttccctaaatcccaaatgatctttaaaaaaaaaaaaaaaaacaacaaaaaaaaaaaccctatcttccttcagcatccaaaaattttttactcactctgaaaccctcattgcaggcatttaaattattccttcctgttcctatttatagagatttataggacattataacaataatcmtgtttatatatttttttcttatttggtgtacttcagtaaaatctgtccaaatatttaccatcaaaatctcttttatactgattatgaggtcaattatttttattaataatattttatccctgtgtaacagctggtagtaccttaataaaagt

SEQ ID NO: 459948 - DNA, 593 bp, Homo sapiens
tggtctatttaaaagttttkcaagaacttaagactttgtattagaaaataaaatacctatgtcccaatgtcttatttaaatgttatatatctaatatatattccttaacatgttgtacagttgatacacttctttatacctctgctttcaaaatatcatatccagaagattttcagaattacattcagcagtttcattagctttatactgcaaatctctgagaaactgttagcaaaatctttatgattgtagtcattttaccatgttattcaaaatgcttcttgcctttgtacaaagttcacaactgtgcaacaagtgataagtttgtaaaataacatatgaggaaaaatagcaatcaacaatttgttgttctttgctgtgctaccacactctagtgcggaccagtatttatgaggtcaagtaaatcaaatctcaggtagacaacaggtggttaatagaggcagaaactacaaataaaattgctacttgttgtactccggtgtattgtttttagatacattatagacaaatataccattaggattacatcctctgcaggcaattctcaacactgaaatgccatccattcttat

SEQ ID NO: 459949 - DNA, 299 bp, Homo sapiens
acttttacagcttactgtttttcccttctcttgaacatattacatattagtggtatcctagggcctgctcattctggcttgcaataactaattttgcatctcttttcccaaatctgtattcrgtgaccctcccattggtagtttgatatttgttattgtgggaatatttaaactatgaaaattggcaaatgctacaaaggaaagcccttttcactgccatagccaattattaaactatcatcacatcactgaacaataaatatcatttatattaaatttttaagccaattttatagatg

SEQ ID NO: 459950 - DNA, 579 bp, Homo sapiens
gttacatcaatcctgttggagggatatgtgtgtaccattattcctttcttttaggtttggtcttcagttattcatctctgtacatcaaactgctaagaaccctagaccaataatgaatttcagaacagctcaattttcttggagatatatatggttaagaggaaaaaaaaacctaacatatatgggaattttaatkgagtcattttataaacattttctattatatcaatagtagctttagtttaataaaataaatatttgaagcaaggtgaaaaatatattttattattaatgtaaggggtgggtgccctaaccagactttttatatgactaactgccatctctataatcatatgcctaggtgaaagaaaagagaaagaaaaaggaggagaaaacatttaggggaaaatctgagtaagcatgaacccatcccggacaagatttcttcctaattctctgtcagcaaagagctaccattagaattttgggataaggtcattctatgtctagaaagcactatcccaggctaatccttactcttaattaacattcagagctaattcagataagcatgctgat

SEQ ID NO: 459951 - DNA, 569 bp, Homo sapiens
cctgtctaaataagtcttcagtgtggaaatgtattttattaagggtttaaatttttattataaataatgaattaatttttaaaattatgttttaattaagtttaccaaaggtgtattttcaaaatgctatcttgtttcattaatgaaatgaygtaaagtcccactagttttcaggatattcaccctctaattttctgtctgatacatacttatatgactgaataataaacattcgataattctctatctaaatagcaaaaagtccaaatagtgaaatatcttccatcgatactcccatttttacctcagataaccgaatttaagcaaaccattcgttcatcacattggctaggtaagtccttttaaacaatattgtgaagtaatgtcaccaggaagtatatgagatttttaataaagaggttggcatctcatgaaaagaacctaagtttcactgaaacgagattttcctattttaaaagaaatttaaaaattttcaagtgttcaacagaaaagaccttcatcagtgaggaaaaacacagtatttctgatttctgctcccagcaaattca

SEQ ID NO: 459952 - DNA, 569 bp, Homo sapiens
cctgtctaaataagtcttcagtgtggaaatgtattttattaagggtttaaatttttattataaataatgaattaatttttaaaattatgttttaattaagtttaccaaaggtgtattttcaaaatgctatcttgtttcattaatgaaatgacgtaaagtcccactagttttcaggatattcaccctctaattttctgtctgatacatacttatatgactgaataataaacattckataattctctatctaaatagcaaaaagtccaaatagtgaaatatcttccatcgatactcccatttttacctcagataaccgaatttaagcaaaccattcgttcatcacattggctaggtaagtccttttaaacaatattgtgaagtaatgtcaccaggaagtatatgagatttttaataaagaggttggcatctcatgaaaagaacctaagtttcactgaaacgagattttcctattttaaaagaaatttaaaaattttcaagtgttcaacagaaaagaccttcatcagtgaggaaaaacacagtatttctgatttctgctcccagcaaattca

SEQ ID NO: 459953 - DNA, 572 bp, Homo sapiens
tttacacttaggtaaaaattttgacataaaaaagattctcagggtaggactctactttaaaaagttgaattttttgggcagtttgtcatggaaagtcttaaagcagcttctctgtgcttttcagatggatagatttagaagaaatgagttgaggacatacttttttaaaaattatctatatagttaagcaaaattgtcattttcagctcaaggttcatacraaagcagtatttcttttatatatgttatcatggctctgacaattctttatagtatttatctgccatgatttgacaaagattataactaactcatgagctatttaatcatgtagcttccacttaagttccttatgttataccgaaaagttaaaacacatgcatcagatgtcatgaggttgtagtccacaatgactgatggcagaactgtattctgttttttggcctggcagtaacactacaactgatcagacaaggatgactaaggacagaagagatgtgaaggcagctaaaccctcactgcatgaaccatggtcagagagacactgtttgaaaaggagcaagcattggaag

SEQ ID NO: 459954 - DNA, 622 bp, Homo sapiens
ggaataaatactgcaattcaatgccttatgatttcatgccagcgtgacagcaaaactcataaggracaggattctggattaagaatgaggagacttgctctagcagaaattctctgtataggtgaccttggggaaatcactgaaaatttcaggactttgttccatgatctggaaagtgactgtgttttaaaaggtgatttcagggtttcccccacagctctatgcctctataacataataataccacaggtgcaatgcaaaataagacaaaaattactccagccacttacatcgctaatgagttccgtgcattttctggccaattccatgcttaagtcttcaataacaggcttatagaagacctatttgaaaaaaaagaaaagaacagaaagaacatttttctcattgtcaatttagaggaacaaacgctggtctgagtatgtgttttctcactcacctggtcttcttcattttcttcttcccctatcttttcttcttcagtttcatcttttatatcctcaaatacagggaccctcatttttaccctttaaaatatttatatttttaaaatttactcatgtggcgtccttttccataccacagtgcccttgagatgctgacg

SEQ ID NO: 459955 - DNA, 564 bp, Homo sapiens
catcctaggatgaacatgaaacacatccagaaaagtggtttttcactttttctgaaatccacacggcctgatgcaatgtcatgtccagacccaatgtttcatgaataaaggtgtatacgtgtcaggtaactgtgaaggtaatttctacttctgtcttatactttacagtcaaagccccagattctggaggatttaaacatgatcaagaaatgccacttatcatcaaaggcctcacacaattacacaacaaaaataaatatttcaatcactttgtttatgggaaattgattctatcaaaaatgacagtgttaagaataatagaatggtttttaaggttttttcctgtattctttttttctaaatccatactctctttcctggtttgctaaacacaggcaaattctaacacctttataattctaaggatgcaakgatacaaagcttaattcaaatggttaaatattcctttgtggcctggtatggtggctcatacctgtaatcccagcactttaggaagctgagatgggaggatggcttgagccgaggagttcaagaccaacctgg

SEQ ID NO: 459956 - DNA, 604 bp, Homo sapiens
tacttcattataagtaaggtgtctctaaaagggacagatctcctagacccctccttaaccaagtaaccagtcctgatatcataatggtgatggacaaactagaccttctctgcccgcagatgggctraggttggaaactcacagcattgtctctgcagtgttcccagcaaaaagtttaggctgaatttaatcatgaagacattttcagacaacttcagaatgtagatcattgagccagagagctgacctgtcctctataaacaagtccatgtcaccaccatcaatgacaacaacaaaaagatgaggaaatatttggggttcaaaataactaaagaaatgcagctacattatctttttactttttttcaacccaaaatatctcttctcctttttgttgtgtgatttgtggtgatatggactatgtgaaggagacaggtcagttgtcctgctcagtgttctacattctgcagttgtctggtgattacctcctatgaaactcaggctaagcgttttctgcaagaacatggcattgctcatattctgcaccggcagagtcctgggtgacatgctgtctcctgccagcggctcctgactcctgttctct

SEQ ID NO: 459957 - DNA, 604 bp, Homo sapiens
tacttcattataagtaaggtgtctctaaaagggacagatctcctagacccctccttaaccaagtaaccagtcctgatatcataatggtgatggacaaactagaccttctctgcccgcagatgggctgaggttggaaactcacagcattgtctctgcagtgttcccagcaaaaagtttaggctgaatttaatcatgaagacattttcagacaacttcagaatgtagatcattgagccagasagctgacctgtcctctataaacaagtccatgtcaccaccatcaatgacaacaacaaaaagatgaggaaatatttggggttcaaaataactaaagaaatgcagctacattatctttttactttttttcaacccaaaatatctcttctcctttttgttgtgtgatttgtggtgatatggactatgtgaaggagacaggtcagttgtcctgctcagtgttctacattctgcagttgtctggtgattacctcctatgaaactcaggctaagcgttttctgcaagaacatggcattgctcatattctgcaccggcagagtcctgggtgacatgctgtctcctgccagcggctcctgactcctgttctct

SEQ ID NO: 459958 - DNA, 612 bp, Homo sapiens
tacaaaatccatcttataagctggaagacagaggcccatccagatctgtctttggagactttcttaagttctacatactcaagatcaattttatgataatataaatacaataggagaaagagctctgcttgcaactcagtaaaataaaaattcagagatgataggaaattccatatctattcttggcctagcaggaggaattttgtagcttgagaaggagctgggatatttctctaagacactgtgtaaccaagtctcaggcccatgattcaccacttcttcttctttggtgctctgcaaaatgccatgggttgttctgagtgattgcctcaccgtggcatgatagacatgagaactcaagacgagcaatgaaagtatcatgattgacacaaattccaagtatgttggcttaactattttcatgtttgttctgttaacacagaagagaccaggttctgctgctgtgtgttctttagttgcattttagtgagacttttcctctccctttatgaatataggattctgacagctgacaaatgacattccaagaacttagccagagcccarattgtgccctgctgtgggaatttctcctcatagatttgtccaaca

SEQ ID NO: 459959 - DNA, 604 bp, Homo sapiens
gttaagtaactcggtgtttgggcatacctctgcgtgggactgtctccgccgcgcccctcatctctacgcggatagattcccacacgcttcccttttccttgggccgctgaaacctctccgaccaaccgccgaagagtctccctggaccccgcagcttctctccttcccggaccttcttgatcctcgctccatagtgagacgtggcctaacgtagcggaaagcccagcacgcgaatccctctgatgggctttgggttacccaggggtttgccgggagactagatgaaagtagcaaaggttttaattcccagtatttaaaactgcagcaacccaccggaaacactccccactttcaaggacaggcttcgagcacaggaacgtaaattccgggattattagttcgagcacagagaatgctccagaggtggcacgcccctcaggttagcttctagctgccacgaccaaggtccataaatgcagtacagcctgtataatataataacttygttgggtagaaacgtagtagcccttcctgccggaagagtaagaagtcctgcatggccgggagtcgtaccggagtcgccggcgtgggagacaaaaacctc

SEQ ID NO: 459960 - DNA, 532 bp, Homo sapiens
tttagtatttactaaatttgggcttcttcatatgcaagggggttatgataataatacctacctcgtgargacagtatgaggactaaacaaaattgtgtatgtatagctttggccaatacccatagacactgagcgctcaactaggtgttagctactagattttaaattttaaattatttttatagtttttaagataaaatttacattcattgaaatgttaactgaattttttgtaattcctacccctatcaaggcagaccatttttagcacccagaaatttctcttgtgtgccttcccagtcaatatcctgttagaaggaactgctgttatgattttttcaccacagattaattttgccttttctggaatttcaaataaatgggatggtatgcactcttttgtgtcatttatttatcttcacatactttaaaataaaaaggtccaattggggatgtagtaaaaacctctttcccaccagtagccaccagtcaagagtctttctttctctctctctctttttttttttttttt

SEQ ID NO: 459961 - DNA, 532 bp, Homo sapiens
tttagtatttactaaatttgggcttcttcatatgcaagggggttatgataataatacctacctcgtgaggacagtatgaggactaaacaaaattgtgtatgtatagctttggccaatacccatagacactgagcgctcaactaggtgttagctactagattttaaattttaaattatttttatagtttttaagataaaatttacattcattgaaatgttaactgaattttttgtaattcctacccctatcaagrcagaccatttttagcacccagaaatttctcttgtgtgccttcccagtcaatatcctgttagaaggaactgctgttatgattttttcaccacagattaattttgccttttctggaatttcaaataaatgggatggtatgcactcttttgtgtcatttatttatcttcacatactttaaaataaaaaggtccaattggggatgtagtaaaaacctctttcccaccagtagccaccagtcaagagtctttctttctctctctctctttttttttttttttt

SEQ ID NO: 459962 - DNA, 327 bp, Homo sapiens
atggaggaggtagaagaggacagattcaaggaaaatttggaaggtaaaaaccagtaggatttgctgatggacggaatataggaggggaaaggtagattatcagggatgtatcttagttttcttatagaagatgtatttagttgcaatgmaattgttaattgaaattgactttaaataatggcacgacttaaaattatgcaaacatttgccttagataaaatttcaagttttcaaagtttttagctgggtagatggcatggctttacttcatatttcttggtatttcctaatcttgttaaaaaaaagtttttctttttctcaaaggct

SEQ ID NO: 459963 - DNA, 479 bp, Homo sapiens
tttctgtaaataaattcagagaagcaggtcacattaagcaattcatacttcacatatgaccaaatcactgtccagtcatagcacaaggacataactattctcagtgcaagaataaggattctgacaggaatattctagggtgccctagattaactttggtgagaattagatgaccctgctttccagacccacaggccaaaatctccctctacgtgtagaccataatgccatattccctgcctgagtcaaagttaaacaaaattttttccccaaaaaaatctccaaaaattggtcaaacaattttctaagaatgttgctgcaatacggacttatatcaccaggtaacgtggacatwaaatgtttagaggcatctatacatgaaacacgactgatagataaatttgaacaactcttgctttaaaaagaatctgtgatttgggaggccaagacaggtgaatcatttgaggtcatgagttcag

SEQ ID NO: 459964 - DNA, 611 bp, Homo sapiens
tattcattataaattacccagtctcaggtattctgttatagaagcacaaaacagatgaagacaggttccagtggttttacacccatctttctatcaatcaccttcttcctgaggatttgataaagatgatgtgttaggctgggcatcccaaatttctttccattgtggttgaagaacatactttgcaygatttcaatccttttaatttattgaggtatgttttatggcctaatatctggtcaatcctggacaatgttccatgttcacttgaaaagaatgtctattctcctgctgttagatgaaatgttctgtatatgtctgttaggcctagagctttcatagtgctattcaagtcttcttatttccttgctgaccttctgtctagttatatctattgtttaaaactaggtactgaaatctccaactatgattgttggtttatttcttccttcaattctgtcagttttgtttcatgtattttgggactctgtcgttacatgcatgtttataattgctatgtcttcttgatggagtgattcttttatcattataaaatatctttatctctaggaataattttcaatcattgaaaaatgtctttatctatcgct

SEQ ID NO: 459965 - DNA, 611 bp, Homo sapiens
tattcattataaattacccagtctcaggtattctgttatagaagcacaaaacagatgaagacaggttccagtggttttacacccatctttctatcaatcaccttcttcctgaggatttgataaagatgatgtgttaggctgggcatcccaaatttctttccattgtggttgaagaacatactttgcatgatttcaatccttttaatttattgaggtatgttttatggcctaatatctggtcaatcctggacaatgttccatgttcacttgaaaagaatgtctattctcctgctgttagatgaaatgttctgtatatgtctgttaggcctagagctttcatagtgctattcaagtcttcttatttccttgctgaccttctgtctagttatatctattgtttaaaactaggtactgwaatctccaactatgattgttggtttatttcttccttcaattctgtcagttttgtttcatgtattttgggactctgtcgttacatgcatgtttataattgctatgtcttcttgatggagtgattcttttatcattataaaatatctttatctctaggaataattttcaatcattgaaaaatgtctttatctatcgct

SEQ ID NO: 459966 - DNA, 497 bp, Homo sapiens
aaccatgccagggcattttgtgaaagataaaacatgagagttttcagtacaatgctgaaccatacatagatattcatgtctctgtgcacgttgggctgactgtgcttgcagaatgtgaagtggraaatatctgaacgaacattttgtatttatagaaaatgatgaagatgaggatgagatgttcaagttgaggaggatgagaaagtgctggaatcatcttcccccaggtgacactgaatactcaggagcaagtaatgggtgttaacatatgaaaatgtctaggaggcatgccctctctggcatctatgatgggccaaaagcccgcattcccttggccacagtatgtgaaattcaacccagcttagacacagggtgtggcagctgtcgtgtttctgtatgtgtgccaagtgtcatgtctgtaccatacagggatagctgagtcttcatcctcctcagctcctatttgtccagtgcactgaacaccagctgctctcttc

SEQ ID NO: 459967 - DNA, 497 bp, Homo sapiens
aaccatgccagggcattttgtgaaagataaaacatgagagttttcagtacaatgctgaaccatacatagatattcatgtctctgtgcacgttgggctgactgtgcttgcagaatgtgaagtggaaaatatctgaaygaacattttgtatttatagaaaatgatgaagatgaggatgagatgttcaagttgaggaggatgagaaagtgctggaatcatcttcccccaggtgacactgaatactcaggagcaagtaatgggtgttaacatatgaaaatgtctaggaggcatgccctctctggcatctatgatgggccaaaagcccgcattcccttggccacagtatgtgaaattcaacccagcttagacacagggtgtggcagctgtcgtgtttctgtatgtgtgccaagtgtcatgtctgtaccatacagggatagctgagtcttcatcctcctcagctcctatttgtccagtgcactgaacaccagctgctctcttc

SEQ ID NO: 459968 - DNA, 551 bp, Homo sapiens
ttttcatcttgaattgcttactagtgcttacaaggctgactgactcaatgaactaattcaggtttaggaattacacattcgagcttctggttccatatctcccattgcttggctgttcttgaactgaggtaaataacctttaggctttaatttatatcataggcaaaacggagatgatgataactgttggcacctactggttcagggagatgttgtgcctctttttatttttttttaaatcagtatttaaaaagtattctctaaagtgctctaggaagtagaataataaattgccgtgacaaattggaccattacaaattcaccacatatgtttttattaagatagaaaattgggtctcaatattgtgtaacatcaacagggataygtaggaactctagtactcacagaagtctcacaccccacacacaccaacctgtgctatagcatacgcttcctctgtctttcatgtatggcaggcaatgtatgttttctcactgaatctttgccacactttttggagagttaggtgccattattaacatgttaatca

SEQ ID NO: 459969 - DNA, 551 bp, Homo sapiens
ttttcatcttgaattgcttactagtgcttacaaggctgactgactcaatgaactaattcaggtttaggaattacacattcgagcttctggttccatatctcccattgcttggctgttcttgaactgaggtaaataacctttaggctttaatttatatcataggcaaaacggagatgatgataactgttggcacctactggttcagggagatgttgtgcctctttttatttttttttaaatcagtatttaaaaagtattctctaaagtgctctaggaagtagaataataaattgccgtgacaaattggaccattacaaattcaccacatatgtttttattaagatagaaaattgggtctcaatattgtgtaacatcaacagggatacgtaggaactctagtactcacagaagtctcacaccccacacacaccaacctgtgcyatagcatacgcttcctctgtctttcatgtatggcaggcaatgtatgttttctcactgaatctttgccacactttttggagagttaggtgccattattaacatgttaatca

SEQ ID NO: 459970 - DNA, 523 bp, Homo sapiens
aaaggatttgccattctagatgccattaagaacatctgtgattcactggagaaggtcaaaccctcatgtatgcctttgaggagttcaagacttcagtaactkgaaaagtagaggaagtaactgtagatgtagcagaaatagcaagagaactagaattagaggtggagcttgaagatatgactgaattgctacaatctcattataaaacttgaatgaatgttgagttgcttcttatggatgagcaaaggaagtggtttctcaagatgggatttattcatggtgaagatgccatgaacattgttgaaatgacaacaaaggatttagaatattcacaaacttaattgataaagcagcagcaggatttgagaggactgactccgattttgaaagaagttatattgtgggtaaaatgctttcaaacagcatcacatgttacagagtaatttttcttgaaaggaagagttaatttatatggcaaatttcattgttgtctaattttaggaaattgccacagtcaccccca

SEQ ID NO: 459971 - DNA, 523 bp, Homo sapiens
aaaggatttgccattctagatgccattaagaacatctgtgattcactggagaaggtcaaaccctcatgtatgcctttgaggagttcaagacttcagtaacttgaaaagtagaggaagtaactgtagatgtagcagaaatagcaagagaactagaattagaggtggagcttgaagatatgactgaattgctacaatctcattataaaacttgaatgaatgttgagttgcttcttatggatgagcaaaggaagtggtttctcaagatgggatttattcatggtgaagatgccatgaacattgttgaaatgacaacaaaggatttagaatattcacaaacttaattgataaagcagcagcaggatttgagmggactgactccgattttgaaagaagttatattgtgggtaaaatgctttcaaacagcatcacatgttacagagtaatttttcttgaaaggaagagttaatttatatggcaaatttcattgttgtctaattttaggaaattgccacagtcaccccca

SEQ ID NO: 459972 - DNA, 523 bp, Homo sapiens
aaaggatttgccattctagatgccattaagaacatctgtgattcactggagaaggtcaaaccctcatgtatgcctttgaggagttcaagacttcagtaacttgaaaagtagaggaagtaactgtagatgtagcagaaatagcaagagaactagaattagaggtggagcttgaagatatgactgaattgctacaatctcattataaaacttgaatgaatgttgagttgcttcttatggatgagcaaaggaagtggtttctcaagatgggatttattcatggtgaagatgccatgaacattgttgaaatgacaacaaaggatttagaatattcacaaacttaattgataaagcagcagcaggatttgagaggactgactccgattttgaaagaagttatattgtgggtaaaatgctttcaaacagcatcacatgttacagagtaatttttcwtgaaaggaagagttaatttatatggcaaatttcattgttgtctaattttaggaaattgccacagtcaccccca

SEQ ID NO: 459973 - DNA, 323 bp, Homo sapiens
ctgtggccaggccctgagccagagggagtggcccagtgaaggcctgaggctgggagctaggacttagaagatgactcagagaggggccaggtcttgcaaggcctgggaggccattgctgagtgagaagtgggaraactgggcttcattctgggagcaatgggaagtcagtgaagtatggagtgtttgtgagagagctctggcttctttacggagaatgggcttgaagagggcaagaaagaaggcaggagggagagatgatggtggttggattagaacagtggcagtagaggcagagaaaagtagttatgcttccaagtcctca

SEQ ID NO: 459974 - DNA, 323 bp, Homo sapiens
ctgtggccaggccctgagccagagggagtggcccagtgaaggcctgaggctgggagctaggacttagaagatgactcagagaggggccaggtcttgcaaggcctgggaggccattgctgagtgagaagtgggagaactgggcttcattctgggagcaatgggaagtcagtgaagtatggagtgtttgtgagagagctctggcttctttacggagaatgggcttgaagagggcaagaaagaargcaggagggagagatgatggtggttggattagaacagtggcagtagaggcagagaaaagtagttatgcttccaagtcctca

SEQ ID NO: 459975 - DNA, 564 bp, Homo sapiens
agctgcagaattaacaccatgtagacaccttcaagatttgtggctggtacctcttggagaggcaagtcgagtggcacctcgggcctcttgaaccacagctgagctggcagaggggtgctgcactggagtgcagggggcagaggcccaagggggccctgggtagcaagataattttgtattcaactttagttattaataatataaagttgtaaaaatctaaataatgtacattattttagactcacaaattcaagtaaayggataaataacagtaaaatgaattttatgtgaacaaacaaaggagttttacaaagtttgagtcagtatttctggagctttgatgagagttttctgtttttgttttactcagtaattattccttacgacattctacaacttggcaaactaagattgttattctataaacaaatgcagtagattattactcaggccatttgatttctactttgtaaaatagggagagaaatgtgtatatgtttggaatatgttatcagtagttccatgttaactttaaataatagttctgcatttctttattcttgc

SEQ ID NO: 459976 - DNA, 564 bp, Homo sapiens
agctgcagaattaacaccatgtagacaccttcaagatttgtggctggtacctcttggagaggcaagtcgagtggcacctcgggcctcttgaaccacagctgagctggcagaggggtgctgcactggagtgcagggggcagaggcccaagggggccctgggtagcaagataattttgtattcaactttagttattaataatataaagttgtaaaaatctaaataatgtacattattttagactcacaaattcaagtaaatggataaataacagtaaaatgaattttatgtgaacaaacaaaggagttttacaaagtttgagtcagtatttctggagctttgatgagagttttctgtttttgttttactcagtaattattccttacgacattctacaacttggcaaactaagattgttattctataaacaaatgcagtagattattactcaggccatttgatttctactttgtaaaatagggagagaaatgtgtatatgtttggaatatgttatcagtagttccatkttaactttaaataatagttctgcatttctttattcttgc

SEQ ID NO: 459977 - DNA, 498 bp, Homo sapiens
aaggcacagagaagaaaaacatgacacaaaatgctgggctcaccaggatggagtcgtctgctccctggaatcttggctcctcaggctctggctgccttagcagcacttggaagcctccaaacgatttttattttttggatttgtatccaggttttctggggaaactttatctacagtaagctcgtagacacataaaaaggtataattcttgattgaaatttaaaatcaactcttcatagtgtacagatyttggtcacaagccagaacattcatccaacacatgcatgcatgttgctgctcactccagcatttttggatatagtttgaaggtagagtcaatgggatttgcccaagataaggttgcagagggtgcaagagaagagccaaggatgataaagcttttgcactcagcacctacaaagttggcattgcatttccttaaaggggcaagtctacaggaagagctcttgataggaggaaattatgcaggtgaatgtg

SEQ ID NO: 459978 - DNA, 590 bp, Homo sapiens
  misc_feature (1)...(590): n = A,T,C or G
aatgaaaattctataatccaatgtttccaacaacttttcagtttctttcaccccagagtgtcgtttattttttccgtatgtgcagaaaggtgttaacaatagcaagtctgagaccacttatcctcaaaaccatctgctcttaaggttggcctctgactggtatctgggaactgattttgagtcagtttctactaccataattgataaaagcgggttattrtgcctaaattgcttgtagaaacaatgtagtttgtgctgaatgcctgcataacttctgagagtctgtcatttttctatacaccaaacagagggtactcacatgtccaatctacaagagaaaccctgggcactgggtctgtaatgagcttccccggtagagaacacttcatagatgttgtcacagcttctttctggtaggattatttatgtcctgtttgactttattggaagagggcctttaaaaactggtgcctggtttaaccaggacattaccccatgcaaatctncctgtatattttgctttgcatcctttcactgtaataaatcatagccatgagtatgactatatgctggtactgggagtcctncta

SEQ ID NO: 459979 - DNA, 590 bp, Homo sapiens
  misc_feature (1)...(590): n = A,T,C or G
aatgaaaattctataatccaatgtttccaacaacttttcagtttctttcaccccagagtgtcgtttattttttccgtatgtgcagaaaggtgttaacaatagcaagtctgagaccacttatcctcaaaaccatctgctcttaaggttggcctctgactggtatctgggaactgattttgagtcagtttctactaccataattgataaaagcgggttattatgcctaaattgcttgtagaaacaatgtagtttgtgctgaatgcctgcataacttctgagagtctgtcatttttctatacaccaaacagagggtactcacatgtccaatctacaagagaaaccctgggcactgggtctgtaatgagcttccccrgtagagaacacttcatagatgttgtcacagcttctttctggtaggattatttatgtcctgtttgactttattggaagagggcctttaaaaactggtgcctggtttaaccaggacattaccccatgcaaatctncctgtatattttgctttgcatcctttcactgtaataaatcatagccatgagtatgactatatgctggtactgggagtcctncta

SEQ ID NO: 459980 - DNA, 586 bp, Homo sapiens
aaggtacacatatgtcaaaacattgcattgtacatcataaatatacataaattttacatgtctattaaaaaagaaacttaatatagcctaaaaatttcagtggtttaattgaggctagattgttaaatctggagaaatgttctcaaagaatattgtcactagtattaatttcatttataaatgtgagattatayatttatacacacacatcactaattttagatatgcaaatgtgatcattaaaaattataatttaaatagtttaattagaatataaccaattttaatttctctgacaactcttctgcaacctgagaaatgccctatgacaacaatgacccttttatccgtggccataactgagggaagaaggcacctgatccaaactagaccaatgagcgcctgtcttaagaatttgtattaaagtctgagacatatctatggttctttcttaatgacttctttgtggggtcccatgttgagctgtgcatgtagagaactgaagaaagctaacctacagagaaagagacaaattgagctatgttaagataagagctatgacagaatgctattcaaccctagaaaa

SEQ ID NO: 459981 - DNA, 576 bp, Homo sapiens
ccaggtttcagtcaatagcaccacctgctaaactttaaggaagctgaaaaagccaatgtccaacacttttctgtgtagagaacttatctagtctttccttttcttagaaggtgctgatactatcatttttaataggcatttgattaaaacatattggatgccactttatacataccaatatatgggtttttctaagccttttttctttcttctcaaacaggatgtgcaaaactataacctactgcccaatttcagctttctgttttatggatctgtccccgaggctgcatgacagttttgctgaaattgagccaatgcatctcagatgatcacacacagggtggtctgtctgctgctttcactttccaaacatccatgactatgtgaaattgttttgtgttgtgctaggaccatcttctgcccaaatgcctgtggcttccctatttcatctccttcttcaacagctgtttgggattctctcctacagtcattgccacctttacytatgaaaaaatttcccaccgtttgcagattctttctctaatactactggctaagtgactcagctggagagta

SEQ ID NO: 459982 - DNA, 558 bp, Homo sapiens
tagatatttccctaatgattccacttgtctctgggcctgaagactgaatcatgtgtctatatggtaaaaggtaggaagtctgttttgatagtctccaacaaagaaagcatttaaagacagatgtactctagagtgcaggtttccccacagactaactctgtgatcttgaagagcttactcaacttctctaattttctcaaaaaataatagtgcttattttattacaaaaattaaatgggaccrtgcgtaaatatactttgaagctcctggcatttaataaatactcaaaaattgcctatatatatccttagtttattaggtacaatagttaatatctaaagtaaggtaataagctatgtggccctctagataatatttgagaaattttcttgatccagaacaatcacatctcttggtaggtcttcatgatctcactcattttgaaatgtgctcacatattattcacagggattatctacttactatttttggtgagaaaagacagtacatacagctgggacacaaagataaagagaagtatggagtagaaaagtaaat

SEQ ID NO: 459983 - DNA, 558 bp, Homo sapiens
tagatatttccctaatgattccacttgtctctgggcctgaagactgaatcatgtgtctatatggtaaaaggtaggaagtctgttttgatagtctccaacaaagaaagcatttaaagacagatgtactctagagtgcaggtttccccacagactaactctgtgatcttgaagagcttactcaacttctctaattttctcaaaaaataatagtgcttattttattacaaaaattaaatgggaccgtgcrtaaatatactttgaagctcctggcatttaataaatactcaaaaattgcctatatatatccttagtttattaggtacaatagttaatatctaaagtaaggtaataagctatgtggccctctagataatatttgagaaattttcttgatccagaacaatcacatctcttggtaggtcttcatgatctcactcattttgaaatgtgctcacatattattcacagggattatctacttactatttttggtgagaaaagacagtacatacagctgggacacaaagataaagagaagtatggagtagaaaagtaaat

SEQ ID NO: 459984 - DNA, 597 bp, Homo sapiens
ttctcttatgatttaaaaaatatatatttacatgagtatctcaactatgttagtctccctcctacagcatctctagggttataattgagagagrgagtcagcagcccacattagtttgtcatcttattaagaaccagaagtcaattttgatatactgtagaaatctaattcttcaaactgacaaaattgatatttaaatcaggctattgtaataatcctcaagcagattgcattgcaggtgtctaaaaatcttataaataaccttttctaacaagcagtatgctgtatatcatccaaaatgggaaagtaagagtacgtgcttttaaaagtgcacattttaaacttttactctggtgaattatgcacaaatatcagccttagattcagatattggcagggtcttgagttagtattaggcctcaagataccagaactgtactgatactttgattcatgcaatattattactgaaacgaataatcaagcaaataaaataaataaaattggaacaaaaattagcaaagaaccaaaagcaactaatgtggcagcaaagcttattttccaagcccagtttttaaagagatgtatattagatag

SEQ ID NO: 459985 - DNA, 562 bp, Homo sapiens
cttcgtgggttttattaaaatttttaactgcaggttttaaaacctgaatttatttacctattatacagttgaactatgatttattatttctataacagtctctcttatcttataatttgtaatcaaactttaatgtgttgttttttctatgttttatgaaggatttaatttcctactatgcagattttggagaaacacattatttctttttaaaataagcaaaatattgccaaaataaagggctttctttcagtttgtggaaaacctcttaattgctttgaaatcatgtgattactataaagttatgtttaataccaatattgttttacaatattagcttactttatygtttcaaatagtcttactttttttgttgtttttctttgtccatatgtaatagacttagaaatttatttcacaagatagcctaattcgtggctcctcaagtctaaaaacccttttataaaagattaccatctgcatgtcattgaataacatatgtatgattcctgagatatattatttataatgtaataatcttgccaaaattatgttttcagta

SEQ ID NO: 459986 - DNA, 562 bp, Homo sapiens
cttcgtgggttttattaaaatttttaactgcaggttttaaaacctgaatttatttacctattatacagttgaactatgatttattatttctataacagtctctcttatcttataatttgtaatcaaactttaatgtgttgttttttctatgttttatgaaggatttaatttcctactatgcagattttggagaaacacattatttctttttaaaataagcaaaatattgccaaaataaagggctttctttcagtttgtggaaaacctcttaattgctttgaaatcatgtgattactataaagttatgtttaataccaatattgttttacaatattagcttactttatcgtttcaaatagtcttactttttttgttgtttttctttgtccatatgtaatagacttagaaatttatttcacaagatagcctaattcgtggctcctcaagtctaaaamcccttttataaaagattaccatctgcatgtcattgaataacatatgtatgattcctgagatatattatttataatgtaataatcttgccaaaattatgttttcagta

SEQ ID NO: 459987 - DNA, 608 bp, Homo sapiens
ctttttttgttgtttttctttgtccatatgtaatagacttagaaatttatttcacaagatagcctaattcgtggctcctcaagtctaaaaacccttttataaaagattaccatctgcatgtcattgaataacatatgtatgattcctgagatatattatttataatgtaataatcttgccaaaattatgttttcagtaatatatactttcttaatgtttctgcactcctgacatgattgttctatttttttcaaattagtctcaaatgatgcaaatgctggatcaaaatcaatcttagtgggatctaaatgccaaagttcagttttcctccgcccataatgaaatctctccttacttgatacttgagtccaaagatgtacttactgtactgattatttaattggtgaagggaactataaaaacctcccaaaatgcagtggtccataacattatccaccatattttctaaaaagattcrtttttttttagttttatgaaaactactctataaaatttatgtagtgatgataaagtgactatcctataccagtaagattgacacatcaggatcaaattcagatgacagaaagtgagagagagagagaaag

SEQ ID NO: 459988 - DNA, 581 bp, Homo sapiens
ttgtttcatttgaacacaagatcactagttacaattccactttgacacgttgaaaaacaaaactaataacattatggtattgttaacgataacccttctattatgttttcatctataaatagttgacagaaaaactgagaaaaataatttttaaaaagtaatttaaaaattgtaaataatttgcatcctttatcagtattcattccctgttagagttagccctggtataaaagaatttgattgcatagcggtggagatagtttttacaattgtcatgactcactgttttctagtaaatgcagaaatagctctgaggttaatcttccatatcaaaataaaatgagcagccacctgctctaatggcttctcactgccacgaatgggctgacaggccagaagagcagctggaggaggaaaggccttgtgatgccagtggtttgtttacctaacactacttcaactcattttactttatttttcaagtggyatttatgggtatcttctggatatgtatttccattcagaatatgcacaaaaagtgttacatccatttctgacattcagaaatttagcaagttatt

SEQ ID NO: 459989 - DNA, 650 bp, Homo sapiens
aaatcattgaataaaatataaaccaagtaacaaattatgatggaaaatttctaccagaagwtggaaaggaaaatctggaaataaacagaatcaatcatgagtaatgacttagtaacctaattggttaatagaagaactcaggctgggaacctagaaaagaaataaattcaaaactttctagacacagaccaaaaagccaccagcttaaaactgacaaatttctatgggagaaattcttgtgactaaaaatgaagtggaatatgtagaaagcttccagaaagaaagtggtctacggcaaagtttctttggctctaggttatagacaagccgctagagaacaaattaagtggtgaaactgctatgcgtatcagtcactatctggctggtttcctgagatttcttccatggcataaaatagatcttataaaatcgctggaatgtctagctgagtgtatgatgtttgggaagtgtcactctagaaagcaataaataaatagaagtcagttcccaaagtactaatctcaataaagtcctctttaatctttgcagtggtatcaataaaagtgactagcacaaaatatctgagattttagttaagtgttgctactggcattttagcaaagaagtttgtaaaagtttaagaggaaggt

SEQ ID NO: 459990 - DNA, 613 bp, Homo sapiens
taggaacaccgtgattagttatccagtgccagatctctacatgagtcagactattctgattgctgcttttcctctgctgtccattatggtagctatgcccaccttgcctttgatggttgagtgctgccacttgtcctctgccacctcgagatccaattattcccattgtatttaaattttgtagttgagtgactccagttctcactgttagatctgacatacagagaagataaattacagggctcttcaaaaattcaggttctgccctcacaaatctattttgcaaggcattggtcaagagtatatcttctgcaccctcccagctgggatgagtaggtctaaagtgactaacccactccaccatcccaatctccctaagcctttggatcccttcccctacgttaaaccaagagagatcaggcatttccagctcactcacagtgggccaccttttaatctatatttcagctaagcaagcaaataaactattagaaygttctataactccccaagctgcaacattaaatacagagtccctacttagtgggcccaaatcaataaattcaacctgatccaactctatgttccttccaccattatcccacacccgtaa

SEQ ID NO: 459991 - DNA, 613 bp, Homo sapiens
taggaacaccgtgattagttatccagtgccagatctctacatgagtcagactattctgattgctgcttttcctctgctgtccattatggtagctatgcccaccttgcctttgatggttgagtgctgccacttgtcctctgccacctcgagatccaattattcccattgtatttaaattttgtagttgagtgactccagttctcactgttagatctgacatacagagaagataaattacagggctcttcaaaaattcaggttctgccctcacaaatctattttgcaaggcattggtcaagagtatatcttctgcaccctcccagctgggatgagtaggtctaaagtgactaacccactccaccatcccaatctccctaagcctttggatcccttcccctacgttaaaccaagagagatcaggcatttccagctcactcacagtgggccaccttttaatctatatttcagctaagcaagcaaataaactattagaacgttctataactmcccaagctgcaacattaaatacagagtccctacttagtgggcccaaatcaataaattcaacctgatccaactctatgttccttccaccattatcccacacccgtaa

SEQ ID NO: 459992 - DNA, 566 bp, Homo sapiens
ctgtgggggactgggacatctcaagtgaccatggaagttgagtaatttggacctccagcagacaatgcagtctctattggtagctgtcttaggcactctttcctgttccacagctgagcagaattcaaatgatcatcagccatctccaaatactaagtttttatggtaattagagccaaatgttttgtgaataacaacagaagcttctagaagcagattgaaaagtactgatttagtctaaatcttgtattttaaataacaagccattgggacatatacatgattaagtgacttacttaagattaaaaaataacagcaggactctttcaaccrtattattcagctcatcctttgacagtcactgcatgattaccctgccatgagaattatgagatataagatatttagcatgtacagataaaaaaagtcgggtctgcatgatatgcttcttatgttggaaatatttttatgattttaggtggctaataaataccactgagctatgatgctgagataaatattttattttctgccatcgtggtgatttcataaaagtgcatgaagaa

SEQ ID NO: 459993 - DNA, 566 bp, Homo sapiens
ctgtgggggactgggacatctcaagtgaccatggaagttgagtaatttggacctccagcagacaatgcagtctctattggtagctgtcttaggcactctttcctgttccacagctgagcagaattcaaatgatcatcagccatctccaaatactaagtttttatggtaattagagccaaatgttttgtgaataacaacagaagcttctagaagcagattgaaaagtactgatttagtctaaatcttgtattttaaataacaagccattgggacatatacatgattaagtgacttacttaagattaaaaaataacagcaggactctttcaaccatattattcagctcatcctttgacagtcactgcatgattaccctgccatgagaattatgagatataagatatttagcatgtacagataaaaaaagtcgggtctgcatgatatgcttcttatgttggaaatatttttatgattttaggtggctaataaataccactgagctatgatgctgagataaatattttattttctgccatygtggtgatttcataaaagtgcatgaagaa

SEQ ID NO: 459994 - DNA, 597 bp, Homo sapiens
catgattaccctgccatgagaattatgagatataagatatttagcatgtacagataaaaaaagtcgggtctgcatgatatgcttcttatgttggaaatatttttatgattttaggtggctaataaataccactgagctatgatgctgagataaatattttattttctgccatcgtggtgatttcataaaagtgcatgaagaacctgctctctgtggtacattctcctttagctttttcagaaatgcttgaactccagtgaaaaagtgattcacctagaatactcctgttttctagtaagatattaattaagtggaaactttatattgtaagagacgaagakaaatcttttttaactagtaagactgaattgaaaacaagttgtgttcactaaaaataaattatttttctttgaagagttaaattatttctgacaatattttgctatatgtttttatgattattacatatatagaaaatgcttttttgtgtaaattgaagaaataataaacaaaatataaattaaaagaatggcaaccatagcagaagcttagcattagctgcaagctatttcccactgtaagatataatagttacag

SEQ ID NO: 459995 - DNA, 571 bp, Homo sapiens
tactctttaaatttgcctaaaacttgttatatttagtattatcaaacaaatttcttgttttgcatttatttccattgcacttttttgtgtgcatttgtatgtacaactcaccataaatgggaatgtatattttttgtagtgataaatcatagggacgtgtatgtgcaactaatttaatggataatgtatgccaaccattttaacaaagtatattaatcttctccaaaactctgaacacttttataagtatggcatacttttccctagatkatttcatgtaaggtttagtttcatgtattcatgaaaattgctttggtgctttctctttgtgacatacaatataatagcaccataaaggtacagacatgtcagtccgaggtgacagagctaaaattatatataagaaattgcccaaatacagatcacttgtttgttctatagtttagtagtttcattttttattgacaaaggggaacataaaaactaggaaggttgttttatgttggtgtcttttgtaggttatccttacaaattccagatccttcttctctttactttaaactgtcagaca

SEQ ID NO: 459996 - DNA, 578 bp, Homo sapiens
  misc_feature (1)...(578): n = A,T,C or G
ttctgtggatgcctcattgaaagtttctccatgtgtttctgagtgatgtganatccatgaggtgaaaaaacataaattacttctttttactggaggacttgcatatctccaaggtttagaggtaaacgtgttttccaatatatacattttttttaaataaaatgagagatgatagcagaatgcattacttcaattaaatttagtttgactcaaaattaactcaccttacatgtacaaagtaccattttgaaggaattttcctagtwaaaaaaaaatgaacacaaaactataatctttttatatctaccaaaaatgaggcagtcacagttcataacagatgttgaacaaaactgaaataagaacaatggaattaaagcttatgaaagtaatgaaaggtttcccaatccataatttcaaagtgaagtaaaaaaatagaagtaaaaggagcatagaaataggatatttgatgttttgtaatagtatcaagcaaaaattgaaaatcacaaataacaggataatcaatatttaaatgcatgtcattactaaaatatatcataaatgactattgattatattta

SEQ ID NO: 459997 - DNA, 578 bp, Homo sapiens
  misc_feature (1)...(578): n = A,T,C or G
ttctgtggatgcctcattgaaagtttctccatgtgtttctgagtgatgtganatccatgaggtgaaaaaacataaattacttctttttactggaggacttgcatatctccaaggtttagaggtaaacgtgttttccaatatatacattttttttaaataaaatgagagatgatagcagaatgcattacttcaattaaatttagtttgactcaaaattaactcaccttacatgtacaaagtaccattttgaaggaattttcctagtaaaaaaaaaatgaacacaaaactataatctttttatatctaccaaaaatgaggcagtcacagttcataacagatgttgaacaaaactgaaataagaacaatggaattaaagcttatgaaagtaatgaaaggtttcccaatccataatttcaaagtgaagtaaaaaaayagaagtaaaaggagcatagaaataggatatttgatgttttgtaatagtatcaagcaaaaattgaaaatcacaaataacaggataatcaatatttaaatgcatgtcattactaaaatatatcataaatgactattgattatattta

SEQ ID NO: 459998 - DNA, 570 bp, Homo sapiens
aatgtagaccattacttactggatgtattaataaagtaaatatctaccttttccctagaaaatatgttttcagattgtgtcttctttttctcaatatatgcaaaattctatccagttcaattgtcctgggtgaacgcccgggtttcccttctaacatgttccatggtcttaccacaccctatacatgcaatgaatcaaaatatcgccaataagaataatcatttatggagtccgacatgttacaagtagaaattttttaaattttctctaattggcctcatctggttctgtggcaatcactggaaaaacttggcaattgggacatctccatattttctggctttaaaatttttaatttcagttttagtgttagttcttctctctccgctgrtctttcctaatctttttttaggatggtatttgggagcaaaattaaggtcctcggggaagaacattatacctaaatgctgtcctctgaacatttgagggtccacagggtaagatattgagccagtcttgtctatgaatatcctgccttggtgtatactaaggatgtgtggttgattgatc

SEQ ID NO: 459999 - DNA, 553 bp, Homo sapiens
ttaacaccgaggtaataagattctactacagtgcctttgtgtcattcaggacttggcattatataaaatgcagagcttctttgagagacttctagaytacccaagctgccctagagtaagtggggagcaagccccaatgttctctgattcagctaaacttatttaaggtttttttaattttcagtttctagtttctctacctctccactccagtggaaattaagcagttccctccatcattctgcattctttttgttaaaaaaaaagacaatccttcaagactattgtttagctattaattttaataattgagcttgagcctctaaattaagcaactgtttctttgatctaggtgttcctcctcactcctcagtctgactacccacaaagcagtgattttccctattcctaatgtaattctccaaatgctcacaagacttcaagcacttttacttcagtagcattgtactattcacctctgtagctctgacctttacctggcacagaagaagcacttgaataaatgccaagtggaagaatggtgaacaagtgg

SEQ ID NO: 460000 - DNA, 553 bp, Homo sapiens
ttaacaccgaggtaataagattctactacagtgcctttgtgtcattcaggacttggcattatataaaatgcagagcttctttgagagacttctagattacccaagctgccctagagtaagtggggagcaagccccaatgttctctgattcakctaaacttatttaaggtttttttaattttcagtttctagtttctctacctctccactccagtggaaattaagcagttccctccatcattctgcattctttttgttaaaaaaaaagacaatccttcaagactattgtttagctattaattttaataattgagcttgagcctctaaattaagcaactgtttctttgatctaggtgttcctcctcactcctcagtctgactacccacaaagcagtgattttccctattcctaatgtaattctccaaatgctcacaagacttcaagcacttttacttcagtagcattgtactattcacctctgtagctctgacctttacctggcacagaagaagcacttgaataaatgccaagtggaagaatggtgaacaagtgg

SEQ ID NO: 460001 - DNA, 553 bp, Homo sapiens
ttaacaccgaggtaataagattctactacagtgcctttgtgtcattcaggacttggcattatataaaatgcagagcttctttgagagacttctagattacccaagctgccctagagtaagtggggagcaagccccaatgttctctgattcagctaaacttatttaaggtttttttaattttcagtttctagtttctctacctctccactccagtggaaattaagcagttccctccatcattctgcattctttttgttaaaaaaaaagacaatccttcaagactattgtttagctattaattttaataattgagcttgagcctctaaattaagcaactgtttctttgatctaggtgttccycctcactcctcagtctgactacccacaaagcagtgattttccctattcctaatgtaattctccaaatgctcacaagacttcaagcacttttacttcagtagcattgtactattcacctctgtagctctgacctttacctggcacagaagaagcacttgaataaatgccaagtggaagaatggtgaacaagtgg

SEQ ID NO: 460002 - DNA, 563 bp, Homo sapiens
tgttctctgattcagctaaacttatttaaggtttttttaattttcagtttctagtttctctacctctccactccagtggaaattaagcagttccctccatcattctgcattctttttgttaaaaaaaaagacaatccttcaagactattgtttagctattaattttaataattgagcttgagcctctaaattaagcaactgtttctttgatctaggtgttcctcctcactcctcagtctgactacccacaaagcagtgattttccctattcctaatgtaattctccaaatgctcacaagacttcaagcacttttacttcagtagcattgtactattcacctctgtagctctgacctttacctggcacagaagaagcacttgaataaatgccaagtggaagaatggtgaacaagtgrcattgtattctatatggactcttccgtgtttctctgttttttttttttttgttttttttttttcttcttttttgctttgtgaccaccacttaactagcagagagcaaggtaccttaatcagggtttgtgtctctggctccttgactg

SEQ ID NO: 460003 - DNA, 599 bp, Homo sapiens
taaacttatgctaatacttctactattaaatatttgcgttttgctgtttagttaaatctatgaggaaaaatcttagcacagtgctggtatgtgataactatatattaccatcattataacaattatgtatatgtatttactagttggaatatatatttttattacagacatttgtaacatatatgtctgtatacatctttcaatttttttaaaaaccagtaattctgttttctgtttccacattttaaacacatttttggtactttgactctattcctggaagttgaaatgaactgcttttctggcaactaggctagttggaaggttgataatttcttctgtctacaaacaatagtgcaacatcaacattagctagcagaaccagaacttttttaagtaataccatcacctgcaaagaaaataattctgcattatgcaatttattctgtttcatagctttggaattgatcaggtgactaatatagaatatgaayatgaattaattcaaatttcaacaccaataaaatgttctttgctttctagttaccatgatgacctttcttcgttctcctctattacctgtcattctcattatataa

SEQ ID NO: 460004 - DNA, 584 bp, Homo sapiens
attttccaaagcaaaatattgtttctcctaattgtgttgtgcctgtctgaaacaaattgtttttgctgctgtaaaggttcccggatcctcactgcagctcatagtccagccagagcattggaaaacagtgyacatttcagaaatagataattttccaaaatgagacagtgctctccagagagaacaagacctttattttctcaagccttgaggtagttcatgctactgtttaaataccaacactctataaaaatcacagccatttatcttattattcaagaagtctccacggttgccacatagcagttttattacagaaaagaaagggagaagtaaatttcttactatccccaaatcagataatggaattcacatccttttccttgtcctagttatttatctgggacttcctggtaaaaattctgtacttcacatgtgtattatatcagggacacaaagtgatcagttaacttggggtgggagcaaagagccataaatatattttaaccatcaaaaagctcaattgtatcatttgcaaaggattaaaaactcattctatgtatatatttaaataacaatgttta

SEQ ID NO: 460005 - DNA, 584 bp, Homo sapiens
attttccaaagcaaaatattgtttctcctaattgtgttgtgcctgtctgaaacaaattgtttttgctgctgtaaaggttcccggatcctcactgcagctcatagtccagccagagcattggaaaacagtgtacatttcagaaatagataattttccaaaatgagacagtgctctccagagagaacaagacctttattttctcaagccttgaggtagttcatgctactgtttaaataccaacactctataaaaatcacagccatttatcttaytattcaagaagtctccacggttgccacatagcagttttattacagaaaagaaagggagaagtaaatttcttactatccccaaatcagataatggaattcacatccttttccttgtcctagttatttatctgggacttcctggtaaaaattctgtacttcacatgtgtattatatcagggacacaaagtgatcagttaacttggggtgggagcaaagagccataaatatattttaaccatcaaaaagctcaattgtatcatttgcaaaggattaaaaactcattctatgtatatatttaaataacaatgttta

SEQ ID NO: 460006 - DNA, 586 bp, Homo sapiens
tggggttggggaacacaaacacctctttgaccaccactactgagactgcttgtgtcacacctgaagccagcacagcactgggtctcaaacaaggcctgctgtaactactatctggctacctcctatgtttgctccaggcactagggctctaaaatcagcaagtggcaaagccagacaggctggtgtccttcccttcagagtgatgagttctcccaggtcctgggcagatccagaaatactgtctgggagccagagactgaagtcagaaaccttagaaatcttagaacctgttgttctattgcactgtggttgcacaggcactcaaaccatgagacagagtagttcctactcttcccccgctttccaaaggcagaggagcctcactttgtggccataactaccacaggtccatagggagtactgtggggctgccgtcaaagttcccttaaggccccaggtctctttagtaagcttgtggtgaatrctgctaggtctgggactcactattctgggtaatgggctcccctgtgacccagaattggtccagaaattccattcaggagtcaaggcctagtataagggactc

SEQ ID NO: 460007 - DNA, 599 bp, Homo sapiens
tctacagacttaatactattcctatcgaactaccaatgtcatttttcatggaatttgaaaaaaacccttctaaaattcatgtgtaaccaaaaaagagcctgaatagctaaagcaatcttaagcaaaaacaacaaaaacaataacaaaaccccacaatcccgagcagaagcatcacgttacttgatatcaaactgtagtataagatatagtaacaaaaccagaatggtacttgtacaaaactgaaacatatgtaaacctagggattattagaaaacaaaacacacacaaatacatagatgatggaaaacaatagagcactcagaagtaaagccaaacacctacaactgtctgatctttgacaaagttgaccaaagtaagcaatgggggaaagsctccatagccaaaccaaagccttccactctctgtgtatcttaaccaccacccttgaaaaatccatcacacattttgtcctgaaccaatttaatagtcttcaagactgatcttttacttgtcctttttatttgagtcttgttctctgtactctctaaattgcaaacaatatgatctaataattattacataataaattaagtagatca

SEQ ID NO: 460008 - DNA, 460 bp, Homo sapiens
tgctgtgatctgaagatacaaagtcatgaaaatcaacttaggtgraagatcttttcaagaattacaaaacactgttgaaggaaattataggttacacaaacaaatggacaaacatttcattctcatggattggaagaatcaatattgttaaaatggccacgctgaccacagaaatctatagacttaatgctattcctatcaaactaccaatgtcatttttcacagaattagaaaataactcttctaaaatttatgtggaaccaaaaaacagcctgaatagctaaagcaatcttaatcaaaacaacaacaacaataacaaaaccccacaatccagaacacaagcattatattacttcatatcaaactgtactataaagtatagtaacaaaaccagaatggtactggtacaaaactgaaacatatgtaaacatagggattatttaaaaaacacacacacaga

SEQ ID NO: 460009 - DNA, 460 bp, Homo sapiens
tgctgtgatctgaagatacaaagtcatgaaaatcaacttaggtggaagatcttttcaagaattacaaaacactgttgaaggaaattataggttacacaaacaaatggacaaacatttcattctcatggattggaagaatcaatattgttaaaatggccacgctgaccacagaawtctatagacttaatgctattcctatcaaactaccaatgtcatttttcacagaattagaaaataactcttctaaaatttatgtggaaccaaaaaacagcctgaatagctaaagcaatcttaatcaaaacaacaacaacaataacaaaaccccacaatccagaacacaagcattatattacttcatatcaaactgtactataaagtatagtaacaaaaccagaatggtactggtacaaaactgaaacatatgtaaacatagggattatttaaaaaacacacacacaga

SEQ ID NO: 460010 - DNA, 614 bp, Homo sapiens
tatgctcagtacctggatgatgggaacaattatacctcgaatctcagcatcatgcaatataccaaagtaataaacttgcacatatacaccctgaatctaaaataaaaattgaaataataataaattgtccaggtacagtatctcatgcctatgatctcagcactttggaaggccaaggcaggaggatcacttgaagccaagagttgaaaacatgtctggtgaataaagcaagacacctrtctctacaaaaattatataaaaaaatagctaggcatggtattgtgcacctgtagtcccagctacctgggaggctaagacaagaggactgcttgagcccaggagttcaaggctgcagtgacttatgattacaccactgcactccagcctgtgcaacagaacgtgatcccatgtcttaaaaagtaataataaataaataaataaatgcaccttcagagtgacagtgtttaacacatctgactcaataagccaatacaaaaagaaaaaaaagaatagattgctaacatagaaattattttttgaccctaatacaactaatttaaaaatcaatttttaaaagatacaaaagctcacttggaaagtcaaaatgaaacata

SEQ ID NO: 460011 - DNA, 620 bp, Homo sapiens
aatgcctataattgaccatatttaatatgtatgttgatatggtttagctgtttccccacccaaatctcatcttcaattrtagtaatctccatgtgtcaagggtggtgcgggttggagattattgaatcgtgggagcagattcccttgtactgttcttgtgatattgaataatcctcataagatctgatggttttataaatgggaattcccctgcacaaactctcttgcctgtagccatgtaagaggtgcctttgcttcttctttgccttccgccatgattgtgaggcctccccagccatgtggaacggtgagtccattaaacctctttcctttataaattacccagtcttgggggtgtctttattagctgcgtgagaacagactaatacatatgtgtaaatgtatatgcatgtatatgcattatttgcatgtgttaatatggcataaagtcataattactagagcaagttatagttaggcagactgagtaaaataaacaattcaggaagtattcttgttgttctttatgattaaacacctctatgtttttcatttttcacagataaatgttttcttttagtcactacctgagtgaaatttgtacatgtacaatacatatg

SEQ ID NO: 460012 - DNA, 597 bp, Homo sapiens
tatctgttaaaatgtaataaatgtcttctcacctaatacagaggttatatggattttcttttttgtttcataatatagtaaaaaaatcatagtttttaacatgtaaaaccttttttgaatgcttgaaaacactcaaatttattttgataggctactttgtttgatttgctcatatttrataattttttatgttcctatcctttcctcatcattttggtaactgaatttacactgaaaacacagtacaaatagtgcttcttcctgttactatttttttctccggaatatattgtataaaaaggaattatcacttcattgaagcattggtagaattcacattgtaaaccttttgactctgtttcttttttgtgagtgtagttttcattactatttcaatgtattgtactataaatggtcattgaaccttatgttctcttcacccaggccaatatttggttctaaatattctgtaaatttaaatttaatttttttgatataaatcattttaaaagtgtgtttgtgactatctaaatgtttcagttagttttagtgctagctttatattgctgatatctaattttattaaatttgtgttat

SEQ ID NO: 460013 - DNA, 624 bp, Homo sapiens
gtttcataatatagtaaaaaaatcatagtttttaacatgtaaaaccttttttgaatgcttgaaaacactcaaatttattttgataggctactttgtttgatttgctcatatttgataattttttatgttcctatcctttcctcatcattttggtaactgaatttacactgaaaacacagtacaaatagtgcttcttcctgttactatttttttctccggaatatattgtataaaaaggaattatcacttcattgaagcattggtagaattcacattgtaaaccttttgactctgtttcttttttgtgagtgtagttttcattactatttcaatgtattgtactataaatggtcattgaaccttatgttctcttcacccaggccaatayttggttctaaatattctgtaaatttaaatttaatttttttgatataaatcattttaaaagtgtgtttgtgactatctaaatgtttcagttagttttagtgctagctttatattgctgatatctaattttattaaatttgtgttatcgactatgctgttaactttctaaaatgtgtccagattgtttttgttgagcaatgtcacttttactggtccatatttgaaaaaagatgtgta

SEQ ID NO: 460014 - DNA, 391 bp, Homo sapiens
cagcaaggaaattttagactaaccttatcacttagaacattcagaaaaacttgacataattaaaaaaaaaaaaacatgccttccagaactagcaaggcaagaaagatatgtgggactaacctctaatctggttgagaaacaatgttcagagaggtgagtcaacatttagcaatatgttcctctagatgaatttgccatttttacaagcagtagctaaaagactgtggacytgagcagagatgtaggcaggttcacagagcaaaaaggataaaaattagagatcagagacttcccaaaacttctgtctatacttggaaatgctacactctagcactaataatgaatgcaatacaaactaacactcacagagactaaaacccagtttcaaatt

SEQ ID NO: 460015 - DNA, 607 bp, Homo sapiens
gactgatataccatacatggctatcaaagctaaaaatcatttgctgtatcattataatactattaggtaatgctttttcagcaaggaaattttagactaaccttatcacttagaacattcagaaaaacttgacataattaaaaaaaaaaaaacatgccttccagaactagcaaggcaagaaagatatgtgggactaacctctaatctggttgagaaacaatgttcagagaggtgagtcaacatttagcaatatgttcctctagatgaatttgccatttttacaagcagtagctaaaagactgtggacctgagcagagatgtaggcaggttcacagagcaaaaaggataaaaattagagatcagagacttcccaaaacttctgtctatacttggaaatgctacactctagcactaataatgaatgcaatacaaactaacwctcacagagactaaaacccagtttcaaattttatcaattttctattgactaaatgtaatctaggattgcaagggtcattagattcatcactagacagaaacctaaatttcttctggagtaagataacattattcaccatcaaattacctgtattttttttctaatgta

SEQ ID NO: 460016 - DNA, 588 bp, Homo sapiens
tggtacatttgatgctaggagagtttctaattatgatctttaacatcaaatttcatcagtctagaatataaatatataaaattttccataaaacataaagtggatttaattgtcatgtataacaatattaggtaaaaggattgctgttcaaatgataatttttttaatatgacagaagtctatgcatcaccttcaattcaattttgaattgaatcattgataaattctttttattttttatagttttctaataatgccatattataccaaatagtaaaaatattaatctcatatcttgaggaaatttcattttccctaagtttaatgtaagyatttgtcacagtaaagaaaaacaatttaaaaaactaaatccattgtttactcatttataaaactggaacaaggtagaaataagatgagaaaatagaatagagatattttttcaaaacatgttgaaaatctcttacagggcaaagcttcctgttaggcattcttttactttttaacatctttctagcatctaataatcacatatagtcacttctatgagttatagttcaagtatctgctcccaaaactttctaacac

SEQ ID NO: 460017 - DNA, 575 bp, Homo sapiens
atttcctgtttcctcattattcaattttattttgcaattacaaataatgatattataaatatgtatgttttgtgtcaagataggcttttattctttttggaaaattattgaggagcagaatggataaattttatggtaggtgtatgttttacattttaagaaactgttttccaaagtggctaagccattctaccttcccaacagcactcgatgaggtttctatttgatcttcattttcactgwcatgtgttgtgatagtctgtttaattgtagtcattctaataggtctatagcgatatgtctttgcggtctccatttatgtttttctaataaattcttaagttgaacatttatttgtgtggttacttgcaatctgcacatgttttttggtgaattttctgttcaaacattttgttcattttctgaacaaacattttctgttcaaatattttgttcaggacactttatccattttgtttaagttttttacattgtctatgtcagttttcaacctgtagtaattatgtaatctcataggacatattgtcaggattgtggaggtttggaaggtaatg

SEQ ID NO: 460018 - DNA, 589 bp, Homo sapiens
ctcattttttgcttgttaatttgtttaagttccttgtacattcttgatattagaccttggtcagatgtatagcttscaaatattttctctcattctgtgggttgtctgtttattctcctgagaataagtgatttttttcaattaggtcaaatttgtcaatttttatttttgttgcaattacttttggaatctcatcatgaaatatttgccagtgcctgtgtccacaatggtgctttctaggttttcttcaagggtttttatagttttaggttttacatttaaatctttaatccatcttgagtttatttttgtatatggtgtaagaaagaggtccagtttcaatcttctgtatatgtctaccgagttataccagcaccacttattgaataagtggtcctttccccattgcttgtttttgtcaactttgtcaaagaagattagatggttgtaggtgtgccactttatttctgggctttctattctgttccattagtctacgtgtctgttttgttgttgttgttttttaccagtaccatgctgttttggttactgtaaccttgtactataggttgaagttggataatacgat

SEQ ID NO: 460019 - DNA, 383 bp, Homo sapiens
ttgacctgtaaatcaacatgagtagcatgccattttaaaaatactgattcttcctacccatgagtatggaatgttttttcatttgtttgtgtcatctttgatttatttgagccgtgttttttaattctagttataragatctttcaaacctctggttagctgtattcttatgtattttattttattttattttattttattttattgggactatcatgaatttgattgcattcttcattcaacactcagcttggacattgttggtgtatagaaatgctaatgattgtcatacattgactttgtgtcctgaaactttgctcaaattgtttatcagatctaggagcttctggacagaaaccatggggttttctaaatatagtcat

SEQ ID NO: 460020 - DNA, 553 bp, Homo sapiens
aaagatatgtagatactttaacctgtaaataatctataaaaaggctaataaaaaactatatttcttttcttcaaagaatatgtaatctatttgattaagaacatacaatggagagaagcatgttatcttccttgtaattatttctctatatctagtaatattttctaaatataatgatatattcctatatccaataatagacatagccataatatcatcagcttatcttcacattatcatgccactaaaaaaagtaataaaacatgtaacaattctttaatgttttcaaaatacattttatacattctctaatttccatattttgaacatttttcattktgtttccagactgcttatgttttccttaatttccgaattttctatacattttcagaacccatttgcttagagtataaccaaaaaacattcatcacatacacagattacttttaatttttttctttatgaatgcatcaattgattctgtgttgtctatcaaaatgtatgatattaactgattcacaagtaatagaaacccctatttctatgcaca

SEQ ID NO: 460021 - DNA, 490 bp, Homo sapiens
ctacatctttaactttcttaggtttttctaaaattttttccctaatgatatgcatcagtttatactccaccactggtatataagaatgccctttgctccacattcttgctaatatttagaaatgtcaaacttaaatattgttaatctcatgttgtgaaatggatcctcttactgctcattttactccatttttcaagatttattttctgcgataatggatattgcttctgacaattgttttccattttcccactacctrgtatgtgataaatctgctttctctggcttatgttggctagtaggttttctaatgctagccaataaatgcttacagcaaaaggtaacacatataagtgttggtctagataatttacttgtcaatacaatacattttctttttgatacaggacagagaaacattttatatgatgacggctccatcagtttgcagctctgtgcgatatgatcaacagacccctcttggaagaaa

SEQ ID NO: 460022 - DNA, 618 bp, Homo sapiens
gatattctgtttgttgaggaaattattttgtaccaaccaatatttatttattaatgcattgataaccaatgaattatctcattgaatatgaaaaaatatattaacacttttagtttattattttcataaaaatttgaaggattaacttttgatggcattcaaatttctaccattgaaactgttgtgatagattttcatttcctcactctaacttatgatttatccccatctttctctatcatgtttggtaaatgatacctcattgagtctggaaaactagattgacttccattttcttttaataagaagaaagaaaatttattctatttagtactaaagatactatagtattgttttggtaacaagtgctattcattttgagcacttactgtatttcatgtactagtacctgtaatgtataatctaatttaagtataacagtaaatctggaagttaggtattatttgtatttacatatgaatacattgaaggggtttatgyctctcaatatcttaattacctctttcatatattttacttgtttataatttaaatcaatatgtcttgatatataaataaataaaagttacataaattaaatagcacaaaaggtagaca

SEQ ID NO: 460023 - DNA, 618 bp, Homo sapiens
  misc_feature (1)...(618): n = A,T,C or G
aaccaatcatcaaggacatgttaaatgacatcaatggcagtaggtttagtgttaataatatgcaaccacaaatgtttaacacccctaattttctctctttatgctagtatttttaagtgactgtacagatttaaaatactgaatgtattgtttatgttgagagacattataacttgtaaaaacagaaaatagtatgtttacytggaagcagtctagggtcactgaagcagcagtatcgttgtctgagatattacctggagttctttgtctcacaaccaagaaaattaaggagcatggccaccaagggtgaggttggagtgaaagtttaataagtgaaagacgaaaggtctccacagtggagagggggcctgagagggttgccatcacacagtcgaatgcannnnnnnnnnnnnnnnnnnnnnnnnnnnnnnnnnnnnnnnnnnnnnnnnnnnnnnnnnnnnnnnnnnnnnnnnnnnnnnnnnnnnnnnnnnnnnnnnnnnatccctctagtgtgtatgcaggctcttagcctgagttactccatattgtttcacctctcttactgtgcatgcatcagatgctggaattttacactccagacatgcctggttctgtgta

SEQ ID NO: 460024 - DNA, 505 bp, Homo sapiens
aggcctgctaccagagttccttttaccccatatatcatatctgactatcaagaaaatattgtaaggcacaccaaaaggcaaataaaaacccaaacccaaataaacaacaaacctgttccatagtctgaaaaaagggacataattgaaagcttaacggtcaccctaaagtctacacatcaatgcttatagcagctttattcataatgcccaagcatataattaaccaaaatatttcttcaggtgaattgataaataaatctggtatatccagaaaagggaatattattcagtgttgaagaaaaatgagctatcagtccataaaaaggcatggaaggggccaggcacagtggctcatgcttgtaatcccagcactttgggaggccacagcaggtggatcgcttgaggtcyggagtttgagaccagctggcaaacatagtgaaaccccatctctactaaaaatacaaaaaattatctgggcatggttgcaggtgcctgtaatcccagc

SEQ ID NO: 460025 - DNA, 450 bp, Homo sapiens
atgatttccctatgggttttgtaggtagcatggttctagcaacactttgattttggacttctagcctccggaattgtgagacaatatatttctgctttttctgccacccagtttgtggtcatttactaggacagccctagaatactaatatgctcaatatctccatttaaatctggtacaaagagaagtaatacmaacgtgtcagtttttataaatcttatgagaggtattaaaataacaatgttttactattagctttgtaatgatggggggagcaatgctcttactcaggctttgtccttagcaaacacccaggaatgcaacaaatagatgtcaaattatatattatttgattatagtgactaaatgtactttaaagtagaaatacaaaacatttttattaaaattatctggccaaagactcttctaaacattttatataaggcattt

SEQ ID NO: 460026 - DNA, 531 bp, Homo sapiens
ccttttatatattttccagttatgttcgctgtcccaattttaatagctgaaataaataaggcttctatttatgtagtcttagaattatattataaatatttaacaggctaaaaatacagtttaaaatttaatttgatacaaatagcctaggtaaatatgagtgatacataagtaaaaagttaaatgtggaaactttttgataattaggattatattttaaaataaatctgtttctgaaaaaaatgttgtcccaacattaygaattcaacagccaaataattaattttaacatttttcttgcatcatcatgttttgaaacattattgagagatctcaggtacccagtttgaaattccttcatgcatatagtcttatcaaaactaaaataagatttcaaggggtcttgtcatttggaactgactttgtagccatttcctccaatgatcatagctgtcttggtgatgcttgactagtagttaggtgtcctcaagtcagagggataactgggctctgtttggcttcctccacttg

SEQ ID NO: 460027 - DNA, 542 bp, Homo sapiens
tgtaaatgattattttatctgtcttaagacaaaatgaagctacttataagatagtaatacttatatgttatgaaggatgctatctataaacactggagaatatatgaaattatttcttttagattataaagatggtaatgaatcataacattctgaaaatttttttctctcataaattggtttttcctatggaaaaataaatttgttatttgagatgagattaggcatttatttgtaaataaaatttcataaaatagcaaccatgaaataaaattaaaatgtatataaaaacaaatatctgacaaatctgtaaaaaatgcattctcattcttaaattagtaataataatgaaaatgacaataataattctaaaattatcataacatattggacaagyaaaagaatatattacataatgggcttatgtcaatagttattttttcagtatttttaataaaaatatttcattatcaaaatacccatttacattagttgtaaagttactaattaattctacataaatacattcaactgtattaaag

SEQ ID NO: 460028 - DNA, 552 bp, Homo sapiens
atttcatttaactttttaagttgtaaatataattaaaattgaaacacaatatacctgtaatgtggctgcagggttgaatggatggcaaacactacttatttctacagaggattatatttctaagaaaaatcacagaaataatacattgtggtgtgtttaaagtaaccgcatgacaagaagtgtcattgccttgtgcattctcttggttcttaatgcaacactatgttgaaactctttgttaaatgtaaataaataaataaacacacaaacaaactgcttggattataaggaagatgcactgataaagactccaaactagtcaaggaaagagaaaggaagaaattatcttgatgctgtcacctttggaacaatttctgtttttattattggactcagaaattattaaagcattaaagtttctcacatcaacagaaattactgcatataattttatttaaaatgtcatttgcagtattgatcttttaaaatgcatgaagaccatagaattaatccaccatttttwgtctctaacttaagcttgaggaaacctga

SEQ ID NO: 460029 - DNA, 570 bp, Homo sapiens
caatagaagctgtgtgcatgtgtgtgcactaatgtgcatgcatagttttgaggctctagctgaaggcatgtctatatcccaagagcatattgttcttacatgcaacgtgtggtacctgacacaaactctctctaaaatatgattatgcaagagaaagaaaaatgtgtacctttaatgcatagacttcctcagaatgatgtataacagaatttacraaggaataaaattgacaactcatgaaataaatatatatatacatatgttatttattgttttcagtaataggtactgtggtacttccaatacttagaaattttaattgaaatgtttttggtcatgtgcgctgccaagtgttacatgtgctgttaattatgacacaataattttcctttaaaacaaatatagctacaagaggctaaaaatttagtgagtgactaataaaagctcaatttgatgaacatacatgtgttgaatacccataatatatgacattctgatcccttctatgtgcaagatttcctttactcttgcttcacctagagttatctttcttctttcagttgtaaaagg

SEQ ID NO: 460030 - DNA, 625 bp, Homo sapiens
tctcctagacaacagttcttttttggggggggtgggggagaaggattctcactctgttgcccaggctggagtgcagtggcacaatcttggctcactgcaacctccgcctcctgggttcaagcaattctcctgcctcagcctcccaagtagctgggactacaggcatatgtggccatggctaattttttgtattttagtagagatgggatttcaccatgttgcccagcctggtctcaaactcctgagctcaggcaatccatccacctcggcctcccaaagtgctaggattacaggcatgaaccaccatgcccagcctcctggacaacatttctaaacacaccccaagccataagggaaactgcagtcttgaagggaaggacccaatcctggcaggatccatcacctgcttactaaacagcccttagggcctgtataagcagctgtgatatacaggtaatatgccatgggctttggrtgacactctgagacttgctggcttcaggtgagacttagcacattctgggctgtggtagctatggggagagactccttctacttgagaaaagaagagggaaaagtaaagaggattttaacttgcaccttaggtactaacttgaccagaggg

SEQ ID NO: 460031 - DNA, 563 bp, Homo sapiens
gaaataaaaacaagataaacaaaagctaatggatttcatcaacaccagaccttcttccaagaaatgctaaagggagtatatcaatcagaaagaaaaggatggtaattagcaataagaaatcatctgaaagtacaaaactcactggtaaaagcaagtaaacagaaaaacacagaacataataacactgtaaatgtgatatgtaaatcactcttaagtaggaagactaaatgatgarctaatcaaaaataataactataacttatcctgagatagacagcagaataagacaaaaagagaaataacaaagagtttaaaaatgggggatgaagttaagatacagagtttttattgggtgcttatttatgcagaaaatattaagttgttatcaggttaaaataatggattataagatagtatttgcaaccctcatggtaacctgaaatcagaaaacataaaacaaatacacaaaaataaaaaaagcaagtacttaatactaccagagaaaatcaacttcactaaaaggaaaacagggaagaaggaagagaagatcacaaacagttaca

SEQ ID NO: 460032 - DNA, 566 bp, Homo sapiens
aaacataaaacaaatacacaaaaataaaaaaagcaagtacttaatactaccagagaaaatcaacttcactaaaaggaaaacagggaagaaggaagagaagatcacaaacagttacatacttatcaataataaaattgaaggtaaatggactaaacccttcaatcaaaagccacagtggctgcatggataaaacaaaaacaaaacaaaacaaaaacacaagacacaatagctgttgcctacaagaaactcactccccctataaagacacacccagactgaaaaaacagggatggaaaaagatattccatgccaatggaaaccaaaaaaaaaaaaaaaaaaaaaaaggagagcaggaatagctatactaatatcagacagaatatatttcaagagaaaaaytgtaagaagagacaaagaaggtcgctatataatgataaaggggtcaattctgcaaaaggatgtaacaattttaaatatatatgcacccaacactggaatatccagatgtataaagcaaatattattagagctaaagagagagacagacctcaatacaataataacta

SEQ ID NO: 460033 - DNA, 560 bp, Homo sapiens
tatatgcacccaacactggaatatccagatgtataaagcaaatattattagagctaaagagagagacagacctcaatacaataataactagagactttaactcccactttcagtattgggcagattttccaaacagaaaattaacaaaaacataggacttcatctgyactatagaccaagtgaacctaatagctatttacagaacatttcatccaatggctgcataatacacattcttctccttagcacatgaatctttctcaagtatagaccatattttgggtaaaaacacaagtcttaaaacatgccaaaaaaatgaaataatattaagcatcttctctggccacaatggaataaaacaagaaattaacaagaggaattttggtaattatacaaacgcatggaaattaaacaatatgctcctggatgaccagtgggcaaatgaagaaatttaaaaagaaacttaaaaagttcttatcatcaatttcttgataatggaaacacatcatttgaaaacatatgggaaacagtgaaagcagtattaacagggaaaattatag

SEQ ID NO: 460034 - DNA, 603 bp, Homo sapiens
atagttacagtgttttcttataatcctttttatttttgtaaggtcagtttggatgtccactctcattcctgattttagtaatttgagacttgtctggatttttgtttcagtcatttaagtgaaaattttgtcaattttgctggtcttttcaaagaatcaatttttgttgttttttttgtattsacttttattttctgttttatttatttccaaattaatatttgtctcttttcttccatttgctctgggttccagtttgctctttttttgctagtttcttgaggtagaagattgttttagatttgagatcttttttaaaacaggcatttatcattataaatttctaagcacttcttgaaatacattccataaatttaggtatgttttcattttcattcacctcaaaatatttactaatttcctttttttttctttgacccatgggttatttggcagagtgttgtttaatttctacatgcttataaatttcacaaattttcttctgttattaaatgtctaatttcatctccttatggtgagagaacatactttgtatgatttcaatctttttaaatatactgagacctgtttatggcataatat

SEQ ID NO: 460035 - DNA, 550 bp, Homo sapiens
aaggtcttgcacaacttcggaaggtgaatggacttcaagaagctttcatgcacagacctcccaaactggtaatggtatattgtacttctacgcactcaggtagttccttccttcatttagagctacctaaactggactataaggaagcagtgcatggggcagaggaatacttgctcttagccagcatgggataaaggacagtatcctgacttatctagaaatctggtaaatacagaaaatggaacttacagtgttggggatcttgccatcccctttcctccatggaagggaacagattggcccttccctcatattcccctgcccagtggttttatggtgtgtgtaaactcataaaattcatgctacatataygcaaccagagggctgaatgagacatcgcctgcatcacttgcactgagatgccagtgtgacagatagcaggacactaaagtgaatctgaggctgattcccccactccacaagaagattgcctgaagaaatgtccccaagaacctgctccatgattcttggttgctcagcctaatcagaa

SEQ ID NO: 460036 - DNA, 586 bp, Homo sapiens
tggtcttaggcatagaagaccttcaatcaatgaaaattcacagtacacaatgtacagagagctcttgttgaagactgttgaaaaagaggaacatggaattgcttttctcttcattctatccctgcatatgggtaaaaataaaacaatggtgaagcaaaaaawtttcatggggctcataattcaacactaaacccaaatttatttcagactctttctggagtaaaaaatttggaattttctagcacctcaggtcttcctaatgaataaaaactcattaattcaacaaaagcgtctaacaatattaaaagttcttaggaaatgctaagtgttgagagacgtccaccagaaaactcaaaccctattacccacaagccaatctgtgtctcagctgaaagaacttgaacttttattgtttgttttaatgtatatgtcttctttcacaatctcctgttgcttggtgatgctctcaagagataactttgaatcaccaagcttccccatctcaaactggctttctcaagggcaaagggcctggtcagttcagaagaagcactagcctaggagtcaaaggatctcagaaacaatc

SEQ ID NO: 460037 - DNA, 586 bp, Homo sapiens
tggtcttaggcatagaagaccttcaatcaatgaaaattcacagtacacaatgtacagagagctcttgttgaagactgttgaaaaagaggaacatggaattgcttttctcttcattctatccctgcatatgggtaaaaataaaacaatggtgaagcaaaaaattttcatggggctcataattcaacactaaacccaaatttatttcagactctttctggagtaaaaaatttggaattttctagcacctcaggtcttcctaatgaataaaaactcattaattcaacaaaagcgtctaacaatattaaaagttcttaggaaatgctaagtgttgagagacgtccaccagaaaactcaaaccctattacccacaagccaatctgtgtctcagctgaaagaacytgaacttttattgtttgttttaatgtatatgtcttctttcacaatctcctgttgcttggtgatgctctcaagagataactttgaatcaccaagcttccccatctcaaactggctttctcaagggcaaagggcctggtcagttcagaagaagcactagcctaggagtcaaaggatctcagaaacaatc

SEQ ID NO: 460038 - DNA, 586 bp, Homo sapiens
tggtcttaggcatagaagaccttcaatcaatgaaaattcacagtacacaatgtacagagagctcttgttgaagactgttgaaaaagaggaacatggaattgcttttctcttcattctatccctgcatatgggtaaaaataaaacaatggtgaagcaaaaaattttcatggggctcataattcaacactaaacccaaatttatttcagactctttctggagtaaaaaatttggaattttctagcacctcaggtcttcctaatgaataaaaactcattaattcaacaaaagcgtctaacaatattaaaagttcttaggaaatgctaagtgttgagagacgtccaccagaaaactcaaaccctattacccacaagccaatctgtgtctcagctgaaagaacttgaacttttattgtttgttttaatgtatatgtcttctttcacaatctcctgttrcttggtgatgctctcaagagataactttgaatcaccaagcttccccatctcaaactggctttctcaagggcaaagggcctggtcagttcagaagaagcactagcctaggagtcaaaggatctcagaaacaatc

SEQ ID NO: 460039 - DNA, 566 bp, Homo sapiens
aaaaagacacaggataaaacatttcagtgccaaaattcagcttttctgagttcacttgttcactactaacakattttttttcctgtgtatttttaacttaagccatttaacttctcaagagattttgttgtctttatgtgttttaatttaaaagctgttaagagtttttcatttctttgtttgtatattccactaatagttttatcacatgttttgaatcatctatatatggacattagaatttacaaaacattgttatgtataaaattacttgagagtggattcttgctaatatactgtaacagatttttaaagagacactgtaaacatctaggtatattgaagccatagttaatgattactgtaaattttcaaagatttaaaaattctaaaactatagtattctccaatgagcaaaatttaaaaagtgatttcagagagtacactataattgaatttcagtaaaaataattggtataatgtcttctaacatctaatatgggaacatttcaattcaaaatggtgcaatcagtttatccatgacaatgatacatgcacagacacac

SEQ ID NO: 460040 - DNA, 566 bp, Homo sapiens
aaaaagacacaggataaaacatttcagtgccaaaattcagcttttctgagttcacttgttcactactaacatattttttttcctgtgtatttttaacttaagccatttaacttctcaagagattttgttgtctttatgtgttttaatttaaaagctgttaagagtttttcatttctttgtttgtatattccactaatagttttatcacatgttttgaatcatctatatatggacattagaatttacaaaacattgttatgtataaaattacttgagagtggattcttgctaatatactgtaacagatttttaaagagacactgtaaacatctaggtatattgaagccatagttaatgattactgtamattttcaaagatttaaaaattctaaaactatagtattctccaatgagcaaaatttaaaaagtgatttcagagagtacactataattgaatttcagtaaaaataattggtataatgtcttctaacatctaatatgggaacatttcaattcaaaatggtgcaatcagtttatccatgacaatgatacatgcacagacacac

SEQ ID NO: 460041 - DNA, 566 bp, Homo sapiens
aaaaagacacaggataaaacatttcagtgccaaaattcagcttttctgagttcacttgttcactactaacatattttttttcctgtgtatttttaacttaagccatttaacttctcaagagattttgttgtctttatgtgttttaatttaaaagctgttaagagtttttcatttctttgtttgtatattccactaatagttttatcacatgttttgaatcatctatatatggacattagaatttacaaaacattgttatgtataaaattacttgagagtggattcttgctaatatactgtaacagatttttaaagagacactgtaaacatctaggtatattgaagccatagttaatgattactgtaaattttcaaagatttaaaaattctaaaactatagtattctccaatgagcaaaatttaaaaagtgatttcagagagtacactataattgaatttcagtaaaaataattggtataatgtcttctaacatctaatrtgggaacatttcaattcaaaatggtgcaatcagtttatccatgacaatgatacatgcacagacacac

SEQ ID NO: 460042 - DNA, 566 bp, Homo sapiens
aaaaagacacaggataaaacatttcagtgccaaaattcagcttttctgagttcacttgttcactactaacatattttttttcctgtgtatttttaacttaagccatttaacttctcaagagattttgttgtctttatgtgttttaatttaaaagctgttaagagtttttcatttctttgtttgtatattccactaatagttttatcacatgttttgaatcatctatatatggacattagaatttacaaaacattgttatgtataaaattacttgagagtggattcttgctaatatactgtaacagatttttaaagagacactgtaaacatctaggtatattgaagccatagttaatgattactgtaaattttcaaagatttaaaaattctaaaactatagtattctccaatgagcaaaatttaaaaagtgatttcagagagtacactataattgaatttcagtaaaaataattggtataatgtcttctaacatctaatatgggaacatttcaattcaaaatggtgcaatcagtttatmcatgacaatgatacatgcacagacacac

SEQ ID NO: 460043 - DNA, 632 bp, Homo sapiens
tccataatagcacctagagtaggaacttctgccccacacaatctgccctgatagggaagaactaccatttagataatcctgcctgagtctgaggagatagcactgtatcagaaagcttaattcatgccattatatttcaaatattcttcagtgtagctttcctggtaataaagctaatatttccatggccagatacaggattcctgyattcatctctcaattggttatgaacttgggttggaactgggggttaaataggcattataattatctcctaaactcactgaagtactttgcttacattccctgtgatgctcttaggcatgggaagtcagcaggaaaatactgcagaatgtcactcatgggtctcaccccacctgccctggcagtcacttcattcgccagcccttgatactcactcaagatgtgaaagagctttttctctctcactcagcaacttgttttctttaactgattttggcaatcttattctatattctgggaaatttgacaagtaaaataaagttgctcaactagaatgacatcttggttctgcatactattttcaataaaactattgatttcagactcacagacaccagaaacacactaactattcaacaacaaactca

SEQ ID NO: 460044 - DNA, 573 bp, Homo sapiens
tatgtggcctaaagcagaagaatggagccagatactctattcaccatacaacttcagctccagggatttacaacaagtgtgacagctaagataactttttaaataaaaactgtcagtgattataaaccctggagatgttataaacagattatcaactttaattatttgaaatcatttcctagaatttgatcttttaatcttgcacaaaaatggaagatacaggtgtacaatttgttttttgtgcttcttttactatttgtgaatcatcataacactgatgtaacttgcctttgcaagtgrgctaatggatggttaatatttctgtgagctcattttaaatcaatattttatgggtgtctgccatgtgcaagtatgtagttaggtgctgcgtagtgtgtgctagatgatagggatgctgcgtatactaaaacaacaatgcaagattgaccctgaaagatacacatgaaataaacaattacagggattggtatcttacactctacagagcctcaaacctagttctctcctggtgaatggttccaccactttgaggaggaaataaaattctgatag

SEQ ID NO: 460045 - DNA, 508 bp, Homo sapiens
gccatatgaaatgtgtattaggctaatgtacctaatataggctggcaattcaaccagaggagctgctcagaggatattgaaataagtcattttgctaattctaaagagtttctatagatatgyactggatttctttttaattattctgcatctgtttagagatatgcactttccagctatgtaattggattttaagtacttttacattactataaataaagtgttacatgcaattacattgaaaaatctgcagtgcaaaagcaaagctgcagcccacaggttaccgcacttcagcatatggaggatgcgcttcttatggggtgatgatagtcaaattaaaaagaacactttactccttgagctagataataggctgattatatttaaagcatattcacttcccacaatcatctggtaggaaagatggaactgctcaaacttcatctccactggacagtatcgtgactggaaggaattattagtggaagagaagtataaactcacccaa

SEQ ID NO: 460046 - DNA, 508 bp, Homo sapiens
gccatatgaaatgtgtattaggctaatgtacctaatataggctggcaattcaaccagaggagctgctcagaggatattgaaataagtcattttgctaattctaaagagtttctatagatatgtactggatttctttttaattattctgcatctgtttagagatatgcamtttccagctatgtaattggattttaagtacttttacattactataaataaagtgttacatgcaattacattgaaaaatctgcagtgcaaaagcaaagctgcagcccacaggttaccgcacttcagcatatggaggatgcgcttcttatggggtgatgatagtcaaattaaaaagaacactttactccttgagctagataataggctgattatatttaaagcatattcacttcccacaatcatctggtaggaaagatggaactgctcaaacttcatctccactggacagtatcgtgactggaaggaattattagtggaagagaagtataaactcacccaa

SEQ ID NO: 460047 - DNA, 440 bp, Homo sapiens
gagtcaccttaggtcacttaaatcgcgattcagtagtcttccttcttcatcacacaacttaatattttactgcagttgtttatttttaattttattacagaaaaattcactctttttactgtgtatttccacgtgctttgaaacatacatacactcatggaatcaccaccaaaattaaaatgcggaattgctccacacccgaaaaagcacccttgtgctgtctctttgtagtcaacgcttcctctcacctttaaaccctggaaaccactgatctatcctctgactctttagctttgccttttccagaataacatgaaaatggaatcatgtagtaacacagcatcttttacattagggaatttaaaacaaaagcaagtaaacaagcaaaaacaaawactagagccccattccctgaatattctggttaagtaaaatttact

SEQ ID NO: 460048 - DNA, 643 bp, Homo sapiens
gcagggttgccatgttctttagagtttttattaaactaaaagaatttggtaacacccctaggtaccctttagaggcctccaactggttacaccctatgaagacctggcctgtggccaatcagaggctgaagtggagacttggcctgtggtcaatccgaggctaaagtggaaacttctatcttgttatcgcaagagtgaggatgtggcctgtatgctgcctaatcttgcctagaactggctgcacctgctgttcttttgccatttgtaacataacaaatatcttaacccttggttaccctaactccctattttcctgtctcacattcacttccttaaggagccaactggcacacagaagcccaaccatcactttacctacaagactcccacgtctctagtctgtgctaccaatctccccagtttctaacttttctcttttctgagatcttctagccccatacttgggatcttgttaaaatccagcttctgatttagcagggctggggttgagcctgattttgcagttctagccagcttccaggtgatgtycatgctgctggccaatgaattacacttgagaagcgagcatctagcttaactgctacaccagaaatcacctgaccagcatctgtcagatcctgta

SEQ ID NO: 460049 - DNA, 596 bp, Homo sapiens
ctggtcgagaggtcatcagtgaaactggaacgaggacagctctcactctgtagacccaggacctacaaagaattcctcaaattcccagactcagccttcagcctggatctcaatgcccatcagaatgaaagctccaagtgcatcacaaytgccttgttggtggtcgaacttcagtgcctagaacagtgctggtataaagcagacatacaataaacacttgatggatttttttcgatgaatgtctcatacctagttcagagatgttctcctcccaaagtcacctctgtttggtttgtacattaaaaaccctaataggtgatgcttattatgctttagagtcactttccaaatatgggcaagaaaaagcagagagctgcagaggggtcaacaaaagccaaaggcactgagggaacacttcaaatatatgataaactattccttccaatcaagaaagctacagcagactgaatatcccctgcaaagatgtccacaccctattcctggagtctgtgaatatgcacatttcatagcaaatgcactgtgtagatgtaattaaagttatgaacctcaaaataaggagattatcctggattatg

SEQ ID NO: 460050 - DNA, 596 bp, Homo sapiens
ctggtcgagaggtcatcagtgaaactggaacgaggacagctctcactctgtagacccaggacctacaaagaattcctcaaattcccagactcagccttcagcctggatctcaatgcccatcagaatgaaagctccaagtgcatcacaactgccttgttggtrgtcgaacttcagtgcctagaacagtgctggtataaagcagacatacaataaacacttgatggatttttttcgatgaatgtctcatacctagttcagagatgttctcctcccaaagtcacctctgtttggtttgtacattaaaaaccctaataggtgatgcttattatgctttagagtcactttccaaatatgggcaagaaaaagcagagagctgcagaggggtcaacaaaagccaaaggcactgagggaacacttcaaatatatgataaactattccttccaatcaagaaagctacagcagactgaatatcccctgcaaagatgtccacaccctattcctggagtctgtgaatatgcacatttcatagcaaatgcactgtgtagatgtaattaaagttatgaacctcaaaataaggagattatcctggattatg

SEQ ID NO: 460051 - DNA, 596 bp, Homo sapiens
ctggtcgagaggtcatcagtgaaactggaacgaggacagctctcactctgtagacccaggacctacaaagaattcctcaaattcccagactcagccttcagcctggatctcaatgcccatcagaatgaaagctccaagtgcatcacaactgccttgttggtggtcgaacttcagtgcctagaacagtgctggtataaagcagacatacaataaacacttgatggatttttttcgatgaatgtctcatacctagttcagagatgttctcctcccaaagtcacctctgtttggtttgtacattaaaaaccctaataggtgatgcttattatgctttagagtcactttccaaatatgggcaagaaaaagcagagagctgcagaggggtcaacaaaarccaaaggcactgagggaacacttcaaatatatgataaactattccttccaatcaagaaagctacagcagactgaatatcccctgcaaagatgtccacaccctattcctggagtctgtgaatatgcacatttcatagcaaatgcactgtgtagatgtaattaaagttatgaacctcaaaataaggagattatcctggattatg

SEQ ID NO: 460052 - DNA, 538 bp, Homo sapiens
atgagggttgaagaccctgaatggtaacaattcccccaaagagccagtgcagccccagagggaaaggatgtcctggtcacamtggccagggcgtggaagggcacagtcagcctggctttgaagctcagaaggaaatggaagataacactaagacataacattgacccaaatgaattttggacctgaacagaatgagaagaagaaacaaagaaccaacatcagaaaaagcaagaagatagctgagatgaaaactctacctgaagaccagagaggcagaaaaatgagagaggacagctggaagacaaaaggagtgaaaagaaggtaagagataggaagtatgaagaaacagagtccagaaacaggaaagactacatcaaacagaaggggaagagagaaaaagaaaagagagtttgaggcattcagttcccaaggatgagctggtctctcactgaaaaaagggaccagacacttcaaacaccacacaacatgggactagaatcagcctgcagggccctgagaagtccaggcacaaaaagaa

SEQ ID NO: 460053 - DNA, 543 bp, Homo sapiens
gggcccatggaggctacaaagccagtctagggtccatgaacatgacagtgtggccctgcrtgccgcagctgcagcttcctcaggattgtcctgagccacatcccatcgtccttactccgtcctaactcacatcacggtcctgtgcatttgaagaatcctcaatgtctcatttgggggacacttattatgcccatacttatgtccaggcactgaagccaggagccaggaatacaaagggaaggggcagcatcctgctttgctcagggagctcacactcaggggagaaagacctgcagacattgtagtctgatggggcagtgacagaggtgagagaggtgacctgatgcagagaagacagaactcccctagccttggctgtcagcttcttatgggcaaggacccttccagcatgcatctttgtgccagcccctaccctctagctcctagagccagcccattcagatgcacgtctgctgcatgatatcattaacaacatatagtatattccaaaatagctagcagacaggacttgaaatgttcaca

SEQ ID NO: 460054 - DNA, 543 bp, Homo sapiens
gggcccatggaggctacaaagccagtctagggtccatgaacatgacagtgtggccctgcgtgccgcagctgcagcttcctcaggattgtcctgagccacatcccatcgtccttactccgtcctaactcacatcacggtcctgtgcatttgaagaatcctcaatgtctcatttgggggacacttattatgcccatacttatgtccaggcactgaagccaggagccaggaatacaaagggaaggggcagcatcctgctttgctcagggagctcacactcaggggagaaagacctgcagacattgtagtctgayggggcagtgacagaggtgagagaggtgacctgatgcagagaagacagaactcccctagccttggctgtcagcttcttatgggcaaggacccttccagcatgcatctttgtgccagcccctaccctctagctcctagagccagcccattcagatgcacgtctgctgcatgatatcattaacaacatatagtatattccaaaatagctagcagacaggacttgaaatgttcaca

SEQ ID NO: 460055 - DNA, 543 bp, Homo sapiens
gggcccatggaggctacaaagccagtctagggtccatgaacatgacagtgtggccctgcgtgccgcagctgcagcttcctcaggattgtcctgagccacatcccatcgtccttactccgtcctaactcacatcacggtcctgtgcatttgaagaatcctcaatgtctcatttgggggacacttattatgcccatacttatgtccaggcactgaagccaggagccaggaatacaaagggaaggggcagcatcctgctttgctcagggagctcacactcaggggagaaagacctgcagacattgtagtctgatggggcagtgacagaggtgagagaggtgayctgatgcagagaagacagaactcccctagccttggctgtcagcttcttatgggcaaggacccttccagcatgcatctttgtgccagcccctaccctctagctcctagagccagcccattcagatgcacgtctgctgcatgatatcattaacaacatatagtatattccaaaatagctagcagacaggacttgaaatgttcaca

SEQ ID NO: 460056 - DNA, 553 bp, Homo sapiens
taatacactgcccaatggtccaagattggcaaatggcagagccaagattcaaagccactctgactgaagggctccttctcttcgccattatggaccccaacctccttatgcactttgccttcacttaccagagcatacagacacctgctctctcaaagcccttgctgagctgggagactagcatgtatgagtgaattaaaragactgtctgcaaagttcacaccacctgagccagagaactcatgagagacaaaatttaatctttgcccttttatcttggacctctaaaattcttcccatcattgaacctagaactcaccttccaaacccaggggaatgttccaggtatttcttttcataatagcctccctctagaaaccaaagttgacttctgccaggatatgccattatggctacactcattaataaaatcagatttctcctccttctctaagcttagcacttttcctaaacataaaccctcataaatagcttggaaatgaagttgatcctttaccattataaattcctacagaaaactcttctaaatctt

SEQ ID NO: 460057 - DNA, 553 bp, Homo sapiens
taatacactgcccaatggtccaagattggcaaatggcagagccaagattcaaagccactctgactgaagggctccttctcttcgccattatggaccccaacctccttatgcactttgccttcacttaccagagcatacagacacctgctctctcaaagcccttgctgagctgggagactagcatgtatgagtgaattaaagagactgtctgcaaagttcacaccacctgagccagagaactcatgagagacaaaatttaatctttgcccttttatcttggacctctaaaattcttcccatcattgaacctagaactcaccttccaaacccaggggaatgttccaggtatttcttttcataatagcctccctctagaaaccaaasttgacttctgccaggatatgccattatggctacactcattaataaaatcagatttctcctccttctctaagcttagcacttttcctaaacataaaccctcataaatagcttggaaatgaagttgatcctttaccattataaattcctacagaaaactcttctaaatctt

SEQ ID NO: 460058 - DNA, 439 bp, Homo sapiens
gtgagacacatgcttgtcatcccaaattgttttctaagtggctcaggacagagcttgcattccagagacactgaaataaataattagctagatttttctcatacagaagctgctctccaggaatcasttcgttgatttagaagctacatgaatctcttgaaatccccaaggtaacaatgaggaggggacaattaaaaaaggaaaactatcagaaagagcccaggcatgaattagccccggcttcccaactatgtgcccctggccaaggctttatgctctctaagcatcaatttcctcatggtaaaataaggatgacaatacttaccttgtatggtgttcaactgtgttctactgtggattcaacgagataatataaataatttcccaacacagtacatggcttaatttaagtgccaaagcaatgtgagttcccttctcc

SEQ ID NO: 460059 - DNA, 552 bp, Homo sapiens
atgtatcaaaatatcacaggtaccccgtaaatatgtacaattattatgtatcaataaaataaatacattttaaaaaatatatgtgcctgtgtgtacttcacttattcctcctcttccctgcccccagagcctctgggtttgtgtcgtccggctctgtttagtgcctccttcttccctggattagcctgtccccatcagtgcagacacctgtgtggccaggtgagcccgcagccccttctctgactctcaggagggaatggccgtcttgctggtagcaataartagactgaggaaagccagggtgctagaggggagcccatccccaccaagtctctgcctcagggctgctcaccttcagaccagggtccacctggaggccgcccccatggggttagttgctttggggtgagaagaaggctgtattcaggagctgagttttggatttggataaaaggctttgtgataaaaaccatgagggttgtggaatgagaaagacttgggttggactcctggcttgctgaccttgggtaggtcactttacccctctgagcc

SEQ ID NO: 460060 - DNA, 331 bp, Homo sapiens
aattgctcttctaatgtaccccaatctgccttccagtaactttccctccctatttggatttctggactctggagtcacacagtcaacccccgccttttaaaggaagtaattcattggctcaataaacccttcctgagcaccagctatagctgctgagtgcaaggcatccagcagtagccgggacagactccatccctacagcctggcaggtgagagacatgctcagcctcaccatctgggtcccaggtgccccaagtgaaacccctggtgacatcacctgctccccttcttggcccactctccyctaaacagctgttctcctgcctgaata

SEQ ID NO: 460061 - DNA, 352 bp, Homo sapiens
tgcaatccactctaaccaaggagattagggaagaccccaaactggagagaccacttaaatagagccttgaaagacaagggtacatggcaaggtaagaccagcaaggacatctgaggaagcagggacwgtgtgtgcaaggtcacaggggcagcacacagtttacagacttcaagtagtgtggcaatagggctggaccaagcaaggagtgtgctgtgcagaggcagcaagggctagaccatgaaggggtgggggccccacgaggagcccaggtttttttcagcaagcaatgctggaggtggaggagctaggcttggaggtgcagatacacagtagaaagcatgaccagctgcag

SEQ ID NO: 460062 - DNA, 588 bp, Homo sapiens
ttattcttttaggagaaacatccatgtaaagctcttttgtagattaagcaattcaatggtatgcatagagaatacctaaatggccaaaaaaattctattctacttaaaactataccataattaaaaaatagtaaatagcaataacactttaaaataaatttaatcaatgaatattccttgtccatttgtataaaatacttaaataaaaagttttgtaaaatgttatgatatttatctgctttaaaatattttactattaactcaaacttttaccctaggactgattcatagttacacaacttcaatgttgaagtaaaatcctacggcctatcatgtgaatttatacaaatcatgwatgtagtatgtaggttttttttctttttcaaattaagaatatcagaaaatacaaaacaaaattttatttattattcattatttcagatctgcagtaaacagaatcctgctcagataatttgagaaatttttcaagtaagagtatgaatgaacgaatgtcgagacatctagagattagcagctgtgggaagtcattgccagctctaagctgaagagcaaaggaggtaatagcac

SEQ ID NO: 460063 - DNA, 620 bp, Homo sapiens
acttttttacagcgttttttcttgggaagacagctcagagtagggaactctgagcaacacatatgtgcgaccatagacttgatgaaattttcatcatggtcttcaccatttcacctgtcatccacctaatattgttctagaaggaatatgtaatgaatgattgaactttcctttgcatatgtgtacccgccattgtttctaagaaataaagccacattgcagcactaactaattaaagagaatgaatgacaaggatttctagaaaagaatgttgccaaatctctgcatataagtgaagtgcctgcctaggtttctttgtgattctcttggtatacatgaattcagaaggtggtaagtcttytattatctagttatatcataaaaatgataaaatacttcataagatttaaatgtctaaatgcacagaatatgcttttaaattaattatcctcacatgaccgttggaggaatatccagtaaaattatcggaaaccaaaattcttacacagcagttcgagaaatgaaatagaaaagtgttgtgaaagagagtagcaaatggaacatgtgccaagtgggcaaaatgagggtctaagtcaacatattttacgccagaattttct

SEQ ID NO: 460064 - DNA, 591 bp, Homo sapiens
aaacatttggtagaatgtatcagtaaagccatctattctagggattatgtgtgtattggtggagggaaattttatattgcctactttatttcttccttcatgtattttgggattctcttgacaggtgcatatgtgcttattgttatgttttcttgatgtattaatcctttctatcattgtaaaatgctctttctcgctaatcacaatttatctcttgaagtttgttttgtgtgttattatgaccaggtctctcttgattactgtttgaatgatttatcttaattcagtcatttgtattcaaactgtttgtgtctttgaatataaagtgtgtctgctgactaaaacagatagttggattatgtttttttctaaacccatctgcaaactctattttaaatggagtttttaatctaygtacatttaatgtaattactgatatatagaatttatgtttgccagtttaccagttgttttctatatgtcttctgcttttttatttctctatttttctaagattgccttttctttagtgaatagatatttttaatgcactgtattaatccccttatcactgattttattatattttgt

SEQ ID NO: 460065 - DNA, 531 bp, Homo sapiens
cagtcaactttctacgtggatacccattcttcatgagcctaagcatcaaaatagacagttccccctgggtcattgggtcttcatttctgaaggctcctgtgtcatgtaaaaaattgattaaataaattgctatccttttctcttgttaatctctgtcttttgttacaggaatgtcagccatgacctatgatgtgtgaagaaagatatctcacacctttctaccccttcaccactgtctattccactcttaatctgcactcaactactgtgactctccccttggtctcttatcccagagtactgtgactctacctctaagccttgcttcctgctcttgtgccattttttacatctttctctaatcttayggattaaattatatccatttgaacgtctgggatgaaatctgttttctgatgcatcccttacaaatataaggacatttaaacaaatatttaagggaggatatctcagaggagactgttttggacagaagtaacaccaagatctaataaagaaatcatactttgc

SEQ ID NO: 460066 - DNA, 540 bp, Homo sapiens
ccacacacttttgaaggactagatcccatgagaactcactatcatgaagtaagtaccaagtcatgagagatctgcctccatgatccaaacacctcccacaagacctcaccccagcattggggattacaattcaacatgatatttgggggatatcattctgaaaagtacatcattctgctctggccctcgcaaatctcatgcccttttgacatttcaaaatggtatcatgccttcccaacagtcccctaaattcttaactgtttccagcattgactcaaaagtcccaagtcctgtctgagacaaggcaagtcccttccatctatgatcctgtaaaataaaaaacaggttatttacttccaagatacaatggaggtataggaattgggtaagcattcctgttcaaaaagggagaaattgaycaaaagaaagaagatacaggccccaagcaagtttgaatcctagcaaggcagtcattaaaacttaaagctccaaaataatctcttttgatttcgtgtccgacatccaaggcatactggtaca

SEQ ID NO: 460067 - DNA, 520 bp, Homo sapiens
atcattccttctgtttgtctttgcattatcattttccagtctatggcatacagcaactattcaaatgttttttggataccttcattarctatggcttccaaacttttggttaaaatagtaagctaagctgagcaagcaacattttggccttttcatcttattgggcacactggtcatttattgcccctcccccactctattcctctggcaccagcgccaagcattccctggatggggatttggctgtctggctagtggccacttcactgcatgccacacatctgtgcccttggaatctgaggccttgtcttcattttagggcactagaaatatttctgccaaaactcccaaagttgtttctttcttttctattcttctctttttttcctcctttttcttttctcttttccttcttttttaaaaaatttctgagaacaatataagctacacatacatttgatggtcaacagctgacactactaggaaacatatgtgtaagagtagatttcaaaggccttaa

SEQ ID NO: 460068 - DNA, 561 bp, Homo sapiens
ttttggccttttcatcttattgggcacactggtcatttattgcccctcccccactctattcctctggcaccagcgccaagcattccctggatggggatttggctgtctggctagtggccacttcactgcatgccacacatctgtgcccttggaatctgaggccttgtcttcattttagggcactagaaatatttctgccaaaactcccaaagttgtttctttcttttctattcttctctttttttcctcctttttcttttctcttttccttcttttttaaaaaatttctgagaacaatataagctacacatacatttgatggtcaacagctgacactactaggaaacatatgtgtaagagtagatttcaaaggccttaatgcatctcccagctccatctctgactctgtaatgttgtasaagtcacttaaatctctcatcccctgtcgacttaactactaaatgagaccagttatacaattgagtgagaggagaaaatagttgatatagatggaagagctttgaagattctgcactctctcatatgcattgtatcagtatt

SEQ ID NO: 460069 - DNA, 476 bp, Homo sapiens
catgaactcattcttttttatggctgcatagtattccatggtgattttgtgccacatttctttatccagtctatcattgatgggcatttggtttggtttggctttgaaactgcaatccctcttcccaaaaatccccacttttcccactttctgaatgaagctcacacagcaggttggcatttaagacatgctactatctggaaaaaaaccctcaattttaccacatatctatagcctatagattaactggattattattattaatcaatttttaagcccacctcattgaatatatgagactctcaagattagaagatgggatggcattctctargaaaactgtcctctgtttcaaataacacaccaatttcaagatcttcctgattccatcagttacctcctttttccatcaactgtctgtgtgtttcttctttccttggattgaagatatttacatttctgattttcatcaatat

SEQ ID NO: 460070 - DNA, 433 bp, Homo sapiens
  misc_feature (1)...(433): n = A,T,C or G
tttttttccgagacagggtctaactctgttgcccaggctggagtgcagtggtaagatctcagctcactgctacctccacctcctgggttcaagcaattctactagcctcagcctcccgagtagtgrggactatggagcatgccaccatttctggtctgatatatgtattttagtagagacacagagagatggggttttgccatttaggctaggctggtctcgaactcctgacctcaggtgatccgcctgcctcagcctccctaagtgctgggattacaggtgtgagccaccaaggctgccctcttataatcattgtgatatgcatattccttcaaatttatgttaatggaattaaattgcttgtnaatcatgaatgaatggcttgtaaaatcgtcccgcagtgaaatattcattggaatatttgttgtgtact

SEQ ID NO: 460071 - DNA, 558 bp, Homo sapiens
cttatgcctccatctttttgtaatttggcttctgtccctgtctgaaacccgtctaagcactgtggcttacttttactttcatttggttcccgtgatggtagtagtccttcagacaacctgccactgccatcacccggctggagcagggaggcgcggttggggctggctactgtgtggagccaggggacygtggacaagctggagccccaccccttctgagttggggtggtagctctccgggtgctgctgcagatgcccaaaccagggctgcatacccagcctcgctccgtggagcaggcaggagtcctgccccactcccgggtgcagctgcagctgcccaaacagcggctacagactcaggcatccttacactcttggaggcctgggaaaacctccctgcactctcgctcaggaaggcccctgtccttgcaggctcggaggtgcctgttcttgatgtctggtttctctctttttttgtgccaggagataggagcaaagtcaggcagcctggttgccttgaacagcagtagaaagatggcaggttcatgggcagaaggg

SEQ ID NO: 460072 - DNA, 558 bp, Homo sapiens
cttatgcctccatctttttgtaatttggcttctgtccctgtctgaaacccgtctaagcactgtggcttacttttactttcatttggttcccgtgatggtagtagtccttcagacaacctgccactgccatcacccggctggagcagggaggcgcggttggggctggctactgtgtggagccaggggactgtggacaagctggagccccaccccttctgagttggggtggtagctctccgggtgctgctgcagatgcccaaaccagggctgcatacccagcctcgctccgtggagcaggcaggagtcctgccccactcccgggtgcagctgcagctgcccaaacagcggctrcagactcaggcatccttacactcttggaggcctgggaaaacctccctgcactctcgctcaggaaggcccctgtccttgcaggctcggaggtgcctgttcttgatgtctggtttctctctttttttgtgccaggagataggagcaaagtcaggcagcctggttgccttgaacagcagtagaaagatggcaggttcatgggcagaaggg

SEQ ID NO: 460073 - DNA, 558 bp, Homo sapiens
cttatgcctccatctttttgtaatttggcttctgtccctgtctgaaacccgtctaagcactgtggcttacttttactttcatttggttcccgtgatggtagtagtccttcagacaacctgccactgccatcacccggctggagcagggaggcgcggttggggctggctactgtgtggagccaggggactgtggacaagctggagccccaccccttctgagttggggtggtagctctccgggtgctgctgcagatgcccaaaccagggctgcatacccagcctcgctccgtggagcaggcaggagtcctgccccactcccgggtgcagctgcagctgcccaaacagcggctacagactcaggcatccttacactcttggaggcctgggaaaacctccctgcactctcgctcaggaaggcccctgtccttgcaggctcggaggtgcctgttcttgatgtctggtttctctctttttttgtgccaggagataggagcaaagtcaggcagcctggttgccttgaacagcagtagaargatggcaggttcatgggcagaaggg

SEQ ID NO: 460074 - DNA, 276 bp, Homo sapiens
aataaagataattagcatactcataacagtttggggaacattcgaaattctctcttctagcttttaaaaatatataataaactacttttaactatattctccctacagtgctatagagcactagaacttattcctcatatctagctgtaattttgtatgacttagccaacttctccctacccaccyatacttccaagcctctaataaccacaattctctccacttctatgtgttcaacttcgttcagttcttacatatgagtgagaacattcagta

SEQ ID NO: 460075 - DNA, 563 bp, Homo sapiens
aaaatttttgcttgctatttccagatatctattttagacagagttctccagagaaacagaatcaataactatataaaaatatatagaaagataattattatgaaggattgggtcatgtgattttggaggctgagaaatcctatcaactgctgtttgcaagccagaggcccaggaaggcaagtagtgtagtgccagtccaaacctcaaggtctgagaaccaggggaatcaatggcagaaattccattttgagtccaaagtccagagaaccaaatatctgatgtccaaagacagaaaaatatgatgttccaactcaagcagagacagccagttctcccttcctctgcctttcagttctgtttgggtcctcaatgcattgcataagctccacccacattggtgagggcaatctttactcagtctatcaaaatgacaccttcacagacgcatcyagaaataatgttttacccgctatttgggcattccttagcccagccaagctgaccttagaaaaattaaccaccacattttctatgcatgtgcacacttcaaagtctccaagtcc

SEQ ID NO: 460076 - DNA, 594 bp, Homo sapiens
tcaatttctcctagtctaaatgtgattatcaataaaattatgttaataaagccttgctctgtttagagtcttaggtgagaaaatgtggtttgtaaatgattttgtgaattttataaaattatacagatatatttcatattgctattattataattaaaaatacagagtcaggataatttcatcctgtgcacaagaggcagattatgtttgaattaatcaaatagaatttgagcacagaagtcattcatcccttcattcaacatgctatttagcactgagtatacatcagaaactgtgctcaaatcttggtatctgacactgaaaaaaaacagataaaaaactgtctacgtggagcttacactctaacacttaccaaataaatgatgtccatttrgtcggcttctattaacattataggaatcaaattttgccctgattattctcagtcatcatagtgctggtggtggcaaagtgacaaattttgtggagatagtggcagagaatttttactttgaaacagtaatagaataattaattattaattcttgtgagaatgactgaaaattctatcacactgtttggcgaagggagaag

SEQ ID NO: 460077 - DNA, 611 bp, Homo sapiens
ctccaactatattgaccaagccatccatagcaaaatcctgcatttaggaagagacaaagtttcagcaagttcacttgaattctaaactcattaccaccaattcaacataaaagccgtctatacttcctgaataactaagactatactaaaaagagagtcaaacatacttaactctagatacaaagatatcacatgccctagacataggataaaagcaaagaatagttcagatgctgtgaaatcctttataccatttaaaatgcagtgagaggctrggtatggtggctcacacctataatctcagcactttgggaggcaaaggcaggaggatcacttgaggccaggaatttgagaccagcctgggcaatatagcaagacctcatctctacaaaaaatttaaaaattagctgggcatggtggcatgtgtttatagtcccagctactcaggaggctaggtgggaggatcgcttgagcccaggagttcaaagctacagtaagctatgatcacaccactgaacttcagcctgagcaacacagcaagaccctgtctcaaaaaaataaacacaaaaaataaagttcagtgggagatttgcctatctaatgactttttt

SEQ ID NO: 460078 - DNA, 562 bp, Homo sapiens
cgtttatatcctcaacccctctgattctggaaccggttccctaaacaaaggcagacttcttcagcttcttccagaatagacatkagacatggtgacagtgataaacctttggggtgggctagtctttttcaacattgatggagcagaatttacaccctctgattcaatccatctcagtaaatgtcaatgatgccttcctatctacttctgctatccaggaacccacctctttagagtcaatgcatgtgaaaggctcatgatttgtaatatcaagaagtaggaagacaaagaggtttgaaggattctgccaaaggcaaagctgtatgaggctctctcctgactacatgtacaccctatatttggataactcattcccaactgagtctgctcttaagggtacagagcagggtcattgggtattatcttaactgtcattgccccagtacctagaacagtgccagtacctggcacatagcagcattcagtatatttgttggattgatggacagataggtgaataaataaatgagcttcaagaatggggctcagcaaacaagctaaa

SEQ ID NO: 460079 - DNA, 528 bp, Homo sapiens
catccttcctgttgtttggtgctgaaggaagtgagtataaaataawgtaagcataaacatttacagtgtatctccatttatgggctcagtgaagacaggatcataagtgttgaggatttttaaaaagtcattagaatttgagcattctgaaggggcagctccctcagatgaaatcagcttttctatttgactggctagtttactttgataatgtctaccatgaaaattttttgcattttttttcctgaaagatttcatgggaatgtggcaagcaaaataacggcccccaaagattctcactcaaaccaggatctgtggataaatgttacacggcaagggggaattaaggttgctaatcagctgaccttggaatagggagatgatcctgaattactgtggtgggtccaatgtaatcataaggtcctttaaatgtgagacagggaggtagaagagttagaagcagagagataatgtaaaaaagactcgaccacgagccatggccggctctaaggatggatgggggccatg

SEQ ID NO: 460080 - DNA, 592 bp, Homo sapiens
ggtcccttcccttaaaacttcctctttaaggctcttttaaagtaatatttagaatttaagtgagtcagggcattcgtagaggagttaatcagtctgtatagtctgggtggtaagtgctacctatgatagaggcagatccagcatgctgtgggatcacagaagagggagctggtagctgagagcagactgggaggccagggtgggcttcctggagaaaggaatgcttgaaggtcattgtgagctcatcttccatagtggttccctctcatccttgggcaacattcctgagagggggcttacaaagccttttaccttccggcttctgccaccccagttttgagttttgagcaccagtgcacaccacatatgtgtgtgtacatatacatgcatgtacacaccacatgcacacacacgctcaccaagtgcttcagttaaagagcactgagcagatcatattagtaagctcttcaycttaggtgtttaacagctctgtcctctgtgcaccattgtacccctggcagatgtctattagaccatgagaacacatagtgtgcccagttgcatacatagccatttccttttgaagcgcagg

SEQ ID NO: 460081 - DNA, 601 bp, Homo sapiens
ctgtgcagttattctctatttatgtgcaaaaaaaatagtgaacataaattgctattgagtagatacccccaaaatatttggaatgattatagaataacrgggaaatatcagccctggcactatggaggtcttctggaagtttcttgaagtaagggctttttgttattcatctttgttcccaacaccactgactctggatattcgtcttaaataagacacaaatgtgcctcccacagataaaagtcagcctcatatgtgccttcaggaaggcactgatgataaggctcacacttatccagagcttgccaggtacccagtgctatggcctaagcacgtcatatgcataatcatatttacactaacctcacaacaattatttaagaaaaacacgatgatgatcctaatttgcagataaggaaactgaagcacagggaattaggtaaacttgtccaaaattctccaagtagtgacaaaaggatttgaattctttgaccattggattgtaataactattttcctaagataaagtacagagcaaagacatatttatgttaaattcaatgtatgttcaagagttacttccagcctagtggctccaaga

SEQ ID NO: 460082 - DNA, 605 bp, Homo sapiens
  misc_feature (1)...(605): n = A,T,C or G
taatttttctaataattctcctatcgagaatttggtagaacatactcctgcattggaaagagtaataaattcccttttacttataagttttactttatgattctatcattttcattaagggctcagttttaacaaatacaccatagaatagatgttttgtttgatccactgaattgtctgagatggagtctcgctctgtcgcccaggctggagtgcagtggcgcggtctcggctcactgcaagctccgcctccccctttcacaccattctcctgcttcagcctcccgagtagctgtgactacaggcacccgccaccacgcccgtctatttgtattttcagtagagatggggtttcactgtgttagccaggagggtctctatcccctgaccttgtgattcacctgccccggtctcccaaagtgctgggatnactgttgtgagccaccgcacccggccaccatagamtaggtgtcttaaacaacaaacctttatttctcatggttctggagttgagaaatcccaattaaggcgctggtaaagttgatatctgctgagggccctctacctcactggtttctagaaggcaattgtctcactgtagcctc

SEQ ID NO: 460083 - DNA, 606 bp, Homo sapiens
tctggcatgcaagtctggcttaaaatatgtaaatcaataaatgcaatatrtcacaataacaaaatgaaagatcaaaaaacacatgatcatttcaattgatattgaaaattttaaaaaggtcaatgatatttcttaataaaaactctcaacactttaggcatagaaaggaaagttcctcaacataatcaaaccatttattaaaaacccacagctaacgttataatcaatgggggaaattgaaaacttttccactaaactttgattgaaggcaaggacacccactctcatcatgtctatctatagactctaagtactagcaaaatcaatcagaaaagaaaaataagaaaccctccaaattacaaaggaaaaaagtctaattatttttatttgcagataacatgatcttatatttttaaaccccaaatatttcacaaaaataaccattagaagtcagaaatgaattcaataaaatttcgggacacaaaatcagtacacaaaattagcaacattttaatgtgctaattgaaaatgagtatattgaaaaagaaattataaaatcccattcttatagcatcaaaataataaatacctatgaataaaaatgta

SEQ ID NO: 460084 - DNA, 594 bp, Homo sapiens
aatgaattcaataaaatttcgggacacaaaatcagtacacaaaattagcaacattttaatgtgctaattgaaaatgagtatattgaaaaagaaattataaaatcccattcttatagcatcaaaataataaatacctatgaataaaaatgtaaacaaggaggtaaaatatttgtacactgaaaattataaacattgataaaaagaaattgatgaagacacaaaaaagtaaagatatttcatgaacataggtcagaaaaaataatactgcttaactgtccatagtgcaaaggcaatattcagattcaatgcattgcctatcaaagttctaatcacactcctcacagaaatagaaaaaaaatcttaaaatatctatggamtcataaaagacccccaaattgttgagtagccaaaacaattctgagaaatagaaacaaggttggaggcatcacatttctcttatttaaaattgtattacaaagctatgttaatcaaaataatgtaatactggcataaaaaactgacacatacaccagtggaataaaatagagagctcagaaatgaatccaaatatatatggtcaactgatttttaagg

SEQ ID NO: 460085 - DNA, 545 bp, Homo sapiens
caacacccagaatgtgctgtaatataaactaycacatctgggtgacaataatgtgtcatcataagtttatcagtgataacaaatgaaccacactgttgagggatgctgataatgagggaggctatgcatgtgtgggggtgggagatatatgggtaatctctgaaactactgattaattttgctgtgaacctaaactgctgtagaagaatatagtctattaaaaatacagcaagaatgaatacaaatatgattgactttatttcatctctccatagttcagtgcataccatctccataatacagccctctaatatatgtatgtttatgtatatttgtgtgcacttttatgtaaaaaatgtatgtttatgtacccttttatagaaaaatttgtatttcattgtatttttcttttatcattaatgtttttaaatactttttgtttttgagaaagtatctcactctgtcacccgggctggagtacagtggtgccatcatagctcactatggttttggtctaccagactcaagcaatcctcccacattag

SEQ ID NO: 460086 - DNA, 545 bp, Homo sapiens
caacacccagaatgtgctgtaatataaactaccacatctgggtgacaataatgtgtcatcataagtttatcagtgataacaaatgaaccacactgttgagggatgctgataatgagggaggctatgcatgtgtgggggtgggagatatatgggtaatctctgaaactactgattaattttgctgtgaacctaaactgctgtagaagaatatagtctattaaaaatacagcaagaatgaatacaaatatgattgactttatttcatctctccatagttcagtgcataccatctccataatacagccctctaatatatgtatgtttatgtatatttgtgtgcacttttatgtaaaaaatgtatgtttatgtacccttttatagaaaaatttgtatttcattgtatttttcttttatcattaatgtttttaaatactttttgtttttgagaaagtatctcactctgtcaccygggctggagtacagtggtgccatcatagctcactatggttttggtctaccagactcaagcaatcctcccacattag

SEQ ID NO: 460087 - DNA, 422 bp, Homo sapiens
tttatggggatggcacactgtacaatggaatatgatgygtttggtcaactgtagggtctttgtcttttgcatctagacacctctagtcaattaggggctggcagagttaaagatcaatagaaagtttatgatgtatttaatcaggcattatttctaacttgaaataatgtttacagtagattcaaaagcatagaatttaatgagaggttatcgcaaaaagctttgaattagcaatttggaagaacttctttcaataacaaagataaaaagattaaaacacatttttaaattgatagaaaacgtatctttctactactaggagagcagcagtggtttatggtatgaataaagaatataaaaattataaattaagcaaatatgacaataatgaattacttgtcagcactaatgtaaaacatttt

SEQ ID NO: 460088 - DNA, 549 bp, Homo sapiens
ttccctcttcactcactctctcttctgccaccttgggataaggtgcctgcttccccttcgccttccactgtgattgtgagtttcctgaggcctccccagccatgatgcagaactgtgagtcaattgaacctctttcagtctcaggtaacatctttatagcagtgtgaggacagactaacacatcatctgtattagtccgttttcacactgctgataaagacatacccaagcctggscaatttacaaaagaaagaggtttaatgaacttacagttctacatggctggggaggccttacaatcatggcagaaagttaaagtcatgcctcacatggcggcagaaaagagaagagggcttgtgcagggaaactcccatttttaaaaccatcggatctcgtgagacttattcagtatcaccaaacagcatgagaaagatcctcccccatgattcaactacctcccaccaggttcctcccaccacacaattggaattgtgacagttacaattcaagatgagatttgggtggggacacagccaaactatatcatta

SEQ ID NO: 460089 - DNA, 566 bp, Homo sapiens
ctgaggcaggagaatggtgtgaacccgggaggtggagcttgcagtgagccaagattgtgccacttcactccagcctggatgacagagcgagactctgtctcaaaaataaaaataaaaataaaaataaaaaagtctgtggcaattccctcttcactcactctctcttctgccaccttgggataaggtgcctgcttccccttcgccttccactgtgattgtgagtttcctgaggcctccccagccatgatgcagaactgtgagtcaattgaacctctttcagtctcaggtaacatctttatagcagtgtgaggacagactaacacatcatctgtattagtccgttttcacactgctgataaagacatacccaagcctggccaatttacaaaagaaagaggtttaatgaacttacagttctacatggctggggaggccttacaatcatggcagaaagttaaagtcatgcctcacatggcrgcagaaaagagaagagggcttgtgcagggaaactcccatttttaaaaccatcggatctcgtgagacttattcagtatcaccaaacagca

SEQ ID NO: 460090 - DNA, 596 bp, Homo sapiens
ccccaccccacccagaagcccagctggcttcactgctcagtctagccaaggcatgtgtactatggagtagaaatcttgcagccaccttagaatcctgcctcccatgcaagttcaaatggaatttctaaaacaataataataaagataaccatttcaggaagacaagtgtgcaaaccaaagtgtttaagaatgattatactgtgtgcttgtataattgagtggtcaattagacatttaattttttcatgtgaacataatagatattccccyaaagagataaagtgaatttcaggtttatggagagggagcaacattaaatcaaaacactgttttctcacatttttcaatctggttacaatttgtggaagaattttccatcctctacaagaagtagaagatattcgttgaaggcagttggaattaaatgcaattagaaaagctctgatttatattgctacccaattttcttccattatcttgtaaggaaataccttaaaggtgaaaggagaattctgaattaatttttctgttacatgaagcacatttaccagtctcagcctaaaaacatgtagggagctctagcagttctgttttcc

SEQ ID NO: 460091 - DNA, 557 bp, Homo sapiens
tcctgttaaaactcatttactacacacaaccacctaccagatggtagcctctgacaccagaatgtgcctgaggcagaattgtggctgtaaagatgtacatgtaaatgtgatagggtaaggaattttttttaraagcaactgagaaagcatttaggaaacggaggctttaacttcacccttcagacccagtggtgatgttgctgtgctttgcagttagcagaaaaactgagatgccattttgctcatttgtacatatgttaaagatctattttaggtcttcattgtttttctatgaatgtgcaacatgattttaaaaacaaaatgccacaaaatattgcatattttgttcataatgcaatcttttgttttggggtggcttctatttctaaagctatggattaatgtcactttaaagtttaatgctagtagaaagtcacttttggtttgtctattatctttgtcctcatagtgtacacttaaagaatagataaattcaagcacttacagtcaattaattatcaaaaggtgaccaagaagacacaatggggaaagtttct

SEQ ID NO: 460092 - DNA, 557 bp, Homo sapiens
tcctgttaaaactcatttactacacacaaccacctaccagatggtagcctctgacaccagaatgtgcctgaggcagaattgtggctgtaaagatgtacatgtaaatgtgatagggtaaggaattttttttagaagcaactgagaaagcatttaggaaacggaggctttaacttcacccttcagacccagtggtgatgttgctgtgctttgcagttagcagaaaaactgagatgccattttgctcatttgtacatatgttaaagatctattttaggtcttcattgtttttctatgaatgtgcaacatgattttaaaaacaaaatgccacaaaatattgcatattttgttcataatgcaatcttttgttttggggtggcttctatttctaaagctatggattaatgtcactttaaagtttaatgctagtagaaagtcacttttggtttgtctattatctttrtcctcatagtgtacacttaaagaatagataaattcaagcacttacagtcaattaattatcaaaaggtgaccaagaagacacaatggggaaagtttct

SEQ ID NO: 460093 - DNA, 563 bp, Homo sapiens
aggtcagaaaacctaattttctgatgaaattttctatatgaaaccacttacagtttttatcctgatgattaaccagaaagtagcaaataggttaagacccatttctagtaatagttgcatgtgttggtcaaactgcattactaaggtccctggaggaaattagggagttagagtcagaaatgtttttgagtyaatttttgagaaggctgctctaatgcttagcaaatttaaataattgtgaatgatgcagcctgtgaaaaaaacatcaagtcttttgataattttgagtgcttatgagttaaaaggcacaccattggcagtttggaaatggtaatggagatcaaaaacataacacagtttagtattaaggccataaaggtggagttaacttatcagaatggaaaaagaacactaacttgaagtttcaaaatattggtgtaacaccactgacagcctcaagagggagtcaaagttttaggcagtcaatcttccgtgaaggagcacagctcataccccatgttatggggcctccttattaagagatgaacaactcaaattcagca

SEQ ID NO: 460094 - DNA, 663 bp, Homo sapiens
ctcttctctttatatattttgtcattaaggccattttttgcttttatttgtcttagtggcagatatcctcagttctttccccttactctagtccaaagaggctgaccactaggcctgcaacacagctttcactcctggtttttcctgattttcctttcttatttccttttcattttaaaataccatttccaaactcacatgtatttttcttaaattttgatttgcctacttttattcatctacttcattgtctcaaacttttctcatttttacctaagaagccttagcatatttttttctaatttcctccaatatgaaaatttaatactatacatatactgtgttttaattacaagaagaatatttttttctatcccaagaactaatttttgcccacttgggtatagtattgtcacattaaaaaagaattatctactctgttatagtgtgacaaatctaatattwtcctgagcaaagaagaatgaaagtcaattcaagtaacacaattttttaaaagaattacacattataactgtgtttgtattaagccttaaaaatctgtattctttctactcccagaattatttttaaaaaactattatttagggatatacacaaattaaacagtacatttaaaaagggaatgtggaaaagaaacacaca

SEQ ID NO: 460095 - DNA, 448 bp, Homo sapiens
tccatgtccagaaactcggggaatcactgtgtccgttttccttgcctcgggactgtgcctcttgtctggagatgatgaggtttctttcagcctcccatgctctccaccaatgatcatgagtttccattcgagacacagaatctggctttgagaataagamacagttccctccagcttttcttcaagagcctcaagtcaccttctgtaactccagatcacaagctggacccatccagggcagcaggcactcctgggctttgacctcctctgtctcgaggtgaaactcggtgagggttttacattccactgaactactgctggactgcagtggcacgtccctgatctctgcacagaatgtctttcatcccctggttaaacaagtctgtcaaaaacaagagaactttcaccacacgcataccatgacaccctcaccacctcccagggtgat

SEQ ID NO: 460096 - DNA, 448 bp, Homo sapiens
tccatgtccagaaactcggggaatcactgtgtccgttttccttgcctcgggactgtgcctcttgtctggagatgatgaggtttctttcagcctcccatgctctccaccaatgatcatgagtttccattcgagacacagaatctggctttgagaataagaaacagttccctccagcttttyttcaagagcctcaagtcaccttctgtaactccagatcacaagctggacccatccagggcagcaggcactcctgggctttgacctcctctgtctcgaggtgaaactcggtgagggttttacattccactgaactactgctggactgcagtggcacgtccctgatctctgcacagaatgtctttcatcccctggttaaacaagtctgtcaaaaacaagagaactttcaccacacgcataccatgacaccctcaccacctcccagggtgat

SEQ ID NO: 460097 - DNA, 448 bp, Homo sapiens
tccatgtccagaaactcggggaatcactgtgtccgttttccttgcctcgggactgtgcctcttgtctggagatgatgaggtttctttcagcctcccatgctctccaccaatgatcatgagtttccattcgagacacagaatctggctttgagaataagaaacagttccctccagcttttcttcaagagcctcaagtcaccttctgtaactccagatcacaagctggacccatccagggcagcaggcactcctgggctttgacctcctctgtctcgaggtgaarctcggtgagggttttacattccactgaactactgctggactgcagtggcacgtccctgatctctgcacagaatgtctttcatcccctggttaaacaagtctgtcaaaaacaagagaactttcaccacacgcataccatgacaccctcaccacctcccagggtgat

SEQ ID NO: 460098 - DNA, 448 bp, Homo sapiens
tccatgtccagaaactcggggaatcactgtgtccgttttccttgcctcgggactgtgcctcttgtctggagatgatgaggtttctttcagcctcccatgctctccaccaatgatcatgagtttccattcgagacacagaatctggctttgagaataagaaacagttccctccagcttttcttcaagagcctcaagtcaccttctgtaactccagatcacaagctggacccatccagggcagcaggcactcctgggctttgacctcctctgtctcgaggtgaaactcrgtgagggttttacattccactgaactactgctggactgcagtggcacgtccctgatctctgcacagaatgtctttcatcccctggttaaacaagtctgtcaaaaacaagagaactttcaccacacgcataccatgacaccctcaccacctcccagggtgat

SEQ ID NO: 460099 - DNA, 488 bp, Homo sapiens
tgttttttcttttgatgcagctagaaggccaccagctatgcaaggccacaagttatgccaagtcatcagttatgctatagattatgtgacctgtcattatatgattaactgcctttgttttgcttctgtagattgcctataaaaatcctgctcagtctttgttcaargctcagctttttggatgtgaatccactgagccagtgcacaccttaaaataaataccctcctatattcacccatactggtctctctagtcctctgtgacctgtaacggtataaatccttatagtcacagtgctatgctcttaacaggtgctttaaaaaaacagctctgtggaatgattgacatttacatctctgagcagctgagcctggcaagacctaccaaagggcaagcaggatccttatatcttgcagaatatcttgctaaggagagctcaggaggcagaacagatggacacacctcaaattcattctctgatatgacc

SEQ ID NO: 460100 - DNA, 403 bp, Homo sapiens
ttttcttgtaaatttgtttaagttccttatagatactggaaattagacctttgtcagaygcatagtttgcaaaaattttctcccattctttaggttgtccgtttactctgttgatagttacttttgttggagacaacactattaacagtctggtgtttattcccccaggaacttttcatagcttatactaatacgttataaatagtatttagtattaatatttctattattttagaaaattgactactgctatgtgtgttctgtaactagtattgaggacagactacagcaggtcaaggatgggtctagttaacaggctactgcgatcacctagagaaagatgagtgtggtttcggcattcaagttgttgaattctgactttatttagatggaaagccaacaa

SEQ ID NO: 460101 - DNA, 403 bp, Homo sapiens
ttttcttgtaaatttgtttaagttccttatagatactggaaattagacctttgtcagacgcatagtttgcaaaaattttctcccattctttaggttgtccgtttactctgttgatagttacttttgttggagacaacactattaacagtctggtgtttattcccccaggaacttttcatagcttatactaatacrttataaatagtatttagtattaatatttctattattttagaaaattgactactgctatgtgtgttctgtaactagtattgaggacagactacagcaggtcaaggatgggtctagttaacaggctactgcgatcacctagagaaagatgagtgtggtttcggcattcaagttgttgaattctgactttatttagatggaaagccaacaa

SEQ ID NO: 460102 - DNA, 403 bp, Homo sapiens
ttttcttgtaaatttgtttaagttccttatagatactggaaattagacctttgtcagacgcatagtttgcaaaaattttctcccattctttaggttgtccgtttactctgttgatagttacttttgttggagacaacactattaacagtctggtgtttattcccccaggaacttttcatagcttatactaatacgttataaatagtatttagtattaatatttctattattttagaaaattgactactgctatgtgtgttctgtaactartattgaggacagactacagcaggtcaaggatgggtctagttaacaggctactgcgatcacctagagaaagatgagtgtggtttcggcattcaagttgttgaattctgactttatttagatggaaagccaacaa

SEQ ID NO: 460103 - DNA, 403 bp, Homo sapiens
ttttcttgtaaatttgtttaagttccttatagatactggaaattagacctttgtcagacgcatagtttgcaaaaattttctcccattctttaggttgtccgtttactctgttgatagttacttttgttggagacaacactattaacagtctggtgtttattcccccaggaacttttcatagcttatactaatacgttataaatagtatttagtattaatatttctattattttagaaaattgactactgctatgtgtgttctgtaactagtattgaggacagactacagcaggtcaaggatgggtctagttaacaggctactgcgatcacctagagaaagatgagygtggtttcggcattcaagttgttgaattctgactttatttagatggaaagccaacaa

SEQ ID NO: 460104 - DNA, 610 bp, Homo sapiens
gtgttaaaaatactcggagaggcctgactgtgaagtgaagcataagttaagacatgaacacacgagatggatgtgtgttgggaggaaagcttagtgttgggagaaaagttgaggcagggcttggaacatgtccggggtccaggataaaaccccttgtggcctttgtaatgtgtccagacttgctggctccttgcttctagcactcccattatctcaagtagccatatgtttcaaagaaaatgctaaaccctcacagctgtagttcattcgcttgatacaccactttctttcaacycccacatcctcatcacctgtttctttgtttgatcaccaacaaatagtgtgggcttccagagcttggggacttcacagcctccatactagcattggccccctggtcccactttctctcttgacttgtcttttctctttcctttgactcggctggactttgtagcccccatggccgggtgttgggtctgatcaccccaacagatgtgttttcattgtgtagtctccaaaacgttgataaaacaagaggaaaaagtcacagccacttggttacttattttaaatccttattctgagtttattttatcctataactagt

SEQ ID NO: 460105 - DNA, 610 bp, Homo sapiens
gtgttaaaaatactcggagaggcctgactgtgaagtgaagcataagttaagacatgaacacacgagatggatgtgtgttgggaggaaagcttagtgttgggagaaaagttgaggcagggcttggaacatgtccggggtccaggataaaaccccttgtggcctttgtaatgtgtccagacttgctggctccttgcttctagcactcccattatctcaagtagccatatgtttcaaagaaaatgctaaaccctcacagctgtagttcattcgcttgatacaccactttctttcaactcccacatcctcatcacctgtttctttgtttgatcaccaacaaatagtgtgggcttccagagcttggggmcttcacagcctccatactagcattggccccctggtcccactttctctcttgacttgtcttttctctttcctttgactcggctggactttgtagcccccatggccgggtgttgggtctgatcaccccaacagatgtgttttcattgtgtagtctccaaaacgttgataaaacaagaggaaaaagtcacagccacttggttacttattttaaatccttattctgagtttattttatcctataactagt

SEQ ID NO: 460106 - DNA, 610 bp, Homo sapiens
gtgttaaaaatactcggagaggcctgactgtgaagtgaagcataagttaagacatgaacacacgagatggatgtgtgttgggaggaaagcttagtgttgggagaaaagttgaggcagggcttggaacatgtccggggtccaggataaaaccccttgtggcctttgtaatgtgtccagacttgctggctccttgcttctagcactcccattatctcaagtagccatatgtttcaaagaaaatgctaaaccctcacagctgtagttcattcgcttgatacaccactttctttcaactcccacatcctcatcacctgtttctttgtttgatcaccaacaaatagtgtgggcttccagagcttggggacttcacagcctccatactagcattggccccctggtcccactttctctcttgacttgtcttttctctttcctttgactcggctggactttgtagcccccatggccgggtgttgggtctgatcaccccaacagatgtgttttcattgtgtagtctccaaaaygttgataaaacaagaggaaaaagtcacagccacttggttacttattttaaatccttattctgagtttattttatcctataactagt

SEQ ID NO: 460107 - DNA, 553 bp, Homo sapiens
cttctgcaccctgtgtcccttcacttgtgyttccattggcatggtcagaagttctgtgcccttcagtgtgggtctctctgctgcagcacacaggatgccctgccagtcagggatggttctcatccctcacagagctggccatatggcccaggttccacacaagcctgcaaaacttgtatttctagcttctataaataacctctggctgggcacagtggctcacacttgtaatctcagcactttgggaggccaaagtgggcagatggcatggctccaggagcttgaggccagcctgagcaacatggtgaaacgtggtctctacaaaaagttaaaaaataaaaatagccaagcatggtgttgcacacctgtagtcccagctactctggaggctgaggtggaaggatcacctgagccctggagacggaggttgcagtgagccaggagtgcacccctgcaccccagccttggtgacagagcaagactctgcccccaccccttaaaatgaaaaaaaactctaaaatcatctacagaagacaccttctgccaaggtcat

SEQ ID NO: 460108 - DNA, 553 bp, Homo sapiens
cttctgcaccctgtgtcccttcacttgtgcttccattggcatggtcagaagytctgtgcccttcagtgtgggtctctctgctgcagcacacaggatgccctgccagtcagggatggttctcatccctcacagagctggccatatggcccaggttccacacaagcctgcaaaacttgtatttctagcttctataaataacctctggctgggcacagtggctcacacttgtaatctcagcactttgggaggccaaagtgggcagatggcatggctccaggagcttgaggccagcctgagcaacatggtgaaacgtggtctctacaaaaagttaaaaaataaaaatagccaagcatggtgttgcacacctgtagtcccagctactctggaggctgaggtggaaggatcacctgagccctggagacggaggttgcagtgagccaggagtgcacccctgcaccccagccttggtgacagagcaagactctgcccccaccccttaaaatgaaaaaaaactctaaaatcatctacagaagacaccttctgccaaggtcat

SEQ ID NO: 460109 - DNA, 553 bp, Homo sapiens
cttctgcaccctgtgtcccttcacttgtgcttccattggcatggtcagaagttctgtgcccttcagtgtgggtctctctgctgcagcacacaggatgccctgccagycagggatggttctcatccctcacagagctggccatatggcccaggttccacacaagcctgcaaaacttgtatttctagcttctataaataacctctggctgggcacagtggctcacacttgtaatctcagcactttgggaggccaaagtgggcagatggcatggctccaggagcttgaggccagcctgagcaacatggtgaaacgtggtctctacaaaaagttaaaaaataaaaatagccaagcatggtgttgcacacctgtagtcccagctactctggaggctgaggtggaaggatcacctgagccctggagacggaggttgcagtgagccaggagtgcacccctgcaccccagccttggtgacagagcaagactctgcccccaccccttaaaatgaaaaaaaactctaaaatcatctacagaagacaccttctgccaaggtcat

SEQ ID NO: 460110 - DNA, 553 bp, Homo sapiens
cttctgcaccctgtgtcccttcacttgtgcttccattggcatggtcagaagttctgtgcccttcagtgtgggtctctctgctgcagcacacaggatgccctgccagtcagggatggktctcatccctcacagagctggccatatggcccaggttccacacaagcctgcaaaacttgtatttctagcttctataaataacctctggctgggcacagtggctcacacttgtaatctcagcactttgggaggccaaagtgggcagatggcatggctccaggagcttgaggccagcctgagcaacatggtgaaacgtggtctctacaaaaagttaaaaaataaaaatagccaagcatggtgttgcacacctgtagtcccagctactctggaggctgaggtggaaggatcacctgagccctggagacggaggttgcagtgagccaggagtgcacccctgcaccccagccttggtgacagagcaagactctgcccccaccccttaaaatgaaaaaaaactctaaaatcatctacagaagacaccttctgccaaggtcat

SEQ ID NO: 460111 - DNA, 616 bp, Homo sapiens
cttatacatatctatcttatggacataggaaaaaatatttcctagctctctccactgcaagggccttgaaaccaaaacacttcagtagcaatgagcacgctaagcatataaaccttgcttgtaaatagccttcatcacttaagaggaatcagggctccttggagaaatggctgattccaaggctggggcaggacaagcctaacgagcctggaacattttgttgtgccagaaagtaagaaaattctaaaaaatacaatcgttggggacagagaagccagcttgaaggggctcctactagtcaaatctggggcagtttgaccattaaaatagtgactgtaatggattataacttayagaataaaataagaatccatgagtccatatgagaatatataagtagattaagaagggagaaggcaaagttctttgttaaagtagaatgccaactaataaatgtggggaaaataatggagttttaaaaaactgccatttcctcaccaccatagtataactgaatcaaagcaggatcatcaatgagtcaatgagtgctaaacctgggtgatcatttgacaaggaataagatatatgcatagtctcaaagtttcttctcacaaat

SEQ ID NO: 460112 - DNA, 559 bp, Homo sapiens
ctgtgcacctttttttttttttttttttaacttcacttcaaatgactttgagatgtctgtgtagcgttttggtctttcaggtatatcctactgaagaaatacagtgaagatactgtgttccaaagtcagttgtaataattcttttctctgtrtggttgagacaccaatatcaacctcatttggaattaggttcatttgtgccagtttgttttccgtttttagagtttttatgactatgtttacatatacacacatacacattcctttccccactgctgttgctaatacaaaagatgacagaccatatacaatttcagcacctcgttttctttattctgtgtcttagagatcactctctagtttcttcattctcttgtacatctgcataataatccattgtgttgctcttattaatccccaatttgatgaacatttagatggtgcttcagtgtgactattgtaaataatgctgcaaataactgtgtgcatatgccatttcatatttttgcaactatatctttgagataggatccaagaagcaagattgatgagtcaaagg

SEQ ID NO: 460113 - DNA, 606 bp, Homo sapiens
acaggcacgcacaaccatgcttggctaattttttgtatttttagtagagatggggttttgccatgttgtccaagctgacatgatacaatcatgtcaggtctctagtttgacccatatttcctgcatccaaaagctatgagtcatatagaccaatattctagatgactgagtttatagctactatctcttaatcaaatgtttctccccctttttattccataattaaagctgaaaaaagaagcaggttttatagacaatgttcattatgtttattgatgcttagatgagagaatcatttattaaagcaatatttaaaaagtgtgratggtgaattaaatcaaaaagtgagattttttttaaaaggataaaagccctatacatagttttaaaaaatacagatgctgatgcggtcttagtctgagtgtagtgtgagcacagggatatgcctgtatgcacacatacacaagcagcccctttctctttaagattcacaaagaaataatgtttaaggtgatggatatctcaaatatcctgatttgatcattacatattgtatgcttgtatcaaaatatcacatgtacatcgtaaatatgtacagctatttat

SEQ ID NO: 460114 - DNA, 491 bp, Homo sapiens
tatgatgagagctacattttgcaaagaccatctggtaacagtgtggggaagaaaatggagaagtaggtgtcaggagatggcttaggaggtagtaatctaggggacaagatgtcgatggcctgaagtaaatgttgttttcaagagctgttcagaaaatggagctgcacagactcagtgctaattgtttaaagttttattaaaggtcagctatgatttggcactatgcagggagctagaaaatgccaatgaacaaaatggattgggcttctgcccttgggggccgtgggccaatggggaagsttctttgagggacagagtagggagagacctgacctgggctggacaagtcttcctcaggaggtgaagttcaaggaattagcctgagatgagcccagaggaaagagacagcaaaatgctttcaagggactgaagtcatccagtattaatggctaacgtccatggagctaggaaaatggtgtgattttaagctg

SEQ ID NO: 460115 - DNA, 453 bp, Homo sapiens
aattctaacattgaagggatggccacaggaagaggagcctacaagaaggatgagaatgcatagtaagagaagtagaagaaaggatggaacaataactactttgagaacataatttatggttatattcaatttgagtatcatttgaaatcatctgaaactcccaaaaagtttcattcatgtagtcacatagaagttacctaaagtttatttctttggcttgtgccttttcacagttctaattgtattaaggmatatttactttttgttttgcttttagattgcattaaacattgatcaagatttgtaggaccaaccaacctaagagcaataaatgtttttgtttgtttcaaatttcaaaccatgaggttcccaatttgtatttttttccttcaaacttgaactcccctttttttttcctctaaggactgcttatgaatgggcttcaagagtagc

SEQ ID NO: 460116 - DNA, 459 bp, Homo sapiens
ccacttgaagtttatccattaaaaaatgtatgaatgcctgctctgcctcaacttcctcatttgtatactaagtaaagtaatagtgctgacctctttagggttgtgagaaggattaaatgagttaattcatggaaagcttttacaacagtgcctggcacttagtaagcactcaacaagtagttactactgctattacatgctaggtgctgtgtgaggtaaatagagatctcatcagagttattatattctccagtagctcataacaaacacagaggtagaacagagtcagtgggtaatggaggtgccctggaactgaggattgggagactgtcgcgggaccataggggtttagagtcaggtaggagcagccctggagtgcgtggctcccatgcttactctcaggtwggtgtcagtactgtggctggagggaaggaggtggtgaccttgttcaaagcaggt

SEQ ID NO: 460117 - DNA, 485 bp, Homo sapiens
aagaagagagaatagagactagcatggagtacttactaatgccaacagctcccctgggagtttatagagttggtatgagcttgtgtttgaaagtatagggaaatgaagtctcaaagagtagcattcagcattgtaccagtaagtgttgaaactggtcctgtcacccagttatgttagaaatataactactgaatacatttgcagattccaacagcattaaaaagtgcctatctctaaaacagagtttatttcacttttcctagaagttttttatcctcttcactttttttttttttttttaagagatggggtcttaccatgttgcccaggctggtcttkaactcctgggctccagccgtcctcctgaagttctgggattacaaatatgatccatgatacctggcctcctcttcacttctttagtataataaagtggcttcactgttgtccaaatgctccaatttatagtgtgggagtcattctta

SEQ ID NO: 460118 - DNA, 575 bp, Homo sapiens
aaatttatttttcatcagagtatcctattccagaaaagcctgacaactgtaatgaatatggtaaaacttctagccagtccttaaaactttctcaacatcaaataattaacattggagagaactcacaaagatgtaacaaatgtataatagtctttagtcagtcatcacatctaaatagacataagttaatcaacactggagagaaatcattcagatgtaaataatgtggcaaagcttttacctgggactcacatcttagacaacatcagaaaatccatactggagagaaacccttcaaatataaagaatgcacaaagcctttaaccaatatgcacactttatacaacatcagagaattcacactggagagagactttttaaatgtaaagaatgtggaaaagctttaaactggggctcacaacttactcaacattagagactccatactggagagaaacttttcraatgtaaagaatgtggcaaggcctttaacaggcactcaaaccttacttagtatcagataattcaccccagataaaaaccccacaagtataaagaatgtgccaatgcccaaa

SEQ ID NO: 460119 - DNA, 593 bp, Homo sapiens
ttgaaatgctctattcagctatgtgtaaacttaatttgttttttaaaaaaataaaaataaaatggtttttaattttgaaaaaagaggctgggtgcggtggctcacacctgtaatcccggcactttgggaggccaaggcgggctgatcacgaggtcgggagatcaagaccatactggctaacacgatgaagccccgtctctactaaaaatccaaaaaaattagccgggctcggtggcggatgcctgtagtcccagctactcaggaggctaaggcaggagaatggcatggaactgggaggtggagcttgcagtgaacggagatcacgccactgcattccagcctgggtgacagagcaagactctgtctcaattaaaaaaaaaaaagaagwaaagatcacagtacatatataaatacataagtaaatttaaacatatagtcactgcagtgttcatttgtaatccctctttctcattttatttaaaagacaaatgcataaaacaataatccatgttaatgaatatataatgtacaaagatgtaatttgtaacaataacaaagtaaagagggaaattaagctctaaagaagtattatt

SEQ ID NO: 460120 - DNA, 550 bp, Homo sapiens
taaacgattcaagacagacaagagctgcagcagtkggtagaggactcctacagatgagaggtaaggagccttccttcctgcagttgcaggatccttaaacgctcatcaagatgatgccactgcccctagaatctgtcaacatacattttctcatgtgttggctttttcagatcgccccttctgctgcaagaaaggcctcaacaactgggtaagtttgttcatttttcccttgcttttcggccaagtcgggacatggatgtatttttctccccacagctctgtgctcaagccttgcagagggagatggcagagaggaaggctgccggcaagcagcacaggtaggtgattgtgatggacaaattttaaggatgtttttgttttaagatgaagctttgactgtctagtaaagaaaacagtgttttaattcttctacaagtcaactctttcactgtcttcaagacaggaaatgatggaaaagcagggagtgctggagagacacatgagtcaggaggcagcccagggacagctagggctagagaaccctttctgg

SEQ ID NO: 460121 - DNA, 550 bp, Homo sapiens
taaacgattcaagacagacaagagctgcagcagttggtagaggactcctacagatgagaggtaaggagccttccttcctgcagttgcaggatccttaaacgctcatcaagatgatgccactgcccctagaatctgtcaacatacattttctcatgtgttggctttttcagatcgccccttctgctgcaagaaaggcctcaacaactgggtaagtttgttcatttttcccttgcttttcggccaagtcgggacatggatgtatttttctccccacagctctgtgctcaagccttgcagagggagatggcagagaggaaggctgcckgcaagcagcacaggtaggtgattgtgatggacaaattttaaggatgtttttgttttaagatgaagctttgactgtctagtaaagaaaacagtgttttaattcttctacaagtcaactctttcactgtcttcaagacaggaaatgatggaaaagcagggagtgctggagagacacatgagtcaggaggcagcccagggacagctagggctagagaaccctttctgg

SEQ ID NO: 460122 - DNA, 490 bp, Homo sapiens
agcccagggacagctagggctagagaaccctttctggagaggtaggagctctctgggaaggcacccacttaacttctgctccacaatccacacccctgcttctcctttctggggtgagggcttgggttgggtaattgttatgtttcctggaaacagttccaagcacttactaaagagaacagttatcccgctgggtggcaggaccgtttttctcacgtgccacagctgaatgactcttggctggtcccctgtgaatagcggagcacaggcccctccactgactgtggacatcattccaccctgatgtcttggttacttttawctgaggggatgagcctagaaggcaaatgggtcagctccccttccaaccttgagtcagtgggaaggctttattttttttattaccacctgagaaaagtaacactaataacattttagaatgggagccataagtgctgatgagagcagaaattttctggctatgtcttca

SEQ ID NO: 460123 - DNA, 598 bp, Homo sapiens
  misc_feature (1)...(598): n = A,T,C or G
aatgtgaatgttaaagacaacaattggaaaagttgaaccctgaaaacttggttacttatgagaaaatgtaaaaggtgagtcactttttactgaattcccaatcactggacctctcttgaagattgaagcagattcccctattatgtgtgataagcctatttcaaattgcttgaagactccataattacttattggtgagagntacttcgcaagaaaaactacgccaccctacttyccaacttcaaacacttttccttttctccagtacaaacctgaccaattgtgaaattacaatgtaaacgctaggagcaaaaactttcttaaagttatgtaaggggcaatttatattcacaaaaatgttgtgaatatacatgggaaacacatatatttgctagattaataagagaagaacaaaagtttaactcagttgaagttataatatagatgctagttactagagtttccggattcaatttaccaggttgagcagctggggtatttgtaattgtttgcttagttggttagctgaaatccatagtcaattgtgtcctgtgataaatgaaagtgagatataagaaataatttcttataatgtatg

SEQ ID NO: 460124 - DNA, 504 bp, Homo sapiens
cattatccccaaattctgatgtacatttactaaataatttgtataggaatattttaagcagaatatttcatagtatcctaaaatttaaaaaataccagaaaaatccacattttgggatattcatataaggaaatgaaatattatggcaagaatgaataatctacaatcatatgcaacattatagatgaatctcacaaacataaacatatgccaaagtggtcagaaatgaaacgatatactatacaattttatttatataaagtataaaaagagtaaaatatattggatttttaaaaagttttagaagactaattaacagagattgtggtgartctgtaagaagacacatgggaattttgggaagtttatattttgtttcttaattcgatgttgtttttaatttgaagaattcatcaagctgtatattctgttgtactttttaatgtgtattaacattgaatacaatttaatgcaattgttataaaatttagtacaattttaata

SEQ ID NO: 460125 - DNA, 539 bp, Homo sapiens
tttaaaatctagctaacaaaaattttagtgtctccaggaaagttgctattaggtctttgggagggtaatatatgcactaagcccaatatgtgtactaggcaaacataataactattgaagtggaataaggtagtgagttctagtgttaaactgtttagatcccagtcctggttctaccagttactaagtaagtacttttgacaaagttatgtattctatctatcctgcattggtcaatcttttaaayggggctaattttaaaacataccacagaacttcaccttgttcaaacaagcaaagcacgtaggacactactgggaacataatagccttctagtatattttagctattattgatcaataaacaggatcacaaatattaggtcaatggtaatttgattaaattcggataatgcctggaatttatcgtgccaataaggctcttaatgtaacacctcaaattaaagaatggtatctggaccttattttctccctttattaatatactctttcttgaggatctcaaccagcgctgtggc

SEQ ID NO: 460126 - DNA, 570 bp, Homo sapiens
tgagtacaatactatagtgctatcactgtagtatttacaacaatacagtcataaaaatatctgaaaaaaattattggaccttgcgaaacagtgcatccatccaytttggcaagacaactgtatggttaagaatttccagtatgactatacccaataagtgtattagattgttaatggattattgtgttataggtgacatagttaactctaaagtaacctgactcagtatagttactggtaccacagtgaggtgaataaatcaggattttcagaagttaggctgaatttaactgtacttttacatttaacttccattaactaagcatcttttctttgtggtagagtctaacttctgcttccctggaaagggtgaatttacatcatttgacacgcctattttcaagttatttgtgtttgtttgcttgtttttgtttctgcagccaaaaataaaaatttcaaatacaattttagttcttacaagataatttcttaattttgtaccagttcaggtagaagcagaggcctagcttgaaataagggttatagtcagtttttaccacattattgaag

SEQ ID NO: 460127 - DNA, 570 bp, Homo sapiens
tgagtacaatactatagtgctatcactgtagtatttacaacaatacagtcataaaaatatctgaaaaaaattattggaccttgcgaaacagtgcatccatccattttggcaagacaactgtatggttaagaatttccagtatgactatacccaataagtgtattagattgttaatggattattgtgttataggtgacatagttaactctaaagtaacctgactcagtatagttactggtaccacagtgaggtgaataaatcagrattttcagaagttaggctgaatttaactgtacttttacatttaacttccattaactaagcatcttttctttgtggtagagtctaacttctgcttccctggaaagggtgaatttacatcatttgacacgcctattttcaagttatttgtgtttgtttgcttgtttttgtttctgcagccaaaaataaaaatttcaaatacaattttagttcttacaagataatttcttaattttgtaccagttcaggtagaagcagaggcctagcttgaaataagggttatagtcagtttttaccacattattgaag

SEQ ID NO: 460128 - DNA, 570 bp, Homo sapiens
tgagtacaatactatagtgctatcactgtagtatttacaacaatacagtcataaaaatatctgaaaaaaattattggaccttgcgaaacagtgcatccatccattttggcaagacaactgtatggttaagaatttccagtatgactatacccaataagtgtattagattgttaatggattattgtgttataggtgacatagttaactctaaagtaacctgactcagtatagttactggtaccacagtgaggtgaataaatcaggattttcagaagttaggctgaatttaactgtacttttacatttaacttccattaactaagcatcttttctttgtggtagagtctaacttctgcttccctggaaagggtgaatttacatcatttgacacgcctattttcaagttatttgtgtttgtttgcttgtttttgtttctgcagccaaaaataaaaatttcaaatacaattttagttcttacaagataattycttaattttgtaccagttcaggtagaagcagaggcctagcttgaaataagggttatagtcagtttttaccacattattgaag

SEQ ID NO: 460129 - DNA, 543 bp, Homo sapiens
cagggaggtacaaaaacatttgaagaaatatgctgaaagttttcaccatttgataaaaattacagattcacagacctaagaaggtcaattaaattgaaatacaaaaaaacataagggaaactacaataaggcacattctacttaaactgctcaaagytaatgatttaaaaagaaaatatatagatgagacagataaaatgtaaattaattacaggtaaatagagataaggataacagcagatttctcatagaaaacaatgtcatctaacagagagtagaacaaaatctttaaggcactgtgagaagaaaaagtggaataaaaaaagttttcagatgcgcaggcttacagagttcatgaccatcagacctacagtataagaaatgttaactaaaacttttcaataagaagaaaattataccagatcaaactgagagagaagaaaataaaaaacttatcaggtaggtggttagggtaggtccttggcaaaattcctccaaacaaagaacaggctgaaaatcaaaatgcaggccccaaataagaaa

SEQ ID NO: 460130 - DNA, 572 bp, Homo sapiens
taaggcacattctacttaaactgctcaaagttaatgatttaaaaagaaaatatatagatgagacagataaaatgtaaattaattacaggtaaatagagataaggataacagcagatttctcatagaaaacaatgtcatctaacagagagtagaacaaaatctttaaggcactgtgagaagaaaaagtggaataaaaaaagttttcagatgcgcaggcttacagagttcatgaccatcagacctacagtataagaaatgttaactaaaacttttcaataagaagaaaattataccagatcaaactgagagagaagaaaataaaaaacttrtcaggtaggtggttagggtaggtccttggcaaaattcctccaaacaaagaacaggctgaaaatcaaaatgcaggccccaaataagaaagagcccatgtccttgaatggaaacacttagtatttgaacccagatgaacaaattccaccctttcttggatacatttatctctccttggcacaccttaatcttttacctttcacctactgatcttttacttttcaaattttaacatatgcgtatct

SEQ ID NO: 460131 - DNA, 601 bp, Homo sapiens
cacaccttaatcttttacctttcacctactgatcttttacttttcaaattttaacatatgcgtatctttctataatcggtgctggctaaggcttcatttacatacggtgaattattacttcagcccctgattggtcctgggccaagttcccaggcctagcattcacctyggcctccaattggttcttcacattctcatacctctttcttagtggtggtttgtccaaaatggcctgcagaccagtcagcacattcctccttttttcagtccataaaaacccctgattcagcctcatagttgacacccttcttttgggccccctttccgctgtggagagatttcctcttttgcttattaaacttttgctccaaactcacccttggtgtcattctccttattttccttgatcgtgagacaatgaactctagataatacttcagacaatgaggctgcttcaaaactgtgtttacacgaactaataaagaggactgaaaatgtctaatgacttggttatatatgagagtatgatttttttttaaatagtggcatctcttcaatatgattttaaagcaaaaataaatagggtgatgtatatgttcat

SEQ ID NO: 460132 - DNA, 601 bp, Homo sapiens
cacaccttaatcttttacctttcacctactgatcttttacttttcaaattttaacatatgcgtatctttctataatcggtgctggctaaggcttcatttacatacggtgaattattacttcagcccctgattggtcctgggccaagttcccaggcctagcattcacctcggcctccaattggttcttcacattctcatacctctttcttartggtggtttgtccaaaatggcctgcagaccagtcagcacattcctccttttttcagtccataaaaacccctgattcagcctcatagttgacacccttcttttgggccccctttccgctgtggagagatttcctcttttgcttattaaacttttgctccaaactcacccttggtgtcattctccttattttccttgatcgtgagacaatgaactctagataatacttcagacaatgaggctgcttcaaaactgtgtttacacgaactaataaagaggactgaaaatgtctaatgacttggttatatatgagagtatgatttttttttaaatagtggcatctcttcaatatgattttaaagcaaaaataaatagggtgatgtatatgttcat

SEQ ID NO: 460133 - DNA, 598 bp, Homo sapiens
ttcaattttactctgttccttcccctccaactcctttgatacagggatgaaggagagtttttcaaaaatgatgatagaagctgagtatgtttatggtttcaaaaaaacatcaaatagtggaattagaaaatataggggcaatattgtagaacataatcagagtgctggagatcactaatcctagtagaaagattgcatttttttagaaaattaagaactattgtttgagaatgaagaatgatatatgtgatacaaagtgagaaattgaaatttatttttgttctttattttctctataaaataagaggcagggaataatctaaacaaagagataattaaatggaaagcttgagaaagtgatgaaatgtggctgtatttgttgatggttatgggagcaagatttagcaaaaatatataaatatataaataaatatatgtrtatatatatatatatatatatatatatatatatatatatataaaactaaacctggtatgtggcattgagggatataaagaagccatatggaaatgtctagatcttatttttatttccctatatgttagattatatagttgattattattgtgattatga

SEQ ID NO: 460134 - DNA, 603 bp, Homo sapiens
gagggatataaagaagccatatggaaatgtctagatcttatttttatttccctatatgttagattatatagttgattattattgtgattatgattattaaaacaattgccaatttcttcaaaaactatcatgcttcttgcatgagacaaaagcttcattcaaggaattttccaagaccaatttttctccacattaaaaaaaaaaactcagcctaaaactatgcaactttatgaaagtacaatgcaagtttttaaattcaattcttactaccagaaagatccactgtgaatgatttttctggtataccctgtatcagtgaattgtcccaccatgtctctatcgcatggtcagtaaccattccctgtttctttctctttctgtgcatttgattttctcctttgtctaatttttctgattttatccctttggagtttgtttcagcttcaggctcacatgttgacttctcyacctgctgatctgcagagatactcagctcatagctctatggcttcgcaacttcattgcaaagagactttttatctgggttttaaaataagattcatgaattggatccattttcatgtgaagtggtgaattaaatag

SEQ ID NO: 460135 - DNA, 722 bp, Homo sapiens
actatgtgttctcttctaagcagaatatgaatatattaattacttttttaaattttatagaaaaacaataaactatacaaatattataaaaaagattaagttaatctcacttttaacttggatggtaaatttctaaaaaatgataataacaataataagcaaataaaatctaacaatgtatgatttatattacaacctactggttattcaaatactcaagtatgggttaatattggaaaatccactcacatattttatcactgaaagagttaaatgagaaaaaaaataagccacctaatattaatagatgcagatcaatagatgcagaaatagaattgaataaaatttaataaccctttaaaaaagaaaaatagaaattgttttgaagtgaaaaaaatagaagttttcttaactagacaaaatatatctacaaaaagactgtggaatattagcacgatgcaaacaatgtcataccaagaacarcaacaacaaaaaagacgtccacttacatcacttccatttaacattgtaatgaatgttctaggtagtctatgagaaagaaaaaacaatgcaacacacagtaaatgaaattaaataaaatcattggttgccatcttctacattaaacaatccaaaaatcaaaactatgaataaacccaaaaatcaaaactgaataaaccctgctaaattatgagaaatttcagcaagtttactagatttga

SEQ ID NO: 460136 - DNA, 725 bp, Homo sapiens
cacccttactaaattatttaacatagctactattatttctgtagaatttccaaaacactttgtaatattggtatttaaaaatgatatgtgaatcaacttattatattttaaataataagtatatattaacataatgaaacaataaattatggtcatcagaatttgtaattgacatttaaattttgtagttattacttagcaaattaaattacatttttgtatttcaaatcttccctgaaactaygttgctatatgtttttaataactacatatattctgcaaatccaatctctccaaaagtgaaatgaccaacgttgagtggccagaaaacccctttcacttttacttgcactattgttggatatattagaatgaatatcacaagtggcatgttttgcatctgtaatactgtaaaaatattgtatatttaatcaatcatgtgagtattatagcaacaatacagcttttaatagcaaaggagtttaagcatattaaaggagatgcttcagtatactataatagcttaatatacctatgaatatgagaaactttttaggcttctcatatatttaccactaaattaaaaagtgtcaaagaaaaaactgtgatctgaaaacatcataccaagaatttgagaattttgcattagtggtagcctagctaccatcatactttttgcatgtgtgaattttttaatacatgagatattcaactgatagcaaaaa

SEQ ID NO: 460137 - DNA, 725 bp, Homo sapiens
cacccttactaaattatttaacatagctactattatttctgtagaatttccaaaacactttgtaatattggtatttaaaaatgatatgtgaatcaacttattatattttaaataataagtatatattaacataatgaaacaataaattatggtcatcagaatttgtaattgacatttaaattttgtagttattacttagcaaattaaattacatttttgtatttcaaatcttccctgaaactacgttgctatatgtttttaataactacatatattctgcaaatccaatctctccaaaagtgaaatgaccaacgttgagtggccagaaaacccctttcacttttacttgcactattgttggatatattagaatgaatatcacaagtggcatgttttgcatctgtaatactgtaaaaatattgtatatttaatcaatcatgtgagtattatagcaacaatacagsttttaatagcaaaggagtttaagcatattaaaggagatgcttcagtatactataatagcttaatatacctatgaatatgagaaactttttaggcttctcatatatttaccactaaattaaaaagtgtcaaagaaaaaactgtgatctgaaaacatcataccaagaatttgagaattttgcattagtggtagcctagctaccatcatactttttgcatgtgtgaattttttaatacatgagatattcaactgatagcaaaaa

SEQ ID NO: 460138 - DNA, 598 bp, Homo sapiens
tttgcattagtggtagcctagctaccatcatactttttgcatgtgtgaattttttaatacatgagatattcaactgatagcaaaaaacttttagttttgttttgttcctgtttttattacmaagcattgaagagtcaaattcctgttaaagaaattgtctgaataaacttgtagaataggaaattggaagtctttatcagaagaaaagaggtttgccagatatggtggctcatgcatgtaatccaaacactctgggaggccaaggtaggaggatcgcttgagcccaggagttcaagaccagcctgggcaacatagcaataacccacctctgttttaaaaaaaaaaatttacaaagaagaaaagaggcttattacaaaaattagagtcctgaaactaaatgtcttgattcactagaaccccaaaagaaacataaagattaaaaaatcaatccgttaagccaaataacataattcaatattttttccaaaatgtgattgattttttggagggtattttcttcaaaaaacttacctgagtaatttccctgttgatgtgaatgacaatagaaacctacgtgctgaaataaaaagtttttatt

SEQ ID NO: 460139 - DNA, 491 bp, Homo sapiens
aattgccaccatatcagatgttttatcattgttcaagtgaattagcacatcctccagaaaaccagccacctcttaattgtcctatgtttctcaccccctaccaaagtaatgtccaaaaagatctgaaccatctagtcatactatagaaccacatgctgtcctattatattagtggcatcatgatgacctaggagggcaagcaagaggtacccggtctgctggagaccacagtaagcaacatgtacatcaaaaggtaggagatgcaygctacaagattcagagatatcccaactcagtaacgctttccgaggttcagattcagaagaatgtcaagaaatcttatccaaagtgaaaggaaaattactgcttgttgagacagagtctcactctagcacttaagctgtagtgcagtggcgtgatctcgactcattgaaatctctgccttccaggttcaagagattctcctgcctcagcctcccaaatagctggga

SEQ ID NO: 460140 - DNA, 578 bp, Homo sapiens
aattgggctttatttgagcacagtgtctagatttaattctgatactgattgcataagaaaaagaagaaattcatcaaagagaaataattagaaaatgttattttatctaacctttgattattgatggtctacagatattataaaattaaatgcattgaaaattggattagattttaaaacaaggaaagttttaaaacaaaaataatcataaattgatttctcaaaaaacggtttcaaactcagacagkctctcttctatctaggatggtttaagcttgatgcctgagggctggattagatgaggtgcctcttaccctttgatattatgataattagcacttattgagcccccatggggtgtatatcccatcgtaggtgctacttgatagctagtttagacatgatccttttgatttgatacacagaatactccatacatattaattcaaaaaattctttccaactcatttcatttgtggcctcttatttttctgaacttactgcacaaattgtctgtacaactcttttgtcgatcactatgtgctggcttgtaacattgcttgaatgttgttttattg

SEQ ID NO: 460141 - DNA, 578 bp, Homo sapiens
aattgggctttatttgagcacagtgtctagatttaattctgatactgattgcataagaaaaagaagaaattcatcaaagagaaataattagaaaatgttattttatctaacctttgattattgatggtctacagatattataaaattaaatgcattgaaaattggattagattttaaaacaaggaaagttttaaaacaaaaataatcataaattgatttctcaaaaaacggtttcaaactcagacagtctctcttctatctaggatggtttaagcttgatgcctgagggctggattagatgaggtgcctcttaccctttgatattatgataattagcacttattgagcccccatggggtgtatatcccatygtaggtgctacttgatagctagtttagacatgatccttttgatttgatacacagaatactccatacatattaattcaaaaaattctttccaactcatttcatttgtggcctcttatttttctgaacttactgcacaaattgtctgtacaactcttttgtcgatcactatgtgctggcttgtaacattgcttgaatgttgttttattg

SEQ ID NO: 460142 - DNA, 578 bp, Homo sapiens
aattgggctttatttgagcacagtgtctagatttaattctgatactgattgcataagaaaaagaagaaattcatcaaagagaaataattagaaaatgttattttatctaacctttgattattgatggtctacagatattataaaattaaatgcattgaaaattggattagattttaaaacaaggaaagttttaaaacaaaaataatcataaattgatttctcaaaaaacggtttcaaactcagacagtctctcttctatctaggatggtttaagcttgatgcctgagggctggattagatgaggtgcctcttaccctttgatattatgataattagcacttattgagcccccatggggtgtatatcccatcgtaggtgctacttgatagctagtttagacatgatccttttgatttgatacacagaatactccatacatattaattcaaaaaattctttccaactcatttcatttgtggcctcttatttttctgaacttactgcacaaattgtctgtacaactcwtttgtcgatcactatgtgctggcttgtaacattgcttgaatgttgttttattg

SEQ ID NO: 460143 - DNA, 533 bp, Homo sapiens
aaccaaatagtttcaagtactaggaaggataattcccgcccttaaaccctagctctgccacttattacttaaatgatcttagataaaaaaactaacatttttataagatggggaaaaggatagtacccaccttttaaagttactatgagtttatatgaggcactgagaaaagaaaaagacacattttttatgctcaataagtattagccattagtrttttgtctactcattttatttttttgcctcttccactgttctgtaaatcctatgagggaaaactacatgtaattcttctgttctgtgcttggtccctattacagtagctgacacatattaaatgttcaaattttttgttgttgatgagtgaacaaatgtattgattgatagtatggagaagaatttgaaattccatttggtttctagttataattgagtaatcactcttcttatgtgtgttcctcatctatgttttactatttatttttacttttctttttaaaaatataataatatagcatatgtgtatgtttgca

SEQ ID NO: 460144 - DNA, 279 bp, Homo sapiens
ccactgttttagctcccacatataaatgagaacacgcaatatttgtctttctatgtccaggcaaattttatacgttaggaaccttggtatttaaaataaagatggtctgtcaacatctccccactctcagtctctcttcttttgtcattctacagaaccatctgtcaatggctacttcakactttagatgctccaagaggaaaaagtcatttcaggtaaggggcacctctctggaaaggtggttattatacctccatgttcaatttatttcacatttca

SEQ ID NO: 460145 - DNA, 591 bp, Homo sapiens
atcattagcgtttctgaacctcagagtccctacctgcaaatcaaaatagtaacaataatttaatcataaaactttgccatttttaagctacattgattttttatttttattttttaattgagacagagtctcactctgtcatccaggctggagtgcagtggcgccatctccactcactgaaacctctgcctcccgggttcaagcgattctcctgcctcagcctcccgagtagctgggtggagtctgccaacacgctcagctaatttttgtatttttaatagagatggggtttcaccatgttggccaggctggtctcgaactcctgacctcaagtgatccgcctgcctcagcctcccaaagtgcttggattataggcatgagccactgcaccaggcaaagytacactgaatcttttaaaaatgaacacatccttgtgtccagcactttgatcatgtaacagaacatttcctggatcccgacttcctccttgtaatctttttctgtctctctctcccaaagtaatgaccatcttgatatctgagaccatagattagcttgcctgcttctacctcatgctagtgaaatcatgca

SEQ ID NO: 460146 - DNA, 521 bp, Homo sapiens
ttcctccttgtaatctttttctgtctctctctcccaaagtaatgaccatcttgatatctgagaccatagattagcttgcctgcttctacctcatgctagtgaaatcatgcagaatgtgctattttgtatctggcatcttttccttaacattatgttctgagattcataccttgcatacaattgtgaatacttcatgaagaagctcaggagaatggggcraaaagcccagaatcaaggctatgtcagtattgcctgccatctcacatggtgggtactagagctgagaatattgacattgaagatcagactgtaggttgaagaattcttgataggtgttataacaaagcttttaggtaagagcagagaaggaaatgtatctgcaagttttcctctgagaaaaacaaaacaatttaagggaagccaataagcttacaatttggaataatcatcagttgccatccctttctcattactaatggtaaattttagaaaagacacctagaacttctgacccatttgat

SEQ ID NO: 460147 - DNA, 521 bp, Homo sapiens
ttcctccttgtaatctttttctgtctctctctcccaaagtaatgaccatcttgatatctgagaccatagattagcttgcctgcttctacctcatgctagtgaaatcatgcagaatgtgctattttgtatctggcatcttttccttaacattatgttctgagattcataccttgcatacaattgtgaatacttcatgaagaagctcaggagaatggggcaaaaagcccagaatcaaggctatgtcagtattgcctgccatctcacatggtgggtactagagctgagaatattgacattgaagatcagactgtaggttgaagaattcttgataggtgttataacaaagcttttaggtaagagcagagaaggaaatgtatctgcaagttttcctctgagaaaaacaaaacaatttaagggaagccaataagcttacaatttggaataatcatcagttgccatccctttctcattactaatggtraattttagaaaagacacctagaacttctgacccatttgat

SEQ ID NO: 460148 - DNA, 443 bp, Homo sapiens
tgaggtttctcttaaaatgttttccagagcctattttccattttgctatatgtccaaaagcagctggagctgcaatggcgcatcttctctgtcttttctttctaatctggggatggtagtgataagtgccctttctcaaacttcttgagtattaagaggtgactgcagtggtggcttctagatgcccttgattcstacatagcttcagtggtagccccagagaagtcactccttggtgcatcagtaccttattgctctagaagtcatttggaggcctttgatagaatgttatattagtccttttaagatctgtgtgcactgagtccattgtaataattcactgcctacataaaatgcctacagtaagtagacatataaacccaaatgctctttttttactctaaaaccattagtaagaactaacatttattgcaggcttacca

SEQ ID NO: 460149 - DNA, 546 bp, Homo sapiens
tttagagaactagcatggtacacattctgaaaactttactgaggacagcaaaaaaaaatgttaagaaattgttacagttcttacaaagaagatcctgggattctggggcaaagttgtttggacattcacctgaatgagaaacaacatctgttccagggctgaaatagatctaaatctctctgtaaggagttggctggaacacggttggattccactggtaatgagatctactcatagtgttgtgaagcccagtagcttctggtagccaggagaaatcagacctagagwcctgtttttatattacctaagtttctggaaaaattaccagaagtcagacaaactgctttttgaatgaaagcaaagaaatgagaattggttaaggttctggatttaaagattgatggccatttttttttctacaaatgatgctgaatttattatatttaggcaactctaaatgacttacctacagagtataaaatacaaaatagtctaactatgatttacaatgttggaaataacagaggtgttagagtaaagcaaacc

SEQ ID NO: 460150 - DNA, 548 bp, Homo sapiens
agcctctcatttttaatttttatttgttcttacaataacataatcttttcaacatgttggcttctctgattatgtgcaactaccrcagtttatcactccctgagtaatggctttaatatcttccctatcaagtatcaaacatatcattctccagcaatcaccttcaattttccaactcacctccttgtgtactccactcagaaaacaagtttgtctctaccaggacctaaaacccattgatctatgcttcaacctcattatatccccatcaatgtgctttatacagctttgattcaatggcccttcattaaaaccattccaatgtgtatattttttttattttcatcaagaaacttttattgtgttaagctcctgtagtgttgcatttttcttaacttctttattcttattttcctttagagacagagattagtactgtataattccaattatctgttctcctcttcacatacagctgaatgaagggggaaagaaacacacaagcatgctgttcagtctcactttaaattcatgaccattagctttta

SEQ ID NO: 460151 - DNA, 548 bp, Homo sapiens
agcctctcatttttaatttttatttgttcttacaataacataatcttttcaacatgttggcttctctgattatgtgcaactaccgcagtttatcactccctgagtaatggctttaatatcttccctatcwagtatcaaacatatcattctccagcaatcaccttcaattttccaactcacctccttgtgtactccactcagaaaacaagtttgtctctaccaggacctaaaacccattgatctatgcttcaacctcattatatccccatcaatgtgctttatacagctttgattcaatggcccttcattaaaaccattccaatgtgtatattttttttattttcatcaagaaacttttattgtgttaagctcctgtagtgttgcatttttcttaacttctttattcttattttcctttagagacagagattagtactgtataattccaattatctgttctcctcttcacatacagctgaatgaagggggaaagaaacacacaagcatgctgttcagtctcactttaaattcatgaccattagctttta

SEQ ID NO: 460152 - DNA, 617 bp, Homo sapiens
ttttcatatttgatatcccttgtgtctattattcttctatatgtctgtattattcattaccatatttcaaggcccctgcataaatttaatcttaacaattaagactttcctgagcattccaaagaaaatacaaaacaaaataaaagaaacaaaacaaaacaaatcaaatatcttccagtcccctctctgatacttcttccctgtttcctgaattagtaccacgttatgtactttttttttcttctgcccccaccatccatgttagaaaagatgtatttatctgagaaagatgttgctttctgtttgtttttctgttctatcttcctagaacactatctggcatagaatgagtacttgtatttgtctgttttcacaatgctataaagatactgcctgagactgggtaatttataaaggaaggaagtttaattgactcacaattctgcatggctggggaggcctcaggaaacttgcaatcatggtggaagttgaaggggaagcaaggcacatcttacgtgctggcaggagacrgagtgggaacaggggaaactgccacttttaaaccatcagatcttgtgagaactccctcactatcaggagagagaacaccatgggga

SEQ ID NO: 460153 - DNA, 604 bp, Homo sapiens
ctccaacagaatagtaaaatttctcatgggacatttacctcataatctaatccatcctatgtaagccaaaaattagatatttgggaaaaaataattaaggatgactgtgtttttgtttttatagggaatactgtagaatttttccagctttcctcatggaggaaggaaaaaatggtcctttcaaaggctagttgttgagaaattgaaggaatgcagaagacaaagagagtattttatctgaaatctcattgtccccrcctggtgtggccacagaaatagggcatgataatagagtgtttgcaagagtttgctatttgaattctggaatttggagataaagttatagatgcataatgatgtttaagccagtgacagatggcatattatggtaatggtcatataacattctaatggagcatatataaaaaactgatatatagcacttgatattgacattgaagattaagcagtggaaattattgctagtaatggtgctagtacatttgattttccatatgaaaaagtgtatatatgaacacatatatcatctacgtatatttatgtacactctataatgttcacacaagggaattgtttatgcatt

SEQ ID NO: 460154 - DNA, 604 bp, Homo sapiens
ctccaacagaatagtaaaatttctcatgggacatttacctcataatctaatccatcctatgtaagccaaaaattagatatttgggaaaaaataattaaggatgactgtgtttttgtttttatagggaatactgtagaatttttccagctttcctcatggaggaaggaaaaaatggtcctttcaaaggctagttgttgagaaattgaaggaatgcagaagacaaagagagtattttatctgaaatctcattgtccccgcctggtgtggccacagaaatagggcatgataatagagtgtttgcaagagtttgctatttgaattctggaatttggagataaagttatagatgcataatgatgtttaagccagtgacagatggcatattatggtaatggtcatataacattctaatggagcatatataaaaaactgatatatagcacttgatattgrcattgaagattaagcagtggaaattattgctagtaatggtgctagtacatttgattttccatatgaaaaagtgtatatatgaacacatatatcatctacgtatatttatgtacactctataatgttcacacaagggaattgtttatgcatt

SEQ ID NO: 460155 - DNA, 611 bp, Homo sapiens
ataactgtttcattagaaataggtactctgcccaatgatacattggaggtgtaggaaaattaaaattgtgaaagactttaaactgaccgaaaagatcatgacagttttctctaagtcactcttccaggctatctcattctttcattatttttgagatatttcacaactccgtaagtgtaggcactgataacattgcaaatgwttctttcccatagaaatatgaataattttatcagtaaaactgaattaactattgccgtgcagataagcccattttgcatctatttgcaaatttattgtagcttgactcttttacactcttaaaatttgttgagtattttaggagctttaaaatgtgtgggctataagtgtttatgtttattatgttgaaaatagaaataagaaatcttaaaacgtttattggttcattttaaggtaacagtaatgaacacatcacatgatagcagaaataacacttcaatgttatgggtagacaggcatgagtggagcaagagagggctctctccccacacacgagaaatgttgggtgatggtttggcaattaccacattgcttctctaaaagtgataaattggcagtcagcacctggg

SEQ ID NO: 460156 - DNA, 581 bp, Homo sapiens
attttacccttatcttccctatgggcatgaaacacacacacacacacacacacacacacacacacacacacacagatattgtagctgcctctctgattctggatacaatacaaagggtataatggtctggatagtattaaggcatggataacattaatgtacaaaagtgacaagagtaccaaattgtggtagagattttccagtcattcagtgatttcataagtatagacaaaggcatcgattacaaacagatttttttttggcccgtattatctgctttaaaaacatagtaagaactaaaaccattcatatccacatacatgtctacattaacataactctactattacactgccttcatcaaattaattttactattcctgaaaacttttactgaaaaatagaatagttgtttattctaagaactttctgaaagatttatttrtttattgaaaaatatatgacatgttatctggaataaattttggaaaaggatacattatttttgtatgtcattcacaacagagaaagacctaaaattagtgttatgctatatgtgacttctagagtttgtttagttt

SEQ ID NO: 460157 - DNA, 530 bp, Homo sapiens
tgttttatagttttgagcatacaggtctttaatctcttttgttaaatatattcctaagtaatttttgtagcgattatgaatgaaattttttcgtgattttttaaggtagttcgtcattagtgtatttaaaaagctactgatttttgtaggttgatttgtatgctgcatcttcctgaattcatgttgtgattttcgtctaatttcatcttgaggactctcttcggagagtggctataaatgctgattcttccctgatgggcttccaggggtgatgtttttggatgttatagtgtgtctttcataagatccttctttattttggtggacagcctaatkcctatgtgttcaagctgtgaccaggtgttcctctcataggaatcttatttatgctgacagacagctttggctcttgtctgacctttgttcagtttatttctaacaagataatcactctctaggagaacccttaccaggaggtgagttatatttaggtgtgttggtcagacaaaacaaaaacacatgaaataaca

SEQ ID NO: 460158 - DNA, 393 bp, Homo sapiens
ttattacctctgatgagatttatgaaatgatgtaccaatcaatgcttgtgtataaagatgtgggaatgaaaaaatgtttgctttaaaaaaacaaatctgtaatataagactatgatcacatgtatatatgaacaagtawcttgtgtatgtacttgtatctatgtcattattgattactctggaaaataatcagcattgatatagcaatagtagcatggcagtaaataaataatgtttgtaacgtacctgacatgatcaaaataactaaaatgaaggagcaagggctttacatagactacacacaataataacacaatattaatagtataacaagttcaacatatcccaaaataactatagctgtggaaagtttcagtttgttaaattgaagga

SEQ ID NO: 460159 - DNA, 393 bp, Homo sapiens
ttattacctctgatgagatttatgaaatgatgtaccaatcaatgcttgtgtataaagatgtgggaatgaaaaaatgtttgctttaaaaaaacaaatctgtaatataagactatgatcacatgtatatatgaacaagtaacttgtgtatgtacttgtatctatgtcattattgattactctggaaaataatcagcattgatatagcaatagtagcatgrcagtaaataaataatgtttgtaacgtacctgacatgatcaaaataactaaaatgaaggagcaagggctttacatagactacacacaataataacacaatattaatagtataacaagttcaacatatcccaaaataactatagctgtggaaagtttcagtttgttaaattgaagga

SEQ ID NO: 460160 - DNA, 595 bp, Homo sapiens
tttctgtttctacaggattggtccctggtcatttatcagaaggtagcaaagctagccagtcctgtgtccttccctgcagggcagtgactttccctaacccctaagtgggtccagagatgctttctaggagtcagagactagggtcaagatcttgtaagtctgtctacctggtgttctattgtagtgtgactgagctggcactcaaaccacaagatgcagtctttcccactctctcctaccctttacaaaggcagaggagcctcaccccatagcaaccaccatacaggccatgaggagtactgccagagtaccactactgttctcttagtgtccaagggctcttaagtcagcttgtgrtgaatactgcctggccaggactcaccatccagggaagcaggctttcttctggcccagtgctggtccagagaagatatccaagtgtcaagtcctggaatcagggaccccaagagcccacttggtgttctacccccctgtagatgtcctggtacctaaagtgaaagacaaagcccctttacttttccctcttcttttctcaagcagaagtttcaccccatagccagcacagccagtaatg

SEQ ID NO: 460161 - DNA, 547 bp, Homo sapiens
gggtacatctagaaatgtcatctgggagatagggcctggaatggaggccttatggctctgactagtaccctatcctgctgtggctgagctgataatcaagatgccagataaagtcctccccactctttcctttcttcttctcaatcagrataaagtggtctctttttgtatccaggagttgtgcagcctgaggttacgggagggttgatgcaagtacacccttagccacccagctggtttctcagtaggtcatggtgccccacaagtccactgtctctggcccggtttagcactaggactcacctaagagttgcgatcctaatgacctaggctgcctttcatgttttcttagagacccagggctccattacccattaccttcggcgataagttttgcagaaactcaagttccaagtgctgggactggcaattaccctctggctagcgctggtttaaacacttcctctgtgtgtaagtgccagctgagtttggtctgatggctctgtcaggacagtgctgacatcattgcttcacatcgtttctgttc

SEQ ID NO: 460162 - DNA, 553 bp, Homo sapiens
attaaactaaacagcttctgcacagcaaaagaaactaccatcagagtgaacaaaatctgatattattttaaggtattcttttccctttgctcagcacttctccttcctgtygcctttgaagaaactgcctgcttttccttcaccttctgccatgattacaggtttcctgaggccttcccagccatgctgaactgtgagtcaattaaacctttttcttttataaaggaagggtcttgggcagttctttatagaggtgtgaaaatgaagtaatacatgatatttaaaaattatctttttttgctaattgagaaattgttagaaatgcatattttggtatccagtagagtgtatgaatttttcctttgacttaatatcaaattgtgttaaaattttaatattaaaatatttatgtctttatgaaaattgctctatttaaccatggtagtgagttttagagctggaggacatactttgattttaatttgctcatctcgtttcatactatttttgctactttcttactagatttgttatatattttgctatattgttt

SEQ ID NO: 460163 - DNA, 604 bp, Homo sapiens
gtctaatctgactagtatggaaatcagatatgagtgagactaaaggtaagatttatcctgaggtwaaattactctccagatgtgaacctgtaaaaccagaaaagttgtgtgcttcaaaaatataatggtgggacaagcataggatagacatttgtatcctcaaaagaagaagttagaagaaaggactgacagattccaagaagttcaaaaaaatagcaaggcaaatatcattagaatttaaagcttgagaatagtctttggttcaatgatctgcccacgtggccctctggggtggcagagaactacagttctgtggggtaagccctgccctaacagctctctgtggtggtcccactcatgcagcactcttcagtgtccttcaggcctgtggaagccaaagagatggcttcatcctccaaaggtaaagaggaagaagttttgcttcttgggcctgtagtgggagtggtaaccctgatggcctctgcatcacctttaggggtaattcctcttgtctttaatgataatgcatatctgcagcctgtcttcattctatctcattttctctgttttatttagtgccagctggaagtgtttctgctggtat

SEQ ID NO: 460164 - DNA, 604 bp, Homo sapiens
gtctaatctgactagtatggaaatcagatatgagtgagactaaaggtaagatttatcctgaggtaaaattactctccagatgtgaacctgtraaaccagaaaagttgtgtgcttcaaaaatataatggtgggacaagcataggatagacatttgtatcctcaaaagaagaagttagaagaaaggactgacagattccaagaagttcaaaaaaatagcaaggcaaatatcattagaatttaaagcttgagaatagtctttggttcaatgatctgcccacgtggccctctggggtggcagagaactacagttctgtggggtaagccctgccctaacagctctctgtggtggtcccactcatgcagcactcttcagtgtccttcaggcctgtggaagccaaagagatggcttcatcctccaaaggtaaagaggaagaagttttgcttcttgggcctgtagtgggagtggtaaccctgatggcctctgcatcacctttaggggtaattcctcttgtctttaatgataatgcatatctgcagcctgtcttcattctatctcattttctctgttttatttagtgccagctggaagtgtttctgctggtat

SEQ ID NO: 460165 - DNA, 595 bp, Homo sapiens
ttctgtctaatatttctttcagcaccttgcaactcagtccttttcaatcaatatttgaagggcaattttcacacaaagcatcatgtttagttctaatactttcacagaaacttgttgtggtcacagttttttttctgatctattaaaaattatcatgaattgtttctattaaggttataataaaacccctcttaatttatcctgttttaatttttctttagtttttgaaaatgttatattttaattgttaagccttaaataaatataagggtcttctgtttattactgaacagattaaaaattcacatatatacatatattttgaatattgaatataaaacgggatggtggttaggattgaagaactaataattattttwaaaaatattttaaaatattgacataatcttctaatttctctttgatacttgccctgtgatttccacgtaaatgttttgcagaaactatgatgtctcacaaactatttatcaatgattaactgaacccaataattccttctccactcttgaactccctgctacattttgaaacatgtaaatcattttttgagatataattgatgaaaataaactgc

SEQ ID NO: 460166 - DNA, 595 bp, Homo sapiens
ttctgtctaatatttctttcagcaccttgcaactcagtccttttcaatcaatatttgaagggcaattttcacacaaagcatcatgtttagttctaatactttcacagaaacttgttgtggtcacagttttttttctgatctattaaaaattatcatgaattgtttctattaaggttataataaaacccctcttaatttatcctgttttaatttttctttagtttttgaaaatgttatattttaattgttaagccttaaataaatataagggtcttctgtttattactgaacagattaaaaattcacatatatacatatattttgaatattgaatataaaacgggatggtggttaggattgaagaactaataattatttttaaaaatattttaaaatattgacataatcttctaatttctctttgatacttgccctgtgatttccacgtaaatgttttgcagaaactatgatgtctcacaaactatttatcaatgattaactgaacycaataattccttctccactcttgaactccctgctacattttgaaacatgtaaatcattttttgagatataattgatgaaaataaactgc

SEQ ID NO: 460167 - DNA, 419 bp, Homo sapiens
  misc_feature (1)...(419): n = A,T,C or G
gcagtaaccttttgaaagtaatctttttataaaaatagaagccacacaaagatctaaaagagtgctgcctgctcagatccagaacagaggtacttaacctttgttttccagtttagttatcaaagcattgtgtgaacaaaatgctgagtgtcacactggcattacaaataggaccaaaattttgagcttttaacgagattgagaaatattttatgagatttaactcaatangctttaacatatccatgttgtttttaaggaaatagtactacccattttaatacatagtaaacagaagcatgggtaagtgacatgctcatactttaagcaataagaatgagaagaaaccacagaagyttggggccttctctctagctctaaccccccaaaaatgaactttttctttttaagcatcaaat

SEQ ID NO: 460168 - DNA, 551 bp, Homo sapiens
caacattgtttcaacaggcctattctgtcaaataaaaggaagtttcttgatgtaggggacgttcagtgggtcctggacaggaaaatgttaatgtagaaaaaactaccttaattaccaataaaggacaacacaggttttccaggcctattcctgcctgttatatttattggaataatttttttttaatgggagatgaggtttttctgtgttggccagggtggtcttaaactcytgcctcaagcattcctcccgcattggcctcccaaatgctgggattacaagcatgagccacctcacctggcccttattgttaatttcaatccattataagatgacagaaggaactattgtaaattataattcatcaaatatctcatactttaaaaatttagagataaactagaaaaagtagaagaggcattaatcaaagcttttccatttcaatcccaatggtaaattcctccttatttctttggcgtatttctcaaggtactagtttgaattattattttaaaaattttttaattgtgacacacataaaaatagactgt

SEQ ID NO: 460169 - DNA, 359 bp, Homo sapiens
attataaaatacacaaattcaaaagaagttgaaaatataaatgtgaaagttacagaaatagtaggtttatcttaaaatactgacataaagaatatacaggcttattattatttcatatctgaacaaaaaaactatcctaatgtggaagacagtggtagagtyggtggggaggaatcttaccatgaaatagcattcgttcattggcatggttgtggttttcttcagaaacttcttttctccggtgagtgtatctttcccatagtttcttgttacaaaccttctgaatctataaaaaataaaccagaaaaatcaaatctttaggaattacttactgacttcttcatctaaaccaaacatgg

SEQ ID NO: 460170 - DNA, 634 bp, Homo sapiens
gatttaaaaaaacaatccaaaaactaaaatcaaaacaaacaaaaatccaatatatctaaaaaccaggagtaaaattaggaagaaatggctgcattcttctcaaggaagttccctatatattatgtacatgaagggaaagtagacaaatggatccaattcactcttccaaagtacaatatataatcaagattgcatgcatcagagggctgttgttaaaaaaaaaaattgaagatgaaggagaaaaatgtacacaatgtattttctaatactccatatcccaaatgaaaacaagctctatagtaagaaactgtaaaaatatttaatttaccttttgtgtctgaagatagacaaggctttctactacaggcactaatgatgctgcagcaacagctctgacatcatcatcaagatcctggagtccttcaattattctagttaaaactttaggcaataaagtattaattacatcctgtaaaacagtacatgaaaataaattaattttctattctacagttactgtgcttaaacattttaaaatttaaatttgccacatgacagctaaatyccaatatttatagtcatgcactgcttaacaatggatacattctgagaaatacatcaggcaattctgtca

SEQ ID NO: 460171 - DNA, 532 bp, Homo sapiens
ttttttcccttaatttctaatttagtcagcagtacatcgtccctcatttttcacttgtatgtcttcacttggcaaagttgaatatttttgtgcatatgtgtttgcgggttgcaatgtcatttctctccacctttgagccatgtgcttaaatatgcttgtaccaaattagagaattatcagtacatagtattgtaagagctcctcaagcatgcggtggatcacacagtgccctctgagccagcctgtgcgccattgtttggggaattaaaggtgcctaattagtgcgatcaagcccggaagcgagcactgcggaccttgtctgtagtctctggggcccactggtgatgtctgtgtcatcttctaccttcaactgtgctgtgaacccagttgaaatttgatcacattacagtatggctaaggggcctaatcagccgtaaacctcaggaaattcaaaaattagagagtccattaatcccaaggcccctccctttgtgartgtctctaattcccctttggtttgctcgcttttccc

SEQ ID NO: 460172 - DNA, 579 bp, Homo sapiens
ctggccaattccagcccactacatgtttttataaataaagttttaggtcaggcgtggtggctcacacctgtaatcccagcactttgggaggccgaggcaggtgaatcacmtgaggtcatgagtttgagaccaacctggccaatatggcaaaaccctgtctctactaaaaatacaaaaattagccaggtgtggtggtgggcacctgtaatcccagctacttggaaggctgaggctggagaactgcttgaacccaggaggcagatgttgcagtgaggcgagatcatgccattgcactctagcctgggtgacagtgtgagcatcagtctcaagaaaaaaattaatttaaaaaaaaaaaaaaaataaataaatataaagttttgttggaactacttctttctgataacatagctgatttcttcaatccagtctgcaatgaactagtcggttcaccagaatgtttattagttggtgcctatggcttccttcacacttgacagagaccatgtggcctgcaaagcctaaaattttcacagaaaatgtttcctgacccctgtcattgcttaacatagaatagaatgg

SEQ ID NO: 460173 - DNA, 579 bp, Homo sapiens
ctggccaattccagcccactacatgtttttataaataaagttttaggtcaggcgtggtggctcacacctgtaatcccagcactttgggaggccgaggcaggtgaatcacctgaggtcatgagtttgagaccaacctggccaatatggcraaaccctgtctctactaaaaatacaaaaattagccaggtgtggtggtgggcacctgtaatcccagctacttggaaggctgaggctggagaactgcttgaacccaggaggcagatgttgcagtgaggcgagatcatgccattgcactctagcctgggtgacagtgtgagcatcagtctcaagaaaaaaattaatttaaaaaaaaaaaaaaaataaataaatataaagttttgttggaactacttctttctgataacatagctgatttcttcaatccagtctgcaatgaactagtcggttcaccagaatgtttattagttggtgcctatggcttccttcacacttgacagagaccatgtggcctgcaaagcctaaaattttcacagaaaatgtttcctgacccctgtcattgcttaacatagaatagaatgg

SEQ ID NO: 460174 - DNA, 546 bp, Homo sapiens
acctctctgagtcaaaccaattacgggccaatttttgataatgagcaatcatataatcataagattggaagagaccttgagagggcatctggttcactctcccctaccaaagtggggtgggctgcactaaaatcatcttggaaagaaatccctaccctattctttgacatttttaaagcaaaggatccactgtctccgagctctggctgcccacagtagtaactcccttgatcctgcaccctgtattggctttctcctcttccctgtcttatcccccactcccatgttcatgtttcctgggctcaggtcacagagaaactgcttttcccctaatcctcatctcrgggtccactttgggggaacttatttaagacactctacatatagcctttaatgaagcagaaagaaagaaagaaaccattagattggtcacattaatattaacccaaacaaaatcttctgattggtgtattgttacaaaaaacaggttgcaaaatattaacccaaacaaaatcttctgattggtgtattgttacaaaaaacagg

SEQ ID NO: 460175 - DNA, 627 bp, Homo sapiens
aaacaataataataaaggaactaagatatctgtatttatctgtattcagtagcatggctttaaaacatatagtacatagacccacgatgaaaagtaggcaaatctgcaatttttagtggcatattttaatacttccaatttgtaactaatagaagaatcaatgatgatatggaatatttgaacaacagaaataccaaacttgatttaattaacatattagtatagagtacgcaagaaatgaagaatacacattcctttcaaatgaatgtaaaacctttgaaaaaattaaccattgagtctccatacatttcaaasgatcaaaatttttcagtacatattctctgttaaaaaatacatttatctagaaatcaaaaaatttacaccacgaatatttttattgccagagaagaaataatactataataaaatgataataaaataaaataagaaattattttcagaagaatgatgataaaattaaaatacataaaaacctgtgaaattagaatcaatcagtacttgaggtagttaagaatcaatgacctaataatattaaaattttagaaaaagaacaaaaataatattaacaaaacataaaaagaaggaaataagaaaggtgagcacaaa

SEQ ID NO: 460176 - DNA, 580 bp, Homo sapiens
atttaaaaactaaacaaagtaaagcttgaactgagttttaaatgggagactaggaagtaagtaagctaatggagaatggggagaatggaaaaagcattctagactaagaaagagcctatgcaaaggcttgagggcatgcaagagatgcaaagaattgaataaaacctagggtgcctgcagcatggagaagtgtaagttatacaaaacatataggcagatttatagatagatcaggttcatcttatgagcaatgggtagctattagcaggttttgagtggagtattttgctgtgtgacacagatttgcattaggaaaagttaactctggttgcagcgtggagaatggatagaaagaccatgtaaaatattgtaggggtccagttactgagaaggtctgcatgaacattgacaggatattcatctatgatggaaacagtggagatggtgaaaatggatagatacrtggcatttctaaacttggagacaaacaaaaagctattgaaactttgttgttttattctcaaattaagtctggtataatacgaactgctaaatccattttgtttcagaggatcacaag

SEQ ID NO: 460177 - DNA, 633 bp, Homo sapiens
atttcttcaacatgattgtatctaagtaggcattttttgctatgtgacttacaacagttaaaaatgcatataaccctgtacactgcactgactccaccttttttcacattttcttcctaagttacttaacataaagcttcctggcacttaataccaaagggtctacttaatcaattgttcattgtattgtgcaatgagtgatcccacctacattggttagtgaatttcattttaaaaattataactttgagtaaaaactggctcagcaattgtcttggtatcaaatattttgtgttctactttcaataacatagtttccctactgagaatttggattattcatttcactcccttttgacttcatttcactcctttcatcatttatattgtacagtgatcggcttctcagaaaggactataaaatgagatatattatgcaatgtcaatgcttcctgatcataatatttgattactagamatccaagatctctgtaatagcatgccatcgaggtacaagtgaagaaagcgatgcatagcaaatagattttagatgattcatcagccatctaaaatcaagtcagtaaaggctttactagattccaactcctaactgcagagttttcatcacagtat

SEQ ID NO: 460178 - DNA, 632 bp, Homo sapiens
aagttgactcttcttcaaagaatgatccttattgatctcactacctagattgctttaatgtgtaggtctccttataggtgctagctcatctttcagatcctagttcaaaactcatctcagagaaggcttctccgatcatcaccacacccatccctccccatcactgttaccttatctatcttgtttatgtgtgtttttgtaaatcagactactcattgtaatgtaagctccaagagtgcaggaaccttgtcatcttattcactgatgtgttttcagtgcctagaaaagtgattgacacaaagtaggcactcataaaatgtttcctagataaataaatgaaaaaaaaatgtcatttgtactgaaactcgttttggtcaaatcttccaacagcaggtagtccaaactagccaggaccttctaataggactattgcgtcagtctctctccttgtctccccgttgtgcatgagtggcaggatgttcagtagtattaaaagrttccatggaaacctgtgtgtcaacaatatgctctagaatgtcaagcgatgtggctatttctggaggcaaaaggagtagttactaaaggtagttacaaaagagttcccgaggatgctttggattatatataaattt

SEQ ID NO: 460179 - DNA, 230 bp, Homo sapiens
taaagttccccagaaatatatgagagagactaaattactataattagtgctaagatctgctaagaaattttacctgactaaactaagaacttcaagcctttaagtgattgtaatttttttcttactcatggaaaaagatatttactggctacacaatttccttttyctagccatgaccaattcttttgtgggttacaaatggatgtgattaaactcaaaatatatgtttg

SEQ ID NO: 460180 - DNA, 557 bp, Homo sapiens
ttctttttccataaaatgaggaagctagycgaagtaacatactgctgcaaagaaacatatacagagaggggtaacccagttgcttcaggcagcatctcacaggtgtgagtggtttgttagaatcacaataaaacatcatgcgattccatcctcacagagttcatctatccctaataaactgcctagaggtactgacacgtacatatgccatgaaaatcaggatgccaacagactcacttgacatttaagcaatatttgactaatccaaagtctgctgctggtctcctctggtgggtaaatacattcagttagtattaaagagccttaattaagagagaaggagatactacaaagggctcttttcatcagcatagggaagtttgatgccatgaccgcccacaggccagaaacacagtcactatatattagtattagattgacacccagtgctccttatcctttgacatccactttcaatccttcatatagaccacagaccttctgtcaggttggcatatttactgcatgttaagttgttatattgtacagcttgtttt

SEQ ID NO: 460181 - DNA, 549 bp, Homo sapiens
tgccccctctccctccatttttgtctttctgccaattatacaatgttatacttgaaaataacaagcctggaagacctctgctttatttctaactctactgctaattgtctttacacatgttagctttattttctttttccataaaatgaggaagctagtcgaagtaacatactgctgcaaagaaacatatacagagaggggtaacccagttgcttcaggcagcatctcacaggtgtgagtggtttgttagaatcacaayaaaacatcatgcgattccatcctcacagagttcatctatccctaataaactgcctagaggtactgacacgtacatatgccatgaaaatcaggatgccaacagactcacttgacatttaagcaatatttgactaatccaaagtctgctgctggtctcctctggtgggtaaatacattcagttagtattaaagagccttaattaagagagaaggagatactacaaagggctcttttcatcagcatagggaagtttgatgccatgaccgcccacaggccagaaacacagtcac

SEQ ID NO: 460182 - DNA, 549 bp, Homo sapiens
tgccccctctccctccatttttgtctttctgccaattatacaatgttatacttgaaaataacaagcctggaagacctctgctttatttctaactctactgctaattgtctttacacatgttagctttattttctttttccataaaatgaggaagctagtcgaagtaacatactgctgcaaagaaacatatacagagaggggtaacccagttgcttcaggcagcatctcacaggtgtgagtggtttgttagaatcacaataaaacatcatgcgattccatcctcacagagttcatctatccctaataaactgcctagaggtactgacacgtacatatgccatgaaaatcaggatgccaacagactcacttgacatttaagcaatatttgactaatccaaagtctgctgctggtctcctctggtgggtaaayacattcagttagtattaaagagccttaattaagagagaaggagatactacaaagggctcttttcatcagcatagggaagtttgatgccatgaccgcccacaggccagaaacacagtcac

SEQ ID NO: 460183 - DNA, 549 bp, Homo sapiens
tgccccctctccctccatttttgtctttctgccaattatacaatgttatacttgaaaataacaagcctggaagacctctgctttatttctaactctactgctaattgtctttacacatgttagctttattttctttttccataaaatgaggaagctagtcgaagtaacatactgctgcaaagaaacatatacagagaggggtaacccagttgcttcaggcagcatctcacaggtgtgagtggtttgttagaatcacaataaaacatcatgcgattccatcctcacagagttcatctatccctaataaactgcctagaggtactgacacgtacatatgccatgaaaatcaggatgccaacagactcacttgacatttaagcaatatttgactaatccaaagtctgctgctggtctcctctggtgggtaaatacattcagttagtattraagagccttaattaagagagaaggagatactacaaagggctcttttcatcagcatagggaagtttgatgccatgaccgcccacaggccagaaacacagtcac

SEQ ID NO: 460184 - DNA, 557 bp, Homo sapiens
ttctttttccataaaatgaggaagctagtcgaagtaacatactgctgcaaagaaacatatacagagaggggtaacccagttgcttcaggcagcatctcacaggtgtgagtggtttgttagaatcacaataaaacatcatgcgattccatcctcacagagttcatctatccctaataaactgcctagaggtactgacacgtacatatgccatgaaaatcaggatgccaacagactcacttgacatttaagcaatatttgactaatccaaagtctgctgctggtctcctctggtgggtaaatacattcagttagtattaaagagmcttaattaagagagaaggagatactacaaagggctcttttcatcagcatagggaagtttgatgccatgaccgcccacaggccagaaacacagtcactatatattagtattagattgacacccagtgctccttatcctttgacatccactttcaatccttcatatagaccacagaccttctgtcaggttggcatatttactgcatgttaagttgttatattgtacagcttgtttt

SEQ ID NO: 460185 - DNA, 542 bp, Homo sapiens
gttgactattcaaatacctatgggggaaccatgtaatgtgcatatggaaattaagtcagttgtaagaaaatagaaagtggtcagtgctattgataaaacaaaacatgctttccctgactaaagattatcaaattctatttttgtaaaaagtggtctaataaaaccgtaacaaaaaaagtctaatacaacaaaatgcrtctttaggccatatttagattgcagtttacacccactgatctcaacactccttggcagcttacttctttcacaaatttagtaagtggtatttgactttgcatagaaaaagatggatgggagaaacattcaagcttcctagtcttttggcttcaaggttaagtttgaatatctgtttctcctttgttaagagtaaatacagaccattgcttccacatttgggcatttaatccttctacaatctgttagagtgtgcagatagctagacatgagcaggaggggaagcccttgagaaaggaagttctggaacatttcctgtctcagagactacctgaaacttgcacgaa

SEQ ID NO: 460186 - DNA, 585 bp, Homo sapiens
agagaatttatttgacttcctgtaaaacttatctgatgaacaatggtgatatgtawattactgaagtataatattttaaccttatgaggagtaagactatttattatcataaacggtcaaactgacttaggcactctgtctcctcttcatttttaaagaaaatatatactccttagaagaaaacattaataactttgtcaacactttatttcagcgcactgcaagtaaaactcctttgtaggtgtctgagatatatgttttatattttttcctacagtctaaccacttggctctacctcctgccagaggctataataccttaaaggctttaacaaagaactatcccaaggtttgtcattttacactgacattgaacttaatgagtttcagctgtcatcacgttttaaaacataaatctatgttctatttatcgttgtttttttcggtgacatttttaaggtttcctaaaattttatggcagatttgacacacttgccctggagtgttttatcttcacagcactcaggagctaatgtctaaaatgctgagatcttgttccacagcacatattcgttgattcattta

SEQ ID NO: 460187 - DNA, 541 bp, Homo sapiens
agtgtgggacttagcttccccttgccgagaaaatggcgtcatgccagagaataattttcaattgttactaagcttgaatacaagaaattggaagattcaagggactcttacttccacttgaaatccctcaggcaaaatgttaatgaaaatcatctttatttccatccagggtaggcaatgattatactacatgaaagtatagagtctaatttcagagtggtttgtagaaagagcattatattgataatcaaaaattcataattataatccgggatctctcattaccagttcatatgattttagtcagagtttcaattttgaaaaaggttgcatctgtcaatgtccaaaattcactccagcagaaaatcaggatgtttttcatttgcatgtagatattcacatgcatgtacattaagcacatggatgcaacacatatggaagtcaatataaaayacctggagattattctggcttgactgttgccccacactgagcggaggatgctgtggtgatttataggttgccatggtggcaggggagg

SEQ ID NO: 460188 - DNA, 617 bp, Homo sapiens
cctgttccagtgtgatggacactctgctccaggaagttgtggctaagaagatggtgctcccttttgcccaagctcacagtgaaaggctaaagtaacttcatggtatgttcaggctgtcagtatttttcacaatccccagccttgtgttactgatgttcaattccaggcaagtgccaacaagaatttgagcatttcccttctccatccaatcagttctcagagggtaaagtctgtactccatgtgtggcacacagagaatacgggggcctcaattactcttaccttagctgctagtagggcagatgttcaatgccaggaaaggcaagccaagaaaacctgatgctaccacatttttccagggtgctgctgataaagcagtgttgtcactctgggaaaagtaggacactatcaccatcctcagttctggagtastgattcagacatttagcctggagaaagaggcaggccataataagagagaactctgaagttctccccaaaggaactgactttatttggaacagggtgtggaaatttttaaggctaagagtatttgggaaaacaatatagattatattgttaagcaattatgaaaaggctgttagctcctcctaaaa

SEQ ID NO: 460189 - DNA, 574 bp, Homo sapiens
gctgcaatgtcatgatcaaacttgaaaacatgaggagttcttacagttgagcaaaaacagttgtttcttgagatggaatctactctttgtgaggatgctaygcacattgttgaaatgaaaacaagggatttagaatattacataatcttagttgataaagcagaggcagggtttcaaataattgccttcaacttttgaaaacacatctactgttggtaaaatggtatcaaacagcactgcatgctatggataaatctttcatgaaaggaaaagtcaattaatgtggttacctttattattgtcttattttaagaaattgccacagctaccccaacctttagcaacaatccctctgatcagtcagcaatcataaacactgaggcaagaccccccaccagcaaaaggattataacttactgaaggctcagtgatcattagcattttagcaatcaattttttaaattaaggtatgtacattatatttttagaaataatgctattgcacacttaatagaccacactgtggtgtaaacacacattctatatgctcatagaaaccaaaaaatgggtgtga

SEQ ID NO: 460190 - DNA, 574 bp, Homo sapiens
gctgcaatgtcatgatcaaacttgaaaacatgaggagttcttacagttgagcaaaaacagttgtttcttgagatggaatctactctttgtgaggatgctatgcacattrttgaaatgaaaacaagggatttagaatattacataatcttagttgataaagcagaggcagggtttcaaataattgccttcaacttttgaaaacacatctactgttggtaaaatggtatcaaacagcactgcatgctatggataaatctttcatgaaaggaaaagtcaattaatgtggttacctttattattgtcttattttaagaaattgccacagctaccccaacctttagcaacaatccctctgatcagtcagcaatcataaacactgaggcaagaccccccaccagcaaaaggattataacttactgaaggctcagtgatcattagcattttagcaatcaattttttaaattaaggtatgtacattatatttttagaaataatgctattgcacacttaatagaccacactgtggtgtaaacacacattctatatgctcatagaaaccaaaaaatgggtgtga

SEQ ID NO: 460191 - DNA, 588 bp, Homo sapiens
ttcaatgcgatctgtagagacacattattaaagtgccctgttccaggataaaaagtcagatcctcattagctgggacaaagaatgttagcayccaagctcaagaacggaaggaaaatccctatctctgtgtgacagatgtgggagttagtggtattgtcgcataaccctgggaattcattaaaagtgtcaggctgtgtcacaggggcatgttgcattgacagcccaagtggaaaaaaaacagtgataattgctttcattccgtgcttaccttttaccttagcaaggaaatacaattgtaaataacctgatactgacacattgcaaagttctgagcagaaaactgctttgtgaaatgtacatctcaaggactgcagggcacttttgtaagagaactaatagagtttatccagcttcctttacttatgtgtacactaaacccccttattcttaactaaagccaggttatgtagtaactcttgacttcttgagacaaaagacagagtaatcaatagtgaacagcaaaatatagtaaaaagaaagaaagaaagaaagaaagaagcatagagagaagagagagaaagaatcat

SEQ ID NO: 460192 - DNA, 639 bp, Homo sapiens
aacataacttttaatgatagtgttatcagtctaaattggagaatgctagcataactaggcttactagagtataataggaagtagtgacatttctgtagtaatcaaatgtgcaatgccaggaaattaagaaaatatttgtttccgcagaaaaatggaagaagaccccttgaatttaccatatattataaaaagcttgaaagcagagttcccttatggaagacctttgtctgcacatcaaaatgcagctgttgtcatttgcaatgttttatggtcttcaaactatacygcgaagatcagtgcattcttttaatgccatcattattagctcatgtaatcttagaatcttccattaaaagttctccagtagccttagctgttcaattagtcggtgccatactctaatgttcacatgttgtatttatgtaggataattagatcagctttctgaggttatttttagtctttttaaagagttgagaatgcaatacatttgcttcatgctgttatttatggggaaaatgacttgtatttgatgatagtttactctgctggtatttggagaaaattggcaaagttttgactttttttttttttttttcatcaatggcttctgtttctggcacttgcttttaaaaagtg

SEQ ID NO: 460193 - DNA, 555 bp, Homo sapiens
gtttgaaatgtaataaaggctaaacagacagctgttatgtattgcacaaactttctgtggcttccagtgaggcagccattctctgaatccctccagagttctaaaataaactaaagaaaaaacaaggcctagatgatcattatgtggcatgaatatgtgaagtaataaagcaatgaaaagaagtggtgtctatggaaaatttcctaaaaatgttgaaaaggagggcaggaaaaataacatttaatataacaaaatattctgtaaatgttattttgttgtgtgtttgtttattaggacttatctactttgttmaatattttgtgttcaggaggctagcctgatgccaggcatataatggggacttaatgaagatattttaatgaatgagtgaatgttccacaatccagtgttctgggtattatttctgggctgttctcaaatttttatatctcaagttatataaatgcaatgcaagccaatatatatttatgtctttcaaattagatttttaagcataacctacttgcaatctatatgacaaaagaattttagttt

SEQ ID NO: 460194 - DNA, 476 bp, Homo sapiens
ttgtgacctggtccccccatccaaaaattcatacattgaaatcctaattaccaatgtaatggtactagcaggtggagctttggggagggaattagatcatgaggtggagcccttataagagagatctgagagctagtgcttgctcatcaccccgcccaccaccacctgcagatacagracaagacagtcttcagcaaagtgggaagatgcccaaccaggcactggatctgcctgcaccttgatcttggacttccaagcctccagaactctaagaaataaatttctgtggctcaacccacacaatctatggtcttccattatagcagcccaaactgactaagaaaaagactttctagataagagagacagaggcagagtgagagcgggagggagagagggaggaaggaaagaagaaaggaaggaaggaaggaaagaaagaaagaaagaaaaaaagcactctgaggcactaggattgg

SEQ ID NO: 460195 - DNA, 590 bp, Homo sapiens
  misc_feature (1)...(590): n = A,T,C or G
nnnnnnnnnnnnnagtaagttagagaaaaggaaggtggcagtaagctcacagacagtcctggaaaatgtggtatttagctcctatgagggaacctaatgtccctgcctccctgtattaactcctgtgtgtatgctcctctggcattgcactagagtttgcatggatgaccaacagagtatgatagggaagataaaaagtcacatccaagattaggtgatacaaagtcatggtatcttttattacccaacatcacaatgtgcacgccctggggaagccagctgccatgccttgaaaacactcagagtctcccttggagtggtccacgtgccaacagcctctcttggaatcagattatccagccccagtcaaagcttcacatgatacaatcccagttcaagtgaaacttcctgagacaacctgagacaaaaccagccaatgatgtgggtcycagattactgaccctccgaaacagagagataataaatgtgtgttgtgtgaagccactacattttggcataatttgttactaagtaatagataactaatataaaagataacagtgcaacatctcagtgttctgtaatagtca

SEQ ID NO: 460196 - DNA, 587 bp, Homo sapiens
tattacccaacatcacaatgtgcacgccctggggaagccagctgccatgccttgaaaacactcagagtctcccttggagtggtccacgtgccaacagcctctcttggaatcagattatccagccccagtcaaagcttcacatgatacaatcccagttcaagtgaaacttcctgagacaacctgagacaaaaccagccaatgatgtgggtcccagattactgaccctccgaaacagagagataataaatgtgtgttgtgtgargccactacattttggcataatttgttactaagtaatagataactaatataaaagataacagtgcaacatctcagtgttctgtaatagtcaaaaagagcagtataagctttattttttaattttaaaaatttcgttagtgtaaatatcaaaggaaatatctaaaagataacaaagtgttatctgtagaggagattctacatctgtggacagaagaagcagatggctatgattttttgttagaattcttttttataaactactactataattttttaatgttcattttaatgaaaactagatgtgtgatttaatagtaaatggatgt

SEQ ID NO: 460197 - DNA, 587 bp, Homo sapiens
tattacccaacatcacaatgtgcacgccctggggaagccagctgccatgccttgaaaacactcagagtctcccttggagtggtccacgtgccaacagcctctcttggaatcagattatccagccccagtcaaagcttcacatgatacaatcccagttcaagtgaaacttcctgagacaacctgagacaaaaccagccaatgatgtgggtcccagattactgaccctccgaaacagagagataataaatgtgtgttgtgtgaagccactayattttggcataatttgttactaagtaatagataactaatataaaagataacagtgcaacatctcagtgttctgtaatagtcaaaaagagcagtataagctttattttttaattttaaaaatttcgttagtgtaaatatcaaaggaaatatctaaaagataacaaagtgttatctgtagaggagattctacatctgtggacagaagaagcagatggctatgattttttgttagaattcttttttataaactactactataattttttaatgttcattttaatgaaaactagatgtgtgatttaatagtaaatggatgt

SEQ ID NO: 460198 - DNA, 600 bp, Homo sapiens
cttgccttggttggcaatgcttgctctgcccagtatttctatttccagtggattacactaggaggaacaaggatttcagtytgtgcctgcacagctaaaccctcttctctgttgagtgattagagagcggtgtgggattgcttactttaaatgccttaatagaatgaaatcagggatgtcattcctctttttaaaacgctgatatccatagagagatgtaagtctaatattttgacatattgaaattaacagctacaatggttatttgcatatgactatttcatgtcctgggacctttttaaaagctcagaatattttctgattaaaactggaaaccagaggaaataggatttgggaaatagatgagtttgtccatgtggtttggttcttttcactacagaatgagagcatttaattattgaaaattattttgcatttataattgattaattaattaatagatgtattaatttaaaaaatttacagttgttctccaaataattttaggcattttccagggatacatttattaggagataaaaaaattgataatgaattggggttgcaaagaaaaatgaaggtcgcaatatgaagctgatg

SEQ ID NO: 460199 - DNA, 600 bp, Homo sapiens
cttgccttggttggcaatgcttgctctgcccagtatttctatttccagtggattacactaggaggaacaaggatttcagtctgtgcctgcacagctaaaccctcttctctgttgagtgattagagagcggtgtgggattgcttactttaaatgccttaatagaatgaaatcagggatgtcattcctctttttaaaacgctgatatccatagagagatgtaagtctaatattttgacatattgaaattaacagctacaatggttatttgcatatgactatttcatgtcctgggacctttttaaaagctcagaatattttctgattaaaactggaaaycagaggaaataggatttgggaaatagatgagtttgtccatgtggtttggttcttttcactacagaatgagagcatttaattattgaaaattattttgcatttataattgattaattaattaatagatgtattaatttaaaaaatttacagttgttctccaaataattttaggcattttccagggatacatttattaggagataaaaaaattgataatgaattggggttgcaaagaaaaatgaaggtcgcaatatgaagctgatg

SEQ ID NO: 460200 - DNA, 600 bp, Homo sapiens
ggtgatgaccttgaggagtaggatataaataacacccacatgcttagtgttccaataatggaacactaggcacagcaaatgactcccaaacattaaaaaaactttatggcagataagtctgttgaaggtaaaatgagtagatgtccttatatagtttgacattttctctaatttccaycccagtcataacaaagtaggatttgggaatctaggaggagggaattctggctctctggaaaggcactgtatcacaacgactaggccatattccatttcatcatctcagtggtcaccaatggctgtgctctcctcttcctggactcacaaattagctccattttcccacctccctatagttaaatatagccatagaactgaggtatggacaagtacatgtgaaccagttccaggcatggcccatagtgtatcactcccattctttttcaatgctagtggaagacagaggattttgaggacctggagggagaaaaccatagcatggaaacttacagttcctttcactttttaagtcaaaaaagttacgaggtagggagtaaaataactaaaaatatttttgtagtaaaataactatgaaaatgt

SEQ ID NO: 460201 - DNA, 600 bp, Homo sapiens
ggtgatgaccttgaggagtaggatataaataacacccacatgcttagtgttccaataatggaacactaggcacagcaaatgactcccaaacattaaaaaaactttatggcagataagtctgttgaaggtaaaatgagtagatgtccttatatagtttgacattttctctaatttccatcccagtcataacaaagtaggatttgggaatctaggaggagggaattctggctctctggaaaggcactgtatcacaacgactaggccatattccatttcatcatctcagtggtcaccaatggctgtgctctcctcttcctggactcacaaattagctccattttcccacctccctatagttaaatatagccatagaactgaggtatggacaagtacatgtgaaccagttccaggcatggcccatagtgtatcactcccattctttttcaatgctagtggaagacagaggattttgaggacctggagggagaaaaccatagcatggaaacttacagttcctttcaytttttaagtcaaaaaagttacgaggtagggagtaaaataactaaaaatatttttgtagtaaaataactatgaaaatgt

SEQ ID NO: 460202 - DNA, 571 bp, Homo sapiens
aaatgttaaggcaggtctgcctgaactgtttcctgtgtaaacaatagttttaatacctgaatatccaaatatagtacactgtgtttatacaaaataggttaagctaggatttgttcaggagttctgaaagactagggatattcctggagcaacaatcttaaagaagctgtgaactttaggatttcctgaggccacagaaataatcygttgcaagtcagtaatcatcaggaaaatatgaccatgaccgacacacgtattattcagaggccatcattctatttaagttgaggagtaccttatgtcttcattgatctgtgtattccttaccattcaacaactctgcctttgcttatgcttcttaagacttactcagctgcaagaaatgatcagtagaaaatcccaacagctatagctgactttttatgctctttgtcacttataattgttcttaaatccatgctcattctgtaatttcatgttagggaataaagctagataatgtagaccaggggtcagaaattagcgactaaaggagatttaccctttggagtgtttaatatattttttaatt

SEQ ID NO: 460203 - DNA, 565 bp, Homo sapiens
ttgtgcctatcttttatctttgccatgattagaaggcaccacttgagataattacaacagggaaggtacaaataggctattttgcaagacacatgaccatacagtcaggtaggaaaggtaaaataagcaacagacacacactattgtgagctggtgttgacatatagagcaatgatgggccatgataggaagaaattccaggatccccataatgggacactstgcattcttctgacctactttgtcctaccaaaattaactaatttatagttcatgcttatgtctcagattaggattaagagagtaatgcccaataatatttaaaatttcaaagtgaaatgaacagaaatgtgcatgtttcagtaaatgtctccttgcttattctttgttttctgatgtattaactcacagttatggaatttctgccatgtttttctccatgggcaatgcaaagaatatgagaccaggactcagtttctttgtaagtagaagagaagagcattaaaatttatagggtacctacttagtgctcaataatggcctaacaattaattgtaacacaact

SEQ ID NO: 460204 - DNA, 591 bp, Homo sapiens
ctaagtacaaataatttgtgtaatataattttttaaatcagttagttctttaaaaagcttacaacaaaaaaaatttcatgattcctcaatcctgacttcattatttatacattgtcttagcatatttatatcttaaattttattaaaagcataatcagcatattatttcctccctgtgtaattttcttacacagggaggaaaagtgtatcaattattattgcttcataataaaacactccaaactttgtgccataaagccacaacaatttttgtatcttcagaggatctgtaggttgtttaactggagatttgtcaggaaaagatatcctctgctccacagtatctgggacctcagtctggggtgagcagtgtggggggctaaaacagctgacactagaggatctatttctaaaatgacygtttcagttacatggctggtacctggactgggttgattcacgctaggatcatactgttgcctggaggacttacaatgtggcctgtccatgctgtctggtcttcttatggcatatcagctggattccaagaggaagtattctgagagggattattgtcaagagaaccaggca

SEQ ID NO: 460205 - DNA, 580 bp, Homo sapiens
tttattataacttggaagtgacagagccagggtggaaacctaaaacctgtgctgttgctatactgcctctcaattaaatcattaatggttttaaggaagcattccttgtaccctcctgcttagaagcctaccagtagtaggcatatttagracaagctaggttctaggctttaatgcatttgttgctttatatctttaatcattacagtctaactagattactatgctggtcaactccctgtttgctctcagatccatgacccagccttccactgcttttctttagattgcaagaggctacatttgccattctcatgttctctttgattttcagagaggctatggcagagaattgagggaggacgtaggaaaaacgcctgagaaagcttcatcagagatcctgctccaccacaaacaatgctcttgctcaatttttccatgaatttttttgaagtctcctcgtataacttagcttctcccctaccaaatgcattcactaatttcaatctactctattgtaggaagatattcaattataattagtattcatttcattttttcctacttattatacctttgc

SEQ ID NO: 460206 - DNA, 580 bp, Homo sapiens
tttattataacttggaagtgacagagccagggtggaaacctaaaacctgtgctgttgctatactgcctctcaattaaatcattaatggttttaaggaagcattccttgtaccctcctgcttagaagcctaccagtagtaggcatatttagaayaagctaggttctaggctttaatgcatttgttgctttatatctttaatcattacagtctaactagattactatgctggtcaactccctgtttgctctcagatccatgacccagccttccactgcttttctttagattgcaagaggctacatttgccattctcatgttctctttgattttcagagaggctatggcagagaattgagggaggacgtaggaaaaacgcctgagaaagcttcatcagagatcctgctccaccacaaacaatgctcttgctcaatttttccatgaatttttttgaagtctcctcgtataacttagcttctcccctaccaaatgcattcactaatttcaatctactctattgtaggaagatattcaattataattagtattcatttcattttttcctacttattatacctttgc

SEQ ID NO: 460207 - DNA, 403 bp, Homo sapiens
tcccttcaacaacacataaactgtatgacataccttgggcttccagctttacacagccactttcaagtcgaaagaggaccgattgctttacctgtcggctttgcagaagaccatctgcctctatgggaagccagaccaaataaaattgatcttatacacaattacgtccatatctcaggctacamttatgatcccaaaatgtggcctctaagtattatactccactctttcagccactgatacaatttttgtttatcaggcccatgatactaatcactggtcatgcttggaagacccttgaagacaatcaagtcaatgaacaggaaaaggaagtatgtgagtaacacccatgactctctactagtccagaagccaaagaggcctagatctagacagcagaaga

SEQ ID NO: 460208 - DNA, 560 bp, Homo sapiens
tcccatatctagtgggttgtctcttcagtttgttgactttttcctttggtctgcagagggttcttagcttggtgtagatttcacttgtctgtttttgctttggttgcctgtgcttttggggccctactgaaaaagtctttgctgagacacaatgtcctggcagcacttccctaatgttttcttccagtagttttatactttcaggtctcagttttacctttaatccattctgatttgatttctgtgtatggtaagagagacgggtctagtttcattcttctgcatatctttatctagtttcccctgcaccacttatggaagagacygtccttttgctcgtatgttgttggtgcctttgctgaagatgagctggctgtaaatgtgtggatttatatctgggttctctattctgttccactggtctatgtgtctgttttacgtgattaccaggctgattaccaggctgataggttggctcatgcctgtaatcccagtacctttggaggcccaggtgggaggatcacttgaagccaggacttcaaaaccagcctgggcaacaa

SEQ ID NO: 460209 - DNA, 560 bp, Homo sapiens
tcccatatctagtgggttgtctcttcagtttgttgactttttcctttggtctgcagagggttcttagcttggtgtagatttcacttgtctgtttttgctttggttgcctgtgcttttggggccctactgaaaaagtctttgctgagacacaatgtcctggcagcacttccctaatgttttcttccagtagttttatactttcaggtctcagttttacctttaatccattctgatttgatttctgtgtatggtaagagagacgggtctagtttcattcttctgcatatctttatctagtttcccctgcaccacttatggaagagaccgtcctttygctcgtatgttgttggtgcctttgctgaagatgagctggctgtaaatgtgtggatttatatctgggttctctattctgttccactggtctatgtgtctgttttacgtgattaccaggctgattaccaggctgataggttggctcatgcctgtaatcccagtacctttggaggcccaggtgggaggatcacttgaagccaggacttcaaaaccagcctgggcaacaa

SEQ ID NO: 460210 - DNA, 631 bp, Homo sapiens
ctggtgcagatttttttttcacatgaaactgtagtatgtgagaataagtgaatttgctaagcaatatggtatgcatattttcaactttactaaataatagcaggtttttctaaagtatctttaccaatttatactttcaaagcagatatgtaaaagtggttattgtttcacatattactagagaaaaatttctctaaaacttggtgacttaaaacaaccatagtgatttatcatccctcacattttctgtgggtcaggaattaaggagcttctcatctggccagttctggctcagagttgctcattaagtcacaagcaaacatcacctggcactatagtcatatgaaagcctcacagggtttagaagatctgcttcaaagttgattaattcacatggaagatgaaaaatgaaaaatggcaagcagtgcatttgccaatggcaggcaaattggtggtggctgttaacttggtggccaagttcctgtccacatgggcctcttcagtgtcctcatgaatggcasgacaggcagctggctttccccagactgaacaatcccagaaagcaaagcagaaactgaaatgtcacttaaaacctagtctcaaagggcataaattacttctgctgtattat

SEQ ID NO: 460211 - DNA, 506 bp, Homo sapiens
tataccacaggtcaattaagtcagaaactccgtgaattcrttccagaaaatatgttctgtatctcctcaggtgattttcagcctacattgagaacaaccactttgcatcacgtataaaagactcttgatggatatcttattttaatatttgattttagatagggtaattatttctctttccatttgctctttattgtcagagtttctttatccaaattttgtacatagtttctatttttttagactatgaaagaaaatattgcactgttcaatttaatcttcaaaaagcccagcagagcaggtctaatctaatacacatggtgtttctttctttctcaaatagcagagtgtgacccatcaaaaaatatctccaaaatactatttttttgtttatttttgcattcctatgcttatacttatataacctttggtgcctgatttcaagtagcaattttactcaaatctctcaccatgtgcatttaatacatgaaagaaaaaatatttca

SEQ ID NO: 460212 - DNA, 560 bp, Homo sapiens
taaaataaggtgtaactatcatgttttatacatgctctgacagtgtaaatcatattcccaggttcagctaaaataatcatcataaaaagaatttatttaaaaaatttaaaaagtaatgatattcaacgataggcatgatactcatttaaattattttaaaattggtagagtgttcatttaaattgaaagcaagagaaaagacccctgctcaccagatctctttttatgtgttgtgaagggagtatgggcagaattagagctgctttcaatgatttgaaattaatcttmgatttttcctggagaggtaaattgtaagttcatcacaaaatgattcagaatgcaaatatgtaagtcctcctgaaagagacaatgtcatctggctcaaagagtcaatttgtgactggtagtaaataatgacctgggagatgcaggatagtgatacctccatagcccctggtgtgagagaagcaaatctggccttaccaagacctgctgctccctctaagcacagttatcctgtagtcaaaacatgtaagaatgctgagctccagcctggcctc

SEQ ID NO: 460213 - DNA, 601 bp, Homo sapiens
tctgagtctaaaggcccaagaaycagcagtgctgaagtctgagggcaagaatacatgaatacctcaattcaaagagaaagagcaagttcaccctttctctaccattttgttctatttaggcactcagcagactgaatgatgctcacctacattgatgaaggtggtcttctttacccagcctatcaattgaaatgcaaatctctttcagagacaatttcacagacatatccaacaataatgattttaccagcagtctgggcaacatttagtctagtcaagttgacacataaaattaactacaaacagtttaatattataactacaatgaatattatattttatttatatacatacacatatttgtatcaatgtatacatctctattggtctgttttcttatttccttttcaaaaagttttactttaatttcttggatacatgtgcagaatgtgcaggttttttgcataggtatacatgtgccatggtggttcactggacctatcaacctgtcatctgggttttaagccccatatgcattaggtatttgtcctaatcttctccctctttggggccccactctctaacaggccccagtgtgtgt

SEQ ID NO: 460214 - DNA, 562 bp, Homo sapiens
tcaaataattgctttaactggaaaaaagttttacctgcatgaaatttatgctaaatggcacactttccctctttgcttttaatgtaaatttttattttttaaaaaattttctcctaaataatatataacagatcagttgagatgttttagcacaatgtggaagtatttgcctcaaataaagaaatctatccctgtttaatggtttttaaatattttatgaaatgtttaaaatcgtgaatgtatttaggtttctcagtgttgttactgtttcaccactttytcctgaatttgtgttctttgttgtgaaatgtcttctgaatggatcagtcagaagtataaggagcaaacaacacataacctttggattttgtaagtaagggaggtttctgattctcttgcagacacaaaatgaggaactcccacaaaacaggaagataatttggattgtgattacacaaatattgatgaatgtctcttatattgaaaacaaatgaacatgattttaacttttaataatttttaaactttatatggcataaggaaataaggtttgagtttggtc

SEQ ID NO: 460215 - DNA, 598 bp, Homo sapiens
tccaaaagaagtgtttgagttctctaatttatataaacaccaatctggagaacaggtatgagaaaggatattagaggcatgggattatggtgaaaggaacatagaattggatcaggctgagtttactgatttgggccaagtaggaagggaatctgcttttaatgttgcggctcagggagttaaaaaaggctctaatagtttatttgcttggttaggtgaaatatggattaaaagagagccactgtgagtgagctagaaatgccttggtttcatgtagaggaatcattcataattcagttgttaacaaatactactatagctattataattatcaatttaatatagggaattcaattattaataaattgttggagggttgaaggtgtagactctatgctaggccaccagaatggtaaactcaggacaaaatttactgcaattaggaagctggagaattgagaagctagcattacaaatataagytttattattaaacctcattggcaatgatttgcagagtaagaggctgttgcacctgttgactccatgtgatggttaatactgagtgtcaacttgattggattgtatataatttaga

SEQ ID NO: 460216 - DNA, 504 bp, Homo sapiens
ggcctctccatcaatttccagacttgagccagtttacagatccagagtcctttgaatgaaggggaggctgggtcaccctcttgaaggaaggatcccactatattacaactatttaagcagtgaatctttctgacatccttccccaaggagacctccagccatttaccagggtaactgggaattggagaaagggaaataattaaacatttaggggactactggcaactagatctgagttgaygttgattctaggagacccaaaatttcactgtggtcctgcagttaaagtaggggcttatggaggtcaggtaattaatggaattttagctcaggcctgacttacagttggtctagtgggtccccagactcattctgtggtcattttcccagtgcaagaaagtgtaattggcatagatatacttagcagctgacagaaccatcacatcggctccctgactggtagggtgagggctattatggtggtaaaggccaagtggaagccag

SEQ ID NO: 460217 - DNA, 355 bp, Homo sapiens
ggaatatttggctgaataggtaatagtaaattcatgtgagagtattacttaatttggaaaatagatttttttgtatcaaaataaacataaaatatgtattgttttatcttgataactcatgtttaaacascttgtatctggagagaagtctaatcaataaatatgttgtaatgattcgttggaagcacaaggcaatctgaagaactaatggaatgttgggaaaatgacagctaaaaaaacaaaatggagctgtcatcgtggtggtgataatgcaactgcaagctaacatggaaaaggtcaggtaagggttacaaataagggcagagagtaagccctattcagatttagatacaat

SEQ ID NO: 460218 - DNA, 588 bp, Homo sapiens
accttgggcaatcttaaatggcaatctccccaacaagaaggctattgcaggattgaacctcattacttgcatatctttttctttcttaaggtggattttagatctgttttatactgttctaagtcaccagagattggggaaaatgtgcttgaaactataaggagttaagattgagcccctcaagatgtatttaatcaattaatatgacatttgtcccaagactaaatagaaacatctatgaagctttaagatgttttccctcctcaattagaagctaaaaatgatgaatctttcccgatggtatttgaatattgcaaattattcattgcaaccactggccttagttaatgttgaagaagacagcgttacaataaatcagaatagcaggaacatgccagggatggtgcacatggaaattttttatgccaaacatttttggaaccaggactacctagaagttgattctgtcttcaccacgctctcccctcattccacagacccttgaacttctgtctggytgtctctacacatccaagatgccatctcatccaaaagtcttcctgaacccctccagtctagctgggcgga

SEQ ID NO: 460219 - DNA, 663 bp, Homo sapiens
  misc_feature (1)...(663): n = A,T,C or G
tgaggtaagggtcaagtaacattttgttttttccccacaaggatattccactgctccattctttcctttcttagcagtggcatctctgtctgacccaaagtgtctgtatatgtgtgrgtctatttctgggcactttattctgttccattggtgtacttttctgtcactttcttaaatattgtatctttatagtcattcttaacaatatcatttttcagtaataaaaagaaatgaactattaatgtattcaacaacttggatggatctcaagaaaattatgctgagtgaaaaaaagtcaatcccaaaagattgcatactgtataattccattaatataacattcttgaaatgacaaaattatagtcaggaagaatgaattcaatcactgtaagttagtgattgccagaggttagagatgggggaggaggtgcaggaggtanntatgttgttaagaaaaaaggcagacaatatacgggatccttgtggaaatgaaactactctgtatccttactatggtgatgattacataaatctctacttgttaaaatcacatcgaattaaatacatatacagacatacacatacacgtacacacatgcacgagtacacttaaaacaggggaaatgtgaataagattaattctataaagtcaatgtcctgatt

SEQ ID NO: 460220 - DNA, 632 bp, Homo sapiens
taggcatcatcttcacctgggaatttgttagaaatggacattcttaggtccaatcccagatcaactaaatcagaaactttggaagtgggatkcaaccggtatgtttttttgttttacttagttttgttttggcataaaacaacacagactgcttatcttgcagttctgtaggttagaagtctgacatgagtctcacttggctaaaatcaaggtgtccacagggctgcattcctttctagaggctctaggcaatcatgtgttttcctgtttttctatgtctaaaggccggcctgctctccttgtctcatggcccttccctccatcttcagtgcccgcacggcaggccaaatcctttccatatcttatcattttgaccaatgccttcttcttccacttttgagaaaccttgagattacactgggcccactcagctcatccagaatcatctccctattttaaggtcagctgattagcaggcttccatctgcaacttcaatacccctgtcataaaagataacatatcctctggttcttcgtgttggggtatggcagcttcagcaactgtgacttcacaagccctgcaggtgctgctggcggctctaaagtttgagagcaaatgcagtaggccacag

SEQ ID NO: 460221 - DNA, 500 bp, Homo sapiens
tctagaggctctaggcaatcatgtgttttcctgtttttctatgtctaaaggccggcctgctctccttgtctcatggcccttccctccatcttcagtgcccgcacgscaggccaaatcctttccatatcttatcattttgaccaatgccttcttcttccacttttgagaaaccttgagattacactgggcccactcagctcatccagaatcatctccctattttaaggtcagctgattagcaggcttccatctgcaacttcaatacccctgtcataaaagataacatatcctctggttcttcgtgttggggtatggcagcttcagcaactgtgacttcacaagccctgcaggtgctgctggcggctctaaagtttgagagcaaatgcagtaggccacagcatttgccatcggtttggactcccggtttccccacatcccacacattattaaaataccaggtcccaggatctgaaagaaattagaccactgctaacagcgct

SEQ ID NO: 460222 - DNA, 500 bp, Homo sapiens
tctagaggctctaggcaatcatgtgttttcctgtttttctatgtctaaaggccggcctgctctccttgtctcatggcccttccctccatcttcagtgcccgcacggcaggccaaatcctttccatatcttatcattttgaccaatgccttcttcttccacttttgagaaaccttgagattacactgggcccactcagctcatccagaatcatctccctattttaaggtcagctgattagcaggcttccatctgcaacttcaatacccctgtcataaaagataacatatcctctggttcttcgtgttggggtatggcagcttcagcaactgtgacttcacaagccctgcaggtgctgctggcggctctaaagtttgagagcaaatgcagtaggccacagcatttgccatcggtttggactcccggtttccccacatcmcacacattattaaaataccaggtcccaggatctgaaagaaattagaccactgctaacagcgct

SEQ ID NO: 460223 - DNA, 492 bp, Homo sapiens
tataagaaacatccctattgagatagattgtcaaactgaatagcaaaccaagacccaactacatgcttcctacaaaaaaaaataataattaaacataaagacacagatagagtgaaagtaaaagatgagaaaagatgtagcatgaaaccaatagatataagaaagctggtgcagctatatttgtataggatggattagacttcaaaatcaatagtattactagaattcargaagaatatttcatagtgaggaaaagtgaaatttatcagtaagaaataacagttctaaatgtgtatacaactaaaaaattgggttcaaaatacaggaaacaaaacctgacagaactaaaaggaaacatcaaaatattcaaaagcatacctgcagatacttgaaacccttcttttagtaattaatagaacaattaaacagcaactcagtaataatgtagacaatctgaacagtattaacttcacctaactgacatttatagaa

SEQ ID NO: 460224 - DNA, 492 bp, Homo sapiens
tataagaaacatccctattgagatagattgtcaaactgaatagcaaaccaagacccaactacatgcttcctacaaaaaaaaataataattaaacataaagacacagatagagtgaaagtaaaagatgagaaaagatgtagcatgaaaccaatagatataagaaagctggtgcagctatatttgtataggatggattagacttcaaaatcaatagtattactagaattcaagaagaatatttcatagtgaggaaaagtgaaatttatcagtaagaaataacagttctaaatgtgtatacaactaaaaaattgggttcaaaatacakgaaacaaaacctgacagaactaaaaggaaacatcaaaatattcaaaagcatacctgcagatacttgaaacccttcttttagtaattaatagaacaattaaacagcaactcagtaataatgtagacaatctgaacagtattaacttcacctaactgacatttatagaa

SEQ ID NO: 460225 - DNA, 613 bp, Homo sapiens
ggaaactgcttaaagcgaaacctgcctcccattctatcagaagtcacgcctctgctcactgagatagatgcatatctgattgcttccttcagaaagactaatcagagactcaaaagaatgcaactgtttgtgtctcacccatgtgtgacctggaagctccctctggcttccagtcttccggcctttgcttcaagttgtcctgcctttccagacccaaccaatgtaygtcttacatgtattgattgatgtctcatgtctccctaaaatgtgcaaaaccaagctgtgccccgaccatcttgggcacatgtggccaggacttcctgaggctgtgttatgggtgcatcctcaaccttggcaaaataaactttctaaattaattgagacctgtctcagattttctgggttcacactgtgtataattaaaaagagaaggtaaagagaaagagaagaaagggttaaaaaaagaaggtgaaattaaagagaaagtaaaaatcaagacaagaaacgataatcttagtctgactggagtggagaaaagtgttttaggatgtggaaaaattgagcataatactaaactatgtcaaagagctttgggagagaggttgaaaatgag

SEQ ID NO: 460226 - DNA, 506 bp, Homo sapiens
tggctatcccctgagatatgaggcactggcactttctgatctggtatttccctaaacctatgtaatgtttacatagattaaccttagacaaacttcacccaggactgtgactttgtaagtggaacatgatgtcttttctcaaaaacaccacaatgctttcatctccccggcccttctccttcattttatcaactccatttcattttgtgtcagaaaacttgcttttacaatatcaagtcttcttcccaaatttattatttatagtattgattgtacatactttattcatattaaaatcaaggatttgggcactcaagctttgcctagctttgaaaaagcacatgtccattgactttcgacactactttattatgaatttttaaatcatttcggaaacgaagtggaattgttttctgaaaattttttgratagtaaagtgggacttaaaagatgagccttggacagtagagaaaagattttgcttcactcttagttacaggcttcca

SEQ ID NO: 460227 - DNA, 442 bp, Homo sapiens
aaaggtgagggtatattattctttatttattaaataaatttttatgatgaaaattaatgaaatattctagatttcactaaattgttatgaaattacactagaatctgtctatgtggtcacataatccataatattaaccatatgtagacattcttagaaacattgcattttatattagtacatttcaagatataacttctgtataagcaaactgtgccttagattatcatagataataaagctgcaatatggtaatagaatatatatcttttgaaattagttwatttaatggcctaatggaggtcattaggctgggtcaagtatagtgccttgggttcctgcctaatcaaaccaaagcccaatgtaaacagtaaaatgaaacttaagtttaaccaatcagaaatcaccaactcatctctaactaggaactttccacattaac

SEQ ID NO: 460228 - DNA, 590 bp, Homo sapiens
gatgcatgtggttccagaaatgccgctctggaaccatgttaccarttgtctcatgaagctgttgagatgtttcaccaccaccaaaaactaaacttgcacaaattcaaacacagccttgccagacttggacttttccatttcccttgatggcattaccatacttccagatatctatgaggactctttgatgcctcctaccccactgtgtccaggttccaatccacatctaaattatctcattgaacaccctctaggacaactcttgtgaaccaaagagtgaggattctggagaagaaaaaaatctaagacggaatctagcccataaccagtcctttcaattcttaaaaaaattgaagacctagatacttctgggagctgttgggaggaggttggtgagaggttcctaaaacggattacagttcaacggttccagacaagcagggactatggagccagactccttgggtttaaatccttcactctgccaccataaggctgtatgaccttagaaaagtaaactaacctttctgtgccaccattgtaaaataagtataatagtagtttctacttccagacaatggtttgtaata

SEQ ID NO: 460229 - DNA, 595 bp, Homo sapiens
atcaaactaaagagttttgcatggcaaaagaaacagtgagcagagtaaataggtaacccacagagtgggagaaaatctttataatctatacatctgacaaaggactaatatccagaatctgcaatgaactcaaacaaatcagtaacaaaaaaccaatcccatcaaaaagcgggctaaggacacgaacagacaattctcaaaagaagatgtacaaatggccaacaaacacatgaaaaaatgctcaacatcactaatgatcagggaaatgcaaatcaaaaccacaatgtgataccacctaactcctgcaacattggccataataaaaaaatcaaaaaacagtatatgttggcacgaatgtggtgatcagggaacacttctgtactgctggtgggaatgtaaactagtacagccaccatggaaaacagtgtggagattccttaaaaactaacaatagaactaccatttcatccagcaatcccactactgggtatctacccagaggaaaagaagtcrttatttgaaaaagatactcgcacacgcatgtttatagtagtgcaattcacaattgcaaaatcctggaaccaactcaaatgcc

SEQ ID NO: 460230 - DNA, 626 bp, Homo sapiens
tcaaaaccacaatgtgataccacctaactcctgcaacattggccataataaaaaaatcaaaaaacagtatatgttggcacgaatgtggtgatcagggaacacttctgtactgctggtgggaatgtaaactagtacagccaccatggaaaacagtgtggagattccttaaaaactaacaatagaactaccatttcatccagcaatcccactactgggtatctacccagaggaaaagaagtcgttatttgaaaaagatactcgcacacrcatgtttatagtagtgcaattcacaattgcaaaatcctggaaccaactcaaatgcccatccatcaataagtagataaagaaactgttgtatatttgtatgacggaatatttctcagccataaaaaggaattaattaatagcatttgcaatgacctggatgagattggggactattattttaagtgaagtaactcaggaatggaaaaacaaacattgtatgttctcattgatatgtgggagctaagctatgaggaggcaaatgcgtaagaatgattcagtggactttggggacttggggagaagaggggagaggggaaaaggataaaacactacaaatatggtgcagtgtatactgctct

SEQ ID NO: 460231 - DNA, 593 bp, Homo sapiens
ggtattctgtgcaatgttataccatcagtaaatagtagctctaggactcacccctggttgctccagaatgcatgctcttratactgatagtgtcctctcttcagtgaaggatgacaggaggtaagaaggtcaatcatgggcttactgccaaaaatcttttcctttagaattatagaaattcagtttggggaaattgcttagctatctcttcaggtatacatcttaaattgatgcagaaaatatatgaacaagctatttatgaaaataattcaatcatattagactgcagctccagggataagtcattggaggagttcatatctgcctgtaacaatgggggcattgtgttaacaaatgaaaaatgttgacatacagatttctttatcccacggatgagcaaactgacaaagctggacattcgtcttgttatttgtaatcattctccgattttctgtttctttgataattggcatgcttatggacatctgggactttgtctgttggtcttgggaggcttcatggcctgttatgccaagtctgcagagcagccatctgaagatatctcaacaggtattcattacacttacttatga

SEQ ID NO: 460232 - DNA, 637 bp, Homo sapiens
tcagctgctttgtagagtgcccttcaacttagctttgtctaatgttttctcaygattcgattgaggtgcggcactgttgccaggtatgtcacagacaggctgtgctgttcttagtatatcatatcaagggcacatggtattcatatgtcttactgctggtgatgttaacctttatcacttggttaaggtggtgtctgctggatttcttaactgtgaagtttctcttttcactttgtaattcataaatatcttggaggagatactttgacactgtgaaagtatcctgcttctcttcaaattgatacctttaattccaacccccacactacacatttcattccagtcttccctcactctttatttgtaaggaatatgttcccaaacaatgagaaacttggctctaattatcgcctatatttacttacttgttcaatcctagcataaatataaaatggctttagaattgctaaaccaaaatcctgtgagaaacaaagttactaattagattacagtttttttgtatagagttttgtctttagccttacaatgtctaattaaaatattgttttccaaagatattttgtttggttaattcttttctttctcaacatcttcagtggtattaaggtattcattc

SEQ ID NO: 460233 - DNA, 637 bp, Homo sapiens
tcagctgctttgtagagtgcccttcaacttagctttgtctaatgttttctcacgattcgattgaggtgcggcactgttgccaggtatgtcacagacaggctgtgctgttcttagtatatcatatcaagggcacatggtattcatatgtcttactgctgrtgatgttaacctttatcacttggttaaggtggtgtctgctggatttcttaactgtgaagtttctcttttcactttgtaattcataaatatcttggaggagatactttgacactgtgaaagtatcctgcttctcttcaaattgatacctttaattccaacccccacactacacatttcattccagtcttccctcactctttatttgtaaggaatatgttcccaaacaatgagaaacttggctctaattatcgcctatatttacttacttgttcaatcctagcataaatataaaatggctttagaattgctaaaccaaaatcctgtgagaaacaaagttactaattagattacagtttttttgtatagagttttgtctttagccttacaatgtctaattaaaatattgttttccaaagatattttgtttggttaattcttttctttctcaacatcttcagtggtattaaggtattcattc

SEQ ID NO: 460234 - DNA, 637 bp, Homo sapiens
tcagctgctttgtagagtgcccttcaacttagctttgtctaatgttttctcacgattcgattgaggtgcggcactgttgccaggtatgtcacagacaggctgtgctgttcttagtatatcatatcaagggcacatggtattcatatgtcttactgctggtgatgttaacctttatcacttggttaaggtggtgtctgctggatttcttaactgtgaagtttctcttttcactttgtaattcataaatatcttggaggagatactttgacactgtgaaagtawcctgcttctcttcaaattgatacctttaattccaacccccacactacacatttcattccagtcttccctcactctttatttgtaaggaatatgttcccaaacaatgagaaacttggctctaattatcgcctatatttacttacttgttcaatcctagcataaatataaaatggctttagaattgctaaaccaaaatcctgtgagaaacaaagttactaattagattacagtttttttgtatagagttttgtctttagccttacaatgtctaattaaaatattgttttccaaagatattttgtttggttaattcttttctttctcaacatcttcagtggtattaaggtattcattc

SEQ ID NO: 460235 - DNA, 620 bp, Homo sapiens
tcttacatggtggcaggaaagagagtgaatgcagggaaactgccacttttaaaaccatcagatcttgtgagtgagaactccctcagtatcacaagaatagcaatgggaaaactacctccatgatccattcacctcccaccaggtccctcccttgacatgtggggattgtaattcaagatgagatttgggtgcggatacagagccaaatcatatcagaacttctgttgtttaaatcttcttaacaggcacccattaggtcaaaagccctttagtgccaaagtaaaatttttatacatccaattgttttaaatataacccgtgtcagcagacttagccatttagagactgcctgctttgcatactttgtaaaactgtacctaatatctgttagctgtaggtaagataaaccctgtggctttaaaggactccaagtttttgctgccttgcagagttctctgatcccagcaattccctgcagtgctcygcagtgacattatttagacccaaatcttcttgatctccttctcccctagaaagcttccctcacccttcttttctggtggtagcccacaggcctttgcttttgaaaagcttcataccgtgcagggcttcactcacat

SEQ ID NO: 460236 - DNA, 517 bp, Homo sapiens
ttgctgctcttgtcaatgaactagcttttggcttcattaactttcttgatttttcatctctgctctattgcatttatttcagctgtaagttgtgtcttctttctgcttgctttgaatttatttgcttttcttttttagttttataatgtggaaagtgagattactgatttaagatctttcttcctttttgatattggcattagcatctatatatttcccttcaataactgatgctgcatctcaaaagttttggtattttgtgtttcattttcatttacttcagaatattttctaatttctcttgtgatttcttctttgaccyactggttatttaatagtgtgtttttgatttttaaaactgaattttcccaaaaccttaggttgttggtttctaatttaattggtttaggtcagtgaacacactgtattatttcagtatattgaggcttgtgttatgggctagcacgtaatctatcttgaagaatgttttacgtgatttgaggaaaagtgtatgctt

SEQ ID NO: 460237 - DNA, 283 bp, Homo sapiens
ctgggattacaggtgtgagccactgtgcccagccaagagtgagattttgaaccctgcatggaattgtatttaccaaagcaaagtagaaagcacctttgaggcagaagacatggaagttctgtagggaaattgcaatagggttgcaaaacagggtcggggagcatgaatgaaacaggcagtcaatgaggatggaarggaagactggaaccagtttacaagatgtgtaaggagtgtggactttattctgtagagaagtgtggcaattatgtattaattttagaag

SEQ ID NO: 460238 - DNA, 271 bp, Homo sapiens
ccatttttaaaaccatcagatctcatgtgacttattcaytgtcatgagaacagcatgggaaagactcactcccatgattcagttacctcccaccaggtttctcccacaacatgtgggaactgtgggagttacaattcaagagatttaggtggggacacagccaagccatatcattctgtccctggggccaagccatatcattctgtccccggcccctcccaaaccttatgttctttttacatttcaaaccaatcatgccttcccaacagtc

SEQ ID NO: 460239 - DNA, 271 bp, Homo sapiens
ccatttttaaaaccatcagatctcatgtgacttattcactgtcatgagaacagcatgggaaagactcactcccatgattcagttacctcccaccaggtttctcccacaacatgtgggaactgtgggagttacaattcaagmgatttaggtggggacacagccaagccatatcattctgtccctggggccaagccatatcattctgtccccggcccctcccaaaccttatgttctttttacatttcaaaccaatcatgccttcccaacagtc

SEQ ID NO: 460240 - DNA, 271 bp, Homo sapiens
ccatttttaaaaccatcagatctcatgtgacttattcactgtcatgagaacagcatgggaaagactcactcccatgattcagttacctcccaccaggtttctcccacaacatgtgggaactgtgggagttacaattcaagagatttaggtggggacacagccaagccatatcattctgtccctggggccaagccatatcattctgtcccyggcccctcccaaaccttatgttctttttacatttcaaaccaatcatgccttcccaacagtc

SEQ ID NO: 460241 - DNA, 530 bp, Homo sapiens
tgcagttggcagcattggccagaatgaccagaatgacaatgtggtttagatcgggattgtggaacaaatgaaataatggttagagacaccccatcctcccaatcactgagcagaatcaatagatgcctatgktttaggtgtggccttagaacatacttctgggcatatgctagggcatgaaagggtggagctgttagggcagaagagcaatttatggagataatgacctctcagggaagagaatgtccccatttgtgtccacatgagatagaaatggcactgggtagttacaggaaaatggaaaacctcaaacaacagctaaaacagaaactaggcaaagaaaccacaggataacagaaaatccaaaataaggagagaaaatggccaaaatcctggtcgtgtgacatgtccatgactcttccaggcaaacccaaataggggagaaaggggcggtaggagtgcaggcacatccctgaaatcatctccttttccagaacatctaatgattattccacatttcagttaaagaa

SEQ ID NO: 460242 - DNA, 596 bp, Homo sapiens
atttccccaatatatttatatgaaattaagtgaggtasataaattggccttcctatatcttaagggaaatcctcaaaatgaagagataggcacagaactatatcacaaatacctataatattataaatcataaacacttaaaacttttatggcctctactatggggacaatcaagactgtgcttcttgagctaagagaatagcagattctggacaggctccaagtattgccaattacttaaagtcacccaccctttgaggggatttgggagaatcttcttgtgcttcagtcctgtggagtaagaagtgattgcagcatgggtcgaataatgattcacatgcactattagcagagtgcaaagttaacaagggacagactatgttggttttttttttaatgtatcaacttgagcaggctgcagtctccagtctttcagtcaacactactaggtgttgtgataagattttgcagatgtaattaaagtacctaatcagttgactttgaataaggaagataattctggataatccaggtgggcctgacataaccagccgaaagccttagaagcagaactgaggctttcccaagagaacaaa

SEQ ID NO: 460243 - DNA, 596 bp, Homo sapiens
atttccccaatatatttatatgaaattaagtgaggtagataaattggccttcctatatcttaagggaaatcctcaaaatgaagagataggcacagaactatatcacaaatacctataatattataaatcataaacacttaaaacttttatggcctctactatggggamaatcaagactgtgcttcttgagctaagagaatagcagattctggacaggctccaagtattgccaattacttaaagtcacccaccctttgaggggatttgggagaatcttcttgtgcttcagtcctgtggagtaagaagtgattgcagcatgggtcgaataatgattcacatgcactattagcagagtgcaaagttaacaagggacagactatgttggttttttttttaatgtatcaacttgagcaggctgcagtctccagtctttcagtcaacactactaggtgttgtgataagattttgcagatgtaattaaagtacctaatcagttgactttgaataaggaagataattctggataatccaggtgggcctgacataaccagccgaaagccttagaagcagaactgaggctttcccaagagaacaaa

SEQ ID NO: 460244 - DNA, 596 bp, Homo sapiens
atttccccaatatatttatatgaaattaagtgaggtagataaattggccttcctatatcttaagggaaatcctcaaaatgaagagataggcacagaactatatcacaaatacctataatattataaatcataaacacttaaaacttttatggcctctactatggggacaatcaagactgtgcttcttgagctaagagaatagcagattctggacaggctccaagtattgccaattacttaaagtcacccaccctttgaggggatttgggagaatcttcttgtgcttcagtcctgtggagtaagaagtgattgcagcatgggtcgaataatgattcacatgcactattagcagagtgcaaagttaacaagggacagactatgttggttttttttttaatgtatcaacttgagcaggctgcagtctccagtctttcagtcaacactaytaggtgttgtgataagattttgcagatgtaattaaagtacctaatcagttgactttgaataaggaagataattctggataatccaggtgggcctgacataaccagccgaaagccttagaagcagaactgaggctttcccaagagaacaaa

SEQ ID NO: 460245 - DNA, 434 bp, Homo sapiens
cagttgactttgaataaggaagataattctggataatccaggtgggcctgacataaccagccgaaagccttagaagcagaactgaggctttcccaagagaacaaataattctcccatatacaacagctttagcttcgacccatggagttctatttggagttcttgtgagttcctttcctgaccacttgccctatgaatttcagacttgattagcccatcacacaattgtgtaagataattcctgtaacaaatctcttaatgcatctatctcttatggrttctgtttttctggcagatgcatatagctcacattcaagagattctctgcttactgaaattttaatttatctaacctttgtgacttctacagatctctgatacctttaaaaatatgactattgtacctcatttgtttttttctagttgttgtagtg

SEQ ID NO: 460246 - DNA, 434 bp, Homo sapiens
cagttgactttgaataaggaagataattctggataatccaggtgggcctgacataaccagccgaaagccttagaagcagaactgaggctttcccaagagaacaaataattctcccatatacaacagctttagcttcgacccatggagttctatttggagttcttgtgagttcctttcctgaccacttgccctatgaatttcagacttgattagcccatcacacaattgtgtaagataattcctgtaacaaatctcttaatgcatctatctcttatgggttctgtttttctggcagatgcatayagctcacattcaagagattctctgcttactgaaattttaatttatctaacctttgtgacttctacagatctctgatacctttaaaaatatgactattgtacctcatttgtttttttctagttgttgtagtg

SEQ ID NO: 460247 - DNA, 434 bp, Homo sapiens
cagttgactttgaataaggaagataattctggataatccaggtgggcctgacataaccagccgaaagccttagaagcagaactgaggctttcccaagagaacaaataattctcccatatacaacagctttagcttcgacccatggagttctatttggagttcttgtgagttcctttcctgaccacttgccctatgaatttcagacttgattagcccatcacacaattgtgtaagataattcctgtaacaaatctcttaatgcatctatctcttatgggttctgtttttctggcagatgcatatagctcacattcaagagattctctgcttactgaaattttaatttatctaacctttgtgacttctacagatctctgatacctttaaaaakatgactattgtacctcatttgtttttttctagttgttgtagtg

SEQ ID NO: 460248 - DNA, 524 bp, Homo sapiens
ttgtacatgtgatacaaattcaggcttagagaagacaaataaattcaaagaaccagcatagggcatgggctgtaaaatgcgcagctgtctaaagaagcccagttgaaacaactggagatgcgggtgtgggatccggagtgagaagcaaggcagagtctgtggtgactctgaatcttcacagcaggcataagtgaaaagaagaaaaggcaggtttgattaggaaaagaatatgcaacatgcctcacatgcactgggtagcctgttctatatatggagtttacctcatactacaaggatttatgtgtatgttttccacagttatctgagagctcctacaactcactgttcaggtcttcctgtcttttgatttcagaccttacctccccttaatatcctctaccaactaccctccattctctcatcttccaacccttccycctgccctttgactttgtctcagaatgttatggtctattgtacaaaggcacaaaaagagccactgtactcaattttgttggctatat

SEQ ID NO: 460249 - DNA, 585 bp, Homo sapiens
ttggggctggccaacatttccgagcagcagcaatattctgctaaagtcaaccaagtttatttaagcagaggaaactaacacctgatttatacttatgaactgttttgtccccctcaagttaatctatagacctkctcatacccagggcagtgattttaattgcattatgtttttaatatcctttgcagatttggtgcttaaaattgcccaccctcttcagtttgcctgatcaatttagttaatagtataccacttccaagacaaacttccgtatctatttcgtctgcaaggagcacttttctccacaatgtctctttggaaattcaaagttacccttatgagagttatttaaacctaaatcttacctagactgcttgcacattcctagatcatgaatgacacccagatgaacttaacaaaagggaggtatcctattctctctcctcagcaacctgttcttacattgctccaagcttgctaggaaaaagctttactaagatgtctctccagacccatctcaagtctttttcttttccctataatggtgcacggtgtatgtaaaccaaaagaaaataaagttcaaca

SEQ ID NO: 460250 - DNA, 583 bp, Homo sapiens
tcaaaattggcatatgaaattaaccgtcacaccacgtgcttacatttatgttgtggtggagtaacaccaggcaggacacaggaaggttaagctttgagtgtccctttactagttacctgccattggttttagtcaatttattttctcatgaggacactaaactgtgaggagaaatgagatgacatataaaagtgatttactgaactgtaaaacactttttaaaaagttatattattatgatcagggtggtagttcagaagcattaacttttcagagaatagaggattcatactttgtaatccagggtgtgacagcaagctcactggctgctgaggaagcccttgtcttcggagaggacattcagtcacttkaagggtgtcctcacagggtgtcctcccaggagcttcgctggagggaggcaagcagggaggcataactgctttgcatctgtcaagcactgcactttttgagtgaagagaagagcaggcagagaagctgagaatagcaaggtgtaattactgcatgatccaggcagagtgattgtcttacatcatctcataggaaattttttggcttccaggtc

SEQ ID NO: 460251 - DNA, 583 bp, Homo sapiens
tcaaaattggcatatgaaattaaccgtcacaccacgtgcttacatttatgttgtggtggagtaacaccaggcaggacacaggaaggttaagctttgagtgtccctttactagttacctgccattggttttagtcaatttattttctcatgaggacactaaactgtgaggagaaatgagatgacatataaaagtgatttactgaactgtaaaacactttttaaaaagttatattattatgatcagggtggtagttcagaagcattaacttttcagagaatagaggattcatactttgtaatccagggtgtgacagcaagctcactggctgctgaggaagcccttgtcttcggagaggacattcagtcacttgaagggtgtcctcacagggtgtcctcccaggagcttcgctggagggaggcaagcagggaggcataactgctttgcatctgtcaagcaytgcactttttgagtgaagagaagagcaggcagagaagctgagaatagcaaggtgtaattactgcatgatccaggcagagtgattgtcttacatcatctcataggaaattttttggcttccaggtc

SEQ ID NO: 460252 - DNA, 531 bp, Homo sapiens
ctacaggagcacactactgtgcctcgttgctttttaaaatttttgtagggatggggttttgccatgagattaggctgttctcaaactcctggcctcaagtaacccttctggctcagcctcccaaagtgctgggattataggtgtacctggccctaggttaggttgtgatggctgtggcaggatgggaaagcaggtggatctggtctttgatatatcaactagctttcagctgagataaccatctctttgtccaagatctatagcccttcccatttcacagatatctctgttgttttccctttaatgatatcctgtgtatcctggaaatcactcatcatttcatggagatatttcttactcttttttttttacagctatatagttttacaattcttctgtttgttaacttcggtagtttccagtattttaaaattacaaatacttctgtaatkaatggccttcttcatatgtattttgtgttgttgaaggtatattttcagtgcaaattcttagaggaataacaaggtctcc

SEQ ID NO: 460253 - DNA, 519 bp, Homo sapiens
gtaatatagtctgtaatcaaatgcgaactggtataatgtaaatttacaaatacagattgcaaaaagcacatttaaatactaagagaatgtatattacacagagtatagtgatagagcttacaatgttcttacttctggttttccactaataaattcatattcagggattataaatttcctgtgacactttgctgaaggtgccatggtttaagcttactggcctatttccttcctgcttttgcagaaaagttgctttatagtcaggaatgagcagctayaggcaagcactcaagtcaagtttctgaggctttgtctcaaaaagaatgttacatctttggctaagatagtctggggataaaagcctattgactttagtggaaccctgtgaaacaatatcattgctgactatagcatctcctccacataccatcttaaagagtttttgctgcaagaagaaaaggcattcagtttcattttttgacagctttaggtcctagagagttggtcccttaggtcatt

SEQ ID NO: 460254 - DNA, 599 bp, Homo sapiens
aatctggtagaagaaaaatatatatatgtaacctagataccctgggatacaaatagaaaacagtatgctataattgatattacagttctatatcaaaaaccttaactttaaaaataagttttatttcagtatctttaggggtacaggtggttttggttatgtagattaattttgtagtggtgaaatctggrctctaagtgtacctgtcacccaaatagtgtacattatacccaacaggtaattttccatcccttccccccaatcccccttccccctgctgagtctctaatgtccattataccactctgtatgcctttgcatacccatagcctagttcccactacaagtgagaacatggagtatttgattttccatttctgagttacgtcgcttaggaaaatggcctccagttctgtataagtcactgcaaatgatattattttgtttttctatggcccagtaatattccatggtgtatatgtaccatattttgtttatccactcattggctgatgagcacttaagttgattccatatctttgcaattgtgaattgtgctgcaataagcatatgtgagcagatgtcatttttatataatg

SEQ ID NO: 460255 - DNA, 599 bp, Homo sapiens
aacatcaataagcaagattaacatttgtaatctcctaaaatgatttcatgatgcaatgctcaataaattggtagaaaagttaggatcaaatcaatgaatttatatatgtttaattttattgttgtcaatgtattaaacttctaaatgttaaatctcactttagggaactgaaagacacattctgtaacacacacaaaaaatcaacattaaggaatgtaagattttcaataaagcatttcactaagtgatgagatcaccatgtagttgtctgttgcatagttatttgtcagttcaagtttttattacgtgattttctgttttggcctaataggaactataaaygtgggaccaaatcttttagccaactttttacaaagaaaagcatagcaactctggagatgggtgaggcctacaaatacaattgagttgaacagctagaatggttttgataaatgggagagcaatgaaagtcaagcccagagagagaagggatgttggaaattatttttgtaaaagaacagagactcactcaaatgacctagagagaactagtgcttctggtaaagatatcgaagctgtggtgggctatgttaaaggaa

SEQ ID NO: 460256 - DNA, 593 bp, Homo sapiens
tgtctttacttagcatttttaaattgtcctgattaaagggcatgttttattgtaaatactcctgtgcttgcatatcttcctgttggatcttagaggctaacttgaggcaaagagaatacacatattgattgcaattaactgtatccactctgatagaatggagtttgtaatttaaaaaagggagggaagttatatttgttgaacacctgaatacgtgacagagattgagttcatgtcatgtgttgaataatttccaaaactgctcatatggggcattttctgaaccrcagattaaactcagtccaagactagagttggtgcaaaatcactgaggacagtaaccttggtcctatggggaaatagtcggcagggggcaggaggcattcagaacttgcagctaatctgccctcactcacgtaggaaactctgagcttctttgctgctctggactgtgaaaaaggaatacttgcctggtcatcccattctaaatgtttcttctgctttcagcttcataggcttggagaagtctgaggtcttgctggcttcatgggaaataccctgtcctatttgctccctgagctctgagactatct

SEQ ID NO: 460257 - DNA, 544 bp, Homo sapiens
tagcactctgatttgtatcattcagaatgtgaaaacaaaattacaattttttagagctctaactaggctaagttgggaaactcaaactaggaagggttgaaaatgcaccttgaatttgaaagacagcagagttcagtgtaaagtgtttattcttgatctagaaagaagatagaggcaatggttaccactgctaccgctccttaatttttaaagataaatcattatctctcttgggaaaatacatatctagtaccataatccatctgacttttataaccaggtacttattcaatttgtcaattgtggagagttctatagctcctcagataatctattccaattttcaataatgctctgagaaattcttattatgattagatgagatttattaatatactatgtctcccccacttctatacctattatagattatcttttcttagcttcttcactctgaattacctaaggatggctctttaattgctgttttgkttttttttgtgtgtgatatagaatcaacagaacaggtagatagatgtatctg

SEQ ID NO: 460258 - DNA, 567 bp, Homo sapiens
cctttggttatgtaaatccattttgyttcatatcctctaataattttttcctgctgtttttttttgtggaaaaacacagggctgaatataaggggaggggaaaactatttgttagttttttgccattaaaaaacatgaaaattagtcatgagttcacttacatcttagaaaacatagtgttaaattgaatgtaataatatatttattttcatagtagtgttatataatgctacttagtaactaagatttgttcatcaacattcatcagaggataaatgaatgctgagaaatttcagctgatatgaatctacaaacaattctgtacttacatctggctaagcattttaataaataatgggaaggagaacatgtctaaattatctatagaaacataaggtaaacagtgtgaagttattttttttccaaacctagtgaagaaggaactttttaaatgaggtaacagttattactatatcacaaaaattatatttgtacttcattacaaactaggaaatatactctagagcagtatgtctaacataatataagccagaaataattttaagt

SEQ ID NO: 460259 - DNA, 611 bp, Homo sapiens
atgcctagggctgataaaaatatttatgtagtatcactaatcattaaagaaatgcaaatcaaaaccacaatgaaatgccatctcgcattagtcagaatggttattataaaaagtcaaaaaacgacagatactgacaaggttgtggagaaaagaaaaggtttatacaccgctgatgggaatgtaaattagtwcacccactatgggaagcagcttggtgacttctgaaataaaacttcagaattactatttggcctagcaattccattattggacattggacatatacccaaaggaatataaattgttctatcataaagacacatgcacacatgttcattgcagcactattctcaatagcaaagacatgtaatcaacctagatgaccatcaatggtagactgtataaaaaaacgtggtacatacacaagatggaatactatgcagcccccaaaataatgagataatgttctttgcagcaagatggatggagctggaggccattattctaagtgaactaacacaggaacagaaaatgaaataccacaggatctcacttataagtgggagctaaacatcaagtacatatggatacaaagaagggagcaacagaca

SEQ ID NO: 460260 - DNA, 611 bp, Homo sapiens
atgcctagggctgataaaaatatttatgtagtatcactaatcattaaagaaatgcaaatcaaaaccacaatgaaatgccatctcgcattagtcagaatggttattataaaaagtcaaaaaacgacagatactgacaaggttgtggagaaaagaaaaggtttatacaccgctgatgggaatgtaaattagttcacccactatgggaagcagcttggtgacttctgaaataaaacttcagaattactatttggcctagcaattccattattggacattggacatatacccaaaggaatataaattgttctatcataaagacacatgcacacatgttcaytgcagcactattctcaatagcaaagacatgtaatcaacctagatgaccatcaatggtagactgtataaaaaaacgtggtacatacacaagatggaatactatgcagcccccaaaataatgagataatgttctttgcagcaagatggatggagctggaggccattattctaagtgaactaacacaggaacagaaaatgaaataccacaggatctcacttataagtgggagctaaacatcaagtacatatggatacaaagaagggagcaacagaca

SEQ ID NO: 460261 - DNA, 591 bp, Homo sapiens
tgcttatagtggttgctcagtaaggatttgtttctcaataaatgcattgtttaattgcaatagaatgactctgatacatactaagttaagttggatacagtttacttgagagggctttacaaaggatttctgtgtgaagggtagaaggacagtagcatggtgcatttatgaaaatctttctgccattagttttttaatgtgtaccctcaatactcagtatcttagaaactattacttacatacattttgagaacaaagattatgtcttattttaccctcattttatcccaagctactttcatggcacatagtaggtattcaacaaatatgtgtggaataaatgcatgaaccagaatcactagttcacagtttatgtaccaaattacactgtaaaattcaatatttaataatagctayatgaaaataatagatggaatttatgtaatttttactgtccaataatcacaaagtatctttgtttgttatctttatgatatatttgtagttggagtctgtccctttatatctgagcagctctgcctccatctgctagtgatgccagatggaggagaggcaggaagaccaagagat

SEQ ID NO: 460262 - DNA, 528 bp, Homo sapiens
aaataacaaaatggcaagagtaaaatcttacctatcaacaataacattgaatgtaaatagactaacctctccaatcaaaagcatagagtggctgaatggatgaaaaaacaagactcaatgattggttaccagtaagaaatacacttcacctataaagacacacatggactgaaaataaggaatggaaaaagatattccatgccaatgcaaactaaaaaggatcaggaatacttataccagacatgatacatttcaatacaaaaactataaacggaggcaaagaaggttattatataatggtacagaggtcaattmagcaaggggatataacaattttaaatatatatgcacccaacactggagcacccaaatatataaagcaaatattattagagaaaaagagggagctagaccacaaaaccaaaatagctggagacctcagcaccccactttcagtattggagagatcactcagacaaaaacaatcaacaaagaaacactggacttagactacattatagaccaaat

SEQ ID NO: 460263 - DNA, 487 bp, Homo sapiens
aactggctttggaaaaggaacagcagtgagaagcatggcagagccaactccaccagagagcattcctagtttactgttactattggctacttgtctccccattattctgttgcagctgtcatgaatacccttttgttgtccttgtgcatttggattgtccctgacaagtaaaaatccagggaaaaagcaccgaattggttaagctaagtcatatgactgtggccttagctcttaggaaaatggaaaatggaatttgttttcttaagtcattcatacgctagtgataacaacattagtagaggtacccaaaatggaaggattttcaggtgttgtatacctctactaaatgtacattaatctatttttgtatgcatagatcatattatcataataakcaagattgatctggggtctctataatatttctgtaggtaaaaatattttaaatttaatttaaaattgtatatgtatatgtgtgtatgtgcat

SEQ ID NO: 460264 - DNA, 597 bp, Homo sapiens
ccctgtgcttccctctatttttaagtcagcaatatcatgtaaaacccttcttatactttgaatctgatgttctcttttgtctctgtatttgaaaggctcatgtgatacattgggcgcatctggataatccagaataatttccttatgttaaggttaattaagcaatattcttaattacatatttaaagtccctttaccaacacattcacaggtgtgctatctcatcatattcatagtcctgggaatcaaggagggcatggtatctatcttcttggtagccataattctgactaacacagcagccttacattacttgattttaaagattataagaattataagaggagagtttattagcttttwacagaaaaatggaaacctaatcatgagacagcagaaaaggaaactgtggtaaatataaaatatatagaattttataaatatggatataggaagttgaatgaattaaagcttgaagtcctaaaatttcgttgggaaatagataaattatcttgttgagaaggagaggccataagtggtgtttgaatagaaagctgtactgttgaagattttaaatggctcttgtaggtaacagga

SEQ ID NO: 460265 - DNA, 641 bp, Homo sapiens
caagcaagaaaaatgagagcaaatgcacagaggaatgtttaagactacagtaatcatttgtatggggatgtgagaaacaatacmtaaaagctgaattctggtgctgaattgaagagcataagatcaaatctcttttttttttttttttttttttttttgagacggagtctcgctctgtcgcccagactggagtgcagtggcgcaatctaggctcactgcaagctccgcctcccgggttcacgccattctcctgtctcagcctcctgagcagctgggactacaggtgcctgccaccgcgcccggctaatttttttttttgtatttttagtagagacggggtttcaccaggatctcgatcttctgacctcgtgatccgcccacctcggcctcccaaagtgctgggattacaggcccgagccactgcgcccagccaaatctctctttttattgataaactaatgcagagtaaggaaattctagtatcagtctcacaatgaattagcagaagtatacttaagagtttcagtccagtgttctctctatcacagctttacttctaagattggtgccagttgatagcaatcttgcaggtagatagagggtagagaaagtctgggcatggtagctcatgcctataattc

SEQ ID NO: 460266 - DNA, 660 bp, Homo sapiens
ttaggagccgggcgcctgcgcagatgcgcctctcaggcccccatcgcgctccgatatagctgaccacactttcgcctgcaaggcagagcagttccacggstgccgtaggaccccactgatcgctcataggtgtcctcactgcctgcgtccaaagtcctgcgaccatgtgcttgtcccatagtcactccgatttgtctagaaacagttttaaataatatttaaatatctgagttgcttttaagaaatcatttgttctagctggacgcggtggcttacgcctgtaatcccagcactttgggaagccggacagcaggattgcttgatcctaggagtgtaaccacccaatattgtggttcactttgcctgctgctgaccgatagcccatttatcaagacaggggacttgcaatggagtctccccaagcagtattcagagtttttaaagataattcggcgattaggggcttgggaagtagggagtgctgatgggtcaggttggagatggactcatagtgggtagacgtgagtttttcttgctgttttctgttcctgggtaggatggcagaactggttgagccaaattaccaatctgggtggtttcaactgatccatggagagcagggtctgcaaaatatctcaagaacttatcttaggttttaca

SEQ ID NO: 460267 - DNA, 559 bp, Homo sapiens
tgattttgtatctggcccaaattcctacctaaggggtctagggagttatgccctacaaaccatagattctcatgagatgggttttatttgaccctgcatattgtgatttgcttttcaatctgactctggcataacattatgaaacaaggaatacaatatttaaccccaaaatatatgtccttgccatgccttgaaattgccctgcaaagtctcttgtgggaataattcacattctatagagaatccccttaccccttcgttttctgtagggtccagccccacagggtgggtgagtttctccccgtgtgcagcracgagagagtgtagaaataaagacacaagacaaagagataaaagaaaaggcagctgggccaggggaccactatgaccaatgcacggagaccggtagtggccccgaatgtctggctgcgctgttatttattggatacaaagcaaaaggggcagggtaaagagtgtgagtcatctccaatgataggtaaggtcacgtgggtcacgtgtccactggacaggtggcccttccctgcctggcagccgaggc

SEQ ID NO: 460268 - DNA, 559 bp, Homo sapiens
tgattttgtatctggcccaaattcctacctaaggggtctagggagttatgccctacaaaccatagattctcatgagatgggttttatttgaccctgcatattgtgatttgcttttcaatctgactctggcataacattatgaaacaaggaatacaatatttaaccccaaaatatatgtccttgccatgccttgaaattgccctgcaaagtctcttgtgggaataattcacattctatagagaatccccttaccccttcgttttctgtagggtccagccccacagggtgggtgagtttctccccgtgtgcagcaacgagagagtgtagaaataaagacacaagacaaagagataaaagaaaaggcagctgggccaggggaccactatgaccaatgcacrgagaccggtagtggccccgaatgtctggctgcgctgttatttattggatacaaagcaaaaggggcagggtaaagagtgtgagtcatctccaatgataggtaaggtcacgtgggtcacgtgtccactggacaggtggcccttccctgcctggcagccgaggc

SEQ ID NO: 460269 - DNA, 530 bp, Homo sapiens
atgcaagcctcccccgcaagcagcatggaccaggcaagggtgagcaggtgaraaaggcagttttctctttagctatgtattctcccttacatttctgtagttttgaatacaaaaccctcaaaaacttgtgtctttcttttttcaaaacaatgctttgaaacccctaggtaccgcagatccatagtgactatctggtgtttcagttctgatggcaaacaacagcactgaaatgaaacaacccccccaatttcaaaccatgatgcaaattaatctatgtttacactctcagggccttgggggcggggggactttaaaggaggtacttgtgaaatcaaatattgaaccaacatcaaatacaatcagttgtgccccctgatttccatgatctttgtattaaattatgccaagtatgtgtgtagtgttctcactgcttaatgacagggactgcaggcatgggtaagcatgggaatgatccataattctgaaagtaaaagaacatctttgaaggctaagatattttttgagccaat

SEQ ID NO: 460270 - DNA, 502 bp, Homo sapiens
ttcaactctttcaatgatgctttcccatttccctgctctaagaagtccagtttattagaacgatgtcatgtttaacaaatttcatttctatgctatgaccactactccataaaaggcatagtatcaaacttagaatgtggaactaaaaagcctcaggattccattcctagctcattcttaacttctggcataccgactactaaaaggcttcctctcagaaaaagtacacaataggaaaaaccaatctttccccaacatgtggagaaagtaaactatgcaatgggcatgtagagaaaaccttggtccaagcaaaatattaatgtacattttagtactcatggggtaaaaatacctctgtcaccttttaatagctaactttaagcaaattaaattttatatcaagctaaagatttttgacaaaattcaagcattcaaaatgaattycaactatcaccatctggaataatggctacccaaaatattatttcagcacagatgtccc

SEQ ID NO: 460271 - DNA, 616 bp, Homo sapiens
atttgtttctttctctgcctgacttcttcagaatttggaaacttaattctataaattctgtttggttcttctttaagatatgaatctccttagtacattttttattcacattctgaattgattttttgctttctttgtatggttttcagatttctcttgggtctcattgaactttttaaaattactattttgaattttttttttttttttttttgagatggagtctcactctgtcacccaggctggagtgcagtggcacaatctcggttcactacaacctctgcctcccgagttcaagcaattctcctgtctcagcctcccaagtagcttggactacaggctcatgcmaccacacctggttaactttttgtatttttagtagagacgaggtttcaccatattgttcaggctggtctcagaatcctgacctccagtgatccatccacctcggcctcccaaagtgctggaattacaggcatgagccaccccacccagctatttttaattctttatctggcatttcacagatttcatttctgttagaatccattgctagagagttagtgtgatcctttgggggtatcatcataacaccttgcttttacatatttccaat

SEQ ID NO: 460272 - DNA, 604 bp, Homo sapiens
ggataggggaaagaacacatcttccattgtaactggaaagatgaaaaggaacagaaaatcagtcaataaaagattgacaaaaataagcaaacttctttatggtacaccaagtagtatatgatacatcaagtaawctttggcatagagactatagaaaataattttaagtaaatttaaaaaatacttttctaaaataaagatcatactaaatatttatatagctattataagaaatattttcagaatctgctttaatgaaatattcccattaaaagtgatttttgtgtgacccaacaatttgtgtaagttacacaaattctataaattcacttctctacaaacataaaatataagggcaataaaggtaaatacactgtggattgtgaagctaaattattttaaaattatgaatgtctcatataaaaggcactgtgagaaaagagagacatgctaaatatcattttattattcaaggatgctaaaatatatacacaatatttaaaacagcaaattcaaagtattgagaaatgttttaaaattgtatttttaaaagtatgcatattttagtccactgaatcagatgtggaaactaaaaaggtactgt

SEQ ID NO: 460273 - DNA, 604 bp, Homo sapiens
ggataggggaaagaacacatcttccattgtaactggaaagatgaaaaggaacagaaaatcagtcaataaaagattgacaaaaataagcaaacttctttatggtacaccaagtagtatatgatacatcaagtaatctttggcatagagactatagaaaataattttaagtaaatttaaaaaatacttttctaaaataaagatcatactaaatatttatatagctattataagaaatattttcagaatctgctttaatgaaatattcccattaaaagtgatttttgtgtgacccaacaatttgtgtaagttacacaaattctataaattcacttctctayaaacataaaatataagggcaataaaggtaaatacactgtggattgtgaagctaaattattttaaaattatgaatgtctcatataaaaggcactgtgagaaaagagagacatgctaaatatcattttattattcaaggatgctaaaatatatacacaatatttaaaacagcaaattcaaagtattgagaaatgttttaaaattgtatttttaaaagtatgcatattttagtccactgaatcagatgtggaaactaaaaaggtactgt

SEQ ID NO: 460274 - DNA, 622 bp, Homo sapiens
tattttagtccactgaatcagatgtggaaactaaaaaggtactgtaattacctggagcacataattaatacactctgttgatcaattcgattgtttaattaggtaatcaggtaagtacagcttgactaagcctgccaaattgtgggcttataatataaagaataatattgtattcaaactgagcaactaaacataattgataattataaagtcaatgtaaactttctatctccatttaataaccaatagagttatgagtaataatcaggaattcaatatatcctttctatacattaataataatcacctcaaatgcactttctttctttgatttcaatagcagaaaaaaggcaatttaattgttkatacagaagaaatacatgaacatgttttttgattaaatatgatgtaaaactctactcttttgtttgatacatcttaaattacctgaccgcttttaaaattttataaacttggttatttgtggtgacttacatgaatggtatttagcacaataaaaatagcatctgacaaaaaaaagacataaaagaagtgatacctaatcaaaaagttaattactaataacagtaatttattagtctccatatcaattgccttatta

SEQ ID NO: 460275 - DNA, 581 bp, Homo sapiens
aaatgttggttaaaaaatctaaatatcgtacaattcatcaagctcttttcttcataaaacttttgatcactaaatatgtgttttaattacttcctagagggttacaatgattccaaattcacagtttgcttcgtgggtcattccatatgtttatgggtctctgtatgatgaaagatttcttgacatctgttctacattcttcctaaacccatttgtgacacattgttttgttcatggtggaaataggagagtatcaacttgagttcattgtgcttttcagaaacactaagttatgaaaaacttatttgctctttcggcttcaagcctcatttcttatgtaacttttccttctcctatatatcaccagttattcttccctgcctgtttctataaakgaagagtccttgttcttatttaaagccaatgcctccatttgtgcattgcatctttatcttcccctacgccttctgaaagacctggttccagcaattctcccttcttcctctcagaatattttctctctttacttgactatttccattgacagaaatttgtttttatctctcccattttttaaaaaa

SEQ ID NO: 460276 - DNA, 581 bp, Homo sapiens
aaatgttggttaaaaaatctaaatatcgtacaattcatcaagctcttttcttcataaaacttttgatcactaaatatgtgttttaattacttcctagagggttacaatgattccaaattcacagtttgcttcgtgggtcattccatatgtttatgggtctctgtatgatgaaagatttcttgacatctgttctacattcttcctaaacccatttgtgacacattgttttgttcatggtggaaataggagagtatcaacttgagttcattgtgcttttcagaaacactaagttatgaaaaacttatttgctctttcggcttcaagcctcatttcttatgtaacttttccttctcctatatatcaccagttattcttccctgcctgtttctataaatgaagagtccttgttcttatttaaagccaatgcctccatttgtgcattgcatctttatcttcccctacgccttctgaaagacctggttccagcaattctcccttcttcctctcagaatattttctctctttacttgactatttccattgacagaaayttgtttttatctctcccattttttaaaaaa

SEQ ID NO: 460277 - DNA, 479 bp, Homo sapiens
ttgaccacactggagggcagtgaaatgatctcggctcactgcaacctctgccacctgggttcaagcgattctcctgcctcagcctcccgaatagctgggattacagccactgtgcccagctaattttttgtatttttagtagagacgaggtttcaccatgtttgccaggctggtcttgaacccctgacttcaggtaatccggcagccttggcctcccaaagtgctgggatttcaggcatgagccmccgtacccagccccttttttccttaaatttactttaaaaaggaatttacagccatcactctagtgaattttttttttttttaaacaaggtcatgaatgatctctgcatgtttcagcctagtggtgtttttaccttatttggcataccatcagcatttgagccttctactcactttctttacctgacattttttaatatgctacctcttggttgtcttcttatataattggcctc

SEQ ID NO: 460278 - DNA, 538 bp, Homo sapiens
tcttgaaagtttgtggtcacagttgattcctttctcttcattaatttattcacaacccatgatttgcattattatagtaactatatttacagcctgtagttgtacaatataattggtgacaaagtgctttgtaagcatcgactcatttaatccacatgacacaatataattggtgacaaagtactttgtaagcattaactaatttaatccacatgaccaccctgtgtttgatatattattattatttaatagataagagtgatttcgattgtagttcagaatacatattaaagcatagatacctaatacattacaaaatcaaagtttaaactctaatttttctgccaccaaagtccacatggctgatcattctgtggtattgctacatagtgtttctagattctacttagatctattttaattgcccttttatagtctcaattagcrttatatctcatttgtatattacaacaatttactaacttggctttctacatccgctcttgttcccctcaagcacgtccctcccactgaactc

SEQ ID NO: 460279 - DNA, 543 bp, Homo sapiens
tttgcccataccttttggttacctaaatatgctcaatctctaaatttcagtttaaacattgtttcctcacagatggctaagatttcactgtcatgtgacccaaagcactgtgcaggttttcataaccttcattccctttctaaatgactatctgatttctggttttcccwttagttaatagcctctgtgaagacaggaaccaaatttatcttgttcattgatccccgactccacactcctaatacctagcccgtcacttgttcagagttctcagtgaagaataaatcaattgcaattagaaacacattggaagttctaaatttcttcatcttatattgtaatagctacaacattgtgaatatacatctttcattctgtaatcatgtgctaaatattaaatgttcataatatgtagaatttatttttgtattatcagtgtgtacatctcaaactaatttgaaaacaccaaaaatataatgttgcaaaaccactgagcaacattgttctgtcattaattatagaaattacaatgtttcacttttt

SEQ ID NO: 460280 - DNA, 528 bp, Homo sapiens
aatttctaagcagcaaagcattcaagaagtgacttgggtgctgttaaaagcattcaattttaaaagaaaaacagagcataaaagttcggaaaatttgcagccttgtgatgctatagaaaagaaaaacccattttctgaggggaaattcaagccggctgcagaaatttgcataagtaacaaggagycaaatgttaattgccaagacaatggagaaaatgtcactagagcatgtcagaaacctttgaggcagcccctcccatcacaggtccagaggcctaggaggaaaacaagatttccagagctaggcccagggcccctctgctctgtgcagcctaggaactttgtgccctgaatctcagcagttctagccatgtctaaaaggggtcaaggtacagctcaggccatggcatcagagggtgcaagccccaagacttggcagcttccacgtggtgttgagcctgcgggtgcacagaagtcaagaattgaggtttggaaacctccatctagatttcagagaatatatggaaa

SEQ ID NO: 460281 - DNA, 610 bp, Homo sapiens
ttcatatatttatatatgtattaagctttccatagtatctgtaatccacaacagacaggagagtgagcagtaaaaatcaggtcttctgaagtgagagtgttgagtttgaattttaactttaccattagccctccacactttatctgaaaatgttagcaataatattcatagtagagatttttaatgattaaattagtggatatatgcaaaacactgagaaaaatacttgtyctacaataatcactcactaaatactttctcttattattttttgaagactagatgtttttaccatttctgttttattcaacactttgtgaattcttcctcaaaatcagcaatatctgatgctctaaaaagttttaataagttaaatttggagatatcacattttactttgcatttcttaagtaatgagtttgctgtattagttttcctatgacatgttttgatatgtaaagtatgatttatattgtttacccatttttacattatagaatttatctctggtcttttcttcttactttttttgtgtgtttctacatattgctttagtgtgaattccaagaaaatagagcctgagtcaaaggtatatctggtttataaacac

SEQ ID NO: 460282 - DNA, 504 bp, Homo sapiens
aagttcatatatttatatatgtattaagctttccatagtatctgtaatccacaacagacaggagagtgagcagtaaaaatcaggtcttctgaagtgagagtgttgagtttgaattttaactttaccattagccctccacactttatctgaaaatgttagcaataatattcatagtagagatttttaatgattaaattagtggatatatgcaaaacactgagaaaaatacttgttctacaataatcactcactaaatactttctcttattattttttgaagactagatgtttttaccatttctgttttattcaacactttgtgaattcttcctcaaaatcagcaatatctgatgctctaaaaagttttaataagttaaatttggagatatcacattttactttgcatttcttaagtaatgagtttgctgtattagttttcctatgacatgttttgatatgtaaaktatgatttatattgtttacccatttttacattatagaatt

SEQ ID NO: 460283 - DNA, 590 bp, Homo sapiens
atgaaagtatttaaatgcatataatctgatatgtctattttaaaaatgttttattggattgaatttatagcccatctagttgtgtatatcatatattgctagcataagcttagaacttttccttaagggcaattaaaaaaaagtcatctccctgttaagattggtgtttctaatatttgaaaacataatttcattcaaaaagtgatattctgttactgttaaagaaaaataattgaaaacattaatatatcatgacagaaatggtgatgaatttaacatttcttgactacttatggttatgaaataagaatgatatttatagatttaattaattaaataacattttttcaatagctacttttctagtaccactgagcaggtacatatttgtcttattttcctctcttctgaaatatgttttaaaataaaatgctgataatgatcccacagtaaaatatttcaccaaaataatgacatgagcatttaaaaataattattatttctyactatgaagggctattgaattccctattcctttgttatacgtgacattagaaatggaattgagttctctaattattgctgtaaat

SEQ ID NO: 460284 - DNA, 646 bp, Homo sapiens
atattacatatacattcatatattccctttctcatttatatatgtgtgtatatctctttgtgtgtgtgtaattcttgttcatatgcactagcaaagtgttcaaagaagggcattgcagtgttactttctctaatagccaaacttggaactaaagtaagtaattatcatgaagaaatgaataaatyaatatgatatactcatgtaatagtagttaaattgagaactatatgaaacagatctatgagtataaaaatgcatagataatacaaaaggtagtggaaaatatgtaaatctcatagagatgtcagacatgtataatttaacatatatacgttattgcatacatctttaaaaatatgtctataaatgtggactgaaaagagatacacaaaattcttattgctcatttaagaatataaaagaggaatgggaattaatagatacaaagggtacattacacctgagttaaaatacatacataaatatgtcaatatcaaaattatgccctatgtatgtttatatgtattaagagaaggaaagtttttacttccttccttgcttcctcccttcctccatccccttcttccttttttctgtcagaaaactttactacgcgtagagtattgacagtcactgttacaaatgc

SEQ ID NO: 460285 - DNA, 581 bp, Homo sapiens
gatacattcttattacagatttcttcagcaagcaaatggaagaaactttattcttgtccattctactataatactaagcttaggttattttaaggttatactgtatttcctacaaggttaatttgaaagcatttataatcttttaatccttgtgtaacactaaaattattataatttgacatgttaatagttgatgtctgaaaattttaatttgttggaaagtttgtgataatttcttcttttggtagctaattcagcaatagttatagaatgatgaatagtatagtagaataaattatctgacttatggcattggacttttctcacacttgctatcaagaaataccccaaamtgggaaatttataaagaaaagtggtttaattgactcacagttccacagggctgagggtgcttcaggaaacttacaatcagggcagaaggcgaagcaggcatctccttcacaagaccgcaggagggagacaagcatatctgagtgcaggaaaaactaccatttataaaaccatcaaatcttgtgagaattcactcactgtcacgagaacagcatggggaaaactgcccc

SEQ ID NO: 460286 - DNA, 581 bp, Homo sapiens
gatacattcttattacagatttcttcagcaagcaaatggaagaaactttattcttgtccattctactataatactaagcttaggttattttaaggttatactgtatttcctacaaggttaatttgaaagcatttataatcttttaatccttgtgtaacactaaaattattataatttgacatgttaatagttgatgtctgaaaattttaatttgttggaaagtttgtgataatttcttcttttggtagctaattcagcaatagttatagaatgatgaatagtatagtagaataaattatctgacttatggcattggacttttctcacacttgctatcaagaaataccccaaaatrggaaatttataaagaaaagtggtttaattgactcacagttccacagggctgagggtgcttcaggaaacttacaatcagggcagaaggcgaagcaggcatctccttcacaagaccgcaggagggagacaagcatatctgagtgcaggaaaaactaccatttataaaaccatcaaatcttgtgagaattcactcactgtcacgagaacagcatggggaaaactgcccc

SEQ ID NO: 460287 - DNA, 591 bp, Homo sapiens
tcatatgttgaagctctataccctaatgttactgtattcagaaatagagccattaaggttaaatgcgccataaagatggagctctaatccaacagaactggtatcttcataagaaaacccgacaccaggagttcgtgagcacagagaaaaggctgtgtgggaacwcaagaaggcagccatgttcaagacaggaagagaggcttcactagaagccaaccctgccagcaccttgatcttaagatatccaatctctgtaatagaatgatttatatttctttgggtgtatacccataatgggattgctgggttgaatggtatttctatccttaggtctttgaggaatcaccacactgtcttccacaatgaaataatttacattcccaccaacagtataagcattcctttttctccacaagcctcaccagcatctgttattttttgactttttaataataaccattctgactggtgtgagatggtatttcactggggttttgatttgcatttctataatgatcagtgatgttgaacctttcttcatatgattgttggcagtattccattataaagacacatgcacatgtatgttta

SEQ ID NO: 460288 - DNA, 629 bp, Homo sapiens
cttaagtcattgttccagaaagtatgtgaagcacatttcataaattactcatttctagaaacctcatgatggggaaattactatttctcacaaattacagatgagaaaactgatgcctacagaagttcaatagtctgccaataccgagctgttctaaacgatggcactggcatttaaacccacactgtggctcagcagtcctccttcttaactgctttcctgagatttataataacctgaggacaatcaggcaaatctgttttggaggtttgcttctgcaattaactctatgtaggagacaagtgaattaagattagatcttaaaaaattayataggcaattccttgttattatgccatttttagatgagctaccagtacgaatgtaaacaaatgtgtttcaagtatatacttttaagttgagaaatgattagcaaggtgtagtggtacatacctgtagtcgaagctactcagaggctgaggtgggaagattgcttgagcccaggagttcaaggctgcagtgagctgtgatcatcacactgcactccagtctgggtgacagcgtgagaccctgcctctaaaaaaaaaaaaaccctataaaataaaataaaataaaataaaaataaataa

SEQ ID NO: 460289 - DNA, 640 bp, Homo sapiens
attagcaaggtgtagtggtacatacctgtagtcgaagctactcagaggctgaggtgggaagattgcttgagcccaggagttcaaggctgcagtgagctgtgatcatcacactgcactccagtctgggtgacagcgtgagaccctgcctctaaaaaaaaaaaaaccctataaaataaaataaaataaaataaaaataaataaaataaaataagaagtgaaataactttgtcctcwaacaaaaaccaatgtttgcctcagttatttattaggtatcagcctcagtaatgaattgctgagtcgacattttctttcatatgttgctggaataattttgttacttacaaaacactaactttgttactttataagacattagtgatgtctaccaaaaattatgactatgagaattaagacaaggtttagtttagcagggccagagaagatttgactggaagtagatcttgaagtcctcttgaggcctgacaaatctctatttctagaacaaggcagtattacacagatgcattactcatcatttattaagtggcaatatatctataatacgctctctcaaatgagttatatttcataagttttaaaaaaggttttaaagcgaaaccctttacacttcatgacagta

SEQ ID NO: 460290 - DNA, 640 bp, Homo sapiens
attagcaaggtgtagtggtacatacctgtagtcgaagctactcagaggctgaggtgggaagattgcttgagcccaggagttcaaggctgcagtgagctgtgatcatcacactgcactccagtctgggtgacagcgtgagaccctgcctctaaaaaaaaaaaaaccctataaaataaaataaaataaaataaaaataaataaaataaaataagaagtgaaataactttgtcctcaaacaaaaaccaatgtttgcctcagttatttattaggtatcagcctcagtaatgaattgctgagtcgacattttctttcatatgttgctggaataattttgttacttacaaaacactaactttgttactttataagacattagtgatgtctaccaaaaattatgactatgagaattaagacaakgtttagtttagcagggccagagaagatttgactggaagtagatcttgaagtcctcttgaggcctgacaaatctctatttctagaacaaggcagtattacacagatgcattactcatcatttattaagtggcaatatatctataatacgctctctcaaatgagttatatttcataagttttaaaaaaggttttaaagcgaaaccctttacacttcatgacagta

SEQ ID NO: 460291 - DNA, 616 bp, Homo sapiens
tcttcatgtctttattttctaattccacattaacatatcacaatacatttttacagacagtcacagttaatagaatttaacgacctatctaagcagaaaaaagcctgttttgaatatagttaatagtgtagcctaccttaaacaatattttagtagaataatacaattatggtgctggccaggtgtggtggcttatgcctgtaatcccagcacttttggaggctaaggtgggaagaccatttgagttcagkagtttcatactagcctgggaaatatagcaagaccttgtctccagtaaaaatgaaaaaaaattaattacctggatgcagtagcacatgcctcaagtctcagctacttgggatgctgagatgagagaatcacttgaggctgagagtttgaggctgcagtgagccatgactgcaccactgcactccagcctgggagaccagagcaagatcctgtctcaaaaaatatatatataattacagtgttgtctgatttttgtgctgtaaagtgtctcttatttgctgtgaaatcatgaatctctgatgtccattgttttaatctatcttttattcccctgaattacacgtggaaaaaaagcaatatatacatc

SEQ ID NO: 460292 - DNA, 616 bp, Homo sapiens
tcttcatgtctttattttctaattccacattaacatatcacaatacatttttacagacagtcacagttaatagaatttaacgacctatctaagcagaaaaaagcctgttttgaatatagttaatagtgtagcctaccttaaacaatattttagtagaataatacaattatggtgctggccaggtgtggtggcttatgcctgtaatcccagcacttttggaggctaaggtgggaagaccatttgagttcaggagtttcatactagcctgggaaatatagcragaccttgtctccagtaaaaatgaaaaaaaattaattacctggatgcagtagcacatgcctcaagtctcagctacttgggatgctgagatgagagaatcacttgaggctgagagtttgaggctgcagtgagccatgactgcaccactgcactccagcctgggagaccagagcaagatcctgtctcaaaaaatatatatataattacagtgttgtctgatttttgtgctgtaaagtgtctcttatttgctgtgaaatcatgaatctctgatgtccattgttttaatctatcttttattcccctgaattacacgtggaaaaaaagcaatatatacatc

SEQ ID NO: 460293 - DNA, 480 bp, Homo sapiens
tttgagtgctgccacttggctcctgccaccttgggatctaattattcccattgtatttaaattttatagttgagtgactgcagttcttactcttagatctgacatacagagaagagctgttacagggctcttcaaagacacaggtgctgccctcacgaatctattttgcaaggcattggtcaagagtatattttctggacccttccagctgggaygagtaggtctaaagtgactaatccactccaccattccaaactccctaagccttttgatcaatttctcgaccttaaaccaagggagatcaggcatttacagctcactcacagtaagccatcctttaatccatatttccgctaaccaaacaaataaactcttataatcttttttaattcgatgagctggaacgttaaatgcagagtccctacttagtgggcccaaatcaatgaattcagcctgatccaattctatatttcttccacc

SEQ ID NO: 460294 - DNA, 356 bp, Homo sapiens
tgcaatacttctatttcggtaaatcagctctatctatgcagcaagcaagaagaacccaccaggcaattacaatttttttctttggcattaagatttaaataaccctatccgcagtggaatayaccttaatatatcctaagattcatgggccagtggaggatgcaagggatcccctattcaattttttgctacttcagattttcttaagtaagaaatataaaagtgctaatggagatggtaatcccaaagtgatactgtgactccagccagaacagagttcacaattcaaggcccagagaccagagcctgataagatttttatgcaataaatatttaataaacaaagattcgcaact

SEQ ID NO: 460295 - DNA, 424 bp, Homo sapiens
tgctcatgtctgactacctactgtaacagaataaaacactcttctgtttccctagacgtattttaatttacttaattaagttggagtatatattgtcttcacttaaaacaatggttagctggggattttgcattagttctacctagcgagctccccatatagctgargcagagttatcagaagctcctctggtactggggaagggtcattgggtttgaagtgatttatgtttaggaattagttcacatattaaacataccagtttgtttacataagttagtgtgtcagtgtgcaagattagtcagtgtttctgaccatgtgaatgtgtacaattcacatgttcagagtaatccatatttttttgttttcttaaaaaataacttttttggagacagggtcttcctatgttgcccaggctagtctc

SEQ ID NO: 460296 - DNA, 621 bp, Homo sapiens
ttcataaatcctattgcattgccttattaactatattaactaattaatgaattgctgaatttttttagacattgaggcagaatatattcgcctatatattagaaaaccattacaacagacaagtgagaatgcatgaattagagcaaagtcttcagaaatagacatagatagaaaaattttatttagtgatataatatatataattattcattaaatgtatattatagacaaagactaaaattggagcttagttttttattttaggttattgtagtgtcatttataaaagtagttgtttagaaagtagatcttgatttttatatatacatatgtataatttgatttatattttgagtttgatgttagagcttgcaggtgaagctgtcaagcagtcagttggaaaattaagcatttatgatttttattatttctattttatggaataagtgctgaatatggagagacaatgattttgcctgaggtcacatgaacagtgactmatgtatgaaaccagcagtggtttcagagttctgcccttcccttctataatatactgactctaaaacttaaatttctgccataatgtctttgaatattccctatcaaaaactagctacagtg

SEQ ID NO: 460297 - DNA, 561 bp, Homo sapiens
gctgtcatgttttcttgattctttataatctatgtagtcttgcattggtgtctgtgcatttgaaggaacaaccacctcaaccagtttttacagactattttcagcaagtaaagctcttctcctgttggatccatagctgatgagattgcctctgggtttgcagttgagtaaggttggggctgaatcacgtggctgctgcttggcccaayagtgggctctgtggttggaaggcctgttacaagggccccagtgggagtggatcttgcattgtccctggaccaactgcactgcctccaggaccttaatcagttctctggcactgggatgagagtttctttcaaggttcatagatggtggacctgttgccggatatgcatctagtaatcgcttccaatgagtccccaagagtactcccaccaggtcattgggcatgcccctggggtaggattggctccaaaccactgctgagagagactggaacagaatcacagggctgcttgagggcccagagctaagaccagtatctgcaggcctgccttcaagagcatggatgggcatgcc

SEQ ID NO: 460298 - DNA, 561 bp, Homo sapiens
gctgtcatgttttcttgattctttataatctatgtagtcttgcattggtgtctgtgcatttgaaggaacaaccacctcaaccagtttttacagactattttcagcaagtaaagctcttctcctgttggatccatagctgatgagattgcctctgggtttgcagttgagtaaggttggggctgaatcacgtggctgctgcttggcccaatagtgggctctgtggttggaaggcctgttacaagggccccagtgggagtggatcttgcattgtccctggaccaactgcactgcctccaggaccttaatcagttctctggcactgggatgagagtttctttcaaggttcatagatggtggacctgttgccggatatgcatctagtaatcgcttccaatgagtccccaagagtactcccaccaggtcattgggcatgcccctggggtargattggctccaaaccactgctgagagagactggaacagaatcacagggctgcttgagggcccagagctaagaccagtatctgcaggcctgccttcaagagcatggatgggcatgcc

SEQ ID NO: 460299 - DNA, 381 bp, Homo sapiens
cagtatccagaactgtaagaaacaaatttctgttatttgtaagctgcccagtttatggtrttttgttatatagcagtctgaatggatgaagacacacaccaccaaagaacaaattctcttatgttccatatttcatgccctaattatgaatataaatgaacactttagtttttaataggtttgaagctcaattatacaatttcacatatacatggaatattacatttattgactatttgattaccaaatctctttgggtcccagtttattcataaagtaacactcacaacagtagggcatgcctctatcaaaatatattagaattatgtcataggagatttaatatttaaatctccacccttctcttcaccccagagtggt

SEQ ID NO: 460300 - DNA, 480 bp, Homo sapiens
tgctgagtgtcattgtttctctatcatcccctttcatgttcccattatcaaaattttctcagatgtgtagatgcccactacagtgaaatgcgctgccaaagagctttcaggaattttacagaagctttcttttttggatcacatctcaagttcaactcagtcatctgattcagtgaaatctgtagactctgaagaaaagaaagaaaaaaaaaaagaaactcagaagtcctattgtaaattttgcatgaactcacgtgctgaacttttcatattaattgcagttatattggtaggtgctgaaagttctgtattctcaaatccttgtgagttarcatcatagaatcttctgttattctcatatgacagtcccaagtggaatattctaggtaagcaggaaacttcctgtacatgttgattcagtcctgacatagaatcacaagattcttatatttagaaacttcccccaactccccaccccag

SEQ ID NO: 460301 - DNA, 633 bp, Homo sapiens
gttgtatgcctatgttcattgcagcactattagcaatagaaaagacttggagtcaacctaggtgcccactgacggtggattagataaagtgtgatacttatacaccatgcagccagttatgtcctttgcagcaacatggatacagctggaggcattatactaagtgaattaatgcagaaacagaaaaccaaatactgcatgttctcacttacaagtgagagctaaacatccggtactcatggacataaagataacaatagacactggaaacgactagagggaggaaagaaggatgcttgaaaaactattgggtactatgctcagtacctgggtgacaggatcatttgtactccaagcctcagcatcacacgatatacccatgtaacaaacctgcacatgtactccctgtatctaaaataaaagtttaaaaagttgtttaaaaagaagttaagcaactaattaataataaatgttatgacattgtrtagtaaagagtagtaacttctttgaattcgcatattcttaatttttttggcattagtaattttactactggctaatttttcatgatggtttatttattttttcataagatttttctattttgttctgaaagataatgattggaaagga

SEQ ID NO: 460302 - DNA, 330 bp, Homo sapiens
tatctttttgatatgttgttggatttggttagctagtattttgttaaggatttcagtgtccatgttcatcagggatatcagtctgtagttttattttttggttatgtcctttcctgatttcagtattagagtgatgctggcttcacagaatgaattagggagggttccctctttatcttgtggaatagtgtcaaaagsattggtaccaattcttctttgaatgtctggtagaattctgctgtgaatccatctggtcctggacctttttttgttgctaatttttaagttaccatttaaatctccctgcttgttattggtctgttcagggta

SEQ ID NO: 460303 - DNA, 414 bp, Homo sapiens
gtttcatgcttctgcatgtgactatacagttttactagcagtatttattgaagagtctgtcctttccctactgtatgttcctagcgcctgtgtcaagataagttggctgtaaatgtatgaatttatttctggttctctattctgttccatcgtctatgtatctgttcttaggccagtaccatgatgacttggtttayatagctttgtagaaaattttgaagtcaggtagtgtgatacttccagcttcattctttttgctcagaattgctttagttattcaggtttttttgaggttttgtatatacttcaggatttttttttctatttttgtgaagaatgtcattagtattctgataaagattgcattgaatctcaagatctctttgggtagtattgacattttaacaatataat

SEQ ID NO: 460304 - DNA, 662 bp, Homo sapiens
tgcatagtaaacacttggatgaatgcatgtcacttagacttaagaatctatcagtcacagaagcatgtgctctctgtctttgattccatcaaacctcatgacacaaccagattataagctgttagattacagagatcatcttcaattctttaaatgtcttcctgatcccttagactaagtaggcattaaacaatcaatactaaagggaaattagcttctgggggtgtaggtaggaaggactcaactttattgagcaatggttcactgccagacactgcaaagcactatacaaatattatctcagttcatattactacttctcattcatttggagattgctggatcagcataataattgtaagcckccttctaatgaacccattttacaacggaattttgaatactaatactttatatgcaaacataatattttatatataaaaatgcttttgtatgtaagtgtagatatcagtaatatatcttaaccctcaatatactattagcatccattggacccacttttagttttttaggttttataaatttgaagcagttctagctatttgtatggattaatattttataactttattctttcttagagatattacaaagaaaaagagaaaatacttttttttaaaaaaagaaagagaataaaactc

SEQ ID NO: 460305 - DNA, 662 bp, Homo sapiens
tgcatagtaaacacttggatgaatgcatgtcacttagacttaagaatctatcagtcacagaagcatgtgctctctgtctttgattccatcaaacctcatgacacaaccagattataagctgttagattacagagatcatcttcaattctttaaatgtcttcctgatcccttagactaagtaggcattaaacaatcaatactaaagggaaattagcttctgggggtgtaggtaggaaggactcaactttattgagcaatggttcactgccagacactgcaaagcactatacaaatattatctcagttcatattactacttctcattcatttggagattgctggatcagcataataattgtaagccgycttctaatgaacccattttacaacggaattttgaatactaatactttatatgcaaacataatattttatatataaaaatgcttttgtatgtaagtgtagatatcagtaatatatcttaaccctcaatatactattagcatccattggacccacttttagttttttaggttttataaatttgaagcagttctagctatttgtatggattaatattttataactttattctttcttagagatattacaaagaaaaagagaaaatacttttttttaaaaaaagaaagagaataaaactc

SEQ ID NO: 460306 - DNA, 662 bp, Homo sapiens
tgcatagtaaacacttggatgaatgcatgtcacttagacttaagaatctatcagtcacagaagcatgtgctctctgtctttgattccatcaaacctcatgacacaaccagattataagctgttagattacagagatcatcttcaattctttaaatgtcttcctgatcccttagactaagtaggcattaaacaatcaatactaaagggaaattagcttctgggggtgtaggtaggaaggactcaactttattgagcaatggttcactgccagacactgcaaagcactatacaaatattatctcagttcatattactacttctcattcatttggagattgctggatcagcataataattgtaagccgccttctaatgaacccattttacaacggaattttgaatactartactttatatgcaaacataatattttatatataaaaatgcttttgtatgtaagtgtagatatcagtaatatatcttaaccctcaatatactattagcatccattggacccacttttagttttttaggttttataaatttgaagcagttctagctatttgtatggattaatattttataactttattctttcttagagatattacaaagaaaaagagaaaatacttttttttaaaaaaagaaagagaataaaactc

SEQ ID NO: 460307 - DNA, 662 bp, Homo sapiens
tgcatagtaaacacttggatgaatgcatgtcacttagacttaagaatctatcagtcacagaagcatgtgctctctgtctttgattccatcaaacctcatgacacaaccagattataagctgttagattacagagatcatcttcaattctttaaatgtcttcctgatcccttagactaagtaggcattaaacaatcaatactaaagggaaattagcttctgggggtgtaggtaggaaggactcaactttattgagcaatggttcactgccagacactgcaaagcactatacaaatattatctcagttcatattactacttctcattcatttggagattgctggatcagcataataattgtaagccgccttctaatgaacccattttacaacggaattttgaatactaatactttatatgcaaacataatattttatatataaaaatgcttttgtatgtaagtgtagatatcagtaatatatcttaaccctcaatatactattagcatccattggacccacttttagttttttaggttttataaatttgaagcagttctagctatttgtatggattaatattttataactttattctttcttagagatattmcaaagaaaaagagaaaatacttttttttaaaaaaagaaagagaataaaactc

SEQ ID NO: 460308 - DNA, 585 bp, Homo sapiens
aatgcaaaagccgtctagaacaactgtgtacctttgtatttttgtttacagttcatccatgagctacagatgcctattgcaatccctcaggcctaccagtattgcattcgccctccagtggacagacaaagaaagaagctcactcaaatcatggaagcagaaccccagccatctggtcgactaactgtgggctcctgattacctggaatattttttataagggggatacaggttccagctgaacttgtcccyacaactccaccaacttctcagctaatggtgataaactcagctgaaagagggatcaagcaaggccctctaaagcatgaggccctaggcaaaaaccctcttgcccagatctggaggtagtacccttgtgatgctagccagtatgaactggttttttttttagacggctttgatgaacatctgtcttttcaattaaattatggagtaaaaatcacagattcaatcaatgctgccatctaaacagcagataaattataaaataatctctatgataaaaagtgtcccagggtggacgcgataatcccagcactttgggaggccaaggtgggctgatca

SEQ ID NO: 460309 - DNA, 566 bp, Homo sapiens
ggagctattaaaacatctaaaaacatcctgtgtgtgatctttacacctactgtagcagcatgattccctctgtgcccagagctaggctagactctgccacagatgggcagtgtagaacaaactgggaaaacatactactcaagttcatggtagaggactaccaatcactagtctggccacttgggcaaatcacataacttcttggtattctatactctcatttgtaaaatggaattacctgtattgttaacagggtcacacttacaatgtgcttcacaattgcaagctcccaaagtacttagtaacttgtgttttaattgcatgttcccacggctggcttggggcaaaaaaaactaggttttagatccctagtaccaaagacgatgcttgacaacatgccctcaagaaataggtaaggtgaatggatatttttaccttgtaaatacatttcttggtagggatgtctaaattttctccttaytaaaagaaaaaataggaaattttaaatagaagggagtggaaaaaaaggagccaaaaatttaggcttaatcctgtcaagttacaaa

SEQ ID NO: 460310 - DNA, 577 bp, Homo sapiens
ctactacagtcaccatttcagccttccagagaggcaggattgtgctcctccacagatggtagccaaaatcctaaaactatgtttttgtcagaaaattggaggaagattttttttttcttagtgacaacttctgrttctttgctatacccacaagtcatcaagtgtaggaaatttaagctagagtcactaatttgctatttattgtaacaacactgcctggtgtttatacagcacattccattctgtgatctccaagaatgttacgatctttttctactaaaacagatggagaaactaaggcacgctagaccacccacatagtcaccctgagaagccaagagtagaagccatcttatggatcacttggcctgaattgtcctgccaggactgagtcaagattcagtttaacaaaaagacgcaatactgaaaaggtgggcttcccttagcacagaagctcagctgttgaaaaaggtgggtatacagcaaatctcatgacaccaacactcattaatttgacttataactcgctgatgggtaagcctacagacagcagccctctgtgtaggatgccagggac

SEQ ID NO: 460311 - DNA, 389 bp, Homo sapiens
ttcctcttcctaattaatgtgcaggcagtagtgccttttagccagcattccagtatttctatgtagtttatatcttaaatcttatatctataaatctcttagatttcaaagagggtaattttgagtcacyctacttctgtcttcaaatctaggattatttcaaagaaaactttgagtgatatgaatatattttcaaatatgtaatgagatgttggaagtctacccagaggctgccatggaagattatctgggaagtgaccaagggtaggtatgggctttggaatctaaccaatcaggattgcttgcctagtttagtagttgacctgccctgtggccttgggcagatttcctaaccacccagcacctccctgatttatctgtagaatgaa

SEQ ID NO: 460312 - DNA, 407 bp, Homo sapiens
attcccatagctgcctcatgctttcctggctccctgcctcccattccttctgcctggaatacgttccctgcccttccccacctccttgggtcaggatcccctgtcctcagaacccacacctgaggctgactgctctggaaggcctttcctgtgttcctatcttttgtcattttccctcctctggtctcttggaccctctccctgctgctcatggcatccatcatggcactttacactgtagttattcatattgttttttaaccttccccattggacttgtgggggggcgggtctcttgagggcaagctctgcatcttgatccctttttatatctccccaraaacctaacccagcaccttgtaaggctaggaatttgtgcttattttgagatgggtgaatgtggctgg

SEQ ID NO: 460313 - DNA, 483 bp, Homo sapiens
gtcatatttgaaattgttttttgattgtatgatagtgtgtataggtaacatattcccatggatcaaaagtaacaagatttaaaagggcatgcagtagaaggcatccctcttatctctgtatccagccactagttttctacctagaaagcaaccagtttatcaggttttttgtgtataatcactttagagagatgccaaaaatatagtatccctttaaaccatttgtaacttrcattttttttccattttaactgtatcatggagatgattctctgtcagtacattaagaccatttcattctcttttatggttgtattgtactttactccatcatacagatatgctttcatttattatattaatctctattgatatatatttaggttgtttacaatttttagttcttactggcagtgttttagtaaataacctcgcacattcacatgtgtaaataggtaggataaactcctaaaaatagaatta

SEQ ID NO: 460314 - DNA, 601 bp, Homo sapiens
caccatcatggcagagaggggcccagagggcaagactactcacacattttttactctttgaaagcaaagctaagaagataaattacctgtatgaaataagttgtatcttgtgcaagcaaattcttaaaaggttgtaataatttgcactggcagaaatagatgttatcaaaatgatttttctaagtggatcattaattattagcctcttctggaagcactttgactagttacttacaggttaatttracattcttaatatagccacttccatcacaaccatcatgtgggacaatgaaatcgcagttatcataattatcataacttaattagcaagtaccaattacagttctgccatgtcctggtaggccagcatcaactgattaggcaaaaggatgaaaattacccaaatccctacccataaaatgctccccttaaacttcattaaagaaggcaacatggtcattgcatttactattttatccttggcatcaggaataatataggttcttggaaaaaataaatctttgctaaatataaatgaatgaataaataaatgcattaataaaagtcttcttcataggaactttaattcagttgggat

SEQ ID NO: 460315 - DNA, 601 bp, Homo sapiens
caccatcatggcagagaggggcccagagggcaagactactcacacattttttactctttgaaagcaaagctaagaagataaattacctgtatgaaataagttgtatcttgtgcaagcaaattcttaaaaggttgtaataatttgcactggcagaaatagatgttatcaaaatgatttttctaagtggatcattaattattagcctcttctggaagcactttgactagttacttacaggttaatttgacattcttaatatagccacttccatcacaaccatcatgtgggacaatgaaatcgcagttatcataattaycataacttaattagcaagtaccaattacagttctgccatgtcctggtaggccagcatcaactgattaggcaaaaggatgaaaattacccaaatccctacccataaaatgctccccttaaacttcattaaagaaggcaacatggtcattgcatttactattttatccttggcatcaggaataatataggttcttggaaaaaataaatctttgctaaatataaatgaatgaataaataaatgcattaataaaagtcttcttcataggaactttaattcagttgggat

SEQ ID NO: 460316 - DNA, 624 bp, Homo sapiens
gcttcccataactgtcaattaatgtgttttggatcttataaaggaggacatctttagacaaaggttcttaagcagcaaatgcacaatgtttacttggaccaaggtccaaagggagagagtactctgagtagagggagggagtgtcccggaaatcatgtagcacatgtatgtttaaattaacgaaggatagactgatgatttcaaaggtcctgtagcttttacaccctgaattaactgtagttccttaatgtattggaaatagaactttcaaaagttaagccagtgaggcaaagcacacartaattcccttctcttaggctgaccatagttttatgaaaatgaatttttaagtgtcttttctttgcatgaggcttcttggcaagaaataaaatctgtataatgcataacctctggctttttccttaaagagctcaaggatagacatatggataatagcttaaaaatataaatatggtctttccagtcatagaaaccttccgatccaagaggtacttttcccactttccaaaaaatacagggctatatacacatacccgtaaggcacccaggcaaaatacatggtatttgacactaaaaaaaacccactgaacttttcttaagtat

SEQ ID NO: 460317 - DNA, 624 bp, Homo sapiens
gcttcccataactgtcaattaatgtgttttggatcttataaaggaggacatctttagacaaaggttcttaagcagcaaatgcacaatgtttacttggaccaaggtccaaagggagagagtactctgagtagagggagggagtgtcccggaaatcatgtagcacatgtatgtttaaattaacgaaggatagactgatgatttcaaaggtcctgtagcttttacaccctgaattaactgtagttccttaatgtattggaaatagaactttcaaaagttaagccagtgaggcaaagcacacaataattcccttctcttaggctgaccatagttttatgaaaatgaatttttaagtgtcttttctttgcatgaggcttcttggcaagaaataaaatctgtataatgcatwacctctggctttttccttaaagagctcaaggatagacatatggataatagcttaaaaatataaatatggtctttccagtcatagaaaccttccgatccaagaggtacttttcccactttccaaaaaatacagggctatatacacatacccgtaaggcacccaggcaaaatacatggtatttgacactaaaaaaaacccactgaacttttcttaagtat

SEQ ID NO: 460318 - DNA, 548 bp, Homo sapiens
gcttcttgctaatcaaacaaaagagctgtgtggcttagcagtgtccctgattctatcagctactgttgctactgaactgagtccttgtgattgagctgaacctgaagtccaggtcactgcatcgggtgcctcttatgtagcttcacctctgactggtggcccagcccctggggctggtgcatctctacatgaaagtgatacaaaatgccactcacttgctacaaagtgatttaagctcctgaggaaatctatgaaatttaaggcctttcagtcaattggtgccaagagtaatttccttacacttaattgatgaaatgaccaatattgtaaaatgtttgatacatttgttctctcatttaatcattcaaatctgactcctgaatatggcagccgctaaccactgtggccattgtgtgcttggcatgtggctagtacgtctgaggaactggatttttaatttcacttaattaaattgtattaactttaaattcaaattttamaactgacacttgacttattagaacatgtttaagtatgtttgatatgat

SEQ ID NO: 460319 - DNA, 431 bp, Homo sapiens
taaaatgtttgatacatttgttctctcatttaatcattcaaatctgactcctgaatatggcagccgctaaccactgtggccattgtgtgcttggcatgtggctagtacgtctgaggaactggatttttaatttcacttaattaaattgtattaactttaaattcaaattttacaactgacacttgacttattagaacatgtttaagtatgtttgatatgatttgggtatatgaacctatttcaactgtcaattttatgagatctaaatgcagatcaaatatctctggtgaaaacttggcatccaaactgagatgtgctgtaagtgaaggacacagctgattttaaagrcagagaacgtaaaatagctcattagtaatttttatatcgcctacatgatgaagtgataatattttggatatgctgggttaaat

SEQ ID NO: 460320 - DNA, 553 bp, Homo sapiens
aataaagcatattgttaaaaaatcatctcaactgtttctttttgcatcttcaatgtggacactagtaaatttaaactagcacgccttgcattctctttttgttggacagcactaattctggtattgattatctgctgtatccccggcgctgtgctcaccatgggcagtagggatggaggctgtgaggttactgcccaggtagagtacagggttcctgtgcgggtatggaaaataaacagataaacataaataaccagcatggattgggattgtggtgagcactagaaggcaggtctgcagggwggtgctcaagtaactgggggagggggccacgttgagagagtgtggtcaggcaagacctctctgagtggagttgaggattgggaggagctgggaaggagcatgggtggtttctcagaagaggaggcctttgatgtgggctctgaagggtggatatgtcgttcttcctttagctcattcagaaagacttcttcagctcctgggtcaaaaggaggatgtggagaaagcgcttggcttcacaccaggcctggca

SEQ ID NO: 460321 - DNA, 594 bp, Homo sapiens
tctgctcacggagctctcagcagagatttggaagctgatcgagaaccagcatttgtgatgggcacacataatttggcccatctgtacactgtggccacatcagtgaattcactgatgtcaggaagacatcacacccaagtggctggcggaaattgaaatgggacccacagaagtgctgagtggcagcacagccctgaatgggcctctgcgcacacccagagctggtcccctcttgcttcataagacactgtgtgtgtgttggwtaatcgcatgggttctggagtcagatcttgcctgaattctgctttgccaatcactagctgtgggaacatgggcaaagaatgaaacctgagtcccagtttcctcatccataataatgtcatttacatgatgccaaccacactcctaatactgttgtatgaataaattatagctattattcttattagcataattttttattctcctttttctttctctttttaattaccatataaaagcaaagttaaaagatcagattgggccacggctcacaggttagcatttggggatactttatccaacaagagagagagatggctctactaacatacc

SEQ ID NO: 460322 - DNA, 479 bp, Homo sapiens
cctacttttcatggttgctcactcacctcaacttcttacttccccctttcactggtttctattgcatgatccatcattgtaaagatacctttggtttcacaccttgcctttctttcrctttgttatactcatctggcaaaaatccccatcttgttcaacttagctatttctcttgcttgtccctgtgtatctgaccatggctggagataagcatgcagccatcccatttcctatccctaaattctaggactccaatgagttgttcacgatgcccagcagtccagccatgttgccgagttcgttggctctccctctctcctcctgtctccatcctcattctttgctgattgtcttgcttctcatctcattgagaaaatagagaacttctgcagactgcacacagcacattttcctacctatcagtcccggtgcccatacacttgaactcccattcttttacctgattgaattgtttatgg

SEQ ID NO: 460323 - DNA, 479 bp, Homo sapiens
cctacttttcatggttgctcactcacctcaacttcttacttccccctttcactggtttctattgcatgatccatcattgtaaagatacctttggtttcacaccttgcctttctttcactttgttatactcatctggcaaaaatccccatcttgttcaacttagctatttctcttgcttgtccctgtgtatctgaccatggctggagataagcatgcagccatcccatttcctatccctaaattctaggactccaatgagttgttcacgatgcccagcagtccagccatgttsccgagttcgttggctctccctctctcctcctgtctccatcctcattctttgctgattgtcttgcttctcatctcattgagaaaatagagaacttctgcagactgcacacagcacattttcctacctatcagtcccggtgcccatacacttgaactcccattcttttacctgattgaattgtttatgg

SEQ ID NO: 460324 - DNA, 554 bp, Homo sapiens
ctgtaattacaggatgtgccaccagtcagaatgatctatggtgtttcaggttatttgggtatcaaagagccacygcactgtcctaaagagaatagcaacgtacaagtggctcatctctcagctgccagtggcatagcagctcccagaggtcctggaccaagtcactttcccctgtgcagcctttctgttagggagaaactttccagcttcaatagagaaatgctcgttcaccaacagaagacactgattgttgtttaaagatgcaattctcctatgctctaatatagttatgctcctacgtatgaggagtgcaaaaggagcagaatagttaggacagaaaatcccccaaaggagttggatttggaattgtatgctcccagtgagtaaaacactcactgcacatcacaatctaacaatgataatgtttattcactttcaactttgcaagcaacatagacacagaggcaaatggctaaggtaacattcaagttcccaatgatgtaaataatttacttcgggcaacagaatattctctgttgccagtttgaaagctt

SEQ ID NO: 460325 - DNA, 554 bp, Homo sapiens
ctgtaattacaggatgtgccaccagtcagaatgatctatggtgtttcaggttatttgggtatcaaagagccactgcactgtcctaaagagaatagcaacgtacaagtggctcatctctcagctgccagtggcatagcagctcccagaggtcctggaccaagtcactttcccctgtgcagcctttctgttagggagaaactttccagcttcaatagagaaatgctcgttcaccaayagaagacactgattgttgtttaaagatgcaattctcctatgctctaatatagttatgctcctacgtatgaggagtgcaaaaggagcagaatagttaggacagaaaatcccccaaaggagttggatttggaattgtatgctcccagtgagtaaaacactcactgcacatcacaatctaacaatgataatgtttattcactttcaactttgcaagcaacatagacacagaggcaaatggctaaggtaacattcaagttcccaatgatgtaaataatttacttcgggcaacagaatattctctgttgccagtttgaaagctt

SEQ ID NO: 460326 - DNA, 554 bp, Homo sapiens
ctgtaattacaggatgtgccaccagtcagaatgatctatggtgtttcaggttatttgggtatcaaagagccactgcactgtcctaaagagaatagcaacgtacaagtggctcatctctcagctgccagtggcatagcagctcccagaggtcctggaccaagtcactttcccctgtgcagcctttctgttagggagaaactttccagcttcaatagagaaatgctcgttcaccaacagaagacactgattgttgtttaaagatgcaattctcctatgctctaatatagttatgctcctacgtatgaggagtgcaaaaggagcagaatagttaggacagaaaatcccccaaaggagttggatttggaattgtatgctcccagtgagtaaaacactcactgcacatcacaatctaacawtgataatgtttattcactttcaactttgcaagcaacatagacacagaggcaaatggctaaggtaacattcaagttcccaatgatgtaaataatttacttcgggcaacagaatattctctgttgccagtttgaaagctt

SEQ ID NO: 460327 - DNA, 618 bp, Homo sapiens
ctgtgtgtctgtttgttgaagatactaaaaaatgattttatatttacccaggtatttttggagttcttcattccttcctgctgatccttggtaacgtgtgatttcattttcctcattctgaagaactttattttggcatttgttatgatgtggatctcctggggacaaattctgttagatttttatcacactgagagtgtttctatttttccttttttttwaaaaggttgttttcttgggaggtagacttttaggctggctgctttttcttgtagtatttaatagatattattccattacctatttgctttcacaatttcaggttagatgtcacttgtaactcatataattgtttactaaatgtggctttttttttctctgattttaagatatgttctttttatttggtttccagaattttgattgctatgtagccaggtatgttttatttatatttatctgtttagagtttgctgcaattttttgatctgtaggttgatatcttttatcagttgtggaaaattttctgtcaatatctcttccaatattatcaccccttttctcttttttcaccttttagtactccaattatacataaactgagtagttttttttttt

SEQ ID NO: 460328 - DNA, 618 bp, Homo sapiens
ctgtgtgtctgtttgttgaagatactaaaaaatgattttatatttacccaggtatttttggagttcttcattccttcctgctgatccttggtaacgtgtgatttcattttcctcattctgaagaactttattttggcatttgttatgatgtggatctcctggggacaaattctgttagatttttatcacactgagagtgtttctatttttcctttttttttaaaaggttgttttcttgggaggtagacttttaggctggctgctttttcttgtagtatttaatagatattattccattacctatttgctttcacratttcaggttagatgtcacttgtaactcatataattgtttactaaatgtggctttttttttctctgattttaagatatgttctttttatttggtttccagaattttgattgctatgtagccaggtatgttttatttatatttatctgtttagagtttgctgcaattttttgatctgtaggttgatatcttttatcagttgtggaaaattttctgtcaatatctcttccaatattatcaccccttttctcttttttcaccttttagtactccaattatacataaactgagtagttttttttttt

SEQ ID NO: 460329 - DNA, 564 bp, Homo sapiens
atctgcctgcctttcatagttgagctggcagcttttaagaactatggaatatcttttgctgtttagaccacagttgcctggactttgagttcctggagagttttcttttctctccacttctatttcttgctttttgcacctcaagaggattattcatcacagatccatatttttttgtttcccgctaaacagctacactgagattatggactgacaatgttatatttatgttatctagaaccacagttaatcttgtgcatgtttaactactgtacctttcgtatttagtatgtgcttagggaatgttttacatacattaatttagggaagtactaattttttcctctacagataaagtatctgaggcacagaggttgagtaactgatcacagtcataagagtaataaatggcagaacttttatttgaacctggccatctgcattatattaaacaytgtgatatgtcatggctctccagtttcactgttgttcctctcagttaaatttgattcatttagcctgaggttatattgcgtaacataactaaaatcttggtttgtttta

SEQ ID NO: 460330 - DNA, 525 bp, Homo sapiens
atttcaagaatgtgtttagtttaattattgatgaatggcgcaggctggctctaaagtgttcaggacagaaggaacctcagggaggtccttgaggtgtctaaacacagtgaggctggccaagaccaagacctgatgattctagccctctgaggccatattaggtactgagaagcattaaaaaccttctctcatggggttcagagtagctctgggtggctattgcaatagtttaggtctggtgaaggatactgggactatcagcgaaagtgatggcagtgatgatggagagaacagggtggatttggaggtgggattgacagaactcagttgattggatctaaaggatgagaggaaaaatgtgtcctccaatatgagctagaatggatggtaggcaccamtgatggaaaacagtcggggagtacaggcttgagaagaagatatgagttcagttttgcatgtgtgtttgagatacctgtggcactgttagtcagacacctcagggaattaaggtgtgagccattggcc

SEQ ID NO: 460331 - DNA, 617 bp, Homo sapiens
gatacatcaaaaaaaagtactgaattttgacaatcgctacagacagtcctagctacactgatccactcttatggctacatggacagtttctactgaatatggaatattaatactgtacaaggacaatattgtacaattttccaaaaagtcacaatgggaagctaaataatatagaggagtcttttctcagaggcaaagggcctctttcgaggagggggcaggacaagaaaggtcaccctggtcctgagattcagggtccatgaggaaagagtaagaagaaagcatgaccasgtgagtcctgacactgaaatagaagctgtgggaaggctgggaccaggaggtattaactattggcagaaagtgatcagtgcccagcagatgaattcttctgcaggtgacagaacaattctgtaatctttactgtatcaatgtcgatatgattgtgactttgtactatagttttctaagatggtagcattgggagaaactgagtaaagggtacaaagaatcactgtgcactatttcccacaactgcatacgagtctacaattacctcaaagtaaagagtttaattttttaacaaaaaaaagaaaatcaagcatcgacacgtggccata

SEQ ID NO: 460332 - DNA, 617 bp, Homo sapiens
gatacatcaaaaaaaagtactgaattttgacaatcgctacagacagtcctagctacactgatccactcttatggctacatggacagtttctactgaatatggaatattaatactgtacaaggacaatattgtacaattttccaaaaagtcacaatgggaagctaaataatatagaggagtcttttctcagaggcaaagggcctctttcgaggagggggcaggacaagaaaggtcaccctggtcctgagattcagggtccatgaggaaagagtaagaagaaagcatgaccacgtgagtcctgacactgaaatagaagctgtgggaaggctgggaccaggaggtattaactattggcagaaagtgatcagtgcccagcagrtgaattcttctgcaggtgacagaacaattctgtaatctttactgtatcaatgtcgatatgattgtgactttgtactatagttttctaagatggtagcattgggagaaactgagtaaagggtacaaagaatcactgtgcactatttcccacaactgcatacgagtctacaattacctcaaagtaaagagtttaattttttaacaaaaaaaagaaaatcaagcatcgacacgtggccata

SEQ ID NO: 460333 - DNA, 567 bp, Homo sapiens
tacatcaagctcctgtttggatcatatgttgcaaccagactcaactccatggcttcacatctagagcaaacaactgaaactggaggcccagcagatgacaggcattaatgaaaggaaatgtccataayatgaattaatactgcccaggtgtccaaggtaggatgctgtaaagtaaaataagatggaggcaggggttcgacttatgtgacttcttcattctccactgtatttaaaaaacaaaataggcctccttttaacataagagcttggtattacatggcaacatgtatgtggttttgggagacatgaaataatatccacttgaatctcaggattgaagaataactttcagaacatactgggaaaaagttgatttcttgcttacataaaataaaactctagtgaatttcgaacatatcatattataacctaaagaggataatatttaaaatttaaaaagaattactgtctttcatagaaaattactaattttccaacaattatgaaaagaacccaatgtagaagatcaattagatttttgaacaggacaatcataaagaagggagg

SEQ ID NO: 460334 - DNA, 567 bp, Homo sapiens
tacatcaagctcctgtttggatcatatgttgcaaccagactcaactccatggcttcacatctagagcaaacaactgaaactggaggcccagcagatgacaggcattaatgaaaggaaatgtccataacatgaattaatactgcccaggtgtccaaggtaggatgctgtaaagtaaaataagatggaggcaggggttcgactyatgtgacttcttcattctccactgtatttaaaaaacaaaataggcctccttttaacataagagcttggtattacatggcaacatgtatgtggttttgggagacatgaaataatatccacttgaatctcaggattgaagaataactttcagaacatactgggaaaaagttgatttcttgcttacataaaataaaactctagtgaatttcgaacatatcatattataacctaaagaggataatatttaaaatttaaaaagaattactgtctttcatagaaaattactaattttccaacaattatgaaaagaacccaatgtagaagatcaattagatttttgaacaggacaatcataaagaagggagg

SEQ ID NO: 460335 - DNA, 567 bp, Homo sapiens
tacatcaagctcctgtttggatcatatgttgcaaccagactcaactccatggcttcacatctagagcaaacaactgaaactggaggcccagcagatgacaggcattaatgaaaggaaatgtccataacatgaattaatactgcccaggtgtccaaggtaggatgctgtaaagtaaaataagatggaggcaggggttcgacttatgtgacttcttcattctccactgtatttaaaaaacaaaataggcctccttttaacataagagcttggtattacatggcaacatgtatgtggttttgggagacatgaaataatatccacttgaatctcaggattgaagaataactttcagaacatactgggaaaaagttgatttcttgcttacataaaataaaactctagtgaatttcgaacatatcatattataacctaaagaggataatatttaaaatttaaaaagaattactgtctttcatagaaaattaytaattttccaacaattatgaaaagaacccaatgtagaagatcaattagatttttgaacaggacaatcataaagaagggagg

SEQ ID NO: 460336 - DNA, 573 bp, Homo sapiens
attataaagcaatttaaggtatgggactagaaactcaatctttctgacccatgagagcactgttcaaatagacaaagaaaaactatgcaaaaagaaggggaatggattcaaatagtttgctccggggtctccaaaagattcagtagaaattatttttagaatttctgcttctcagcacttacctgaatatctgatagaaaggttgtggaagttcagagttagagatattaaacaatccactcctgctgtgccatgtaaaacagcatgaaattgaactctttagtattcgggggtagataaagttgttttgttctgaattcatgcactccatgtcacagtttatatggatgataaatctgaggaagatcagataaaaatagggctctgcacactcttagagatctaaattccttgtaaacataaatatttgtatgagtctatatgatcacatatgaaaacagacaggcagggtgcggtgggtcacgcctggaatcccagcactttcagaggccgargcgggcagagcacctgaggtcaggagtttgagaccagcctggccatcatggtgaaact

SEQ ID NO: 460337 - DNA, 562 bp, Homo sapiens
taattagttgtatcattatttcataatgtcagcctctgggcttcctgtaagaggacaaagattgtgcttatcctgcatcactgcaactcccaaccagagtggtcaataaatatttactgcatgaattaataactgaataaaaaatgtgtccatgaatatatttccaacaattattaatactactaaaagcatttgtctagtatttttttatttgcttactaaaaactacttgctaagaatcacttttttaatcactttacagtttactaagtactgagcaccattctaagtacactgcatttaacaactcaatcctcagaggttggcataattattatccccacataacagatgagaaaaccaatgcacagaaagattaagtaatttgcataaagttcatggtggacacaagatwcaaacccaagaagcctgattccacaagacattactggctcaaattttaattttaaaccaactatatcatgtccataaacagcttatatgtatcttgtaaaatatttataggtctgagatttaacattttagctagataattctcaca

SEQ ID NO: 460338 - DNA, 540 bp, Homo sapiens
tgtaaatatcgccaccaaacgtccagttaatagttgagcttacaacctccttctatcttactcctatcgccaatgccttttcagtttcacaacataaatatttctcaatttaaaaaattgatatctgtctatattgctattatcagtctaataaattcaccgaaactaatagactagtaaatagttttcctatatccaaactctcagctctccaggccttctctacacgatagccagtgtttttaaaaacacagttctgatcatgtcgctctctttcatgttttctcattgtttttagataaagatcaaactccttaccatggccttgagtccttatttggctcacctttgccttcctttcccaatcttacattcctctgcccttccctccacwctctagcaacacttaccctctttcacttcattaaattcactgcttctgccatgtcatggcccacgcacatgctatttcttctacctagaagaggcttttctcccttgcttgttgtctaattaacttctatttatccttcaaacctc

SEQ ID NO: 460339 - DNA, 475 bp, Homo sapiens
aatcttacattcctctgcccttccctccacactctagcaacacttaccctctttcacttcattaaattcactgcttctgccatgtcatggcccacgcacatgctatttcttctacctagaagaggcttttctcccttgcttgttgtctaattaacttctatttatccttcaaacctcagctcaacattccttctctaaggcaggtcttgattcacccctcagattaggtctgacatttaagttacatattcacagagcaacacatatccccgtctccctactttccacaattgttaatttttttgaaaaatcatagaattatttgtttaatgtctgtttcttccaccatgtacccttaagggcagatactgggtctatcttgttyaacattgtattgtcagtagcaagcacagtgacttacacacatagtagatgctcaataaatattcagtgaatacatacactttcaatatat

SEQ ID NO: 460340 - DNA, 641 bp, Homo sapiens
tatgaagactatctttttgctcttcttctcacttatagagaataatccaatgagtttccccaagccagattttgagataagcataagccacagggatggtttcagtgcagctgtttcctacatctaaaatacagacaggatagtactagagatagaggcactgtaactgcctatggacccagaagaacataatggagttgattattcaattagcagtatatttgacaacctatgtgccagaaataccattaaactcctgggccaaaaacatggtcacattatataacagaaatgaataataatcccacactacatgaatcacatccaaataagtggaaatgcacctatttcttccttccrcaagactcccagaaagaactcactcaaaatggagtgtcatggggcatttctagaaaaaatattccatcttccaatctagatatgtattctgtataaccatacctgtaggaacttcctgtcaatataaaaccaagagaggttctggaaggatttgacaagtctgagctgtctgagtacttttgtgctgaaaagggacagcacccatcctgaatgttgatatttcgcttcagaattagctagaatcagatctatcacatcattgtcaataattctggatgtat

SEQ ID NO: 460341 - DNA, 621 bp, Homo sapiens
gtctgctattacagtggatgaaaatcaaatgcttagacacacagaaaaatatggatatgctatccacatgacgctcacattaaaatggcaggacatggagaaaatgatactgcgggcagccaggagctcctctcctgacacctcatggcagtgaaaggcaagtgtgcacagtcctttgaagcctctttctttccttagttgaatcatttcaggagtgaactgcatacattgttaaaatatccagtgagaggtggaaagaatggcacagtcttatgggagcttgaaaggtctctgttcttctcgtgcattttaaagtcaggctggctgtctttggtgtagtctttttggmaggccaaaaagtttacgtgttttgaagaaaatgatgcgtgttcttctttgtagttttgctaagcatttaaaagcacaaaagagggtcttttaaaaatgtaactgcaattgaaatgcctggagaacagaagcagcagatatggctagtgtaggcacactccagagctttgagcatgatgctcagactgaaggaggatcagaagaactcactggagttaacaaaagcattatttatagaagcagcaaagtgtaagaagctgatagccacgctgg

SEQ ID NO: 460342 - DNA, 523 bp, Homo sapiens
ttttggaactttaaaaatacatacacacatgcacgtaacaccccaaagtagaaggtgccatctgaattacaattgattgatgggtgtttaagtcagaaattactgtggggatatttaaaaaacaaaacaaaacaaaagaacccatgcatcttcttgcttcagaatgtgggtagtttttattytgatacattttcgcttttaaaaaaataaatgctaagaagaagtgccagcaaaatgctcgggtggcaattctcaaagagcagctaaaaaaccctgtcaagacctatagcaatgtatatttcacatgtggcttttatctgctcgctcattctaggaatacagagacaattagagttttggatcatttaatataacactttcttttggatttttaagatccattccttgtcttctggcatattagtaataggctaagttttgcatatgtgtatatatggtggtaatggggttggtgggatagaagaaaaggagaaaaagtcaagcatattacatttctttaaaa

SEQ ID NO: 460343 - DNA, 597 bp, Homo sapiens
tcagcattcttaaaaaaaagaatttccagctgggcacagtggctcacgcctgtaatcccagcactttgggaggccgagatgagcggatcacaaggtcaggagatcaagaccatcctggctaacatggtaaaaccccgtctctactaaaaatataaaaaaaaaattagccaggcatggtgttgggcacctgtagtcccagctacttgggaggctgaggcaggagaatagtgtgaacctgggaggtggagcttgcagtgagccaagatcgtgccactgyactccagcctgggtgacagagtgagactctgtctcaaaaaaaaaaaaagaaaaaaaaaaagaaatttccagcaaagatttcatatccagctaaactaagcttcataaataaaagagaaataagatcattttcagataagcaaatgctagaagattgtgttaccactagacctgccttacaagaggtcctgaagggaatgctaaacaccagccactacaaaaacacatttaagtacatagaccagtgatactataaagcaaccacacagacatgtcttcataataaccagctaacaacatatgacaggaacaaatccacac

SEQ ID NO: 460344 - DNA, 537 bp, Homo sapiens
tggacctgccaaccagtcctgtggccccaccaagaagcaaattctgcacacccctctgattgcacccccaaccaatcagcagcacccattcccttgcctgccaaaccatccttgaaaaaccctagcctccaaattttcagggatgctgatttgagtaaaaataagactccagtatcctgttcagctgcctctgtgtgaattaaactctttctgtgttgcagtgccwctgtcttgataaattggttctatataggcagtgggcaaaatgaacccatttggcagttacactcagacagtggatctttgtgtaggttcttcaacagtgttgtgccagcctacaggatgaaacaccaagctcacagaagagtgttcatttaaaagaaagcaacactaatgatccacacaacatcctgaatttgttatgtcccagaaaggcttatcataagttcagtaattctggttcatctaccaagataagtaagtgtgtttgattttgtaaggtatgcagcagtgatctcctattttggtgtttttcaa

SEQ ID NO: 460345 - DNA, 622 bp, Homo sapiens
taatttgttatgaagcaacagataactcatacaagtttttaagtatgtatattaaatatacataaatttcttgagaaatttcggagtcccttctaaaacttaaaccataatttactgaaacataactaaaaatgatgccatacactacaaatgccactgatcaggtttttaacaatgatatcatccagtattacaattaatcattctatagtattayggttagatgtcttcccgactagtttatgaacttctagagggcagggaatgtctgcatctttgcagccaacagtacctgaaacatagcaggtgctcagtaaatgtttacaatatgaaccgagtcccacttgtggcacactcacttcagcctctgtgcctccacctgtgcttccttcttgcacgtatttcaaaactaatgcttttacaaaacagtgcacaaccgccatccccatcacataaccttctccaactactccagcccacaaagctcaatctctaagccctccatatacttatggtttgtttcatctttcccaaccacactctcaagtaccacacattttacatttctgtatcccctccctcccactaagcttaaaggatggcataatcaatgaatactcaa

SEQ ID NO: 460346 - DNA, 622 bp, Homo sapiens
taatttgttatgaagcaacagataactcatacaagtttttaagtatgtatattaaatatacataaatttcttgagaaatttcggagtcccttctaaaacttaaaccataatttactgaaacataactaaaaatgatgccatacactacaaatgccactgatcaggtttttaacaatgatatcatccagtattacaattaatcattctatagtattatggttagatgtcttcccgactagtttatgaacttctagagggcagggaatgtctgcatctttgcagccaacagtacctgaaacatagcaggtgctcagtaaatgtttacaatatgaaccgagtcccacttgtggcacactcacttcagcctctgtgcctccacctgtgcttycttcttgcacgtatttcaaaactaatgcttttacaaaacagtgcacaaccgccatccccatcacataaccttctccaactactccagcccacaaagctcaatctctaagccctccatatacttatggtttgtttcatctttcccaaccacactctcaagtaccacacattttacatttctgtatcccctccctcccactaagcttaaaggatggcataatcaatgaatactcaa

SEQ ID NO: 460347 - DNA, 590 bp, Homo sapiens
caaaatgtcacaaatgacacttcttgggatggaataatttgggtacagggaggggtagaagagcagggctttcacctcttccatagcatatctttatatagcttgaatgttataggagcatgtattattctgtaaaatttttagcagcagagtattcaagcacaattaaatgagataatgtgtgaaagtactcttagctcaatcccaaaaagtagcagccctgtccttgagtggaaatctcgacttagacaaatcccmccaatcaggtacacttctagcacctgttccacatatgtacgcatacccatgagcaagggtaatgcagtcttcatacctgagggaatgtctgtgggaatctggcccatcaggaagacagggaacagaaatacagaggccagacttttccccaactatcatcaagggcaaagccatggagtactggcagacctggcaaaagtggactctccccctggcttaatgaacaatccaaccttggtaggaggaaagagggaaattgactttattaacaccctcttcaaaaacaaatgctcttcatctttcaaccttcaatgaatgaaattactaagaag

SEQ ID NO: 460348 - DNA, 483 bp, Homo sapiens
ctgtcacttctcttctttggctcccctaactcaatgttaaagctaaagtgctaaccatggctgcaaggctcttacaacctcaccttcaccaccttacctctctgactccrtgtcctacaatctgtcaaccattcaactaagcactcaaccaaccactagccacctcactgttcctcaactttgccaagcacattcctgcttcaggacctctgtttgaatgttcatccccttagcatctttgttacttacgtcctccctttagagtctgctcaaatgtcaccatcttggtaagggccaacctgacaacattgtttaaaatcggaactcccttccagctttccaaatttctcgtactttgctcctatacaatcttaaaccatgatagatcctttacttattttgattgttcatttggtctgtctccctccactagaatataaactcagcaggaaaataaatttcctctacttggttcattaatgt

SEQ ID NO: 460349 - DNA, 562 bp, Homo sapiens
aaggccctgtatcaaaataacaacaacagtaataataataatgagattgggaggaaggcagaaaggagcaaaggaacatttgtcttaccttttattaacttgttatatgaatttttataagcatgtattatagtgatcttaaartattttaattttgctgtaataaataggctctgattttaatatgcattaagctaatgacccacactttattctactcatatgttttcctcaggaacaagtgtttcaagtaccccagccagcattcagggccacagtgcttctactaacatgcatattcacatttggataataatgggccaacttataaaggctttcttctgtaatgcataccatctgggttatttcaataggagcaacaatttctggatctggtagagaacatttcctgttagggccttatgctgtaacagatgagaatatgggctgagtcacctctgcttaacggccccacttttattaattctgtgttctggccaggactacttttccagaaataacagaatgaataaacaaagtctttctgaatactgtgctaggc

SEQ ID NO: 460350 - DNA, 635 bp, Homo sapiens
tttactccactaggtaccttgttcatgtgactcctgaccctgaaggggataggggtttaagtaatgaaataaggtcactgagataaatatttaagacaagaccgggtgccctggtggctgcttaaagggaagggggcaattaattctgattattcttggcacttgatgcttaggcaattctaaggtaaggagaggacaggaattaaattcattggaatccaattgatccaaaaatgattttcactgtttatctccatccctcaaaacccattctctccttgcctggcttagattctgtggtcctttatataatcactcctttaaatatgctcttagctttcttggccctgtaatatcccattatgttattctgaacaaagtcccaactctggtaatagttccatctctaccttctgtgctccttctcctgagaatctaaatgtgtctcaggagaaacatggttaccctgacctcaaacattaagtcggccctcaaagctgcttggtgrtccttcagcattttcctagtcaatttattctttgactctcccagactatttcattccttctccaaactccatcaccctcctcatcaattatgaatcttatttctctcagaaatatataagcaacaga

SEQ ID NO: 460351 - DNA, 590 bp, Homo sapiens
acccagtattctaaatcttcagcaataaacctctatacattacatgggcccaagaattttgtaaaacgtgtttggatccagtgatttatataaacaggggtcctgcaaaaattctttgcctgaattctctgtctctrtctcttacatgtgcctcctttggtacatttggcctcattctgtcctgcagacaagatttctccataaggcagggagtgtggatgcaagtgtggctcttgggttatatcttaatgagagatgagaatgatatctattccagaaaattctggaagacattgattgtttcagtggcgggggggtgtgcccactccttgaatcaattattgtgtccggaggaatgtaatcaacaactaacctagcttggatcacctactaaaatcctctgccagaggcagcattaacatacttgatagtcccaccagaaccacatggagtaaaggaggagcagttgagggactagtgctgtttccaaagtaaaagggaggcaggacaaaggaaaacaacagatgcacctactaaagttcctaacatggaataggaacctggaaaagtgggtggcagacgaaacccgg

SEQ ID NO: 460352 - DNA, 578 bp, Homo sapiens
cagtgatttatataaacaggggtcctgcaaaaattctttgcctgaattctctgtctctgtctcttacatgtgcctcctttggtacatttggcctcattctgtcctgcagacaagatttctccataaggcagggagtgtggatgcaagtgtggctcttgggttatatcttaatgagagatgagaatgatatctattccagaaaattctggaagacattgattgtttcagtggcgggggggtgtgcccactccttgaatcaattattgtgtccggaggaatgtaatcaacaactaacctagcttggatcacctactaaaatcctctgccagaggcagcattaacatacttgatagtcccaccagaaccacatggagtaaaggaggagcagttgagggrctagtgctgtttccaaagtaaaagggaggcaggacaaaggaaaacaacagatgcacctactaaagttcctaacatggaataggaacctggaaaagtgggtggcagacgaaacccggaagacatgattgtagtatatttagattacaatgtatttcataactaaagtggagttggtgaaataa

SEQ ID NO: 460353 - DNA, 493 bp, Homo sapiens
ttccaactatgaaatggcatgatgtatttatttattaaccatttacaaacagacattttaaaatgtttacagaaaatcttgtgagtgtaatagcaagtactatgtaaagtttagacctgtgttactctcaatttttatcttgagtgctctctgtgtattcatrtaggtttgcatatatataaattcttacaaatatatatgatgagtatataaaatgcgtattttacatttattttcggttgtaaatctaagttttttgagtgtttaaaattctcatttccgttaaatttccaatatgtaaccaaagaatattggtaaataaaatataattacagtaaatgtaaattaatttttcttagtacatatttgtataagtaaaaattggttattcatcactatagtgagattcacaaaatattatgtgaaagttaatggtgactttaacattttccctgaccagtcatgtatggaattaacaaagtagcaggtatac

SEQ ID NO: 460354 - DNA, 513 bp, Homo sapiens
  misc_feature (1)...(513): n = A,T,C or G
actttctccttgttttaactaagctctaaaagaatctgttctagtggtactgagggttccaatttcactctttaatggcaggtatcagtttctacaaacaccagaggatcattcttctttttggtagccgttgtcatgttatgtcaactgagctctctagtggtctgagagtagagatgcatgccctttaatgcatcacgatgtttaaatgaactttctcatgtaatatgtttaacagaatgtaatcagttttaaatggacaattactgttttgagatgcattataacagagagattatattctcaggttccacatgaakgagaagggaagaaactgctaggggctggtgggtaaaaccaagagatactgacatatgtttattttgaacggtgaaaagaaagaacaaaagaaaaagaaaggacatagaaaaaaatnnnnnnnnnnnnttgcaaacgggactttttttagaggcaaatgttatccttgggccaagccatcgattttctaatact

SEQ ID NO: 460355 - DNA, 555 bp, Homo sapiens
attatgacatatgtgaaacacatgtttcagagggaatgcctgcttcagctacttcatatctacagcttctactgaacaggtgtaagtaggaggctatatttcaactcagtgactcctctcttacaccctgatgacccagtcacagctgtttcaatcaacactgtgttagtctgttttgtgttgttttaaacgaacacctgagactcggtaatttataaagaaaagaggcttatttggctcrcagttctacagactgtacaagcatggcaccaacatctgctcagtttctggtgagacctcaggaagcttttactcatggctgaagaaaaaaggtgagcaagtgtgtcagatggtgagagaaggacaagagaaatgagatgccaggctcttatcaacaaccagctttcatgaactaatagagttcacttattaccaagccattaatgaaggatccactctcgtgacccaagtagtccctacttccaacactggaggtcatatttcaacatgagatttggaggggacaaatatccaaaccatattaagcaccattca

SEQ ID NO: 460356 - DNA, 582 bp, Homo sapiens
aaaggtttctttttaatattttatgccagtgtgaagagaggcatgaagaagtattcatatacaatctcgtgcagcatttcagtcttaatttgttattgtatgctcttcaggacagggggaccaatgagttctctttggggattttgcagaaggacaataattgaccaaaagtaaaattttcacattgcagtggtgagaccattggtgggctataaaatgggtgtggggaaatgtaaactggaagttttattttaaaatgcaaaagaaaatactraattccactatatgtaatatggcaggtattatttccgtacattaggtgttaatatcatgactatttcttacttatcttgtattcaaaattcagcaagtgtgcttcaagcagaggctaaaagtctaatctattaattttcttgtttttcttcttgatttttttctatgctatacgaagagtactattgagaggggaatacagatcccatcaaagtctgatagaggctcagccttttctgtggagtagccacacatatgtggcacttccatgttggtaacctgaggtcatagtagaccaggggtccttct

SEQ ID NO: 460357 - DNA, 579 bp, Homo sapiens
atccggccagtgacttgacgcccttgtgtgttgcttgctgagccttcaagtgcatcatcttccagctggggagggttcttcatccccagagagggctctaaaaccagctctgaaaagaaaaccacagccaatgggatccgctgccatccatgatcttaccgtaactttctcttccacccagaggacatcaaatcaggaaagagccttggacaagaaagtccaaagggygaggggaagccgatagagtcactttaatactttcttttttgttgatctttcctacattactcagtaacgacaagattgccaggatccaaaggcactgccaagtcacaaaaatattccagaaacataggattcagaaacacaaatagcttccaggtagataaggcaaaggcaaggaaataacactgtatgtaggctatgctttggggagagaagagattacaaaaatcaaagttaaataagaactgggttcaaacaggagatgggaatggaagggcctggcagggtggcagcccatgtggcacagaggtgagaccagacataggtgacagcaactgatgagaggaaagaacc

SEQ ID NO: 460358 - DNA, 589 bp, Homo sapiens
atctattctctggtgtctcaaagacctgacattctgtgtcagaatgaaaatctgtctagtttcttcactttaaaaatgataaaactgcaggttcacaaagttactggtttacttgaggtcacacagggatgcattttgagcactgccaataaaaggaatcacaataattattcagtaattatttatagaatccatgtaattcaataaataaamataattatttattgaccaattcatactaggcattttgttcaaaactgtacacatacttggatatcatattttcatcataatccttaaggcaatgttattatccataagaaacaggtaagaaacctgaagaagagggatagcaaatcatgtatttggctatatttctattttttggtttctgtgatgctggaagaatgaccagaatgagtcatgggaatagcattcattcctgtgtcattttccaggacagaggtgtgccctccttcagcattgggaccgaaattcagaagtgtctgcaaccttgctttaacagtgtgggaaataacctctattacctggaatttcactggaactttggaatatacagagaaatatg

SEQ ID NO: 460359 - DNA, 626 bp, Homo sapiens
attttaaaatattcttctcagaattttatagatcaaacagaataaaaattataatgcatataaaataataaggtttagcttaattgatttatatagaaatttacatccaacaagcaaaaaatatacattattttttaggacacatgcatagaacatattttttaaaactgaccatttaataggcaacaaatgaagccacaataaattcccaggaatctatatcataccctctataattcctgactatatttcaatatcatacataacaaaaggatgtctttaaaagaaaaccctcagccagaaaattatgcacacacataaaataaagatattacctaattaatcctaggattaaagaggaaatctcagggagaagttgtaaaataaatggtgcctgaatgacaataaaaacactatatatcaaaatatatatggtatcagttggacctaggaaagaaaaactcatagaatacaggtactagtagtttgaaaaaaacataaaatacatccttcagaaaacatgaaatggtgaaaacatggaagcactctgtattagttagggctctccagaaagacaaaaccaataggatggatggatggayagatataagatagatagatagata

SEQ ID NO: 460360 - DNA, 512 bp, Homo sapiens
taagtggactttattttttaagtagtttcagattttcagaaaaattgagacgataacacagagagtcccatatgtccccacactcagtttccccattggtaacatttcacattattattgttataattaatgaaccaatatagctacattattattcactaaagtccatactttattcagagtttcttagyttttaactaatgtcctctttttgttttaggatcccagctgaaatggcacattctatttgtcatcacatctccttaggctcctcttggctatgatagtttctctttccctgtttttgataaccttgatagcttcaaggagtgctgatcaggtaattggcagaatgcccctctagtggaatttattccatattgctttttaattatttacttgtatgtatttctcccatattttcctatgatgttttgaagggaaagaccaagtcatctgtgtatctccaacacttagcattcaataaatatctgttgagtgaataaataaat

SEQ ID NO: 460361 - DNA, 464 bp, Homo sapiens
tgtcttcttaagacagtacataattatgaaccatgttagtagaaatatggatagtagaggccattcatgayaaagcctcaaatggaaatgatgaaacatgttattagaaactagaggaaagcccatccttgttataaagtggtaaaaaacttggctgaattgtgtttatgttctagtgttttgtggaatgtagaacttgtaagtgatgaaactggatacttagtggaggaaatttctaggcaaagtgttgaaggagtggcttacttcttcccgatcacttatagaaaaaggtaagagagaaataagttgaagatggaatcattaagcaaaaaggaaccagaacttaaatatttgaaaatttctgaactgttaatgttacgaaaaaatttttaaaaagcatgttcagaagagaacactaagggtgtggtgaactaaccacttgaaaaggagattcgtgtaagtgt

SEQ ID NO: 460362 - DNA, 464 bp, Homo sapiens
tgtcttcttaagacagtacataattatgaaccatgttagtagaaatatggatagtagaggccattcatgacaaagcctcaaatggaaatgatgaaacatgttattagaaactagaggaaagcccatccttgttataaagtggtaaaaaacttggctgaattgtgtttatgttctagtgttttgtggaatgtagaacttgtaagtgatgaaactggatacttagtggaggaaatttctaggcaaagtgttgaaggagtggcttacttcttcccgatcacttatagaaaaaggtaagagagaaataagttgaagatggaatcattaagcaaaaaggaaccagaacttaaatatttgaaaatttctgaactgttaatgttacraaaaaatttttaaaaagcatgttcagaagagaacactaagggtgtggtgaactaaccacttgaaaaggagattcgtgtaagtgt

SEQ ID NO: 460363 - DNA, 534 bp, Homo sapiens
gtaggactcggtcctggcagcattcatcacatgctaactgaagaacccctaggccctgaataaccagtagtgatacccaagaactatgtcaagagccttargtaagcctatgagacttcaggtgagactgagtatattacaagctgtggtgggtacaaggcaaaactccttctgcttgaaaaaagcatagggaaaagtaaaggaaacttaggcaccggcatggccacagtgggggaagggggtagagcactaaatgggctctttaggcccctgattccaagacttgactcttggatggcatttcttgacctgctgtggaccagagctgacctgaaagatcaggcagcattcaccacaagtggacttaagagaccttgggccttaagagaaaactggcagtagtctggcagtatcccagtattccccatggcctgtagtggtggtggcctttggaaaggggagggaagagtgggaaagactgtatcttgtggtttcaccgctttaggtggctcaaaacagaaaagagactttgtt

SEQ ID NO: 460364 - DNA, 534 bp, Homo sapiens
gtaggactcggtcctggcagcattcatcacatgctaactgaagaacccctaggccctgaataaccagtagtgatacccaagaactatgtcaagagccttaggtaagcctatgagacttcaggtgagactgagtatattacaagctgtggtgggtacaaggcaaaactccttctgcttgaaaaaagcatagggaaaagtaaaggaaacttargcaccggcatggccacagtgggggaagggggtagagcactaaatgggctctttaggcccctgattccaagacttgactcttggatggcatttcttgacctgctgtggaccagagctgacctgaaagatcaggcagcattcaccacaagtggacttaagagaccttgggccttaagagaaaactggcagtagtctggcagtatcccagtattccccatggcctgtagtggtggtggcctttggaaaggggagggaagagtgggaaagactgtatcttgtggtttcaccgctttaggtggctcaaaacagaaaagagactttgtt

SEQ ID NO: 460365 - DNA, 646 bp, Homo sapiens
cttgcatctggtcttcccatctttctagtcttttttgctgtgttgcccaggctggagtacaatggtgcaatcatggttcactgmaaccttcacttcctgacagaagagtgatcctcccacctcagccttccgagtagctggtgctacaggcacacttcatcacacctggctaatttttgtattttttgtagagatgaggtttcaccatgttgcccaggctggtctcgaactcctgggctcaggcaaaccacctgcctcaccctcacaaagtgctgggattacaggcataagccaccacacccagcctctattcatgtctttcatgagatccccagcttgaaataatttctccccttctcaatttccatagcacttcatattgatctttctataatttatcatttttattttagattattattgatgtgcatgttttatttccccttctagactacaagctacatggccaaaaatccctgtatgactcttctctcgatcctgcatagcgcctagcaaaataccttaaacttagtaggtgtacaatacaaatttactcactgaatgaataagtgattctatcaatcaatcaatcaatcaacaaaattgtttatcttcttggttcatatacagtaatacctgtgtccta

SEQ ID NO: 460366 - DNA, 522 bp, Homo sapiens
cagggttcaagcaattctcctgcctcagcctcccaagtagctgggattacaggcgcccgccaccacgcccggctaattttttgtatttttagtagagacgggatttcgccatgttggctaggctgatctcaaactcctgacctcaggtgatctgcccacctcggcctcccaaagtgctgggattgtaggcgtgagccaccgcgaccagccaaaccccagtttytagaaggaaaccaaaagagaattttaaacatatcttgaagaaaaaaaaaactacaagatatcaaaccttacaggatgcagcaaaagtagtactaagagggaattctatagcaatacatgcctggattaaaaaaaaaaaaaagatctcaaggaagcaacctaatatgaagaaactagcaaaagaaaaacaaactaatcccaaaattaacataaagaaggaactcatagagattagagagtagaaataaatcaaatagagaatagaaaggcaataaaagaaatcaataaagctgagttgct

SEQ ID NO: 460367 - DNA, 558 bp, Homo sapiens
ataggggaaaagcttcttgacattcatctgggcgatgatttttcagatatgataccaaagcataggtagcaaaagcaaaaataaacaagagcaattacatcaaactaaatatcttctgcatagcaaaggaaataactggcagagtgaaaaggcatcctacagaatgggagaaaatatttgcaaatcatatttctgataagagtttagtatgcaaaataggtaaggaactcacgcaactcaatagcaaaagaaacaaactgattgtaaaataaacaaagaacttgagtagacgtttcttcaaagaagacatacaaatggccaacaggtatatgaaaagctscttaacatcactaataatcagggaaatgcaagccaaaaccacagagaaatcacctcacaccttttagaaggactactatcagaaagacagaagataacaagtgttgaccaaaaaaaatgtgaattaaaaaaagaattcttatacactcatgatgggatataaattgctatatccatataaagaacaatatgtaggttcctcaaaaaattaaaaacaga

SEQ ID NO: 460368 - DNA, 567 bp, Homo sapiens
tacatactttaattaatctgacacatcaaagagaaaaggacaacttaaaaaaacagaaataacttaattaccagggaatttgagcataaacaagatgcgttgatggtacaaatatgttacaagattattaaagagtacattgaaatatgcaacgagaaaaggataaatgaaaatacatcgaactttcaacagtggatattcctgggtggcaaggtgttatgggttaatatgtgtctcccaaaattcatatgttgaagtcctaaccctcattccctcagaatgtgacctagagatagggtctttaacaagttaaagtgacatcattagggtgtgccctactctgactggcatccttatgaaaggaaatttggacactgagacatgacacacacagagaggaaacaatgtgaagagacagagaagactgccttctgcaagycaaggaaagagacctggaacagattattcctcgcacccctcaaaaggagccaaccctgccaacaccttgatttttgacttctagcctccagaaccaagacaataagtttctgttatttaagccagtca

SEQ ID NO: 460369 - DNA, 562 bp, Homo sapiens
tggcacatgtatacatatgtaactaacctgcacattgtgcacatgtaccctcaaacttaaagtataataataatttaaaaaaaaaagaaaagaaataatgaagctcaaagtgaaactgaaggagatagaaacatgaaaaacccttcaaaaaatcaacaaatctaggagctggttttttggaaaaaaaaaaaaaggcaataaaatagaccactagcaagactaataaagatgaaaagagagaaaattcaaataaacacaatcagaaatgatatgggggattcatgtacctcagcctcccaagtagctgtgactacaggcatgcactaccatgcctggctrattttttaccttgttgaccagactggtcttgaactcctgacctcaagtgatctgcctgcccagcctcccaaattgctgggactacatgtgtgagccaccatacctggcctgtttcattagtttctactcctatctttactatttcatcctcctttctttctgtttattttcctgtttagtttcctgggtttgaagtttaggtcatgggttggcaaactttggc

SEQ ID NO: 460370 - DNA, 607 bp, Homo sapiens
gatttttttactagaatctgaccatgtctttagaactgtagaaaatacaggtgatggaggaacaagttaaacaataccattaagaaacaatcaaacaaatcatgattgtggaatattctacaagacagttgagctgggttcttcaaaaagtcattgttgtggaaaaaacagtgttggtggtggactgttactagtcttgattaagagaataaacatagtaagggcaatgggtaaatttatttggatattagtttgaaaaaatctgtaaatggcattttggggacaattgggaaaatttgaatatagaataagtattgatggtatagaggttatttgtttgtttgtttatttatttatttatttatttttaaagagacagggctttgctatgttgcccaggctggcttcaaactcyggagctcaagtgatcctcctgccttagcatctcaagtaatagagaattatttttaaatttctaaaatataattatggcattgtggttatgtaagctaatctccttgtttttaggatatgtccaagtactttatggttaagtgtcatcatatctgtaacttactttcaaatggctcagatagacacacacaca

SEQ ID NO: 460371 - DNA, 510 bp, Homo sapiens
tgtggagagtgataatgaattaaaagacctgagaaagctgaatgctaaaccagtattgaaggaggccaagaatcaatccaattaacaccagagaatcccaaagtcacaagaattggtggcagtggttacctctagaatacaagtgtgcgtgtgtgcatatgtgtgtgtgcatgtgtgtgtgcatgtttgcatgcatgtgtgtgcacatgtgtgtgtgcatgtgtgtatgcatgtatgwgtgtgtgtgtgtaaaggtaggtctaaataaatagtgctaagttgcttatgagttagatcctgagatcctctccccagctccctccatagagatgggtggatgcaccctgtctatcccagcaggagatgggaggcttgttctctgaagaaggtccctggactagagatggaggcccagctgggagtgagggcaccatactgaagcaaaagggctgagtaaacacatatttatagatactgaaatccccatcccttttcccaaactcagctccc

SEQ ID NO: 460372 - DNA, 557 bp, Homo sapiens
gcatcagaaaagaagagaaggaggaggaggagagagaaaggaggagaagaaatatttgaagaaaaaatggatgaaaatgttccaaaattaatgaaaaacaacaaaccatggatttaagaagctcagagagaacccaggcaggataaataaaatgcacacatacacaaatatacaaaaacacacactaaacacatcagttaaactgctgaaagataaagtgaaaatattatgagcagctagatgaaaaaatgagtctgaagaggtaacaaaagaccagatcacaaggaatttatatgcagatcacaaggagtttttataccatgcaaacaacttyggatttttttccttcctgatggcaaagagaagacactagcacattttaaacagggaagtgttctgatcaaatctgcattttacaaagatctctctagcagcagtgtggagaatgatttggaggcggtaaatcataaaaatggataagtctgttgtgatatattcctatagggaaacaaaacagagaaaacaaatgaaccagagctaaacatattaccatggat

SEQ ID NO: 460373 - DNA, 410 bp, Homo sapiens
cattggcaggacattcaagtgatgatgttcagcaagccgttagaaacttagaattccacgaagtggtcagaggtggagatgtgttccaggaaagaaagatacaaaaataacagctgaaattgtgagagtgagtcatctccctgaagaagccagtggagaagggagagaagaaggccaaggaaagacattgaaggatgtcccctccaaagagaggacaacatagaaggacccatggagacaaacaaagtgtgttccagaagaagcagggtaatagaaagaaaaaagcatcataaagccrtagaataggagagcttcgtagacaaaagcgggtaaaatggtattaaatgttaccatacagaaggtaataactactaaaaggcttttggaaatgatgaggtctttggcaattc

SEQ ID NO: 460374 - DNA, 513 bp, Homo sapiens
gctagtgtttctagcctagatgctggccagatgcaaaagtgcaccctctctagaagaatataacagcattcggagcctcaaattatctattttaatatatattatctgatacctatcaagacataatcagtcataaaggaagataagatatgaccaaacaaagagacaataggaaaagcagacccataaggatttcagataataaacagacacaaactttaaaacaaccatgattaatatgtttaagratataaaatttttgatgaataactggaaattatgcttataaagtataaaaagtaaaccaaatggaaattctaatatggataaatattatgaatgaaattaacatattggataggtttaacatcagattagacacagctgaaaagagaattagtaaacttagaagctaggtcagaaaaaatatatctaagatgaaacaaacaagcaaaaagatgataaatatcaaaaaccaagagataaataggacattgtgaaatgttctaacat

SEQ ID NO: 460375 - DNA, 618 bp, Homo sapiens
ctttgatacagtcttgtgctaaagtcttcttttttaaattttcgcatccccaaatgctgctttataagatgctcatacattactaatgtttatatgtgaaatattgaacatctgttcttatgagttttttaaattcaacattctttcaaggtattctttaggttttgaatttacttcttttgttttctatgtaaatgctacataaggttgatggtcttatgagctttattagctagcatatctctacaaataacatactatagttttagaatattagtgtcaattatggctacaaaactgaactcaatatgtgaggaattatacttctgagtaaaactagtacaaactcttttcgtagtagtttaatttccttggaatcacttccatagwcatcatctgttttactattggtgctgctgtgcattagcaaaggtgtgtcttttcttgatgaaaacaagtctagggagagctgcattggcacctcttaattacagttgagtagtattatgaaagaccgcttcctaagtaagctaatatttttgttatttattttttcaattggaacgcaatcactgtgtatgaactgatcagattacagtaataattgtggcacacacc

SEQ ID NO: 460376 - DNA, 459 bp, Homo sapiens
ttatttgttcacagttatgcaggtcagaaatccagaatggctcaactgggttctcggctcaggatgttacaaggccaaaatcaagatattggccaggctgggctcttatctggaggctctaggtgagaatctgattccaacttcattcaagttgttggccaagtacagttaatgtggttgtaggactggagtcctcattttctagttgactatcaacagaaggcctctctcagctcttaaggccactacactccctctcaagtggctccaccatcttcaagcaagcaacaatgcatcaaattccgcttatacttgaaagagacttgaacccaccactagaacctttagaggaaatccagmacactcactgttcctcacaatctaaatgatataactcctatgcttagagaattggctccttctctgtttattagcaggctgtgcttgagcaagtcaagc

SEQ ID NO: 460377 - DNA, 497 bp, Homo sapiens
cccaatttttatacagtggtttaggagaaaattataggatttgcctatagatggatatgtcctccatataaatgtcttaaaggagacatgatatatatcataagtgttttattctgctgtgaaatttagcctaacatgttaatgccagataaaggcctaatttttatgtgatggttaggagaaaattataggatttgcctataggtgggtatgtcctccatgtacatttctttaaggatgtgatctgcaaaggcttaagaagcaggtttgctgaggagaaagaagagtttgagrttgcagattaggaactttaagatgcagaaccaaaaattaattgggaacatagagaaacaaccattgcaaactaaacaacatacaagttgtttgttgttttagccatatttgtacttagatagtaaacatcattttccagtatgaaaaacagtagagatgttctgcaacttacagcggggttatgtcctaataaacctatcata

SEQ ID NO: 460378 - DNA, 557 bp, Homo sapiens
gctcagtcttcaagacagtgcaataccaatgtgaaatgtctactccttctgttgctgtttttaaaaatgaaatactcgcaggtacagacggttaggaaaagaaatagataaagaaaaaaatagttttattgttttcttttattgtaaaagtaatacatgctcactgaattttaaaaaaatagaccatattaaaaaggaagaaaaaaagacaaaccagtctwattgccccacccagagttagaactactgttaatgttctttacatttgttcttcagatgttttttaaggctggcaggcaccagcacacactcatacacatcttttcaaaaacaaacatgagatctttgcatacatgctgtttgtaatttttttagttaatattatatggttctccttccatatcaatcaatgcaaaatagcagcatcattctaatggctgagtagtacatgaccttatacctacacatggtttatgtttccaactgagaaacatttaagtggtttctaattttcacttttctagacagtgttgaaataaatatgcttatgttcatcc

SEQ ID NO: 460379 - DNA, 411 bp, Homo sapiens
agcaaaactgtgtcaacagcagtctgtgtttctggtgtccagaagcactcctttcatctatcctgtaaaatactcagcagagtgtcagaaaacatttttgttagctgtatcagcaaaatgcacactacaatctgagcaatctataatgactacatattgttaatggcaatcaccattagctctttatcttcacacttacataaggtttctcatttaatcttctcaacagccctatgagacaggtatcatctccactttacaaatgagaaaactgaagcttctcagaaagtgaaaaagaacgtgtgccacaactgggattttttttttcgttgttgttatactaggatacatgtgcacaacatgcaggtytgttacataggtatacatgtgccatgttggtttgctgcaccc

SEQ ID NO: 460380 - DNA, 568 bp, Homo sapiens
aatcaattcatcttgaaaactattaaataaatggaaagaaaaaagtatcatcctgtctttctgtatgaactagtccactccataaccaaattgcagatgtgtgaagtgtctccttataaagagttttacactaaataaactgcaagaaataatagaattaaaatttcactatttccaaatcccagggaagtaatgaatcaaggcattgagcatcaagagctgcaactacagaaagaaatgaccagacattatgtgcctcttctccacagaacacaccacggcctacggccttaggagaaaggattaagcatgaatctgatcaagactttggmtccaactaccaatttgcgggaaatacacaggatggaggaagatgttgactcaagctatgattatgtaatttaaaaatccacactgtagataactattcaggtcaaatgcaacagataaattttaagaggaagagatggagggaaaactagagattaagagacttaacagctgttaattttttaaatggacaagattatactgtctattgatgtacatttagataataaaagtattt

SEQ ID NO: 460381 - DNA, 551 bp, Homo sapiens
aaagttcttccaagcagaaatatttcttaagtcaagctcctctaaaacaagaataataaaaccagcacatctggtataacctattttattattattttgttaacaaaatattaatgtcttattcacatatttaactgtaagcccaagtcacaatcctgttcttctcagaggtggcagttgarcctgatggtaaaaatctggcaggaacagcctctagtcaccggggacacaggtttcagaagtcctaaacagatttagcaaaactctatccttatgacttagttatggtcattaacgagactcactgtggattgtcttttcaatgggaaggtcctgcctgaagcagaaatgtgctgagtttgagtctgaactctgcctttgaaaagcaggcaggagtatccatgtatgacacatgaaagatctgctttatgaaagttatataaacataatttcaggccccatccatggtcagttagtgcacttagggccacatattctcattggaagtgtccttgtcacacttgtggtttgacagggagaccagcttattc

SEQ ID NO: 460382 - DNA, 389 bp, Homo sapiens
cccccaccacctagatttcatggaaggtaacactttgcagtgtttgcctcataattattttcataaagttttcagagtcaggttccactgactaataagccagtcttccttgtggttcacacacagagaagcagggtagtagagaggataaaaagggaccctgagctgcctgcctgaactcaaatccagcttccctactagctgtrtggctatggacaagttacacaatctttctgtgaatccatttcccttctgaaaaatgggaatggtcatactaatatctacctcctcgttgctatcatcaggattgagtgagtcggtaaattgcctagactgaggctggttgttattccttcttggttgttattccttcaagatgtggctacaac

SEQ ID NO: 460383 - DNA, 593 bp, Homo sapiens
tagaattctagtagataatactaaataatttttccatgatcttggacatgtcaagaaaaaatgggtaaattggagtacattgaaattacaagcttcagttcacagaagacaccatgaagagaatgaaaaaggaagctatagaataggagaagaaatttacaataaaaataattgacatagggcttattttcaggctacagaaagaactcccacaaagcagtgagaaaaaaacaacccaacagaagaaggaaaaatgacttaaacaggtacttcacaatatgggaaatgcaaatattaaataaatatgtatatgtaaaggtgtacaatcttattaatartcaggtaaatgcaaatcaggcattagagtctcataaggcacacgtaacctagatccctcacaaattaattaatgcaaattaatgcaaattaaaacaacaccaaaatattactatataagcaccagaacacataaaatgtaaaagactgacaataacaagtgttggcaaagatgtgaaacaacaggatctttcatacattgctagtgggaatgtagcctggacagccactttcaaaaatagtttcaggttagctac

SEQ ID NO: 460384 - DNA, 600 bp, Homo sapiens
gcaaatctgaaatacagatgcaaatggagtgagctagaaatgatttctctraagagccattttgaacaatgctgtaactgcttcttccctttgagacagccagaagcattgaccctggacattcaagctgaaaaaaatatcctttggtctggtcattatcaccattctgcttgatcaatggtagcctggttctcattgatccactccagcccccagacacacaagagaggtagcacaaggtagacgcatagtgaagccactatgagccaaaggcaattatgtttttccagtgcaaactcattttgctcagttcgggaaacagttatatctttgaagtcatttagcatgaatatttctcttcatcatcaataataagcacctctcttgtcccttcctctgtaggaaggctttctctgacgtttttaggcagagttgagatggtgccagaaacagcaagaacaaaaagatactaacactaaccctgtcttcaagagtctatatcttagcccaagaaatagcactcttcccagaaaacagtagaagatacacattatttacatcatcttagaactttgcatggataaatgaaatatttgacga

SEQ ID NO: 460385 - DNA, 315 bp, Homo sapiens
gatgtcaaactgggactgggacaatgcaactgtagggcaggggcagcccaggaccctgctggacacagacggtgccaccccaagtctcaactgtgactgggagaggccctgyaactaaatcattcaggataaataacaaagtcactacccttctctccactcagacccctatgattatatagtttgtagggaaacattattttaaaaatctacttaggaaatatttttttttcttattgtagcattgtcaaattgatactttaaaggatttaagactttaggttttaaaattgtttccaaatcttttcagaaagt

SEQ ID NO: 460386 - DNA, 662 bp, Homo sapiens
cctcctgtttaagtcatttctagatgacttataaaacctaaaacaaatgtaaacgctatgtaaataattgctctattatattgtttttatttgttcttttaattgttgcatattttattattttttccccraatatttttgatacatggttggctgaatttgcagatgcagaaaccatggacagggagggctgaatgtattattattgggcaccttccctaacgctggctcagaatgcccccctcagcagaattatctaccaagtattcttaagaggcaactccgtgtcttggaggccacatttccattttgcccacattgcagctgaatcctgggtaggagaacaagtgaagattttcacttcttgattttaaaattcgttaaggacctttgtggcctccttgaaaaatgtctgttacccagtcttcagagtgattaggaaagctatcagtcatgattaagatttcctcttcacaggtggaagaatggtccagggaactacgaacccagggttatccaggcttacagggctgaaagcccagaatgactcagtgctacatgttttaagggaaccaataaagatcattattgttactcagcaatgacattcctgccacacagcgcaggctctctacatttctatttacaatcttcatgttaat

SEQ ID NO: 460387 - DNA, 578 bp, Homo sapiens
gtggaacaaaacaagcctgttgtgtcccctgaaatgcaaataaaatctcttcttgctgtgaacctcgaatatccgagacagctgtcaatcagtttaagaagtttattttgccaaagttaaggacgcacgcccaygacacagcctcaggaggtcctgataacatgtgcccaaggtggtctgagcacaacttggttttatacattttagggagacatgagacatcaatcaatatatgtaagatgagcattggtttgatctggaaaggcagaacaacttgaagcaaaggactcacagtggggagggggcttccaggtctttggtagataagagacaaatggttgcattcttttcagtttctgattagctcttccaaaggaggcaatcaaatacacatttatctcagtgagcagagggataactttgaatagaatgggaggtgggtttgccctaagcagttcccagcttgacttttccctttagcttagtgatttgggaaacctgagacttattttcctttcacattgcccagagctctgggtttctctatctcagtgtctgtctggcctgcacccatcacc

SEQ ID NO: 460388 - DNA, 578 bp, Homo sapiens
gtggaacaaaacaagcctgttgtgtcccctgaaatgcaaataaaatctcttcttgctgtgaacctcgaatatccgagacagctgtcaatcagtttaagaagtttattttgccaaagttaaggacgcacgcccatgacacagcctcaggaggtcctgatracatgtgcccaaggtggtctgagcacaacttggttttatacattttagggagacatgagacatcaatcaatatatgtaagatgagcattggtttgatctggaaaggcagaacaacttgaagcaaaggactcacagtggggagggggcttccaggtctttggtagataagagacaaatggttgcattcttttcagtttctgattagctcttccaaaggaggcaatcaaatacacatttatctcagtgagcagagggataactttgaatagaatgggaggtgggtttgccctaagcagttcccagcttgacttttccctttagcttagtgatttgggaaacctgagacttattttcctttcacattgcccagagctctgggtttctctatctcagtgtctgtctggcctgcacccatcacc

SEQ ID NO: 460389 - DNA, 616 bp, Homo sapiens
tacttcattgtaaaattaaatataatcaaaatataattgaaacaaaaagattattaggaaaagtaattggagaaagtagaacaaaaataacattttcaaaaaaatggttattcgacactttttatgtgccagacaattttctaagtattttaaatawgttaactcatttaagcctcataacaaccctatggaataagtaccattattattgacagttttacaaataaggatgtaagaaacaaagatgttaagtaacttgcataaagtcacactttaaaatcagtagaagagaaaatattcaaacagaggctaccaatagcacagttataagtatgcatccatgttggcatttatcaccttttaaaatttttctttatgttgtgtcatattgtatatgaaattattgtatatataatttcattattcattacttaatattttcagcaaataatatttaattgagcaggactttgagacattaagatgaactgtgctgtttcatctgaacttgaaatttttttagttctgccttacgaaaaagcctttttataccctgatatctgaatatttagcagtgaggtccaccattgatattaaattcttctcgatggcaaat

SEQ ID NO: 460390 - DNA, 616 bp, Homo sapiens
tacttcattgtaaaattaaatataatcaaaatataattgaaacaaaaagattattaggaaaagtaattggagaaagtagaacaaaaataacattttcaaaaaaatggttattcgacactttttatgtgccagacaattttctaagtattttaaataagttaactcatttaagcctcataacarccctatggaataagtaccattattattgacagttttacaaataaggatgtaagaaacaaagatgttaagtaacttgcataaagtcacactttaaaatcagtagaagagaaaatattcaaacagaggctaccaatagcacagttataagtatgcatccatgttggcatttatcaccttttaaaatttttctttatgttgtgtcatattgtatatgaaattattgtatatataatttcattattcattacttaatattttcagcaaataatatttaattgagcaggactttgagacattaagatgaactgtgctgtttcatctgaacttgaaatttttttagttctgccttacgaaaaagcctttttataccctgatatctgaatatttagcagtgaggtccaccattgatattaaattcttctcgatggcaaat

SEQ ID NO: 460391 - DNA, 634 bp, Homo sapiens
ttgcaaactctggaccagttaattcactttggcaagttctaccttataatcgatcgtactgtggtctgctttatcaggatttggtgataacagttcacattttttttcctgccacaaatcatttcccaatatcagaacattcagttttgagaattttgactttgtccagatttagactttatgcatttatctaacttaatgcttacaaacagtgagtcagcctttgggctgacagatctctcaaacctactgcgaggtgccagaagctcttatggctctcaagtgacacatccatttgttgattacaaaagtcgttgccttttgttctcactcatactagctactaagatacaaacacccagacatgcacatccacgcayacacacagagaagcacatgcacacacagaactcacaatctcaagcaacaataaagatgacttaattgagttaatgcctttactcctgtgttctcaataacattacccaataactcctcttcagttgtccctgatgcacccaaatatttcagtcattgttgaagatctcaggatggctgccatttatgccaggatggagaaagaagccttattacagtgagaaaatctcaaatctcagtctttgggcaaacggaa

SEQ ID NO: 460392 - DNA, 534 bp, Homo sapiens
ccatttgtggttctgcattttaccaattctggtagccatctataaccaatatatgtatttacattcttaacaggaaagcttgaacagattcagaaatctcataactgtatctggcaaggtaagcacagatgctcctagacctgtgatagggttagttcctataacccagtgtaagttgaaaatatcataaagagaaaatgcatttaatacacctatcctaccaaatgtcatagcttagcctagcctctcttaartgtgctcagaacacttacattagccttcagttgggcaaaatcatctaacacaaagtctattttataataaagtgttaagtatctcatgtaacttattgaattctatactggaagtgaaaaacagaacagctgtataggtactcaaagtgtaatttttactgataatatttattacttttgcaacatcataaagtcaaatatcataagtcaaaccatcatacatcggggaccgtccctttagtgttcagatttttctgtgttacagtctaccaattacatg

SEQ ID NO: 460393 - DNA, 534 bp, Homo sapiens
ccatttgtggttctgcattttaccaattctggtagccatctataaccaatatatgtatttacattcttaacaggaaagcttgaacagattcagaaatctcataactgtatctggcaaggtaagcacagatgctcctagacctgtgatagggttagttcctataacccagtgtaagttgaaaatatcataaagagaaaatgcatttaatacacctatcctaccaaatgtcatagcttagcctagcctctcttaaatgtgctcagaacacttacattagccttcagttgggcaaaatcatctaacacaaagtctattttataataaagtgttaartatctcatgtaacttattgaattctatactggaagtgaaaaacagaacagctgtataggtactcaaagtgtaatttttactgataatatttattacttttgcaacatcataaagtcaaatatcataagtcaaaccatcatacatcggggaccgtccctttagtgttcagatttttctgtgttacagtctaccaattacatg

SEQ ID NO: 460394 - DNA, 534 bp, Homo sapiens
ccatttgtggttctgcattttaccaattctggtagccatctataaccaatatatgtatttacattcttaacaggaaagcttgaacagattcagaaatctcataactgtatctggcaaggtaagcacagatgctcctagacctgtgatagggttagttcctataacccagtgtaagttgaaaatatcataaagagaaaatgcatttaatacacctatcctaccaaatgtcatagcttagcctagcctctcttaaatgtgctcagaacacttacattagccttcagttgggcaaaatcatctaacacaaagtctattttataataaagtgttaagtatctcatgtaacttaytgaattctatactggaagtgaaaaacagaacagctgtataggtactcaaagtgtaatttttactgataatatttattacttttgcaacatcataaagtcaaatatcataagtcaaaccatcatacatcggggaccgtccctttagtgttcagatttttctgtgttacagtctaccaattacatg

SEQ ID NO: 460395 - DNA, 534 bp, Homo sapiens
ccatttgtggttctgcattttaccaattctggtagccatctataaccaatatatgtatttacattcttaacaggaaagcttgaacagattcagaaatctcataactgtatctggcaaggtaagcacagatgctcctagacctgtgatagggttagttcctataacccagtgtaagttgaaaatatcataaagagaaaatgcatttaatacacctatcctaccaaatgtcatagcttagcctagcctctcttaaatgtgctcagaacacttacattagccttcagttgggcaaaatcatctaacacaaagtctattttataataaagtgttaagtatctcatgtaacttattgaattctatactggaagtgaaaaacagaacagctgtataggtactcaaagtgtaatttttactgataatatttattacttttgcaacatcataaagtcaaatatcataagtcaaaccatcatacatcggggaccgtccctttartgttcagatttttctgtgttacagtctaccaattacatg

SEQ ID NO: 460396 - DNA, 532 bp, Homo sapiens
  misc_feature (1)...(532): n = A,T,C or G
ggcaggctcaactaattcaaatttctcaggccatcaaacaagaatgtaaagccccatttctttaaagggcttgaagaaagcaccagttatcatccagaataccttttagttaaagtgatacctaaactttaccagactaatgaattgagaccatttcatatgaatattattctctaccccatttatttaatgcagtatctaaaagactgtacactcttcatctgcctggtaagaggatatgttagatacayatctattcacagctcaaagtcactgtggattcattaatagcccttctcattgtaaaatagtacattctgcaaacacttcacatgacctatcagtcaacccaattatatttatgaagtgtctttcatgtgtccatcccacagtgaaatgtggacttcatataaaagaagatacaatacatatttaaaaggctaaatcaaacaaataagtttttaaattaaacctacaatccancagtaattcaaagttctcatgcataaaagaatagattcttgagttgaaa

SEQ ID NO: 460397 - DNA, 596 bp, Homo sapiens
gtctatcaatgttactggatttaatatattaaataagtcacatataggagaaaaaagttaaaacataagagacaaaagaatggacatagaaaaattaataacaatttaaatatatgtgtctgtataaatatatattatattgtgaaaacagaatgatgtatgatcattttaacagatacgaaaagttttgattgaactgaaaaagaattgacttttaaaatttgaaaaatggttacttcctctaattttttaaaaaattactatgtaygaaagaactgaagcctgttccgtcaattcaagatgactcacaagtgctctgaggggcatgtttcaacctccctagctgcagccagctcacttaacctacttttttttttttttttttttggtctttttgactacaagcatgtttctggtggcctttggatgttggattttaacaacaaccttagagaaattgttaaaaagatttatgtacatacttaatatggaatactctgcagctttaataatgcagacagatctccaagacgtatttttatatgaaaaggcaagttgctgagctatatgaaaagtatgttcaaattcatatttta

SEQ ID NO: 460398 - DNA, 537 bp, Homo sapiens
atttctgacataagctatatttatactcaaagaaagattaacccatttttagaataaaataatgctgtactgttactgttgtaataatactgttactaatacatcaatttctaatgtatcaaaatatattcttctactctaataattgataaataaattttaaaacctcaatgtttatcttaaaattcacctacaaaaatttcagtattaaagacaaagaaaatacttcattgaatgtgattgaaagaatgctcatatgtggagaacaacagagcacactggaaaaatattttcgccccctctcttgcctatggtttatatgtctcaatttagtaaatattaattttgaaagccaaaacatatatggtggcaattgcgagtgaacaaatctggcctaatcrttacagagttggatgtaatatatctgggaaaatagttataaccattccatgaatgaatagatggaacaaatcctcaatgtgaaacagtattgggatttctaaataagtgtttagtccaagactaaatcttctgttg

SEQ ID NO: 460399 - DNA, 601 bp, Homo sapiens
aaaatccccgagaagaagacaaaggctatgcattaatctatacaaggaaataaatataaatgcaarggatttcaccaaaaatataatgccagtcacacaattgatagtgaaaacactgaaatccatcagataaatgaaaagaattatacaacatgggaagtacaaaagattaatttcttgttatttatcaaaaaatgttaatgttcatggaattaatgaagtatttaagtatcatttatttatacatgatagtcacaattaacttctgttacatgatactcaggctcttgagagtttatgacattagcaatcatttagtgataaagtataaatctgaagaatttctgaaggagctaacgcaacatttttttgccaaaaaataaaaaatatttgtatcttacatcttagcaaatcttagaagctgttttgaagaaaccattcaaaattttaggtataaagacaagattgtgattttacttatattagtacaagcttggaaatataaaagaaaaactaattaaatattgcaacttaaactatacaatagaaatcgtatattatgcacccattaaatatttgtttagacatttcaaaatgtata

SEQ ID NO: 460400 - DNA, 601 bp, Homo sapiens
aaaatccccgagaagaagacaaaggctatgcattaatctatacaaggaaataaatataaatgcaagggatttcaccaaaaatataatgccagtcacacaattgatagtgaaaacactgaaatccatcagataaatgaaaagaattatacaacatgggaagtacaaaagattaatttcttgttatttatcaaaaaatgttaatgttcatggaattaatgaagtatttaagtatcatttatttatayatgatagtcacaattaacttctgttacatgatactcaggctcttgagagtttatgacattagcaatcatttagtgataaagtataaatctgaagaatttctgaaggagctaacgcaacatttttttgccaaaaaataaaaaatatttgtatcttacatcttagcaaatcttagaagctgttttgaagaaaccattcaaaattttaggtataaagacaagattgtgattttacttatattagtacaagcttggaaatataaaagaaaaactaattaaatattgcaacttaaactatacaatagaaatcgtatattatgcacccattaaatatttgtttagacatttcaaaatgtata

SEQ ID NO: 460401 - DNA, 601 bp, Homo sapiens
aaaatccccgagaagaagacaaaggctatgcattaatctatacaaggaaataaatataaatgcaagggatttcaccaaaaatataatgccagtcacacaattgatagtgaaaacactgaaatccatcagataaatgaaaagaattatacaacatgggaagtacaaaagattaatttcttgttatttatcaaaaaatgttaatgttcatggaattaatgaagtatttaagtatcatttatttatacatgatagtcacaattaacttctgttacatgatactcaggctcttgagagtttatgacattagcaatcatttagtgataaagtataaatmtgaagaatttctgaaggagctaacgcaacatttttttgccaaaaaataaaaaatatttgtatcttacatcttagcaaatcttagaagctgttttgaagaaaccattcaaaattttaggtataaagacaagattgtgattttacttatattagtacaagcttggaaatataaaagaaaaactaattaaatattgcaacttaaactatacaatagaaatcgtatattatgcacccattaaatatttgtttagacatttcaaaatgtata

SEQ ID NO: 460402 - DNA, 601 bp, Homo sapiens
aaaatccccgagaagaagacaaaggctatgcattaatctatacaaggaaataaatataaatgcaagggatttcaccaaaaatataatgccagtcacacaattgatagtgaaaacactgaaatccatcagataaatgaaaagaattatacaacatgggaagtacaaaagattaatttcttgttatttatcaaaaaatgttaatgttcatggaattaatgaagtatttaagtatcatttatttatacatgatagtcacaattaacttctgttacatgatactcaggctcttgagagtttatgacattagcaatcatttagtgataaagtataaatctgaagaatttctgaaggagctaacgcaacatttttttgccaaaaaataaaaaatatttgtatcttacatcttagcaaatcttagaagctgttttgaagaaaccattcaaaattttaggtataaagacaagattgtgattttacttatattagtacaagcttggamatataaaagaaaaactaattaaatattgcaacttaaactatacaatagaaatcgtatattatgcacccattaaatatttgtttagacatttcaaaatgtata

SEQ ID NO: 460403 - DNA, 496 bp, Homo sapiens
acaatgacaaagtaggaatgtctttgttatgctctttaaacactgaataagaaattcatacaattaaactccaataatgatatgtttatatgatataagatctaacatactctttcactgataagaagctatctttaagatctcaggttggtctgcttcagaaacatgtggctctgacagatagatagacagtcatgccctgccaagcaggctaaatcttagagtgcaggtatccacaagygagccaaagtcaaactcagaaagacaatttgggcagctcaataaaacactggaaaacgtgtttgtagaggttgttaggattattatctcttgcaatccaacacgttattagggcagtttgctaaattttgtaggttttgctttctatcatttcaagcattatttatcagaaacaaattctacttctcaatggttactctaagtactgaaacagaaatcttgctctgcttcactcttatagttaagagtgaaacaa

SEQ ID NO: 460404 - DNA, 496 bp, Homo sapiens
acaatgacaaagtaggaatgtctttgttatgctctttaaacactgaataagaaattcatacaattaaactccaataatgatatgtttatatgatataagatctaacatactctttcactgataagaagctatctttaagatctcaggttggtctgcttcagaaacatgtggctctgacagatagatagacagtcatgccctgccaagcaggctaaatcttagagtgcaggtatccacaagtgagccaaagtcaaactcagaaagacaatttgggcagctcaataaaacactggaaaacgtgtttgtagaggttgttaggattattatctcttgcaatccaacacgttattagggcagtttgctaaattttgtaggttttgctttctatcatttcaagcattatttatcagaaacaaattctayttctcaatggttactctaagtactgaaacagaaatcttgctctgcttcactcttatagttaagagtgaaacaa

SEQ ID NO: 460405 - DNA, 584 bp, Homo sapiens
aaacaacagcgggcaagaaccagagtgcctttctatggttactactgcggctatgttcagaagctatatgggggtctatacagtcacaggctcgcataaaaatattcttcaattaataaatacactgggaagaatgkgtattacagtaaccataatttgtggttgcatgagtgctagaggcttgtaaagcttagaagaacagacacagagaaggctgaaatgagtatcatctttgctttcccaaagccagccaagtgtcagctagagcttttcacagctatgacaagctttctccagcccttgctggtgagacctaagactagtgccgtgaagtaaaatgatactctcctggtttcctttgcacagggcaaccaacaattctcctttcatttctttgattggcctcaataattctgaagatattcagaagttcaatcaaatatagcttgtagaagcagcagcccaccacacttatatatgcctgctcatattcatttaaatctcttccacattctctgaatcaaaagctacctggtccagtagccatgttaccaaagtctttaatctcaatattaacatgcact

SEQ ID NO: 460406 - DNA, 584 bp, Homo sapiens
aaacaacagcgggcaagaaccagagtgcctttctatggttactactgcggctatgttcagaagctatatgggggtctatacagtcacaggctcgcataaaaatattcttcaattaataaatacactgggaagaatgtgtattacagtaaccataatttgtggttgcatgagtgctagaggcttgtaaagcttagaagaacagacacagagaaggctgaaatgagtatcatctttgctttcccaaagccagccaagtgtcagctagagcttttcacagctatgacaagctttctccagcccttgctggtgagacctaagactagtgccgtgaagtaaamtgatactctcctggtttcctttgcacagggcaaccaacaattctcctttcatttctttgattggcctcaataattctgaagatattcagaagttcaatcaaatatagcttgtagaagcagcagcccaccacacttatatatgcctgctcatattcatttaaatctcttccacattctctgaatcaaaagctacctggtccagtagccatgttaccaaagtctttaatctcaatattaacatgcact

SEQ ID NO: 460407 - DNA, 561 bp, Homo sapiens
agttaactcagcaactcaatgtcagaggtgctgtttttgtttttgcaaaaagtctacagcagcttttaaaaatcacattttcatagagcaacacttgaaagctggaaggaagggcaaggagattctctcagtgagtattttataaagtgagaaaactttcctagaattctcaacttttgtgccttattggctaaaatagaataatttactagggtgcttaccgcaagggaggctgggaaaactagcacccagccttttcaacctttgtaacgagagttgagtcacaccagcagagagaagaaagtgaagaatggctgctaagttaacaaatgtaratctgtcagaaagaacattcaggtcacacatacagagagaagcatgataatatcatataactaaacctattgagtaaagagacagccagcacattgagatggtattacaaaggagtggcaaagactgtaagctaggcttaatataaaatgtgagaatttgtggttaccaagtaagtggtctaaaatatcctagggctgatcaacatagaaaaggcattagaagact

SEQ ID NO: 460408 - DNA, 509 bp, Homo sapiens
actattaaaaaatgactaaagtgtcctcaatgcttcacataaatttaaaaaataaagcacaagctttccaagaaatgtctagccatgagctccttaggactttattctttttctcctaggaggtttgcattatgtctcatctattataatagcaytcatataaaaagttttagaagccctgtttaaaatattttcttaatctatgtgttgccataaatacatctacggaaatagaaattactttttaaaatctgtatgaaaccaaagcccattctttccttaactcaattcgtgatataccaactttttctttccttccttatttatttatttttttttgtgagacacagtttcactcttgtcaccaggctggagtgcaatggtgagacactggctcactgcaacctccgcctcccaggttcaagcgattctcctccttcagcctccagagcagctggaattacaaccaaccgccaccacgcccagctaattttttgtatgttagagac

SEQ ID NO: 460409 - DNA, 509 bp, Homo sapiens
actattaaaaaatgactaaagtgtcctcaatgcttcacataaatttaaaaaataaagcacaagctttccaagaaatgtctagccatgagctccttaggactttattctttttctcctaggaggtttgcattatgtctcatctattataatagcactcatataaaaagttttagaagccctgtttaaaatattttcttaatctatgtgttgccataaatacatctacggaaatagaaattactttttaaaatctgtatgaaaccaaagcccattctttcmttaactcaattcgtgatataccaactttttctttccttccttatttatttatttttttttgtgagacacagtttcactcttgtcaccaggctggagtgcaatggtgagacactggctcactgcaacctccgcctcccaggttcaagcgattctcctccttcagcctccagagcagctggaattacaaccaaccgccaccacgcccagctaattttttgtatgttagagac

SEQ ID NO: 460410 - DNA, 352 bp, Homo sapiens
tttttaaggatattaacagtcttatcactacatgattattaattcataatacattggaaaagaaggatttctgataaacagtaaactagtagctttttaatttgatgacatagctaaagaaatgagtgatgctgacaaaattttctgtagaatgtaggactaaccaagtccaattaagaaaaaagccaaagaaatagagcacatgacacacagtgccgtatgtatatatatatatakagagagagagaaatcttaaatacttgctgaagaaaacagcacatcaattagtgccactggaaatagccagactgaattatgaagaaatgtcaggagtggaaaataagagaaagtt

SEQ ID NO: 460411 - DNA, 557 bp, Homo sapiens
attcaattttcaaaatataagcacctctaagtaagttttctgtccagttagctgttctgttctgttctgaccatcttcttctcttactttcttcttctttctttcttttaacttttattttaggttcagaggtatgtgtacaggtttgttataaagataaattgcatgtcagtgggtttagtgaacatattatttcatcacccaagtaataagcatagcaccgaataggaattttttttatcctctcccttttcccaccctccaccctcaagtaggccccagtgtctgttgctcccttctttgtgtccatatgttctcagtgtttagctcgcacctataagtgagaacatgtggtacttggttttctgtttctgcattagtttgygtaggataatggcctccaactccatccatgttgctgcaaagaatatgatcttgtccttttttttggttgcacagtactccatggtgtatatataccacattttctttatccagtctactgttgatgggcatttagattgattccatgtctttgcttttgtgaatagtgctga

SEQ ID NO: 460412 - DNA, 644 bp, Homo sapiens
tagccgtacgtataggcaaatgcttcatacacaaattacttaaatcactcaaacattttgaaatactgtgcaaatttacatttatcaaagagagccattaaaatgtctatagagacagagccgtcttgtggagtggctaattctgccattctcttcctcaaatgaatmtaaataacttttacaggctgccactttcattgttacagtgactcccaaatactttcccacacagtatgtgattttgaattatgcccatcaatgatctcccttctatttttgcccacaaaaagcacaataagtgacttctattgatctttgctgaagaataaaatagtgatctaaagaggttcttgacagttagcacagttgtaaaatataggccccttcatcatgtgtcttgtaaattttggaacctaaggaaatagagatttttttgcgtgtgtctataaaactaagagcttgatataggattaaaagggtcattacataattaaggttttacaaagagccatataatatatgtactgcattcaaaacactttataatggtgtctaaatgtttgcattcttgccacaaccaatgttttataataacttaagatgatttaaatggtataatgtaggtggtaaaacagataaagtgc

SEQ ID NO: 460413 - DNA, 545 bp, Homo sapiens
cagtatgtgattttgaattatgcccatcaatgatctcccytctatttttgcccacaaaaagcacaataagtgacttctattgatctttgctgaagaataaaatagtgatctaaagaggttcttgacagttagcacagttgtaaaatataggccccttcatcatgtgtcttgtaaattttggaacctaaggaaatagagatttttttgcgtgtgtctataaaactaagagcttgatataggattaaaagggtcattacataattaaggttttacaaagagccatataatatatgtactgcattcaaaacactttataatggtgtctaaatgtttgcattcttgccacaaccaatgttttataataacttaagatgatttaaatggtataatgtaggtggtaaaacagataaagtgccactgatgtgttttataatattatctcttatgttctttgttgttagatataaaacatggtttatcaaatttgattaaagtcattaaaaaatgtagacaagtggctcagaaaattgttttaactcatagaa

SEQ ID NO: 460414 - DNA, 545 bp, Homo sapiens
cagtatgtgattttgaattatgcccatcaatgatctcccttctattttygcccacaaaaagcacaataagtgacttctattgatctttgctgaagaataaaatagtgatctaaagaggttcttgacagttagcacagttgtaaaatataggccccttcatcatgtgtcttgtaaattttggaacctaaggaaatagagatttttttgcgtgtgtctataaaactaagagcttgatataggattaaaagggtcattacataattaaggttttacaaagagccatataatatatgtactgcattcaaaacactttataatggtgtctaaatgtttgcattcttgccacaaccaatgttttataataacttaagatgatttaaatggtataatgtaggtggtaaaacagataaagtgccactgatgtgttttataatattatctcttatgttctttgttgttagatataaaacatggtttatcaaatttgattaaagtcattaaaaaatgtagacaagtggctcagaaaattgttttaactcatagaa

SEQ ID NO: 460415 - DNA, 590 bp, Homo sapiens
gcaggaggataattcagtctttaggctattaaatcagtgactccttagcacactcactctacagggatggcagcaacctcttatgatgatgtttcttgtgtgaggattstgtgatgttatacctttttccctgtgaggtagataacaatgttcaacacattacacaaaaactactgagcaggcatgcaatcaatactcaatccttttttgttgttttcatcaatgtcattttcgatgagtgctttaaaaatcatattaaatttgttttaatggtctcaatttagtgtcagaattgtgatcctttttcctacttattaaatgttttgatttttaaaaataaataacttaaaactgccacagcatcaaccatggtggtctataaaatgcttctttcttcctttagcattgatattattattcagtctttgtaattttctggggaagctccaatattcttcttgtcaaatgtctcaagaaaccctaaagatatggttatctcatatttattttctcatttcttcaccacgcatatggagggggtaaatgtaatacattaaaaaatagtaaatagtaacactaaaagagagggc

SEQ ID NO: 460416 - DNA, 608 bp, Homo sapiens
aaaacactgtcacaaagcatgattgccctctaggtctctagggcaaccaaaaaggaaacaaaaggcagaatatagaagttgttggatgttttttcttttaatacatgcaaaatgcacttactggcatgaatagattatcatatccctttatctttgaggcttatctgtagcatttttatacaaatagatttgatttcttagtgtatctgtggttattcagtgcataaaataaattgagggtggggttcttatactcggtctactgaaaacaagttttttacacagacactgcaacaatcatcactacattccctccctcctcatactcttctaactaggtatctgcattaagtgccaacaatatttttgaaagccaaaattatttgtgaaattaataatctgaaaaatgactctcatccagcttcaaattggccttttgtctcatttggtagtgttattcattactcaccaaccttatgaaattcacaaagagagacgcagcattattggtttctgaaataccagtgtgacttaatttctycagtaaatgggctaaaatagatgcatttaaaaaataatggtggatgggaaattttaatatgaagctt

SEQ ID NO: 460417 - DNA, 597 bp, Homo sapiens
accagtgtccttgaaaagatataatatgaaaaaaaaatcctttgctcaccactgaaatgttctttaactggaggtttcttgttcatagaaataaatccctgtgggtaatctctcacttataactgtgactgtctcccgcttatgcagaagaatgtaacaagagtagaaagaagtataaaagaggaatttgaaggggttttaccagtgcagtttgttggggaaggagcaacactaacatcaaggtaaaggaggcatgcaggaagcagtccgtcaggcaaagggaacacattgtggacttgaactaggagataaacacatggcaaagctcaacccaacaagagggaaaaggaagacgtcctgttgagtatgcaatgtcatacttttcggaaatagtatgttttaaatgtttaaattacaaaatcaaactgcaaaaaaaaattgatagagtggcactactttatttaaagatcctccatggtctccttttagagaacattttaaagataggtcctctatctctayagaaagataggcacctctctatcaaatataggttctcttctggtagagacccaaaacatgttccattagtagtac

SEQ ID NO: 460418 - DNA, 602 bp, Homo sapiens
agaaaacaaagtcatcagaaactttatcttccatctaacaaaacattaactcctacaatatgggcacccaccctattttccttgcttcctgtaataatggaaaaatgcttcttctttctttattttatttatttatttatttattttgagagggagtctcactctgtcacccaggctggagtgcagtggcgtgatctcggctcattgcaaccttcgactccctggttcaagcgattctcctgcctcagcctcccgagtagctgggattacacaccatgcaccaccatgcccagctaatttttgtatttttagtagagatggggtttcaccatgttggctaggatggtctcaatctcctgacygtgtgatccgcccgcctcagcctcccaaagttctgggattacaggtgtgagccaccttgcctggccttctctttctacataagagtattcccctgcaccttgcagtagtccccccttattctgagggaaataaatttcaagcattttaacctgtgctttccacgcatccatccaatcccatgtcaccctaccctctccatcctatggcatcatatcctggattccagagaaacttacagt

SEQ ID NO: 460419 - DNA, 545 bp, Homo sapiens
aatgtcaaataaatgtcaaaagatgaagaatggcaatctctactactttcatatatcctacatcatttgactcatatgtggagattatgtgtatatatayacacacacacacacacacacacacacacacacacacacacacatatatacatacatgaaatttaccagcactaagttttcatactgaaaaataagagaattgggttggaggaagagtgacattcttgtcttcccttcttaattatttaattttttaaaaggaatgagaacatttatcagtagattattatttgtcaggcactcttagaagcactatattaacttattgatatttttgataaccttataatgcaagagtattatgatagtatcctgattttttagatgcacagaattcaaacatgagcagttaaaacttgccaaagtcacagtgcctctaagcagcagagcagggtttctcaaccaagtagtcaggttctgagcttatccagcacatcaatctgtaactacccagtgggttctctttgcctgctgcctagacagag

SEQ ID NO: 460420 - DNA, 419 bp, Homo sapiens
atctgggggctcaactgggagagaatcagctttgaagtttcctcaagttattggcagtattcatttccttgctgctattgatcagatagcttctgtttcttgctagctgtgtgccataggctgcctggccacaaaaggtcatctcatctgtagttccttgcccagtggccatctccacaggcagttcacaagtcatgtgctttttcaaggctagaaagagtgagaaccagaactagcaaaaagagtcttatataatgtttcacaatcatgggcgtgacatccatcatgtttgttgtattcttttgattagargtgaagacaataaggatatgctactccaaaatatgccaatttggcataagaattattttgagttcttgaaatctattatctctttaaaagcctagcttcccaaaaga

SEQ ID NO: 460421 - DNA, 573 bp, Homo sapiens
tctcagttgaagcttcagatgacagcagacttcactgacagctcaattgcaacctcatgaggcgtactgagccagaaccacccaactaaggtgttcataggttcctgacccacagaaacagtgagatgataaatgtttgctgttttaactggctaagttttgtggtaatttttaatacmgaatgagatcacgagtgaaatggtgatagcaggcattcttgtctttttatctcggaaaagaaagtctaaatattttactgctaattgtaataacttttgtagtttgatttgtttgttttgtagacttttttaagattaaagtttccttcttttactagctttcttaaaggtgttttaaaaaatcatggaagggtgacaaatttcatcagattttttgccatatattgagatgtttatatgatttatctcatgaaaccaattacattggatttactttcaaatacaaaccaatcttgcatttcttaaactgaatattgtcataatttataattatttcatgttactgtgtcacataaactgtaatgtggtcctcatgatacccacctcctagtgt

SEQ ID NO: 460422 - DNA, 573 bp, Homo sapiens
tctcagttgaagcttcagatgacagcagacttcactgacagctcaattgcaacctcatgaggcgtactgagccagaaccacccaactaaggtgttcataggttcctgacccacagaaacagtgagatgataaatgtttgctgttttaactggctaagttttgtggtaatttttaatacagaatgagatcacgagtgaaatggtgatagcaggcattcttgtctttttatctcggaaaagaaagtctaaatattttactgctaattgtaataayttttgtagtttgatttgtttgttttgtagacttttttaagattaaagtttccttcttttactagctttcttaaaggtgttttaaaaaatcatggaagggtgacaaatttcatcagattttttgccatatattgagatgtttatatgatttatctcatgaaaccaattacattggatttactttcaaatacaaaccaatcttgcatttcttaaactgaatattgtcataatttataattatttcatgttactgtgtcacataaactgtaatgtggtcctcatgatacccacctcctagtgt

SEQ ID NO: 460423 - DNA, 601 bp, Homo sapiens
ttcgtttgtgggtgtgtatacatgtctatatgtgtttatttgtacacttattgtcatatattatgtctaccaaattggcttataagcaaaagagtgctcacaaatgaagtaaataagtccgagcaattttcagattcatgtgatttaggtagggctttggtaaatagactggctttaaaattatcagtaaaataaaaatagaaatgtcttcaaaatgtagacatggtctaaattatgcaagtcagaaaccaggttggctaaatgctttaaggtcataaactgcttttgacttttgaaaattgttcgacttttctgctctacagtttgataaagcctgaggacatatatcacattcctagctatgttggaaatagtcagatcttatctgcacctaagtatgtaaccaaaataacttactgsgtatttcaccaaaattaaaaattgctaagagctaacattaaaacatgtagtggagactatggaaaatatttacatgcaaggtatgtaagaaaagaaaaacgtgtctttagttaaaaaatataagtaggcatgggaatgtaaatttttgcctagtatagagggttgaaagattgttttaaat

SEQ ID NO: 460424 - DNA, 581 bp, Homo sapiens
  misc_feature (1)...(581): n = A,T,C or G
tcccttgatgtggtgctctccccatttccctaaaagtaggagttcctgagagccagacyacagtgatcactattgctcttctgggtctagccatccagtggagctgccacactccatgctggtgctgtggaatgtctgctagggatccagtaatatgacctctcctcaagttttcctagtggtgagtatctgcaccagctctgatgggggcagcaaaggaatgacatagactctgtgagatttcttggttatagatcaccttagtgttctggttttcttgaatgctctttgtaatattagtgaactgattacgtggacagactcagacctcctggttagccagatgttgcaggcaatgttgatggctgaagtcactcactggttttctcctttctccccactagattagctagatacagagtgccaattggtgcatccacaaaccctgagctagacacaggttgctgattggtgtgtttacaaaccttgagctagatacaggctgctgatcggtgtatttacaatcccctagctagacacaaaggttctccaagtccccaccaagactcaggagcctagnn

SEQ ID NO: 460425 - DNA, 527 bp, Homo sapiens
gttatttgcaaacaagtataatttgacttatttatttmtgatttggatgctctttagatctttctcttgtctgactgctctagctaggactcctagtactatgttgaataacagtggtgaaagtggacattcttattatgttccagatcttagaggaaagttttttggttttattccccattcagtatgatactagctatgtgtctgtcatatatggctttaattatgttgaggtatgtttattatctactcagttttttgacagtttttattataaagagatgatgaattttatcaaatgctttttcatcataaattaagatgttcatatggtgttttatctgttcattctgttgatatgatgtatcacattgattgaagagtgtattttgaaccatccttgcatcccagagataaacgttgcttggtcatgatgaattatctttgtaatgtattgttgaatttggttcgttagtattttgttgcgcatttttgcatcaaaatttatcagagatattggcttgtag

SEQ ID NO: 460426 - DNA, 580 bp, Homo sapiens
tatgcagtgccagttgtaatgtctctttttattcatttttggttttatttatttggattgtctcttttcttagtctgactaaatttttgtcaatcttgtttaacttttcaraaaggcaactttttgtttcattgatcttttgtattattttttatttcaatttcatttatttattctctgatcttattatttcttatcttctagtaattttgggttttgtttgctgttgcctttctagttctttaagatgcattgttagattgtttatttgaagtttttccccatttttaggtacttataaatataaacttccctctgagtaccgcttttgctctacccagtaggttttgatatgttgtgtttccattattatttgtcacaaaatatttttcaattttctacttaatatcttcattggcccactggcccatccaggagcatactatttaatttccatgtatttttatagtttccaaaattgctcctgttattgatttgtagtttcattccattggggtcagagatgatgcttgatactatctaatttttttgaatttttaaagatgttttgtgaccttat

SEQ ID NO: 460427 - DNA, 580 bp, Homo sapiens
tatgcagtgccagttgtaatgtctctttttattcatttttggttttatttatttggattgtctcttttcttagtctgactaaatttttgtcaatcttgtttaacttttcagaaaggcaactttttgtttcattgatcttttgtattwttttttatttcaatttcatttatttattctctgatcttattatttcttatcttctagtaattttgggttttgtttgctgttgcctttctagttctttaagatgcattgttagattgtttatttgaagtttttccccatttttaggtacttataaatataaacttccctctgagtaccgcttttgctctacccagtaggttttgatatgttgtgtttccattattatttgtcacaaaatatttttcaattttctacttaatatcttcattggcccactggcccatccaggagcatactatttaatttccatgtatttttatagtttccaaaattgctcctgttattgatttgtagtttcattccattggggtcagagatgatgcttgatactatctaatttttttgaatttttaaagatgttttgtgaccttat

SEQ ID NO: 460428 - DNA, 580 bp, Homo sapiens
tatgcagtgccagttgtaatgtctctttttattcatttttggttttatttatttggattgtctcttttcttagtctgactaaatttttgtcaatcttgtttaacttttcagaaaggcaactttttgtttcattgatcttttgtattattttttatttcaatttcatttatttattctctgatcttattatttcttatcttctagtaattttgggttttgtttgctgttgcctttctagttctttaagatgcattgttagattgtttatttgaagtttttccccatttttaggtacttataaatataaacttccctctgagtaccgcttttgctctaccyagtaggttttgatatgttgtgtttccattattatttgtcacaaaatatttttcaattttctacttaatatcttcattggcccactggcccatccaggagcatactatttaatttccatgtatttttatagtttccaaaattgctcctgttattgatttgtagtttcattccattggggtcagagatgatgcttgatactatctaatttttttgaatttttaaagatgttttgtgaccttat

SEQ ID NO: 460429 - DNA, 580 bp, Homo sapiens
tatgcagtgccagttgtaatgtctctttttattcatttttggttttatttatttggattgtctcttttcttagtctgactaaatttttgtcaatcttgtttaacttttcagaaaggcaactttttgtttcattgatcttttgtattattttttatttcaatttcatttatttattctctgatcttattatttcttatcttctagtaattttgggttttgtttgctgttgcctttctagttctttaagatgcattgttagattgtttatttgaagtttttccccatttttaggtacttataaatataaacttccctctgagtaccgcttttgctctacccagtaggttttgatatgttgtgtttccattattatttgtcacaaaatatttttcaattttctacttaatatcttcattgrcccactggcccatccaggagcatactatttaatttccatgtatttttatagtttccaaaattgctcctgttattgatttgtagtttcattccattggggtcagagatgatgcttgatactatctaatttttttgaatttttaaagatgttttgtgaccttat

SEQ ID NO: 460430 - DNA, 625 bp, Homo sapiens
actttccactcctatctctctacctactctttaaggacaacaactctgagatttgtcattttgaggctattttctgaatcctgtagatgtgcttcattgcttcttacttttcttgtctcccctgtgtatttgcaaatatcctatcttcacgctcactattttttttcttctgcttgatcaattgtgccattaaaaggctctgatgaattcttcagtatgtctactttattttccagcttcaggatttctgcttgatttttaaaaattatttccatctctttcaaatttatctgatagatttctgatttctttttctgtggtaccttgaattttttttagtttcttcaacacagctattttgaattctctgtcagaaaggtcacataactctgtttctgcaggattattccctggtggcttatttagttcatttggtgaggttatgttttgctgaaacatccttatgtttgtggatgttcatctgtgtctgggcattgatgtgttatgtatctaytgaagtcttcatggtctgcgtttgtgtctacccattcttcttagagagtatttcttaatattcaaaagaaactgggtattgtgatttatgctatatctgttttaatggcaa

SEQ ID NO: 460431 - DNA, 625 bp, Homo sapiens
actttccactcctatctctctacctactctttaaggacaacaactctgagatttgtcattttgaggctattttctgaatcctgtagatgtgcttcattgcttcttacttttcttgtctcccctgtgtatttgcaaatatcctatcttcacgctcactattttttttcttctgcttgatcaattgtgccattaaaaggctctgatgaattcttcagtatgtctactttattttccagcttcaggatttctgcttgatttttaaaaattatttccatctctttcaaatttatctgatagatttctgatttctttttctgtggtaccttgaattttttttagtttcttcaacacagctattttgaattctctgtcagaaaggtcacataactctgtttctgcaggattattccctggtggcttatttagttcatttggtgaggttatgttttgctgaaacatccttatgtttgtggatgttcatctgtgtctgggcattgatgtgttatgtatctattgaagtcttcatggtctgcgtttgtgtctacccattcttcttagagagtatttcttaatattcaaaagaaactgggtattgtgatttatrctatatctgttttaatggcaa

SEQ ID NO: 460432 - DNA, 563 bp, Homo sapiens
atacctggcgtatgtgacagagagaataaaaaatgtcctttcttcttccaaacttatatccctgagtcctggcaacctgtgcaggtgttaactgtgggtgcaagtgtaacattcagccatgaagcaggaggcatagctgacaggaatatttgcactcatctgagcggagcctaagcccacctgctgtcagtaaccattgaattctctagaccttatccacgccgtagatgcaagcatgacctttattcatgaaacaggagggcctaatcagcaggaattagtcatgctcacctgtactgtggccctcaaaacccacggtaatctgccttatatctggtgttccattccagggcttcaaatgaaagcttgggacacaaaggtgcctcaggagggagtatgaagccattacattagttccagatggccctcaccaaattgcagctagcaactagcagggrctcctcctctgttgcctcccattcacaagcacatgaagctgtggggccaggtcctcctcaaacaagggagagaaagggagtcccaggaatttggggcctagtcta

SEQ ID NO: 460433 - DNA, 616 bp, Homo sapiens
aatatattttaatacaggcatgcaatgtaatgtaatcacataatagagaatggggtatccaaccgctcaagtatttatcctttgagttacaaacaatctaattgtattattttagttatttttaactgtacaaataagttattattgagtatagtcaccctgttgtgctataaaatagtatgtcttattcattctatttttcttgaacccattaagcttctccacatctccccaactctttcactacccttctcagccactggttaccatccttctactctcaatgtctatgagttcaattgcattgatttttaaatcccacaaataagttagaacatgtgacgtttgtcttctgtgcctggcttattttgcttaacttaatgatctccagttccatccatgtttttgcaaatcacatgatctcattctcttttatggctgaatagtactttactgtgtatatgtactacattttctttattcatttatatgttgattgacacttaggttgcttctaaatcttggctattgtgaacagttttgcaacaaagatggaagagcagatatygcttcaacacaccgatttcctttctttttagaatacaccaagcagtga

SEQ ID NO: 460434 - DNA, 590 bp, Homo sapiens
ccatgacatgcttatttcacattgcatgcctttatcaaaatatctcatgtaacccacaagtatatatacctactatgtactcacgagtttaaaaaaataataatttttaaaaaatagtttagcacttactcccacccaccccccctacacacacaccatgttatacagcagctcctcctttgccttctactatgatagaaagcttcctgaggccctcaccattagcagwtgctggtgccatgcattcctgtacagccttcagaatcatgagccaaaataaatctcttttctctataaattacccagtcttaggtacttctttataacaatgcaaatgagttcatacaaaaacaaatggtaatgggaagtggggcattgctacaaagataatacaatatatggaatcagctttggaacttggcagctggcagaggttggaagcatttggagaactcagaagaagataagaagatgtagggaatggtttgaaacttcttagaggattgttaagtggttgtaaccaaaatgctggtagaaatatggacagtgaagccaggctgacaaggactgtgacggaaatgagaaagttt

SEQ ID NO: 460435 - DNA, 589 bp, Homo sapiens
gagtgatatcttgctctgaatgcacataagatataattcttttaaaaagtgtggtacccctcccactccctctctcaccgtctgatgtgtcagcatgccctttgtcttctgccatgattgaaagcttcctacggtcctcacaaggagaaatgttggtgccatrcatcatgtacagcactcagaatcatgagctaaaataaatctctttttttcataaactacccggtcacaggtattcctttatagcaacatacatgaactaatacaaaacccaattcaaggaaaccagtgaaatgatccaagagaagaaacatgacatagcaattttacaaaagaaccaaactcaacttacagaactgaaaaaaattactacaataattgtacaatataattgaaagtattaacaaaagaatacagcaagctaataaaaaatttcagtttgaagaccagtcttgaatcaactcaagtagacatttttttaaaagaatttttaaaagtggccaaaatgtctgagaaatatggaattatatagggagaccaaacctgcaacacactggcattcctgagagaataagaaacttagagaaca

SEQ ID NO: 460436 - DNA, 589 bp, Homo sapiens
gagtgatatcttgctctgaatgcacataagatataattcttttaaaaagtgtggtacccctcccactccctctctcaccgtctgatgtgtcagcatgccctttgtcttctgccatgattgaaagcttcctacggtcctcacaaggagaaatgttggtgccatgcatcatgtacarcactcagaatcatgagctaaaataaatctctttttttcataaactacccggtcacaggtattcctttatagcaacatacatgaactaatacaaaacccaattcaaggaaaccagtgaaatgatccaagagaagaaacatgacatagcaattttacaaaagaaccaaactcaacttacagaactgaaaaaaattactacaataattgtacaatataattgaaagtattaacaaaagaatacagcaagctaataaaaaatttcagtttgaagaccagtcttgaatcaactcaagtagacatttttttaaaagaatttttaaaagtggccaaaatgtctgagaaatatggaattatatagggagaccaaacctgcaacacactggcattcctgagagaataagaaacttagagaaca

SEQ ID NO: 460437 - DNA, 589 bp, Homo sapiens
gagtgatatcttgctctgaatgcacataagatataattcttttaaaaagtgtggtacccctcccactccctctctcaccgtctgatgtgtcagcatgccctttgtcttctgccatgattgaaagcttcctacggtcctcacaaggagaaatgttggtgccatgcatcatgtacagcactcagaatcatgagctaaaataaatmtctttttttcataaactacccggtcacaggtattcctttatagcaacatacatgaactaatacaaaacccaattcaaggaaaccagtgaaatgatccaagagaagaaacatgacatagcaattttacaaaagaaccaaactcaacttacagaactgaaaaaaattactacaataattgtacaatataattgaaagtattaacaaaagaatacagcaagctaataaaaaatttcagtttgaagaccagtcttgaatcaactcaagtagacatttttttaaaagaatttttaaaagtggccaaaatgtctgagaaatatggaattatatagggagaccaaacctgcaacacactggcattcctgagagaataagaaacttagagaaca

SEQ ID NO: 460438 - DNA, 589 bp, Homo sapiens
gagtgatatcttgctctgaatgcacataagatataattcttttaaaaagtgtggtacccctcccactccctctctcaccgtctgatgtgtcagcatgccctttgtcttctgccatgattgaaagcttcctacggtcctcacaaggagaaatgttggtgccatgcatcatgtacagcactcagaatcatgagctaaaataaatctctttttttcataaactacccggtcacaggtattcctttatagcaacatacatgaactaatacaaaacccaattcaaggaaaccagtraaatgatccaagagaagaaacatgacatagcaattttacaaaagaaccaaactcaacttacagaactgaaaaaaattactacaataattgtacaatataattgaaagtattaacaaaagaatacagcaagctaataaaaaatttcagtttgaagaccagtcttgaatcaactcaagtagacatttttttaaaagaatttttaaaagtggccaaaatgtctgagaaatatggaattatatagggagaccaaacctgcaacacactggcattcctgagagaataagaaacttagagaaca

SEQ ID NO: 460439 - DNA, 573 bp, Homo sapiens
tggctcaattcaacaagaaaatttatcctaaatttatatgcacccaacataggaacactcagattcataaaacaagttttcctcaacctacaaaaagtcttacacagtcacacaataatagcgagggacttcaacaccccactgacagtgttagttcttcaagggcagaaagttaacaaggacattctggacttaaacttgacacttgaccaattggacagctaaaagacatctagagaatactccatccaacaattccagaaaaaacattmttctcatatgcacacagaacatattctaagattgactacatgctcacccataaagcaagtatcacaaaattaaaatatatatatatatcaaaatcataccagccacactcttggactacagggcaataaaaatagaaatcaatatcaaaaagatctcttaataccaaaaaattatatgcaaatagacaacttcctcctgaatgacttttggtaaacaatgaaataaggcatgaatcaaaaaattctttgaaattgttaaaagtaaacacaacataccaaattgttagagatacagctaaag

SEQ ID NO: 460440 - DNA, 558 bp, Homo sapiens
ttgggagcatattgtttaatttcatgtatttgtatagtttccaaagtccccttttgtatgatttctagttttatttcrtagtgatatgagaagatactttaaattatttttatttagttttaaaaatttgttgggactcgttttgttgcctgacatggtctatcacggagaatgtccatgtgctgttggaaagaatgtatactctgtagctgttgactagaatgttttgtaaatgtctgttaggtccatttggtctaaaaatcagtttaagtccaatgattctttgttaattttctgtctagatgatctatctaatgttgagagtgggatgttgaaatccccaaataatatttcagtctatttccttatttagacctgatatttattttgtgaatctgggtgctcaggtgttgggtacatatatatttagaattgttatatatttttgctagattgatcattttatctttatttaataaccattctatagacttttactggttttaacataaaatctatttatctaatattaatagagctactcctgctcacttctgg

SEQ ID NO: 460441 - DNA, 584 bp, Homo sapiens
actgttcaccattttttgatgcagttctgctccctgaatagctgacctcatactttgcacttgaataaactcttttaactagatcctaagccttttaattattttaggtttacatttcgcaatccaggtaggacccaaagcaaaattcctaagatccacactgcttcattaacatttggatctttggtactagcacaattggctttcatttatctgacctcactggaacyggcaagtgtcccttcaaggcttttctcgggtttcgaatcttttctggctttggctgagattcagactctactcaagtgccctgattccatgcttgatggagctagaagaattgaagctttacttttataggtaggagttttgtgtgttaattctctagagattctgccatttccaggtttgtggtttcccttttctttgaggttaagggtggtttttttgtttgtttgtttttgtgtgtgtgttttgttgtgtttgtttgttttgtcttacttgctaaagtttgcagcctttcttttcattgatatttggtcagagaaaatagtttctctttgaaaagagaaaaagtgaaagaa

SEQ ID NO: 460442 - DNA, 535 bp, Homo sapiens
aagacaaataccacatgatgtcactgatattttaaaaagttgttctcaaagaattagagagcgaaatgatagttgccagaaggctggagtggttggtggggaagtaggtagagttttggggaaaaaattttaaaaaatcaatgtacaataaaagtggcattttatataataaaaaaaggagtgaaatattttatacatgtttggaaaactactaataaaaataagtttagacaatctgtttcacaccttaaacaaaaataaattccagatagagtaaagctttaaatgctaaagacraaactataatcatatcagaagaatctcattgtgtattttaatcccagaatacagaagaatttattaattatgatacagaacccagaagctacagataaaatagcaaccaatttaactacataaaaatgtaaaatgtctatatgataaaaagagaggccaaagatatttgtaacatttacgtaaatatatagtggtctcttagatcaataataaacaactcttagaaataaatatggac

SEQ ID NO: 460443 - DNA, 626 bp, Homo sapiens
ttataatgtgaactgaacatatacaggcttatggaatcaaaataaaatgttgcttagaggaaaatttataattataattaaaaaacaaaacaaactgtagcaaatatctagacaaggtgattggaaaattcaaatagacaacataaaccacccagaatatccaggaaaagtgagaaaaaatggctatgagatctatgaaaactaactgtaaaaccttagtaattaaagcagtgtggtattgtcacatgaataaatgaataaatgaatgctgaacagaaaaactagaaacaagacacaatatacatagyagcttattatgatatgaagtgacaacttaaagaaatattaataagataatgtgttttttactatgatgtttgttagaaaactcactaaccgtctggattaaaattggattaatacttcacacagtataccagattaaattccaaatgtatcaatgtttcaaatattaaacacacaaacaggaataaaacaataccaataccattataaattaggaaaccttcttaattctgattaaaaattcagaagtcgctaaaaattaataaatctgcttacataaaaaatttcaggaggcaagataaaataatccatttgtggaa

SEQ ID NO: 460444 - DNA, 626 bp, Homo sapiens
ttataatgtgaactgaacatatacaggcttatggaatcaaaataaaatgttgcttagaggaaaatttataattataattaaaaaacaaaacaaactgtagcaaatatctagacaaggtgattggaaaattcaaatagacaacataaaccacccagaatatccaggaaaagtgagaaaaaatggctatgagatctatgaaaactaactgtaaaaccttagtaattaaagcagtgtggtattgtcacatgaataaatgaataaatgaatgctgaacagaaaaactagaaacaagacacaatatacatagtagcttattatgatatgaagtgamaacttaaagaaatattaataagataatgtgttttttactatgatgtttgttagaaaactcactaaccgtctggattaaaattggattaatacttcacacagtataccagattaaattccaaatgtatcaatgtttcaaatattaaacacacaaacaggaataaaacaataccaataccattataaattaggaaaccttcttaattctgattaaaaattcagaagtcgctaaaaattaataaatctgcttacataaaaaatttcaggaggcaagataaaataatccatttgtggaa

SEQ ID NO: 460445 - DNA, 570 bp, Homo sapiens
aattcccagaaaacatgtcattcatctattttaaaatgaaatattattgagtagttctttttaaataattggaaattattgtctaagcaaatactcttattatattatatatttaattctggaaaaaaatataaaataaaaacaaaacatatagttgacctcagtggaaattttaaaagtcattggagatgagaaacaaaaataaagcagatttagaaacaagaaaagacactgaagaactagtgtcttcaaggcctctggggatatctgctgccttggatctggggtttaaatagcccaaagtgacaggatattaaacttgtgtaacaagccaggtggaagatctgatctgatactctccatataaagacaaatgaacagaatgtttttgagaatgatgggattgtacttgaggtttttaaggatggctctggaaaagacagaaaaaagggtkgaggatctcagaaaattttcatgtgcattcacatggtgttagaaatttttacccctattaacataggagttactgtcacatgaataaaaaagtggttcagataggttgtgtcccca

SEQ ID NO: 460446 - DNA, 649 bp, Homo sapiens
aagctagctgcaggagtttattttcgtaacccagtggggcctggaacactaatgagacagaactgtttccttccctggaaagggggctgaagccagggagccagtgatcttactcagcagatcccacttccaagcagcctagcaagctaagaaccactggcttgaaattctcactgcaagctcagtactctgaagccaacttggaactcgagcttggtgcagggaggggtatcggccattactggggcttgagtaggcggatttcccctcacagtgtaaacagagcccccaggcagtttgaayggggcggagcccaccagagtgccgcaaagcagctgtagccagactgcctttctagattactcctctctgggcagggcatctctgaaagaaaggcaggagccccagtcaagggcttatagataaaactcccatctccctgggacagagcacttgggggaaggggctgctgtgggtgcagcttcagcagacttaaacattcctgcctgccagctctaaagagagcagcggatctcccggcacagcgctggggctctgctaaggaacagactgtctcctcaagtgagtccctggcccccaagcctcctaacggggagacacctcccaccaggggttgacagacacctca

SEQ ID NO: 460447 - DNA, 649 bp, Homo sapiens
aagctagctgcaggagtttattttcgtaacccagtggggcctggaacactaatgagacagaactgtttccttccctggaaagggggctgaagccagggagccagtgatcttactcagcagatcccacttccaagcagcctagcaagctaagaaccactggcttgaaattctcactgcaagctcagtactctgaagccaacttggaactcgagcttggtgcagggaggggtatcggccattactggggcttgagtaggcggatttcccctcacagtgtaaacagagcccccaggcagtttgaacggggcggagcccaccagagtgcsgcaaagcagctgtagccagactgcctttctagattactcctctctgggcagggcatctctgaaagaaaggcaggagccccagtcaagggcttatagataaaactcccatctccctgggacagagcacttgggggaaggggctgctgtgggtgcagcttcagcagacttaaacattcctgcctgccagctctaaagagagcagcggatctcccggcacagcgctggggctctgctaaggaacagactgtctcctcaagtgagtccctggcccccaagcctcctaacggggagacacctcccaccaggggttgacagacacctca

SEQ ID NO: 460448 - DNA, 622 bp, Homo sapiens
cttgaaactgggtaattcatgaagaaaataagtttaattgactcacagttctacaggctatacagaagcatggttgggagacctcaggcaactgacartcatggcagaaggtgaaggggaagcacgcaagcacatcttaccatggtggagcagtaaagaaagataatgaagggagaagtgccacacactttcaaacagccagatctcatgaaaactagctcgctatcatgagaaaacaacataacacatatcttcttggaccacaatggaattaaactaaaaataaataaaaagaggagctttggaaactatatgaacacatggaaattaaacaatatgctcctaaatgaccagtgggtcaatgaagaaattaaaaagaaaatttaagcagtgagctgagattacgccactgcactccagcctggaggacacagcaagactctgttctagaaaataatcccctttacaatagctacaaataaaataaaatacataagaataaatttattcaaagaaatgaaagattactacaataaaaactataggctgggtacaatggctcattcctgtaatcccaccattttgagaggtcaagataggaggattgcttgagcccaggagt

SEQ ID NO: 460449 - DNA, 589 bp, Homo sapiens
tgtaaatgacgagttgatgggtgcagcaaaccaacatggcacatgtatacttatgtaacaaacctgcacgttgcgcacatgtaccctagaacttaaagtataataataaaaaaacaataaaacattgatgtaagaaattaaagaggacacaagaaataaaataattccatattcatatattcaaaaaatcaatttttttatttcaatagttttggggatataggtggattttggttacatggatgagttcttggtggtgaattctggaatttgtaatgcacccatcatctaagcagtgtacagcatactaatatgttgtcttttatccctcatcctcctcccaacctctcccaccccaagtcctcaaagttcattatatcactctgtatgtttttgcatcctcatarcttagctcccacttacaagtgaaaacatatggtatttggttttccattcctgagttacatcacttaaaataacgacctctagctctatccacgttgttgcaagacattattttgttccttttaatggctgagtagtatttcctgatgtatatataccacactttctttatccaaccattggt

SEQ ID NO: 460450 - DNA, 631 bp, Homo sapiens
actgcacaaccttaagcttgccaaaagataatgtatgtcacttgggacatttaaaaaaaaaaaaaacagtacagaacagatccagatacagaaaattatttcacatatctaatatgcatttataagacatatcatctcagttaatcaagggtcatattgcaatccggcccaagtaacatcgttaatcagtgctctatttgtcattcccttttatatgcattatttccttcaaaagcagcatccaaacttattaagtgaatttaataagtacttacaaagtactatcttagaactgtccaacaaactaatatgtacatagttcaatacatgcatattttagtacaaatgctaactccattatgctttcataaaatgtgtcaactgtcttatagtagtactggttccaactaaaaaaaaaatcaatctttcaaaggttaaatactkaaaaataataatattactgagataatcagagccaggcacaatctagagtcatttagaaaaacaagcagtagttacacctcacataaacaggactgcagaaacactttcgtgttttgataccaaatgccaaacactagcaaataaccacctgattctttgtgattttataatttataatgccttttta

SEQ ID NO: 460451 - DNA, 576 bp, Homo sapiens
aaaaaccctgtcatggacttcctatatagcacttatggttgctactttcttagctgttgttgttacagtatctgtaattactttcaaagttctttagcattatctagaaagcacagtcaagaagtggtcagtctactaattaagaaagtgtagcccagggtgtcaaataacattctatcagcaaggactacwcactccagaggcagctatcacaggccttcctgttatccatatctccatcaataacagatgctttctaattagcacactatctgtaagaaataggcttttattagtgtaaaaacagcctgttgctaaatgtgaggaatattagaaatgagctgccaattgtgaaataaagatatttaatatacattgattgtttttaaattaacatgaatacgatataagaattcaacgggatctgtaactatatgcatccttagggaccgcacttaaaaggcttggtttctagaacgctaaattctttcagataaaggtggcagaatcctgcctctggaaatctgcattgttctagaatgagcctttcatacaaaattggtggtcagatcatct

SEQ ID NO: 460452 - DNA, 576 bp, Homo sapiens
aaaaaccctgtcatggacttcctatatagcacttatggttgctactttcttagctgttgttgttacagtatctgtaattactttcaaagttctttagcattatctagaaagcacagtcaagaagtggtcagtctactaattaagaaagtgtagcccagggtgtcaaataacattctatcagcaaggactactcactccagaggcagctatcacaggccttcctgttatccatatctccatcaataacagatgctttctaattagcacactatctgtaagaaataggcttktattagtgtaaaaacagcctgttgctaaatgtgaggaatattagaaatgagctgccaattgtgaaataaagatatttaatatacattgattgtttttaaattaacatgaatacgatataagaattcaacgggatctgtaactatatgcatccttagggaccgcacttaaaaggcttggtttctagaacgctaaattctttcagataaaggtggcagaatcctgcctctggaaatctgcattgttctagaatgagcctttcatacaaaattggtggtcagatcatct

SEQ ID NO: 460453 - DNA, 576 bp, Homo sapiens
aaaaaccctgtcatggacttcctatatagcacttatggttgctactttcttagctgttgttgttacagtatctgtaattactttcaaagttctttagcattatctagaaagcacagtcaagaagtggtcagtctactaattaagaaagtgtagcccagggtgtcaaataacattctatcagcaaggactactcactccagaggcagctatcacaggccttcctgttatccatatctccatcaataacagatgctttctaattagcacactatctgtaagaaataggcttttattagtgtaaaaacagcctgktgctaaatgtgaggaatattagaaatgagctgccaattgtgaaataaagatatttaatatacattgattgtttttaaattaacatgaatacgatataagaattcaacgggatctgtaactatatgcatccttagggaccgcacttaaaaggcttggtttctagaacgctaaattctttcagataaaggtggcagaatcctgcctctggaaatctgcattgttctagaatgagcctttcatacaaaattggtggtcagatcatct

SEQ ID NO: 460454 - DNA, 576 bp, Homo sapiens
aaaaaccctgtcatggacttcctatatagcacttatggttgctactttcttagctgttgttgttacagtatctgtaattactttcaaagttctttagcattatctagaaagcacagtcaagaagtggtcagtctactaattaagaaagtgtagcccagggtgtcaaataacattctatcagcaaggactactcactccagaggcagctatcacaggccttcctgttatccatatctccatcaataacagatgctttctaattagcacactatctgtaagaaataggcttttattagtgtaaaaacagcctgttgctaaatgtgaggaatattagaaatgagctgccaattgtgaaataaagatatttaatatacattgattgtttttaaattaacatgaatacgatataagaattcarcgggatctgtaactatatgcatccttagggaccgcacttaaaaggcttggtttctagaacgctaaattctttcagataaaggtggcagaatcctgcctctggaaatctgcattgttctagaatgagcctttcatacaaaattggtggtcagatcatct

SEQ ID NO: 460455 - DNA, 489 bp, Homo sapiens
caggcaagattaccaatgacttgtatattctgagtaagatttggagaatcccaccacgtaaagaaccttgacmagctgaggtactggctgattagattgggaacatggaatagaggagaaagaaaatttaaaatactgtaactttgtcactaattcagagataagtactatcgttcttactcatattttcttccttactgtttcatgtatatatttacctattctaactttccctgctttcctgttgcctttcatactttatttgcagtgagcaaagtttacaaaatagtgcataactgaaagactgtccagatggaattgcaaaagatgtagaggaagaatagacctttcagagctcttggatttgggcctggaggcagtggcagttaacgatttatctcccttttactgatgtcttctataaggggtatatttggtggcagtattttgcattgcatagttgctaaatctgttgctgcttaattgtaa

SEQ ID NO: 460456 - DNA, 489 bp, Homo sapiens
caggcaagattaccaatgacttgtatattctgagtaagatttggagaatcccaccacgtaaagaaccttgaccagctgaggtactggctgattagattgggaacatggaatagaggagaaagaaaatttaaaatactgtaactttgtcactaattcagagataagtactatcgttcttactcatattttcttccttactgtttcatgtatatatttacctattctaactttccctgctttcctgttgcctttcatactttatttgcagtgagcaaagtttacaaaatagtgcataactgaaagactgtccagatggaattgcaaaagatgtagaggargaatagacctttcagagctcttggatttgggcctggaggcagtggcagttaacgatttatctcccttttactgatgtcttctataaggggtatatttggtggcagtattttgcattgcatagttgctaaatctgttgctgcttaattgtaa

SEQ ID NO: 460457 - DNA, 620 bp, Homo sapiens
agatgtagaggaagaatagacctttcagagctcttggatttgggcctggaggcagtggcagttaacgatttatctcccttttactgatgtcttctataaggggtatatttggtggcagtattttgcattgcatagttgctaaatctgttgctgcttaattgtaagcatggaaaaagtatgtgtatgtgagtgtttggcagtcaagtcctcgagtggacatttgtcatgttattcataataagcccctctcacccatacctgggtttacctgaatcaagtggctctggatgggcccctagatagcttcaggatgggggctggttgctagaggcaccaaccatgtaatagagggctggamctttcagccccaccctgcaacctcctgggagattgagttaatcaccaaaggccaataatttaattaatcatgcctaagtaatagctcctccatgaaagccctaaacgacaaggttaagagagctctgggttggtggacacgtagatgttggggtgctcatcctgcattccaagaggatagaagctcatgaactgaggatccctctggaccttgcccaatggacctcttcatctggctgctcatttgtatcctttataatatc

SEQ ID NO: 460458 - DNA, 539 bp, Homo sapiens
cctgaatcaagtggctctggatgggcccctagatagcttcaggatgggggctggttgctagaggcaccaaccatgtaatagagggctggacctttcagccccaccctgcaacctcctgggagattgagttaatcaccaaaggccaataatttaattaatcatgcctaagtaatagctcctccatgaaagccctaaacgacaaggttaagagagctctgggttggtggacacgtagatgttggggtgctcatcctgcattccaagaggatagaagctcatgaactgaggatccctctggaccttgcccratggacctcttcatctggctgctcatttgtatcctttataatatcctttataaaggatacaaatgtaatgcttggtaaatgtaagcaaagtgtttctgtgaattctgtgaaccattatagcaaattattgaacctaacaacgggatgtgggaacccctgatttgtaaccaagtcatacagaagtgtgggtaacctgtggatcaactatttgtggctgacatcttaaggtgg

SEQ ID NO: 460459 - DNA, 565 bp, Homo sapiens
gttctgtagtctcagacttttccaggttgaatacttggtgccaagttagacatgctgttctatgttcatctccacagagtcaggaggaagggaaaatttcttctctcccatgaagcagtatcttcatatttaccctaacgtaggtctcttttttggggggctgggtttcaggtgggatggtagctttcatataacatcacaaaatatgcatgttctgtatcactttcagacatttcctgtatttcccccttttttccttccttgtatttttaaccatcatgagtttatttattactctgttgtctttactggtattagcaacagctctgaatttagcatcatctgcaaacttcatttaagtaccmtttgctgcctccacaagatcattaataaagatgtcaactagagcattttagaaaattgctacaacacttcttcatcttcaagaaaatgacaaagatgtagagaaagttttccctgatctaaactattgagatcttcttcttgtttgtttgactttcaggccctcacaagtgtcttctgagagacagctcacctcgttagc

SEQ ID NO: 460460 - DNA, 603 bp, Homo sapiens
caggaaagattaagtgcctgcctcaatccctaacgctgtttcactttacaattctagtttatatggctcaggcatacttccttttctttctttgaaacagccttataacaaagcatcaattcatttgagttatcttgaatgggtttttgttcatgtgacttaaaagaaccttgaatacaatgtctaagttctttaatggtaagaagaatatcttatactctttggcctctcttgaagcattgtcctaaaaattagtttaagtaattaaaaaaactttttctatgtctcttcacaatctgttattctatcacaaaggatatgttctccaaaaatgtactatatcattctatatattcttttgccgttttgttttttgttttaagaagtggagagtttaataggcaagaaggggcatgaaggaagggagaaggaagaagctcccttgtacagagacagagggagggggctccaaagccgagagaaggagcccctcattctatatattctcacaacttcaacatttatctatgggtctgattggacrtgagcccaattctatcatttacaagctgtgagatctcactaaagagagaggtttatacc

SEQ ID NO: 460461 - DNA, 543 bp, Homo sapiens
gtgtctttgctttgtgaataatgtggcaatgaacatatgagtgcatgtgtctttttggtaaaatgatttattttcttttgggtacatacccagtaatgggattgctgggtcaaatgatagttctatttttagttatttgagaaatccccaaactgctttccacagtggctgaactagtttgcattctcaccaasagttcactcccttaactccacaaccttgccagcatctcttgttttctgactttttaataatagccattctgactggtgtgagatggtgtctcattgtggttttgatttgcttctcctgctggccagtgatggtgaccattttttcatatgtttgttggccacccgtatgtcttcttttgagaagtgtctgttcatgccttttgtacaaggcttgttaaaaccaccctcacaaactccagaataatcatattcaacttttgtagctgactttgcaatttgccttcaaagctctaaataaatatagcaatcacttatttttacatttaggctttagctattatcatatgga

SEQ ID NO: 460462 - DNA, 377 bp, Homo sapiens
taagtgctgggtttgtttctttcttagaagtttgtaagaktttctttttgtcccagtgttttaatgtagcttggtgtgggtccatgtttttttattgtgttgagtgcaatatccttcatttctggtatattatcttgaattatttccactatactttctcctcctcctcttataatttcctcatttctttctttttatggtttctattatttaagacatcttctattttattctcttaaaataattttttaacttgtctttttactctaatttctgaaatatttttgtaactattttctaaagtttctattaagatttctagttttgctgtcatatttaattcccccctacaccagcccctaaaaagcatcctattt

SEQ ID NO: 460463 - DNA, 612 bp, Homo sapiens
tcactacaagctgaagagcccttgggccttaagtgaatatcagtggtggcctggtgaacctctcctgtgggctagtggcagtggtagccacaaggagaggcctcttttcctatagcaaggagagggaagaggggaaaggactttgtactatgatctgagtgctagcttagccacagtagaatagaaygtcaaatgcatttctaaggtttttgacttcaatccctggctccaaactgcatttctggaccttccctgggccaaggggaactcaccactctgaatgaagggacacaaacctggttggctttaccacctgctgatcgtagagccctagggacttgagtggacataggtggtagccaggtagtggttacggcaggccttgggcgagacccagtgctgtgctggcttcaggtctgaaccagtgcagttccagtgttggtggccacagtggtgcttgtgtcccccattctcagttccaggtggcttagcacagagaaagagacttcatttgtttgggagaaagtaagggaaaagaaccagagtctctagtaatccagagaattattctgaatcttatccaagaccaccaacacagtacctatataagtc

SEQ ID NO: 460464 - DNA, 616 bp, Homo sapiens
tttgaagaacattttgaaagtccgtaacaccttactatgcaatcttcaatggcaaaaaatatttaataaaaaatctggatacatttgacatcgtgttaggtggtgtgctaaaataaatgggaaagaatgatcttgcaggtatctttcacagtacaaacaaaacaaaggcaattcaaaagaccataaggcatttatatgagagggagaagagaagggaatgaaagtaacatatatcaggtgtctattttctataagatggtaactgatgctttacagacatgatttcattggctgctcaaacccatgaggtagatttttttttyccccaacttataaaaataaaggcacgggatcctgtcaaagagactgaatttgaattcagttctgcctaatttcttttttttgttgttattgttgtttgttttaacttctattttaagttcaggggtacatgtgcaggatgtgcaggtttgttacataggtaagtatgtgtgatggggatttgttgcacagattatttcatcactcaggcattaaccctagtctccattagttatttttactgatcctctctcctaccaccctgaaccctctgacaggccccagtgtgtgttgt

SEQ ID NO: 460465 - DNA, 616 bp, Homo sapiens
tttgaagaacattttgaaagtccgtaacaccttactatgcaatcttcaatggcaaaaaatatttaataaaaaatctggatacatttgacatcgtgttaggtggtgtgctaaaataaatgggaaagaatgatcttgcaggtatctttcacagtacaaacaaaacaaaggcaattcaaaagaccataaggcatttatatgagagggagaagagaagggaatgaaagtaacatatatcaggtgtctattttctataagatggtaactgatgctttacagacatgatttcattggctgctcaaacccatgaggtagattttttttttccccaacttataaaaataaaggcacgggatcctgtcaaagagactgaatttgaattcagttctgcctaatttcttttttttgttgttattgttgtttgttttaacttctattttaagttcaggggtacatgtgcaggatgtgcaggtttgttacataggtaagtatgtgtgatggggatttgttgcacagattatttcatcactcaggcattaaccctagtctccattagttatttttactgatcctctctcctmccaccctgaaccctctgacaggccccagtgtgtgttgt

SEQ ID NO: 460466 - DNA, 540 bp, Homo sapiens
atttgtgtacttcctatgtatactaaaccattatatggactacactctactgtatctatttgtctatctatctttttaacttcattcaactgagatatggtcggctgttactagctatcaatggagtgaatgagaaaagactgcatatcttgtctttatcctgcaggtctgtctctgccacatatttctgaggagatcccgggcctgggaaactttggagtcaacactgaccttttatcctggttctataaaccagatcacatgcaagaacgttgcctcttaaaaattctcaaaagtgatgaatagctatagtccaggctaaaggaaaatggagaacaccaggttgttagtgagagctgaatcactctgagttatggagtaacaagttttattaggctggtgcaaaagtaatttgtggttttcgacatcaattttaatggcaaaaagtgcaattacttttgctccaaccsatagttcccagagtcaggtagactaggaagtggcattcagaaagcagagactgggaaggtggagaagagt

SEQ ID NO: 460467 - DNA, 544 bp, Homo sapiens
gtctcctttttacagaaaagagaacatggaaaggctgtccagagttcagtctcaaaggcaayactgggcagggactgacaaagggttgaggagtgtccattaacctgggtattggtgatggaaagcatatcctgaaattggagatagcaagactcttggtgaactgttgagtagactgggttgaattcagtgaaggatctaaaggaaaaataaaaatattaatgcttctatgtagtattaaaagttgtgaccataagatagcaagtataatcacacaccaaaaaatgacttttctgtcccaagtgagtggtgggcttcaatgtagtcacccagaaaacattaaatatttgtcatatgttcaagatacattttgaaacatctaaggaaatagaaattatcactttgttacatgtgcatgtaggtgcacacacagagtattactcagcgaattttttcagctttattctatataattatatattttttccagccttattctgcctgactatccagattttacactgtttagatctggctgtttcca

SEQ ID NO: 460468 - DNA, 544 bp, Homo sapiens
gtctcctttttacagaaaagagaacatggaaaggctgtccagagttcagtctcaaaggcaacrctgggcagggactgacaaagggttgaggagtgtccattaacctgggtattggtgatggaaagcatatcctgaaattggagatagcaagactcttggtgaactgttgagtagactgggttgaattcagtgaaggatctaaaggaaaaataaaaatattaatgcttctatgtagtattaaaagttgtgaccataagatagcaagtataatcacacaccaaaaaatgacttttctgtcccaagtgagtggtgggcttcaatgtagtcacccagaaaacattaaatatttgtcatatgttcaagatacattttgaaacatctaaggaaatagaaattatcactttgttacatgtgcatgtaggtgcacacacagagtattactcagcgaattttttcagctttattctatataattatatattttttccagccttattctgcctgactatccagattttacactgtttagatctggctgtttcca

SEQ ID NO: 460469 - DNA, 544 bp, Homo sapiens
gtctcctttttacagaaaagagaacatggaaaggctgtccagagttcagtctcaaaggcaacactgggcagggactgacaaagggttgaggagtgtccattaacctgggtattggtgatggaaagcatatcctgaaattggagatagcaagactcttggtgaactgttgagtagactgggttgaattcagtgaaggatctaaaggaaaaataaaaatattaatgcttctatgtagtwttaaaagttgtgaccataagatagcaagtataatcacacaccaaaaaatgacttttctgtcccaagtgagtggtgggcttcaatgtagtcacccagaaaacattaaatatttgtcatatgttcaagatacattttgaaacatctaaggaaatagaaattatcactttgttacatgtgcatgtaggtgcacacacagagtattactcagcgaattttttcagctttattctatataattatatattttttccagccttattctgcctgactatccagattttacactgtttagatctggctgtttcca

SEQ ID NO: 460470 - DNA, 544 bp, Homo sapiens
gtctcctttttacagaaaagagaacatggaaaggctgtccagagttcagtctcaaaggcaacactgggcagggactgacaaagggttgaggagtgtccattaacctgggtattggtgatggaaagcatatcctgaaattggagatagcaagactcttggtgaactgttgagtagactgggttgaattcagtgaaggatctaaaggaaaaataaaaatattaatgcttctatgtagtattaaaagttgtgaccataagatagcaagtataatcacacaccaaaaaatgacttttctgtcccaagtgagtggtrggcttcaatgtagtcacccagaaaacattaaatatttgtcatatgttcaagatacattttgaaacatctaaggaaatagaaattatcactttgttacatgtgcatgtaggtgcacacacagagtattactcagcgaattttttcagctttattctatataattatatattttttccagccttattctgcctgactatccagattttacactgtttagatctggctgtttcca

SEQ ID NO: 460471 - DNA, 262 bp, Homo sapiens
  misc_feature (1)...(262): n = A,T,C or G
gctatgcaataccccactgagattgnatggtcctttttgtcctttccttttaaccgtggtggtattttacaaagatgaactcttgagcacccaagatgcttmtgtcttttagtgcatgtaaatgtttgattctgcatggacaggcaagatgttaaattggtaaagtatatcaaattagcttttaaaataactttattacagttcctaaaggagaaattatctctgtaattttagaactgccctcatacttgctgtatgttgt

SEQ ID NO: 460472 - DNA, 262 bp, Homo sapiens
  misc_feature (1)...(262): n = A,T,C or G
gctatgcaataccccactgagattgnatggtcctttttgtcctttccttttaaccgtggtggtattttacaaagatgaactcttgagcacccaagatgcttctgtcttttagygcatgtaaatgtttgattctgcatggacaggcaagatgttaaattggtaaagtatatcaaattagcttttaaaataactttattacagttcctaaaggagaaattatctctgtaattttagaactgccctcatacttgctgtatgttgt

SEQ ID NO: 460473 - DNA, 391 bp, Homo sapiens
  misc_feature (1)...(391): n = A,T,C or G
gtttcttgcccatcaaaggactttaaattagtagcttctgctatgcaataccccactgagattgnatggtcctttttgtcctttccttttaaccgtggtggtattttacaaagatgaactcttgagcacccaagatgcttctgtcttttagtgcatgtaaatgtttgattctgcatggacaggcaagatgtyaaattggtaaagtatatcaaattagcttttaaaataactttattacagttcctaaaggagaaattatctctgtaattttagaactgccctcatacttgctgtatgttgtggatcagcaagtatagtcaatcttctacttgagcaaaatgttgatgtatcttctcaagatctatctggacagacggccagagagtatgct

SEQ ID NO: 460474 - DNA, 575 bp, Homo sapiens
aactcttgagcacccaagatgcttctgtcttttagtgcatgtaaatgtttgattctgcatggacaggcaagatgttaaattggtaaagtatatcaaattagcttttaaaataactttattacagttyctaaaggagaaattatctctgtaattttagaactgccctcatacttgctgtatgttgtggatcagcaagtatagtcaatcttctacttgagcaaaatgttgatgtatcttctcaagatctatctggacagacggccagagagtatgctgtttctagtcatcatcatgtgtaagtgtttacatgaaaaggctagttaatgctaaattgaggtttaaaataattataacaattgcatcttacatatcaggtgagatgtcatagtttggttcaggtagttttagattggccgtgagttagtcccctgcatcagccagaatcagacaaaaagcaagacaagttagaagtccaatgggtgcaggattctttacctcaggacttttaagacctttatccttagagatcccaatattgttcatttcatctttttttaacacctatgcatgggata

SEQ ID NO: 460475 - DNA, 655 bp, Homo sapiens
tttaaaataactttattacagttcctaaaggagaaattatctctgtaattttagaactgccctcatacttgctgtatgttgtggatcagcaagtatagtcaatcttctacttgagcaaaatgttgatgtatcttctcaagatctatctggacagacggccagagagtatgctgtttctagtcatcatcatgtgtaagtgtttacatgaaaaggctagttaatgctaaattgaggtttaaaataattataacaattgcatcttacatatcaggtgagatgtcatagtttggttcaggtagttttagattggccgtgagttagtcccctgcatcagccagaatcagacaaaaagcaagacaagttagaagtccaatgggtgcaggattctttacctcaggacttttaagacctttatccttagagatcccaatattgttcatttcatctttttttaacacctatgcatgggataaaaaagagtatcacatctttgatttttctgattagttatttgggtcttgaaatgtccagtttagcagaaagycttgtactgtcttctggggactatcttctacatactccttgaatttttcaagaaccaaaggggttcactaaatccaaggaagacagtcccttttatcaagtcagaaggagg

SEQ ID NO: 460476 - DNA, 655 bp, Homo sapiens
tttaaaataactttattacagttcctaaaggagaaattatctctgtaattttagaactgccctcatacttgctgtatgttgtggatcagcaagtatagtcaatcttctacttgagcaaaatgttgatgtatcttctcaagatctatctggacagacggccagagagtatgctgtttctagtcatcatcatgtgtaagtgtttacatgaaaaggctagttaatgctaaattgaggtttaaaataattataacaattgcatcttacatatcaggtgagatgtcatagtttggttcaggtagttttagattggccgtgagttagtcccctgcatcagccagaatcagacaaaaagcaagacaagttagaagtccaatgggtgcaggattctttacctcaggacttttaagacctttatccttagagatcccaatattgttcatttcatctttttttaacacctatgcatgggataaaaaagagtatcacatctttgatttttctgattagttatttgggtcttgaaatgtccagtttagcagaaagtcttgtactgtcttctggggactrtcttctacatactccttgaatttttcaagaaccaaaggggttcactaaatccaaggaagacagtcccttttatcaagtcagaaggagg

SEQ ID NO: 460477 - DNA, 655 bp, Homo sapiens
tttaaaataactttattacagttcctaaaggagaaattatctctgtaattttagaactgccctcatacttgctgtatgttgtggatcagcaagtatagtcaatcttctacttgagcaaaatgttgatgtatcttctcaagatctatctggacagacggccagagagtatgctgtttctagtcatcatcatgtgtaagtgtttacatgaaaaggctagttaatgctaaattgaggtttaaaataattataacaattgcatcttacatatcaggtgagatgtcatagtttggttcaggtagttttagattggccgtgagttagtcccctgcatcagccagaatcagacaaaaagcaagacaagttagaagtccaatgggtgcaggattctttacctcaggacttttaagacctttatccttagagatcccaatattgttcatttcatctttttttaacacctatgcatgggataaaaaagagtatcacatctttgatttttctgattagttatttgggtcttgaaatgtccagtttagcagaaagtcttgtactgtcttctggggactatctyctacatactccttgaatttttcaagaaccaaaggggttcactaaatccaaggaagacagtcccttttatcaagtcagaaggagg

SEQ ID NO: 460478 - DNA, 283 bp, Homo sapiens
gtgggcttgttctaaagggtcagaggggttcaaataatgtggcagaaagagatcagtgtttgtttcttcttctttgctaccagatctayactgtgaggcacctttatatcctgtgtagaaccttaggcagtagaaagtcccatatgagccttccccaagcagtggctcccagctgtggttggccccttgagtgatctgatttacatgataatgaaaatcgtccaagctacttccatctctagctcaagattttaaaatattatcaaattgtacctcacaggaa

SEQ ID NO: 460479 - DNA, 228 bp, Homo sapiens
tgtttgtttcttcttctttgctaccagatctatacwgtgaggcacctttatatcctgtgtagaaccttaggcagtagaaagtcccatatgagccttccccaagcagtggctcccagctgtggttggccccttgagtgatctgatttacatgataatgaaaatcgtccaagctacttccatctctagctcaagattttaaaatattatcaaattgtacctcacaggaag

SEQ ID NO: 460480 - DNA, 259 bp, Homo sapiens
gggttcaaataatgtggcagaaagagatcagtgtttgtttcttcttctttgctaccagatctatactgtgaggcacctttatatcctgtgtagaaccttaggcagtagaaagtcccatatgagccttccccaagcagtggctcccagctgtggttggccccttgagtgatctgatttacatgataatgaaaatcrtccaagctacttccatctctagctcaagattttaaaatattatcaaattgtacctcacaggaag

SEQ ID NO: 460481 - DNA, 228 bp, Homo sapiens
tgtttgtttcttcttctttgctaccagatctatactgtgaggcacctttatatcctgtgtagaaccttaggcagtagaaagtcccatatgagccttccccaagcagtggctcccagctgtggttggccccttgagtgatctgatttacatgataatgaaaatcgtccaagctacttccatctctagctcaagattttaaaatattwtcaaattgtacctcacaggaag

SEQ ID NO: 460482 - DNA, 472 bp, Homo sapiens
ctaaaattggaacaatacagagaaagttagaatggcttctgcataaggaggcagcccaactcttgaggcattccatattttgtgcagtcactggaagatcatttcactatytgctgactagctctaaggaaacagtgtgaatcaaagcaaaatgggtgccaccaaaatatcgaaatgtgatttgtgctgcaaaaatagtcatggaagatggtctgtgagatgatttagagctgaataatgtgttcggtgcaaaatatattaagtatgtatgtcaaaaattagagaatgtcaatttgcagcttcttcatgaaaactgaaaaaaaataaaagtagagttttggtctcccatgtcagctggaattgaacatcaatataaagcattatcctaacaaacatctgctggctcagagtttgagtctgtagagaaggatcattgctccaagccaggtcttaacatccattggtttttctg

SEQ ID NO: 460483 - DNA, 472 bp, Homo sapiens
ctaaaattggaacaatacagagaaagttagaatggcttctgcataaggaggcagcccaactcttgaggcattccatattttgtgcagtcactggaagatcatttcactatctgctgactagctctaaggaaacagtgtgaatcaaagcaaaatgggtgccaccaaaatatcgaaatgtgatttgtgctgcaaaaatagtcatggaagatggtctgtgagatgatttagagctgaataatgtgttcggtgcaaaatatattaagtatgtaygtcaaaaattagagaatgtcaatttgcagcttcttcatgaaaactgaaaaaaaataaaagtagagttttggtctcccatgtcagctggaattgaacatcaatataaagcattatcctaacaaacatctgctggctcagagtttgagtctgtagagaaggatcattgctccaagccaggtcttaacatccattggtttttctg

SEQ ID NO: 460484 - DNA, 521 bp, Homo sapiens
agtgtgaatcaaagcaaaatgggtgccaccaaaatatcgaaatgtgatttgtgctgcaaaaatagtcatggaagatggtctgtgagatgatttagagctgaataatgtgttcggtgcaaaatatattaagtatgtatgtcaaaaattagagaatgtcaatttgcagcttcttcmtgaaaactgaaaaaaaataaaagtagagttttggtctcccatgtcagctggaattgaacatcaatataaagcattatcctaacaaacatctgctggctcagagtttgagtctgtagagaaggatcattgctccaagccaggtcttaacatccattggtttttctgcccttagcacaacaaattggtcaactccgtaatagtggacaatcacattatctactttaatgagagatttatgaaaaaatttagttacaaactatgacacagttgagatgccctgaattataagccataaggagtaggacaactaagaagcaaaattaggacttaataacattttctgaaaa

SEQ ID NO: 460485 - DNA, 568 bp, Homo sapiens
tatgtagtgaaaaaggaaaacataagaaatcatggcagaaatggcacaaagtataaaagaggcttggtataattgagagaggctttctggtgataaaatttgaactgatttctggagaatgggttgaatttcaatagagggagatggaccaaagttaattctgatgagggaaatgtcttgagcaaaatctaaaaaagggaaacatgcccattttaagtgttaatgagggtccagttggggtacagtgcaggaagagagttctagtgaaaaggtagttggtctgatrggtcagggtcttgcaggcagaggcagatactatcattatttcatttttcagattggaaaacagacacagagagcccaaggtcacaaagccagaaagtgaatctgggcagtctagcggtagcaccctcttcttaaatgatctattaaagggcctcttctccaggcactctaaaactgttctccatctttagcttccccagagtacagtgaggccccctgtttacctcacaggatggggtctcagaaaagcggcagatcccaactcatactagcttttaaataa

SEQ ID NO: 460486 - DNA, 550 bp, Homo sapiens
  misc_feature (1)...(550): n = A,T,C or G
ttaattctgatgagggaaatgtcttgagcaaaatctaaaaaagggaaacatgcccattttaagtgttaatgagggtccagttggggtacagtgcaggaagagagttctagtgaaaaggtagttggtctgataggtcagggtcttgcaggcagaggcagatactatcattatttcatttttcagattggaaaacagacacagagagcccaaggtcacaaagccagaaagtgaatctgggcagtctagyggtagcaccctcttcttaaatgatctattaaagggcctcttctccaggcactctaaaactgttctccatctttagcttccccagagtacagtgaggccccctgtttacctcacaggatggggtctcagaaaagcggcagatcccaactcatactagcttttaaataaaaaaatatataaccttgcaaaaaagaagcgcagaggttgggagagagccagcactgggtaattcagcagctcaacaatgaatccaagacctgggtattgggtgacctatgcacaccaccatgcttatgggccagnn

SEQ ID NO: 460487 - DNA, 550 bp, Homo sapiens
  misc_feature (1)...(550): n = A,T,C or G
ttaattctgatgagggaaatgtcttgagcaaaatctaaaaaagggaaacatgcccattttaagtgttaatgagggtccagttggggtacagtgcaggaagagagttctagtgaaaaggtagttggtctgataggtcagggtcttgcaggcagaggcagatactatcattatttcatttttcagattggaaaacagacacagagagcccaaggtcacaaagccagaaagtgaatctgggcagtctagcggtagcaccctcttcttaaatgatctattaaagggcctcttctccaggcactctaaaactgttctccatctttagctyccccagagtacagtgaggccccctgtttacctcacaggatggggtctcagaaaagcggcagatcccaactcatactagcttttaaataaaaaaatatataaccttgcaaaaaagaagcgcagaggttgggagagagccagcactgggtaattcagcagctcaacaatgaatccaagacctgggtattgggtgacctatgcacaccaccatgcttatgggccagnn

SEQ ID NO: 460488 - DNA, 565 bp, Homo sapiens
tccttggtagatctataccttgttttttgattcaatatcagcaccatattttatcagtgctttggccattaatttatcttcattgtagatagcatagtgttttagcggtatttccatactcatctggaatatttcgatcagcgccatgttccagcaacattaacacacattcatctttctggcattgtayggcctgtctgtattagaccaaaaacaaattacaagtcctaggaattcaaaataacattccacagctttcaccaactagttatatttaaatgagaaaactcatttttatgctatctattgaaatcaaacccatctcacgctgatatagttgactactgcatacctttatcagagctgtcctttttttgttgtcaaggacattaagttgacatcgtctgtccagcaggagttgtactacttgtgaatttccattggcagaggccaaatgtagagcagtcctatgagagtgagaagacttgaggaaattgtagttcactagctaatgccacattaatgattcatgtagttgcaaacactgaatagcctattactctgc

SEQ ID NO: 460489 - DNA, 565 bp, Homo sapiens
tccttggtagatctataccttgttttttgattcaatatcagcaccatattttatcagtgctttggccattaatttatcttcattgtagatagcatagtgttttagcggtatttccatactcatctggaatatttcgatcagcgccatgttccagcaacattaacacacattcatctttctggcattgtatggcctgtctgtattagaccaaaaacaaattayaagtcctaggaattcaaaataacattccacagctttcaccaactagttatatttaaatgagaaaactcatttttatgctatctattgaaatcaaacccatctcacgctgatatagttgactactgcatacctttatcagagctgtcctttttttgttgtcaaggacattaagttgacatcgtctgtccagcaggagttgtactacttgtgaatttccattggcagaggccaaatgtagagcagtcctatgagagtgagaagacttgaggaaattgtagttcactagctaatgccacattaatgattcatgtagttgcaaacactgaatagcctattactctgc

SEQ ID NO: 460490 - DNA, 642 bp, Homo sapiens
ctttctggcattgtatggcctgtctgtattagaccaaaaacaaattacaagtcctaggaattcaaaataacattccacagctttcaccaactagttatatttaaatgagaaaactcatttttatgctatctattgaaatcaaacccatctcacgctgatatagttgactactgcatacctttatcagagctgtcctttttttgttgtcaaggacrttaagttgacatcgtctgtccagcaggagttgtactacttgtgaatttccattggcagaggccaaatgtagagcagtcctatgagagtgagaagacttgaggaaattgtagttcactagctaatgccacattaatgattcatgtagttgcaaacactgaatagcctattactctgccttcaaaacaaactcaattttcctttgaagaaagcacactacttattacctctcattactcactgtattaatgaaagagcagcctatttgaatagaaagagcatagctcttggatgacattcaacttgggctggaatcctacttgaagctctgtcacttcctagctgttgcttagcctttttgtgtctcaatttcctcatcaataaaatgggaatgaaaatagtcagtttctcagaggaaaccactgtaat

SEQ ID NO: 460491 - DNA, 642 bp, Homo sapiens
ctttctggcattgtatggcctgtctgtattagaccaaaaacaaattacaagtcctaggaattcaaaataacattccacagctttcaccaactagttatatttaaatgagaaaactcatttttatgctatctattgaaatcaaacccatctcacgctgatatagttgactactgcatacctttatcagagctgtcctttttttgttgtcaaggacattaagttgacatcgtctgtccagcaggagttgtactacttgtgaatttccattggcagaggccaaatgtagagcagtcctatgagagtgagaagacttsaggaaattgtagttcactagctaatgccacattaatgattcatgtagttgcaaacactgaatagcctattactctgccttcaaaacaaactcaattttcctttgaagaaagcacactacttattacctctcattactcactgtattaatgaaagagcagcctatttgaatagaaagagcatagctcttggatgacattcaacttgggctggaatcctacttgaagctctgtcacttcctagctgttgcttagcctttttgtgtctcaatttcctcatcaataaaatgggaatgaaaatagtcagtttctcagaggaaaccactgtaat

SEQ ID NO: 460492 - DNA, 642 bp, Homo sapiens
ctttctggcattgtatggcctgtctgtattagaccaaaaacaaattacaagtcctaggaattcaaaataacattccacagctttcaccaactagttatatttaaatgagaaaactcatttttatgctatctattgaaatcaaacccatctcacgctgatatagttgactactgcatacctttatcagagctgtcctttttttgttgtcaaggacattaagttgacatcgtctgtccagcaggagttgtactacttgtgaatttccattggcagaggccaaatgtagagcagtcctatgagagtgagaagacttgaggaaattgtagttcactagctaatgccacattaatgattcatgtagttgcaaacactgaatagcctattactctgccttcaaaacaaactcaattttcctttgaagaaagcacactacttattacctctcattastcactgtattaatgaaagagcagcctatttgaatagaaagagcatagctcttggatgacattcaacttgggctggaatcctacttgaagctctgtcacttcctagctgttgcttagcctttttgtgtctcaatttcctcatcaataaaatgggaatgaaaatagtcagtttctcagaggaaaccactgtaat

SEQ ID NO: 460493 - DNA, 426 bp, Homo sapiens
actgtattttattgagtctaagatgatcattgtctccatgttttaacatttcttacactgaaataccacttataattcatgatttactataattataattggcagcatttaaataattttcttagtgagacataaaataatggggcatcatacaatccctggtgccttayactaagtagaatatgttataatataacaggtctggggcagttccagtcagatgactagcatttagataaattttagtttttaaaagaactatggaataagagggctgaggtgaaaacaaaaacaattttctaaaataatctatttcttactttggttttcaaaaactttaagccaaagaaaacttgaaattcaaatgaatagcatgggctcatttttttcaatacttagatttatacaatgtatgtacatcagata

SEQ ID NO: 460494 - DNA, 426 bp, Homo sapiens
actgtattttattgagtctaagatgatcattgtctccatgttttaacatttcttacactgaaataccacttataattcatgatttactataattataattggcagcatttaaataattttcttagtgagacataaaataatggggcatcatacaatccctggtgccttataytaagtagaatatgttataatataacaggtctggggcagttccagtcagatgactagcatttagataaattttagtttttaaaagaactatggaataagagggctgaggtgaaaacaaaaacaattttctaaaataatctatttcttactttggttttcaaaaactttaagccaaagaaaacttgaaattcaaatgaatagcatgggctcatttttttcaatacttagatttatacaatgtatgtacatcagata

SEQ ID NO: 460495 - DNA, 506 bp, Homo sapiens
tactgtattttattgagtctaagatgatcattgtctccatgttttaacatttcttacactgaaataccacttataattcatgatttactataattataattggcagcatttaaataattttcttagtgagacataaaataatggggcatcatacaatccctggtgccttatactaagtagaatatgttataatataacaggtctggggcagttccagtcagatgactagcatttagataaattttagttyttaaaagaactatggaataagagggctgaggtgaaaacaaaaacaattttctaaaataatctatttcttactttggttttcaaaaactttaagccaaagaaaacttgaaattcaaatgaatagcatgggctcatttttttcaatacttagatttatacaatgtatgtacatcagatatttccaatcattcatattaggatttaagactgttataaattttctctttttaaaatggatttatgaaactatttgtgga

SEQ ID NO: 460496 - DNA, 426 bp, Homo sapiens
actgtattttattgagtctaagatgatcattgtctccatgttttaacatttcttacactgaaataccacttataattcatgatttactataattataattggcagcatttaaataattttcttagtgagacataaaataatggggcatcatacaatccctggtgccttatactaagtagaatatgttataatataacaggtctggggcagttccagtcagatgactagcatttagataaattttagtttttaaaagaactatggaataagagggctgaggtgaaaacaaaaacaattttctaaaataatctatttcttactttggttttcaaaaactttaagccaaagaaawcttgaaattcaaatgaatagcatgggctcatttttttcaatacttagatttatacaatgtatgtacatcagata

SEQ ID NO: 460497 - DNA, 606 bp, Homo sapiens
ataaattttagtttttaaaagaactatggaataagagggctgaggtgaaaacaaaaacaattttctaaaataatctatttcttactttggttttcaaaaactttaagccaaagaaaacttgaaattcaaatgaatagcatgggctcatttttttcaatacttagatttatacaatgtatgtacatcagatatttccaatcattcatattaggatttaagactgttataaattttctctttttaaaatggatttatgaaactatttgtggagcttttytcaacttttacattcggggatacaggtgcaggatgtgcaggttggttaacataggtaaacgtgtgccaagggggttggttgtacagattatttcattacccaggtgttaagcctagtacccgttagttctatttcctgcttctttccttcctcccaccctccaccctctgataggccccagtgtgtgttgcttccctctaggtgtctgtgtgttctcctcatttagctcccacctataagagagaccatgcagtatttggttttctcttcctatgttagtttgttaaggataatggccttcaacaccatccatgtccctgcaaaggaca

SEQ ID NO: 460498 - DNA, 606 bp, Homo sapiens
ataaattttagtttttaaaagaactatggaataagagggctgaggtgaaaacaaaaacaattttctaaaataatctatttcttactttggttttcaaaaactttaagccaaagaaaacttgaaattcaaatgaatagcatgggctcatttttttcaatacttagatttatacaatgtatgtacatcagatatttccaatcattcatattaggatttaagactgttataaattttctctttttaaaatggatttatgaaactatttgtggagcttttctcaacttttacattcggggatacaggtgcaggatgtgcaggttggttaacataggtaaacgtgtgccaagggggttggytgtacagattatttcattacccaggtgttaagcctagtacccgttagttctatttcctgcttctttccttcctcccaccctccaccctctgataggccccagtgtgtgttgcttccctctaggtgtctgtgtgttctcctcatttagctcccacctataagagagaccatgcagtatttggttttctcttcctatgttagtttgttaaggataatggccttcaacaccatccatgtccctgcaaaggaca

SEQ ID NO: 460499 - DNA, 550 bp, Homo sapiens
agaaggcatgctgaatttttgagttttyagtgttcttgcacagagtctttttctcatctttatgggcttatccatcttcaatctttgaggttgctgacgtttggacagggtatttttcctttattatatctgatgaccttgaggatttgattgtggtgtaaggtggattcagccaacaggttttgtttttggaggattttaaggggccaacatgcagctcccaattcttggactgtgtgctttaactctggggaacttgtattgggccacaactttgttctctggctcctcgaggtttggagtccactgcactgaggggaccaaagtgcggcagctgtggcagaatgctaccagatgcaaaagtccctgcctccctgtgggcattcacccagtggtggaggcaaaacagctggggtgtgggccagggggcccctgctgtgtgtgctgttgcactggaggtagtgctggtttggggtgggtggctggccagtgaaggtgccttctttgatcccccccaagcaacagtggtcactcagggtataagaaggtc

SEQ ID NO: 460500 - DNA, 342 bp, Homo sapiens
cttcaatctttgaggttgctgacstttggacagggtatttttcctttattatatctgatgaccttgaggatttgattgtggtgtaaggtggattcagccaacaggttttgtttttggaggattttaaggggccaacatgcagctcccaattcttggactgtgtgctttaactctggggaacttgtattgggccacaactttgttctctggctcctcgaggtttggagtccactgcactgaggggaccaaagtgcggcagctgtggcagaatgctaccagatgcaaaagtccctgcctccctgtgggcattcacccagtggtggaggcaaaacagctggggtg

SEQ ID NO: 460501 - DNA, 342 bp, Homo sapiens
cttcaatctttgaggttgctgacgtttggacagggtatttttcctttattatatctgatgaccttgaggatttgattgtggtgtaaggtggattcagccaacaggttttgtttttggaggattttaaggggccaacatgcagctcccaattcttggactgtgtgctttaactctggggaacttgtattgggccacaactttgttctctggctcctcgaggtttggagtccacygcactgaggggaccaaagtgcggcagctgtggcagaatgctaccagatgcaaaagtccctgcctccctgtgggcattcacccagtggtggaggcaaaacagctggggtg

SEQ ID NO: 460502 - DNA, 550 bp, Homo sapiens
agaaggcatgctgaatttttgagtttttagtgttcttgcacagagtctttttctcatctttatgggcttatccatcttcaatctttgaggttgctgacgtttggacagggtatttttcctttattatatctgatgaccttgaggatttgattgtggtgtaaggtggattcagccaacaggttttgtttttggaggattttaaggggccaacatgcagctcccaattcttggactgtgtgctttaactctggggaacttgtattgggccacaactttgttctctggctcctcgaggtttggagtccactgcactgaggggaccaaagtgcggcagctgtggcagaatgctascagatgcaaaagtccctgcctccctgtgggcattcacccagtggtggaggcaaaacagctggggtgtgggccagggggcccctgctgtgtgtgctgttgcactggaggtagtgctggtttggggtgggtggctggccagtgaaggtgccttctttgatcccccccaagcaacagtggtcactcagggtataagaaggtc

SEQ ID NO: 460503 - DNA, 575 bp, Homo sapiens
acatgatttcattctttttgatgactatgtagtattccatgtgtatatgtaccgctaaaatggaattttacatcaacagacctgagcttgaatcttgggcccataatatacaatagagttacttgactttgtgttgcttgtgttaaaattgaaactcatgatcagagcataatatctgatcacttcatgacaaaaatttcaataatctaataactgatcaaccctctaacccatcttcctcatcctatacgcacacatatacaaaccatcatctctgatgtcatccrtatttcccagtgttatctttatgattctatgccttggttcttactgtggtcaggtgtaataaaatgaacaagagaatataagctctttgaaggcagtgatttattctttttgcccagtgtccccagtatctagaacagggcctagagcatagtaggtgtcgaatatacatttgttgacttatttgaaattagaaaacctaggatgaatgctgaggcttgttcttagttcattttcaagcacttgtcttctccaataacctatttagggtatcagaatttagagtgaga

SEQ ID NO: 460504 - DNA, 518 bp, Homo sapiens
gccctctgtccccaccctcaattttttgcctagtcacacacacacaaaaacaccccccccacaaaaaatgatgttcttcagttagaaggaaacaagaaagtggagacacaccctctctataacataggtggtaaggactaccgaaagctaactgtggaacaggaacattggcatatgctctccagagtctaaggccccacacaaggcacatcacatatcagcctactgctggagaaatctgagttacattggtcactgaatgtttcttacaccgcagcaaaaagcaacctttgttcctgcccacactaatagcatgacataaaaatgaaacagaaatataatttattctcgacataattatcttatgatctactggttttctacatcagatgatttgcattttttagaaattgggagrcacataaaagcaagttagaaatttgagttatgagttataatattttcaaaggataaaaagtcaacagaatcaaattcagagataattcagatgttggaac

SEQ ID NO: 460505 - DNA, 473 bp, Homo sapiens
tcacaaatatgggtagacaaaaagattattcatgttcacaggatttaaagcagggatgtctaatcttttggcttccttgggccacactggcaaaattgtctcaggccacacgtaaaatacactaatactagcaatagctgatgagctaaaaaaaaattgcaaaaaatatctaataaygttttaagaaagtttacaaatttgttttgggctgcactcaaagctgtcctgggctgcactgatttaaagctttgattcaagtgtttctacaaagacaagtgggactggaacagccaatattatttcaaaagtcatgatattactcggggcttggtagggctcaggtaacttatctgaatcaaaaattaaaacagaatgatgctgtgggtgagccaggcagacttgtgaatgtgaccttctttggaaaaaggatctttatagttgtaattaacttgaggctcactccaagtccagct

SEQ ID NO: 460506 - DNA, 349 bp, Homo sapiens
tctgtaaagtagtgacaagatgaaataccaagtgtaacgtaattaaagggctgttgtgataccaaaataacataatgtgtaaaagtgctaaaaacaagatgccataaagcacagaaggggcccaggagagattaattcatggagaacttactcgtttttttgagacagagtctcactgtgttgctcaggctgcagtgcagtggcrcgatctcagctaactgcaatgtctgcctcctgggttcaagtgattcttgtgcctcagcctcctgagtagctgagactacaggtgcacgccaccaagcctggctaacattttttgtatttttagtagagatggggatttcaccat

SEQ ID NO: 460507 - DNA, 539 bp, Homo sapiens
ttctgcctagttcccaagctgctcctgggagtgtttgtctcctagcaaagagctcaatgaacatgtatagaataaatgacttgrtttgatatgagctatgattaactcttttctccaggagtgctctgccaagaatgagacgatggacacaaaaaccccttgttctctagactgttcaggtgtcatctcctccaagaagccctttggattctctccctccaatcagactggggtatgtgaccctcctctgattttccaaagcaacctgtgcttatctttaccaaaaacacaattctgtctcataacaatcaatttgcttacctgcatgccccactagataggaacttttacacctggatcctcagcacctcacatagtatctggtacaaagtgcaaagacaatgagtgttattgaatgagtggatgaatgatataaagaacaagtgcagtaagagatacacacaaagtagtcctaaggggagacagatgaaggagaagctaaatctgctgttgggttgagtaacagtgccatttgaact

SEQ ID NO: 460508 - DNA, 583 bp, Homo sapiens
gcaagttttagcatttctaaaggcaccagccaaagactgaaagtaatctcatgaatactgagttctctctttctaacaggagycaggtataagcagtgtgacctattgttaggatgtggtcatctgaatagagaggcctgggataaagtcatatgttacttaggcaaggcaaactggctgaccatctagcaagtttaccaaagggtggcatcacttgaacatagtcaccagatttcttggaagggttatcctctttgtgggctcacacattaaattacaagtacactaagagacaaaaaacactaagatactaatttaccaaactcacgagagacacgtgtataaaaacaagagagccatttacttactcccattgagaaatataactacgtaggatattggatatatcagccaattgactgcattatcaattgtgaaggaaaagaatgagatgtaaacacatctacagaatcttggaaatacattgtcaagactgtgtatagttagggattttattgtactttaggaataaaatcagccttatgtaagactattgacagattttctcatgctggcatttaga

SEQ ID NO: 460509 - DNA, 583 bp, Homo sapiens
gcaagttttagcatttctaaaggcaccagccaaagactgaaagtaatctcatgaatactgagttctctctttctaacaggagtcaggtataagcagtgtgacctattgttaggatgtggtcatctgaatagagaggcctgggataaagtcatatgttacttaggcaaggcaaactggctgaccatctagcaagtttaccaaagggtggcatcacttgaacatagtcaccagatttcytggaagggttatcctctttgtgggctcacacattaaattacaagtacactaagagacaaaaaacactaagatactaatttaccaaactcacgagagacacgtgtataaaaacaagagagccatttacttactcccattgagaaatataactacgtaggatattggatatatcagccaattgactgcattatcaattgtgaaggaaaagaatgagatgtaaacacatctacagaatcttggaaatacattgtcaagactgtgtatagttagggattttattgtactttaggaataaaatcagccttatgtaagactattgacagattttctcatgctggcatttaga

SEQ ID NO: 460510 - DNA, 583 bp, Homo sapiens
gcaagttttagcatttctaaaggcaccagccaaagactgaaagtaatctcatgaatactgagttctctctttctaacaggagtcaggtataagcagtgtgacctattgttaggatgtggtcatctgaatagagaggcctgggataaagtcatatgttacttaggcaaggcaaactggctgaccatctagcaagtttaccaaagggtggcatcacttgaacatagtcaccagatttcttggaagggttatcctctttgtgggctcacacattaaattacaagtacactaagagacaaaaaacactaagatactaatttaccaaactcacgagagacacrtgtataaaaacaagagagccatttacttactcccattgagaaatataactacgtaggatattggatatatcagccaattgactgcattatcaattgtgaaggaaaagaatgagatgtaaacacatctacagaatcttggaaatacattgtcaagactgtgtatagttagggattttattgtactttaggaataaaatcagccttatgtaagactattgacagattttctcatgctggcatttaga

SEQ ID NO: 460511 - DNA, 528 bp, Homo sapiens
ctcaccacatcagaaagcaagttacacgaaggcagcgatgtttttytactgtgtccttcatgggttcccagtgcccagaagagtacctggcacctagctgtgctcagcaaatctttattgaatgaatgttgtcgaacactgggactctctgtgggtatgactggtgggggtaggggttagggctcctcccatcaccttgcccttgcccactggggcctttcctgactccaggctgatgcctgcctccctccctgccatctcctggatgcctacatactcagggaagtctcatgtaaatgtgttcctcaggaccccaagtctgtaggatttctctttactgtgccagctctagcctgagaccaaaaagtactcacttaatgttactgagaatatagccttgttggcctttaagacagtggttcccaactggcacccaaccagcacccaggaactcgttagaaatgcaagttctcaggccccaccccagacacactgagccagaaattctggggatgaggcccagcaatt

SEQ ID NO: 460512 - DNA, 528 bp, Homo sapiens
ctcaccacatcagaaagcaagttacacgaaggcagcgatgtttttttactgtgtccttcatgggttcccagtgcccagaagagtacctggcacctagctgtgctcagcaaatctttattgaatgaatgttgtcgaacrctgggactctctgtgggtatgactggtgggggtaggggttagggctcctcccatcaccttgcccttgcccactggggcctttcctgactccaggctgatgcctgcctccctccctgccatctcctggatgcctacatactcagggaagtctcatgtaaatgtgttcctcaggaccccaagtctgtaggatttctctttactgtgccagctctagcctgagaccaaaaagtactcacttaatgttactgagaatatagccttgttggcctttaagacagtggttcccaactggcacccaaccagcacccaggaactcgttagaaatgcaagttctcaggccccaccccagacacactgagccagaaattctggggatgaggcccagcaatt

SEQ ID NO: 460513 - DNA, 576 bp, Homo sapiens
aggtatagagtttgttttgtaaactacaaagagttctggagatggatggatgacaacagtgaatgcacagttcacaatgcactaaaaaatggttaaatgggccaggcacagtggctcacgcctgtaatcccagcagtttgggaggccaaggcaggtggatcacttgattcaaggagtttgagaccagcctggtcaacatggtgaaacctgtctctactaaaaatagaaaaattagccaggtataatggtgggtacctataatcctagctacttggaaggctgaggcctgagaatcacttgaacccaaggggcggaactgcacttcagcctgggtgacagagagagagtctgtctcaccaaaaaaaaaaaaagaaaagggttaaatgataaattttatgctgtgtgccttttaacacattttaaaaaataaactaatgaaaagatacatacattagtctacctccaagcagtgttgtaaggctcaaatgagatagagtttggcacayacactgtattaattaaggggttgtggcccgagtaccttaggctctccctcaggaccttgcatttttagag

SEQ ID NO: 460514 - DNA, 546 bp, Homo sapiens
tcccacagctagcaagtgtcacagcaggcctggaacacaggtgtgctgactctacctccagtagtttttccagccctcatcctgactgtcctgtgatctgtgtattgtgaagctatgagtccagaaagaccctgtagatgcaaaagtctagagaatagctcttccaacactgtcttcatagaagctatgctgttgggatgctccacagcagacaacataaaagttctcttcaaaatgagcattttcttcctctctgktgagtgcacaatgggaacggtgctggaaagcataagcagttcagccatgatgctgaagaggtgggcaaagggcaggttccaggaggccccatgtcataacaaggtgcttgggttttatcctaccagcagaacctttgatggggcttaagtaaaggacaccgtggcaaaaatttgcgcttgagatatttcacgctggcggttgggtgtaggatggatttgagaggattggaggagaggcagagagaactgagaggaggccgcagcttaggtgaggtggtctgaggaaagg

SEQ ID NO: 460515 - DNA, 599 bp, Homo sapiens
ctcccgagtgcgtgtgtgcattctctctctctctctctctctctctggcgttttctctgctcagacctgctgctttcatcacatccacactggcctctttcctccttcaaaactagtctattctgtgcccctctgggtccccttggatttctttaatgaatcccaaaaatgaatggcaatgcatgcaccttctgggatcatctggctcctaaagacctttgacacaactacttggctgcaggtgtgtggaaggattaagcagagaggaaacagcagargctgaggcccagtcaagtagagaaaggagagcctttgctgaaatgccacgccaaagggggtgaggtgcaggagccaggtcctggcatgagggagatggaccagcaccagggaacaggtcaaacgagaggcccaattattggcatgccggaagcagaggcagctggaaggcagaggcagccagaagatggctgatctgttgccagagtgctttacagtcctgccctgtctccactcgggagctgtagcccaaggcgcagggtctgcacgtgtgaggaatgcagagaatggcaggcatcggggagggcccagcgtgaggaggg

SEQ ID NO: 460516 - DNA, 599 bp, Homo sapiens
ctcccgagtgcgtgtgtgcattctctctctctctctctctctctctggcgttttctctgctcagacctgctgctttcatcacatccacactggcctctttcctccttcaaaactagtctattctgtgcccctctgggtccccttggatttctttaatgaatcccaaaaatgaatggcaatgcatgcaccttctgggatcatctggctcctaaagacctttgacacaactacttggctgcaggtgtgtggaaggattaagcagagaggaaacagcagaggctgaggcccagwcaagtagagaaaggagagcctttgctgaaatgccacgccaaagggggtgaggtgcaggagccaggtcctggcatgagggagatggaccagcaccagggaacaggtcaaacgagaggcccaattattggcatgccggaagcagaggcagctggaaggcagaggcagccagaagatggctgatctgttgccagagtgctttacagtcctgccctgtctccactcgggagctgtagcccaaggcgcagggtctgcacgtgtgaggaatgcagagaatggcaggcatcggggagggcccagcgtgaggaggg

SEQ ID NO: 460517 - DNA, 475 bp, Homo sapiens
ggcatccaaatggttgagtccagcatgggggccagggaatgattaaaaagatcatttccagggaatggataaaaagatgcctgctttcttccaacttctatagagggaagagggtccccgcctcttcccaaaacccacaaaatgagaggatttcctmaaataggaaatgggctcagatactaggtagctaaaatgatgagggtccactacattattacttttaatattatgatgactaaataaatatttggtgaattgcatttattctgtaaatgtgctaagtgctatagggtgaacattttaaagaaactttttgataaatgctttgataaaagatatggcaaggttgcacatttggatggtgtcatattgggttttctttctctgagaacaggcaggtctccacaaccttcgaacgattttaacgtgtgtgtgtgtgtgtttgtgtgtgtgtgtgtgtgtgttgaggtgggca

SEQ ID NO: 460518 - DNA, 475 bp, Homo sapiens
ggcatccaaatggttgagtccagcatgggggccagggaatgattaaaaagatcatttccagggaatggataaaaagatgcctgctttcttccaacttctatagagggaagagggtccccgcctcttcccaaaacccacaaaatgagaggatttcctcaaataggaaatgggctcagatactaggtagctaaaatgatgagggtccactacattattacttttaatattatgatgaytaaataaatatttggtgaattgcatttattctgtaaatgtgctaagtgctatagggtgaacattttaaagaaactttttgataaatgctttgataaaagatatggcaaggttgcacatttggatggtgtcatattgggttttctttctctgagaacaggcaggtctccacaaccttcgaacgattttaacgtgtgtgtgtgtgtgtttgtgtgtgtgtgtgtgtgtgttgaggtgggca

SEQ ID NO: 460519 - DNA, 527 bp, Homo sapiens
aatgggcattactttatttaattctcacaattacactgtgatgrgcgaactgaagctcagaggataaatacttctttcaaggtcacacatctagggagttaaaaagtttgggatttgaagccaggtctgcctgcctttgaattcagtgcatctagctacaagtgcagcaaagcaaatagtatgcacatgactagggttagctggggacagggccactgtgtaaacggacatgttagcctggtagatgtcacactggggcaaaaggtgggaggtgacttcgctgtgaggtgagttctccaacaatccttctgttcaagcatctcagacagattcccagcaccccaagcccaaggaggtagactagtcatttacagaacagattttcaaaaatgtgtttttccttaaaaactcctttactataaaaggttaaatgaatttacacccaggttaaaaaaaatctgaagttttctacttacctctgcctctcctccctgtccttctgggcaattaatgatgtcagttttaat

SEQ ID NO: 460520 - DNA, 476 bp, Homo sapiens
ccagaccagctgtcctaagaaggtgtcccataattcgtagatctctgtagttttggacttgtagttcctgccttctctgtcctagagtgggaccttaggtgatcacttttcatagcctgcttctatggttaaaagtcaggccagtttcctgtgcatcaatcattgaagatggaagatggatttccaaccaatcagctctgtgagtttagacaacttgcttaacctctstgtgtcttgattcccttggctgtcaaatggagacaaaatgcctctattaggtttctaaaaggattaaataagaacatatatgtaaaatggtgaagacttgctgtccatacacataagcatcccataaattgtaatggtaattattgatttattattaatatcatattagtcaaccaatgtattagccaagcttcttttgattataaagagctaaaataagaactaaaatctagctcaagagaaaggtg

SEQ ID NO: 460521 - DNA, 458 bp, Homo sapiens
atgtctgtaaccaaagttttttaagaggcaataacagaggagaggatgaggcaataactgaagagacaatgaatgagacattcttagaattgatgaaagataacctcaaattccaaaaccccaaaagattcctagtaagacagataaattgagacacacacacasagacacacacacacacacacacacacacatgcacacacacaccccaaacacattgttagaaaacttcagaatgccaaagacaaagatgacattaaaattaactgaagagaaaataaaattaccaataaaggaatggaaattagatagttgacttctcagcaacaaaaacataagaagacagaagattgtgggaaaatatttttaatgtattgagagagtaactctcaaatagaattatttacccattaaaattattggtcacaatatgttacattatgctttggtaaaaaatt

SEQ ID NO: 460522 - DNA, 458 bp, Homo sapiens
atgtctgtaaccaaagttttttaagaggcaataacagaggagaggatgaggcaataactgaagagacaatgaatgagacattcttagaattgatgaaagataacctcaaattccaaaaccccaaaagattcctagtaagacagataaattgagacacacacacagasacacacacacacacacacacacacacatgcacacacacaccccaaacacattgttagaaaacttcagaatgccaaagacaaagatgacattaaaattaactgaagagaaaataaaattaccaataaaggaatggaaattagatagttgacttctcagcaacaaaaacataagaagacagaagattgtgggaaaatatttttaatgtattgagagagtaactctcaaatagaattatttacccattaaaattattggtcacaatatgttacattatgctttggtaaaaaatt

SEQ ID NO: 460523 - DNA, 574 bp, Homo sapiens
tggggagggacacatggtttcattaaaatttccaaatattcactctccttaatccccatgttcacttgcaagcaaaatgtaccattatgcctctgcctcccttatttgcccatattgtttctgtaaatttttatctatcttcatttcagatctatagtgataaaacctatactccaaaatattatatgtttaattactaatgaaatacttggttttatatagtgaatcatttcawagcatagcccctaagaatatgggctcaggaaccagatggcctgggtgtggatactggctctggttgcatgactccacaaggtatttaacctctctgtgcctcagatacctaatctataaaaatgaggccgataatagtacccaacccattagattggtgaaaggattaaatcagtaatagatggaaagcacagagaacattgtctgactttaaaaatagctaaataaatgctagctgccattattattccaataaaatgtactccctaccatagtatcacaattttttaatcatttcaataatccagcaaatgagaagtataataacagaatgtatgta

SEQ ID NO: 460524 - DNA, 532 bp, Homo sapiens
attccactgtatgaatatatcacggtttgtgtattcattctcctattgatgtacacctaggcttcaaatttttgaccattgtgataaagctagtaagaacaattttgtacaaatctttttacagacaygtgttttcatttcccttgggtaaatacccaggagtaaaactgctgcatcaaggggtagatgtctgaatgttgatttcacagtctcaccaacaacaaaagagttccagttgctccacatcctcgtgaatgtttaatattatcaacctttctcattttagctcttctggtaggtatgaagaaatttaagctgctattttagcaagttttccaaattaggaaaaaaatacttatgtacaaagatcaagtctgaagtaaatataggttgaaggaaatctagaaattggcgtgtgcaattttagaaaagtttaccttatccaaactcaggccatacagctaatagtttgagagaatgaacaatggctgaagggatatggaacaagcagccagacacatttttcagtttt

SEQ ID NO: 460525 - DNA, 548 bp, Homo sapiens
aacaggcaatatacatcgagaagaaaactatttttcaccctaatgttactaaatattaactatgtgtttttaaatcaatagtaaattttaaaaaaaattatctatgtgctggaattttccatacactagcaacataagcaatcagcaactggcactgaggaccctcttcaagctaccattttccttccctctctcttaaggtgtccttgaagaatgttcagaaaggagttcattgttccaacaaatcttttcagttttctaattagctcacttctggtagtgaacacagagtcccatcgaacacacttttaagtgcccccagaaaacatttgaattcaatctccctgtggttgacttcagttagtygcctttcctcaccaagaatagttatcagaccttcacatgtacccccaaacctaaaataaaacattttaaaaagaatattcaattgtaataacaaaataagctacattgtaattttaagatgggaggctttcctgatttttattctagtgggatataacatcatgacttccataattttgaaa

SEQ ID NO: 460526 - DNA, 573 bp, Homo sapiens
tggttcttttgttggcctctgccttatgctctaaagcttttgtctattggctttaatatccagatcatctatgagtctgcttctattgcctgccttttctctttattactggccacattttattgccttgtcccatatctactagttttttattatgtgtcagacatagggtataaaaaaatgtgaagattccaaatgctatcttctacagagagggttctccctttcctctgttaggcagagagggtaaggagttggtcmttttgattacatgagaaattgatacaacgagaaactgtgttgagtgtgagctgcatttttattaagactttctctacctctaatttgctcctattctagagcatgttccttctgggcttgtgattgtgagccctggagtcttcatctcctcagccctgaaagactgcaggagatccagctctgtccttcagaagttccagcctagatctttagccctctgtccctcatagcttcaatacttggcaaatgtcttaagaaaaaactggaggtgtatgtaagggaaggtctccaggggacctgtttcctaagcat

SEQ ID NO: 460527 - DNA, 548 bp, Homo sapiens
tgctatctcagaaattaaattctcttgggtgggatccaaaaggatttgctttaattatgaaagtattttcagaggcaaatagtcttaaagtgaagtttcaatggactgcaaacagattatctttagcatgaaacatcttaagaagatgaagtcatgagaagtacctgttcagcaaaaagtaaaaggagtccaaagaaaatatatacacatgagactgggcatggtggctcttgcctgtaatccyagcacttttggaggctgaggcaggtagatcgcttgaggtcaggagttcgagaccagcctggccaaaatggtgaaacctgcctctactaaaaatacaaaaattagctggtctttgtggcacgtacctgtaatcccaactacgggagaggctgaggcaggagaattgcttggaccctggaggtggaggttgttgcagtgagccgagagttcgccactgccctccaacctgagtgacagagtgagtgggacgccatctcaaaaaaagaaaaaaagaaaacatatgcacatgaaaaaatcatttaaaa

SEQ ID NO: 460528 - DNA, 548 bp, Homo sapiens
tgctatctcagaaattaaattctcttgggtgggatccaaaaggatttgctttaattatgaaagtattttcagaggcaaatagtcttaaagtgaagtttcaatggactgcaaacagattatctttagcatgaaacatcttaagaagatgaagtcatgagaagtacctgttcagcaaaaagtaaaaggagtccaaagaaaatatatacacatgagactgggcatggtggctcttgcctgtaatcccagcacttttggaggctraggcaggtagatcgcttgaggtcaggagttcgagaccagcctggccaaaatggtgaaacctgcctctactaaaaatacaaaaattagctggtctttgtggcacgtacctgtaatcccaactacgggagaggctgaggcaggagaattgcttggaccctggaggtggaggttgttgcagtgagccgagagttcgccactgccctccaacctgagtgacagagtgagtgggacgccatctcaaaaaaagaaaaaaagaaaacatatgcacatgaaaaaatcatttaaaa

SEQ ID NO: 460529 - DNA, 548 bp, Homo sapiens
tgctatctcagaaattaaattctcttgggtgggatccaaaaggatttgctttaattatgaaagtattttcagaggcaaatagtcttaaagtgaagtttcaatggactgcaaacagattatctttagcatgaaacatcttaagaagatgaagtcatgagaagtacctgttcagcaaaaagtaaaaggagtccaaagaaaatatatacacatgagactgggcatggtggctcttgcctgtaatcccagcacttttggaggctgaggcaggtagatcgcttgaggtcaggagttcgagaccagcctggccaaaatggtgaaacctgcctctactaaaaatacaaaaattagctggtctttgtggcacgtacctgtaatcccaactacgggagaggctgaggcaggagaattgcttggaccctggaggtggaggttgttgcagtgagccgagagttcgccactgccctccaayctgagtgacagagtgagtgggacgccatctcaaaaaaagaaaaaaagaaaacatatgcacatgaaaaaatcatttaaaa

SEQ ID NO: 460530 - DNA, 577 bp, Homo sapiens
tggctggggagctcttccacattgtcaggaacgctggaaaaaggctgaaagagaatgatgagaaaaaacctggagaatggcaaatgcttcactgaagcaatctgctacattcctccttgcagagtgggatgcctggcctgagatgagagaagtaataggactgagaggaagtgaaagaaatagaacccgaggagagcaggacagaaagaaaagatttatagcatggattgtagccactctaatatttgggctcctcctgaacttaatccaacttccacgttactgaaaatttattatttcccttatggatttgtagaaaamagatagcaaatgagtaaggaaaatggaaagagacccaaaaaagagacaaaaaatggagaggactgtgagtccaattcctgtttctcctgcttttgtcagaccaagtaaaacacttaaaatcgtcagtggatattggctgaaccttgccattttgaaagtggctattcaaaccttttagagacggagctggtcattgcctcagttattggccaaggtatgacatgaactaatagcacttcagggacaatggcctttc

SEQ ID NO: 460531 - DNA, 540 bp, Homo sapiens
ggctattcaaaccttttagagacggagctggtcattgcctcagttattggccaaggtatgacatgaactaatagcacttcagggacaatggcctttcaatgaccatcaggcatcagtgcttctaaattggccaattttgagtgtcaggaggccagaagacataccatcacataagaaaaacactttaatccagtcattataaagtaggagcaaaacagagtggctgtggtgtttatagctatagctgtaatctcagtctaggtccattcagtcaagaagattgtttccagtctactagaaaacacttccaataagcctgaattacaaccccaatatcatttyagttttttagattaacatgtgaaataaagagtttttcttagtcacagttacttttactgccaaaaacccaatgaatatctttccctctggaaccaaatacactgtttaattttaatctcttagctgactgacacaggaacaaaactggttttgcattttcccttttcatttacttttctgcaattgatcactggcctt

SEQ ID NO: 460532 - DNA, 387 bp, Homo sapiens
tacaaatatgtgtagaacatcrccttttctttattgaccatggatttgagtatcactgtcttatctcttcctcaggcttagaatagacaaggatctattttcatttatccttctacttcccatccatttccaaagttcttaaacatttatttcaccttgtcttattatagatgctaattccctctcattagccaagcttgttagtttgacacaaacccagtattcagaccttgaggaatagctctgtcaattctaggaaggattatcacctgtgtttccttaattatgtttcccttgataccagaaagaatcctagctttttgcctactctgggtttagggccagttttagttgcagtgtggaattttcctaagcactccatagtct

SEQ ID NO: 460533 - DNA, 573 bp, Homo sapiens
aggttactgtgtgcgcagggactgaccactctatggacaatttgttgctgctgcatatgataaattggtgtaggaaagaattggttggattctgagtataatgtgaattttgagaaggaagaggaagctttctgtgggcaggagaagcttcattcatctcttgatatttggtactgaatctctcctttctcttcatagcaagctccttggaagaataatccatgctgcctccacgttcttgcctctcactctttcttccrtgctttgcaatagggcttccatatgcataattcaatggaaattgcaacaacaaaggccagtggtatttttaaccatcaattgcagtggcactctaaatttctcattttaattaacttgcctgtggtatttgaccagatcattgtttctccaattttgaaactcatttgattttcatataactcattgacaatttatttgagtcttttgtgagttctttctatgtgtagctattcttctcattttactagttcactgtaggtaatttcttctcccaatattttaactaacatttaaatgattttgacattcata

SEQ ID NO: 460534 - DNA, 634 bp, Homo sapiens
aactcatttaaccttcacaccacacatgatgtgcatatgaatcgtttcctcattttacagttgaaggaacccagacaaatggaagtgaaggtactatatgctcttatagcgttgaggctactgttctttaataacaaaaatgtcttcacaaataattagtatatatcgagctttcattaggagaccatcatagtgccaacatttcatttgatttttctcaatgtctttcttcaagacccctagcgctttctctgaatgggaattcagtccaaagagctcaaaattgagacagtggtaaaacaataacttgttcgttcrttcattcattcattcattcattcattcatttgtttaacaaatatcctattcactgcacatctcctatgcgcaaggcactttcctaggcagaaggggtacaaaggccctcaggggcattaggttatattacacaaccaaataaataaggtcattacagattagcgtgtgcagtcagaaaaaaaaaaaacccagcagagaacaggtttaaaaatacaaagaacgtcttcctttagagaggaatagttataaaaaagcttttctgaggagatgacacttgaaatgagaactaaggagatgagtcctgtgaaaagccagg

SEQ ID NO: 460535 - DNA, 634 bp, Homo sapiens
aactcatttaaccttcacaccacacatgatgtgcatatgaatcgtttcctcattttacagttgaaggaacccagacaaatggaagtgaaggtactatatgctcttatagcgttgaggctactgttctttaataacaaaaatgtcttcacaaataattagtatatatcgagctttcattaggagaccatcatagtgccaacatttcatttgatttttctcaatgtctttcttcaagacccctagcgctttctctgaatgggaattcagtccaaagagctcaaaattgagacagtggtaaaacaataacttgttcgttcgttcattcattcattcattcattcattcatttgtttaacaaatatcctattcactgcacatctcctatgcgcaaggcactttcctaggcagaaggggtacaaaggccctcaggggcattaggttatattacacaaccaaataaataaggtcattacagattagsgtgtgcagtcagaaaaaaaaaaaacccagcagagaacaggtttaaaaatacaaagaacgtcttcctttagagaggaatagttataaaaaagcttttctgaggagatgacacttgaaatgagaactaaggagatgagtcctgtgaaaagccagg

SEQ ID NO: 460536 - DNA, 646 bp, Homo sapiens
aggggccctgaaactgcattaacttccaagtaaatttgtctctgcaatgatgagcatttacatggttctaataagtaaacatggaatattggtctaaccaaaatgacattttgaattttatttattcttgcatgtgctttttaacatatttaaaaatagggattatcatataataaatgatatcttacaaatgtctttggccaggcagcaattcataataaggttgtcattacctatgcaagacagcatgggctgggyttggtggctcatgcctgtaatcccagcactttggtaggctgagtcagaattacttgagctcaggagttcaagacgagcttgaacaacgtagtgagacctcatttctattttaaaaaatatcaaaataattagccaggcttggtggtgcacacctgtagtcccagctactcaggaagctgcgttgggaggatcacttgagcctgggagattgaggctgcagcgagctgtgattgcaccactatgctccagtctgggagacagaacaagaccctacctcaaaataaacaaataacaaacagaaagcaagaacatcaaaaaatgcagcatgctgtgttggaggtgttctgtaattggtttggtggcagctacattgttatatacatacata

SEQ ID NO: 460537 - DNA, 646 bp, Homo sapiens
aggggccctgaaactgcattaacttccaagtaaatttgtctctgcaatgatgagcatttacatggttctaataagtaaacatggaatattggtctaaccaaaatgacattttgaattttatttattcttgcatgtgctttttaacatatttaaaaatagggattatcatataataaatgatatcttacaaatgtctttggccaggcagcaattcataataaggttgtcattacctatgcaagacagcatgggctgggcttggtggctcaygcctgtaatcccagcactttggtaggctgagtcagaattacttgagctcaggagttcaagacgagcttgaacaacgtagtgagacctcatttctattttaaaaaatatcaaaataattagccaggcttggtggtgcacacctgtagtcccagctactcaggaagctgcgttgggaggatcacttgagcctgggagattgaggctgcagcgagctgtgattgcaccactatgctccagtctgggagacagaacaagaccctacctcaaaataaacaaataacaaacagaaagcaagaacatcaaaaaatgcagcatgctgtgttggaggtgttctgtaattggtttggtggcagctacattgttatatacatacata

SEQ ID NO: 460538 - DNA, 634 bp, Homo sapiens
ctggggactgttgtggggtggggggaggggggagggatagcattgggagatatacctaatgctagatgacgagttagtgggtgcagcacaccagcatggcacatgtatacatatgtaactaacctgcacaatgtgcacatgtaccctaaaacttaaagtataataataaaaaaaaaggccaacatcaaagtcttttggtattttaagaattcttctataaaaactacatagtcaacatttttgatggtacaaaggatgatagtgaggaaaaacatcaatagtaagacttagtcaaataagtgatttgcaacatcagattctgaatttgaaaaaaatactaggtatacctttaacaatttactttgctcatatttttatgttgatcaagaatgatacattataaaatttatttatggttaattctaaaaaacttctttcagtaaaaagtctatgtgatgaaaaactttygtgtcatagttaattagcataatttttctttctcagtggtacatacaatgatagtatatcttaaaatcaatggcctctcaggttgatcaaatatagtaactataatgggaggcatggctgcccacatatgtgagtgtcagtggggagtgctgaaaataatgtaaat

SEQ ID NO: 460539 - DNA, 427 bp, Homo sapiens
agaataagctgacaagtagccaagtgcatgagagcttatcagatttccattttggaaagatcaccacgtctgcaaagtagaaaaaagatttgacagagacaagattagttagagaagccagttaggaggcaattgccatgctacaaggctaggtaaacgataacttggatgcggatgatgacagtggagaggacagattttaaagagtttgggaagtgaaatctgtgggacttggagacaaactggtaatagaacataaaggagaggaaggtgtcaggagaagcaggtaagttctaagagatgaaggaagaggtgaagrggcaggaaatacaaatacaaacaattataattcaggataataagtcttactgaggaaatgggagcaaattgctatgagaacccaggaaagaatatgtttgtaaacagt

SEQ ID NO: 460540 - DNA, 582 bp, Homo sapiens
aacaaaaaattgacaaattggacttaattaactaaaaagcttctgcgtagtaaaagaaataatcaacagagtaaacagagaaccacaaaatgggagagaatatttgcagactaggcatctgacargagactgatatacacaatctataaggaacttaaatcaatgagaaacaaataactccattaaaaagtgaacaaaggacatgaatatgcacttctcaaaagaagacatacaaacagcaaacaaacatatgttgttgtattccttaagtcttttcccctctgttttttattttgcatattttctactgctcaatcttaacgtttaataaacttttcttccgcaatatctaatctgccattaattccactcattgtattttaaatctcagacattataattttcatctctagaagtttgattttggtctattttttaattcctcatgtctctatgtaacattttcaatcttttctttagattttgaatatatggagtacagttataataaaccttttaatgtctttgtgtattaagtctaacatctgttttagatctgagttggtttcaattgattaattt

SEQ ID NO: 460541 - DNA, 547 bp, Homo sapiens
  misc_feature (1)...(547): n = A,T,C or G
gcgtcaatgggatttacaagcaagaaygtatctaaaagaatagtggaaaaaaatacntgaaaaagaggtgaagggaagggaattaacaattgtagttatgactactacctaccaaactttggactaggtagttttttaaacaagtgatagcttttaattttataactcagcagtgagaaagttttgattataacaattttaaagatatggaaactgcaacccataggggaacctgccccctctaccccactgtaagtgcacctgtatattaccacttcatctctaccaaacagtttaactaccaaagtacaggcttccctttagggcaagcatagtctagtgatgaatcattgctctggcctcaagattttctggcctaagaagactggatggaaactcgcgtccccattccaggattgtctgcagctccttgtctcaccaggatctcctgagagaatgaatatacagattgagctgcttagtatgccaagtcaccttctactagatctcccaccctccccctacgaatggagctggggaaaggacg

SEQ ID NO: 460542 - DNA, 339 bp, Homo sapiens
gaatttggtaattagagcttcatcactggctgagaaaggcctcaggaaggggcagataaaggaactcaaatacagatgtggcctactggaaagttatccctatatatgccagcagagggaattggtagttgtattgtgtatcttacggggggaattttatgctgttcaaggtcccatgtatatatgctgatgagtgtatattatgtgtgttctcaagagcttaaaattttkgagatgaaaacttctcacttcattggtaatctctttgttctatatcctttatgagtggaagtaaaaaaaaaaatctctcatattcacattcactcattcaacaagcat

SEQ ID NO: 460543 - DNA, 536 bp, Homo sapiens
aaccaggtgcggtggctcacgcctgtaatccaagcactttgggaggccaaggagggtggattgcttgagctcaggagtttgagaccagcctgggcaacatggcaaaactccatctctttgtagaaataccaaatttagccggacacggtgacacacccctgtagtctcagctactcgggaggcygaagtgggagaatcgcttgagcccaggaggttgaggctacagtgagctaagattgcgccactcactgcattgtagcctgggtgatacagtgagacactgtgtgtgtgtgtgtgtgtgtatatatatatatatatatatatatatatatatatatatatatatatctcataaggtaattctggtgattgaacgaatttgtttatgtgcatctggcacatagtgagcactcaattgattgtagccattaaatacgcctacaatatatagtggttcgtaagaggtacttgataaagactagagtccttcaaaataatggttcagaaataagagtcataacataataattcactga

SEQ ID NO: 460544 - DNA, 536 bp, Homo sapiens
aaccaggtgcggtggctcacgcctgtaatccaagcactttgggaggccaaggagggtggattgcttgagctcaggagtttgagaccagcctgggcaacatggcaaaactccatctctttgtagaaataccaaatttagccggacacggtgacacacccctgtagtctcagctactcgggaggctgargtgggagaatcgcttgagcccaggaggttgaggctacagtgagctaagattgcgccactcactgcattgtagcctgggtgatacagtgagacactgtgtgtgtgtgtgtgtgtgtatatatatatatatatatatatatatatatatatatatatatatatctcataaggtaattctggtgattgaacgaatttgtttatgtgcatctggcacatagtgagcactcaattgattgtagccattaaatacgcctacaatatatagtggttcgtaagaggtacttgataaagactagagtccttcaaaataatggttcagaaataagagtcataacataataattcactga

SEQ ID NO: 460545 - DNA, 536 bp, Homo sapiens
aaccaggtgcggtggctcacgcctgtaatccaagcactttgggaggccaaggagggtggattgcttgagctcaggagtttgagaccagcctgggcaacatggcaaaactccatctctttgtagaaataccaaatttagccggacacggtgacacacccctgtagtctcagctactcgggaggctgaagtgggagaatcgcttgagcccaggaggttgaggctacagtgagctaagattgcgccactcactgcattgtagcctgggtgatacagtgagacactgtgtgtgtgtgtgtgtgtrtatatatatatatatatatatatatatatatatatatatatatatatctcataaggtaattctggtgattgaacgaatttgtttatgtgcatctggcacatagtgagcactcaattgattgtagccattaaatacgcctacaatatatagtggttcgtaagaggtacttgataaagactagagtccttcaaaataatggttcagaaataagagtcataacataataattcactga

SEQ ID NO: 460546 - DNA, 512 bp, Homo sapiens
aatgacacaaaattcaaactatatgattcaatttatattatgtgtcaaaactaatctatattcccttgtggagaagaggtgtggtaggtagcagggtgtttgaaagagacttttagggtgcacatacagtcatccctcagtatctgctggrgattggttccaggacccctggaataccaaaatccacaactgttcaagtcccttttataaaatgacatagtatttgcaaataacctaggcacttcttccagtatactttatcatccctaaaatacttacagtacctaatactatgtaaaaactatataaatagtcattatactttgctttttatatattatattgaatattttcaattcatggttggttgaatctgtggatgcagaatttgcagatatggagggctgactgtaatgttcaatttactgacctgattgatgatagaggtggtatgttcacttttatcacactaattacttattttttgtgtacttcaataaaatgtctataaa

SEQ ID NO: 460547 - DNA, 512 bp, Homo sapiens
aatgacacaaaattcaaactatatgattcaatttatattatgtgtcaaaactaatctatattcccttgtggagaagaggtgtggtaggtagcagggtgtttgaaagagacttttagggtgcacatacagtcatccctcagtatctgctggggattggttccaggacccctggaataccaaaatccacaactgttcaagtcccttttataaaatgacatagtatttgcaaataacctaggcacttcttccagtatactttatcatccctaaaatacttacagtacctaatactatgtaaaaactatataaatagtcattatactttgctttttatatattataytgaatattttcaattcatggttggttgaatctgtggatgcagaatttgcagatatggagggctgactgtaatgttcaatttactgacctgattgatgatagaggtggtatgttcacttttatcacactaattacttattttttgtgtacttcaataaaatgtctataaa

SEQ ID NO: 460548 - DNA, 596 bp, Homo sapiens
ttttttttaatttattggcctgttattctgtaaatgaaatggtttctcttctatctctaatagcagatacagcttttaaatttgtcttctactccctgcattgttcatattccctcaattacctttttataattcatgattttgttttttgttcttwtgtgttggtcattttcctcaaatgctgatgatccctagctgtgtgttcatatttaaaagcacggcacaaaagcctcattggcaactctgtatgcaagcttggagcttgtagaatggtgaatgtaatgggatgactgggagccccccaaaagatttgttcacatcctaagtcctggaacatgtgaatgttactttatttggaaaaataatctttgcagattattaagttaaggatgttcaaataagagatcatcctggcttatcagaatgaccctaaatccaatgacaagtggccttataaaactgcacagacattgaaaaagaggcaatatgatcacagaggcagagattacagtgacgtggctataagccaaggaatgcctggggctgccagaagctggaagaggaagaaaatcaattctcctttagagcccttggag

SEQ ID NO: 460549 - DNA, 596 bp, Homo sapiens
ttttttttaatttattggcctgttattctgtaaatgaaatggtttctcttctatctctaatagcagatacagcttttaaatttgtcttctactccctgcattgttcatattccctcaattacctttttataattcatgattttgttttttgttcttatgtgttggkcattttcctcaaatgctgatgatccctagctgtgtgttcatatttaaaagcacggcacaaaagcctcattggcaactctgtatgcaagcttggagcttgtagaatggtgaatgtaatgggatgactgggagccccccaaaagatttgttcacatcctaagtcctggaacatgtgaatgttactttatttggaaaaataatctttgcagattattaagttaaggatgttcaaataagagatcatcctggcttatcagaatgaccctaaatccaatgacaagtggccttataaaactgcacagacattgaaaaagaggcaatatgatcacagaggcagagattacagtgacgtggctataagccaaggaatgcctggggctgccagaagctggaagaggaagaaaatcaattctcctttagagcccttggag

SEQ ID NO: 460550 - DNA, 585 bp, Homo sapiens
ttgaagtaagacaattcacactacagaaactccacaagtgtatttgatagaaaagttggagagaaataatagtgaaataacccctccctggccattagaraaatacatgttgcaaacaacttttccccacaactcactccatgtagaaggctaagcaaagagcatcagctgcttcactgcttgtcctgagactgaaactcctcaacaccaaagtccttccagttagttaatcccaaacctgcctctgatcctggtcttccttggatgggcatcacccaagcaagcacctcctcacatcttcagatccttcagtaacccctgccctgggaagccctccccagacagagggactccgtgctaccacagcttctctgtactcctaggatttgcatttaccatttcctacggtaattgtttacctgtcattcttacttatattcccagtccctatcactgggcctgagacatagtatttactccttaagtagttgctgaaagaaagtgagcaaagaaaaaaaggcaagaaaatcaagaaagaagcactaaaatccaaatctgaatgttagcagttaactgccaactcaa

SEQ ID NO: 460551 - DNA, 585 bp, Homo sapiens
ttgaagtaagacaattcacactacagaaactccacaagtgtatttgatagaaaagttggagagaaataatagtgaaataacccctccctggccattagaaaaatacatgttgcaaacaacttttccccacaactcactccatgtagaaggctaagcaaagagcatcagctgcttcactgcttgtcctgagactgaaactcctcaacaccaaagtccttccagttagttaatcccaaacctgcctctgatcctggtcttccttggatgggcatcacccaagcaagcacctcctcacatcttcagatccttcagtaacccctgccctgggaagccctccccagacasagggactccgtgctaccacagcttctctgtactcctaggatttgcatttaccatttcctacggtaattgtttacctgtcattcttacttatattcccagtccctatcactgggcctgagacatagtatttactccttaagtagttgctgaaagaaagtgagcaaagaaaaaaaggcaagaaaatcaagaaagaagcactaaaatccaaatctgaatgttagcagttaactgccaactcaa

SEQ ID NO: 460552 - DNA, 630 bp, Homo sapiens
aacaacttaaagtgtaacataaatgaattttcagcagctgtaggtatatatttggtgtttactcagcaaatatttattgagcacctaccctgtactactcactgaattaggtgctgggaatacaacagtgatcaacgtcaatatagtctttgacctttgaaattcacaggctagcagaatcagattccaacttcttcttcaaataatgaaacatctctggatttcaattgtattgtctataaaatatggatgaggacacttcrtctactgaaggacaaaggactcaaccagatggtttcttttttctttctttttgagatggagtcttgctctgtcacccaggctggagtgcagtggcacgatcttggctcactgaaacctccacctcccaggttcaagcaattctcctgcctcagcctcccgagtgaccaggattacaggcatgcaccaccatgcccagctaattttgtattttttagtagagacaagctttcaccatgttggccaggctggtctcacactcctgacctcaagtgatccacctgccttggcctcccaaagtgctgggattataggcatgagtcaccacgcccagcccagatgatctcttgaagtcccctctaccactgt

SEQ ID NO: 460553 - DNA, 619 bp, Homo sapiens
aaccccacttctgtcatctctaaaataagggggtatcgtggtctagttataaaaataaaatgacatggtatttaatattaagagtgttctataaactataatgtacacacagacattgtggctaatgcaaagcttactaatattaataaaatcttaatttaaaacttgctcattttattcttctttctgtgaagaatgaaaggaagtttctcacccataatccctccagaacaatctcagctactcagaaccatcaggaaatgaggcattcagaaaactgggttcctctatagtcaaagggtggcaaaaatggcttgttttgtttatttctgatggaacctctctgaaatagttcaagtattaaagaaggtacctgaacttccttcactatttgacgtgtcttcaatctcagaaaaagaactgtatggaaagtgcatgccctatggccctcggaagcagayatacaatcattaggtacaaatcatacagaccaggacaacagaatcgcaagcggtaactgacacaattagtgctgccaacagccaagcggacggcttcatgtgctggcacccttcccaaaactccaagtatccgggagctacctgtagagcatcattag

SEQ ID NO: 460554 - DNA, 561 bp, Homo sapiens
ggccacacagctgatacacagagttgctgggattaaaacctaaatttcctgttctagatcttgtgattggatagggcactggagttagatggaactggactttagtttccctttacaatttagtagttattttactcgagatatttttttctctgtcttgtaaggattagatgaaatagtgcctatgaagcacttagtttaaggtctcacgtatagcccaaatacaatacatatttgctataattagcagtaatagcattaatcctaacactaattttttgggatcttactatgtggcaggctctgttcyacattagcatgtaattaattcattagtggtataatgtgcctctttcagcctacagtgatctctgctttgtctaatgttccccagctcatagtacctccaaccattcaatgtaacagcctcctatgttattctttgcatacactacagatttggataatactctatcttgtttacgtttgtattctttacccaactagtacataaagtccttcagatcaggatccttatttactttagtacaccaaacaatg

SEQ ID NO: 460555 - DNA, 621 bp, Homo sapiens
gactgattttcaaatgctaaatcaacattgcattcacgaattaaacatcacgtggtaatgacatattatcctttatattttgccagatttaataatattttcaaggaaatttgcatttacattcacaatggacattgttattttctcattacatatttgtcaggtttaagtaatggggttatgctgatcacatcaaatgagttgagaagtgtttttccccttgcctcatatcctaaaggggtttgtgaaggatcagcattatttcttccttaacgtttggtagaattgactggtaaaacaatgtggcctacagttttctttgtgggaagttttagaatatgaattaaattcctttaacagatctgtgtttatttagattttaaatttcttctcttagttttggtaattttctttatttcaacttttattttagattcagagggtacatgtgcagatttgttacatgagtatattgtgtgatgctgaagtgtgggatatgaatgatcctsttgcccaggtagtgactatagtgcccaacagtttttcaaccctctaccacctccagtagtacccagtgtctattgttgccatctttatgtccatgagtgcccaattatttag

SEQ ID NO: 460556 - DNA, 560 bp, Homo sapiens
aaaaggttaatatccttactatgcaaataatctaagttcatatgaaaaagataaatatgccaatttatgggaaaatgggcaaatggtataaggaattaactcaaagaaaaaaatattagcaatggccaagtgtaaaaatgtccaacctatcataattacttgtctgtaatgcttgtaagctgggatcaacattccagaaagcaaacagcttctctgcaggtttttcgaggatctccagtaccagtgattatgmtcctgacttttaagatgccagcctcttcctcagttctctgcaatactatcctccaggaggtcataggggggcatggcattcctaagagggtcctgatgttaccggtttcccttcaattcatcaatcatttcttgaacacaaaaacaaggcactaagatatcaggagcgatccaaatacatggaaagacatcctcagcagaagaaacaaaacttaatgggtgacagagacatctgtgactccaaagcacaggaagatagtgcatccaggagaagggaggagagctctgcctctcattagactgtgcac

SEQ ID NO: 460557 - DNA, 603 bp, Homo sapiens
ccctcactgtcatgtgtcctcccaacaaccctgtaggatacacacctgtcattatctctgtttcacaacaaaaggacccaagctcaactcagggaagtgactcgcccaggtcacccagatggcataaggcagagtctgggttgggcttgggcctgttgctctcccaaggctaaatttcttcctcctaacactgcctttctgattactagacaagagaggaaatgtgcctcctttaaagagctcagcagccaagggaggtaggtagggatgtgcaaagatggaaacatggaaagagagaggtatttgtcctctttcttcctcctttcaccctacactggcccttttctcacaaaaaagaaacaaaacaagattttcttttcttccaaaatcttctgagtcccctgtatattttatactaacagtacatgtcagtttggaccagscagatttcaagtgctaaataagtagcatgtaactagtggcaaccacattagccagcagagctctaagaaaactcttgctctcctgtggacaaagtgtaaatgaagagtggctgtgtagaaaagcaaaagctagagacatctctccatgtatagttgctgc

SEQ ID NO: 460558 - DNA, 548 bp, Homo sapiens
tattctgataaggaaacccttgctctaaatgcttttggaattcctctgttggaatagcctttagagcctgacatatattcttctaagcaatgtggcatagcagctawgacggtagattctggagttgatggtctgggtttaaatcccaaagccacaatgtattatttgaccaagttaaattactttacctctctgtaccttagttgtttttttgcttttaaatccatttgaaaatagagtgaggaagatgaggggagtaaataataaagagaactacctcatagggtgttgtgaagatgaaatgagttatacacgaagctctcagaatagcacatagtcaacacacagcaaatgttaactaccatgtgtgagaccttgcataaattacttaatctctctaagcctcagtttactcgtccttggaggaggatgaatgcataaccacctggaagttcttgtgaggactgaatgaaatggttcctataaagcacacactttagtgcctggcatgtagtaagcattcaataaatgtcagatgctgttattat

SEQ ID NO: 460559 - DNA, 548 bp, Homo sapiens
tattctgataaggaaacccttgctctaaatgcttttggaattcctctgttggaatagcctttagagcctgacatatattcttctaagcaatgtggcatagcagctaagacggtagattctggagttgatggtctgggtttaaatcccaaagccacaatgtattatttgaccaagttaaattactttacctctctgtaccttagttgtttttttgcttttaaatccatttgaaaatagagtgaggaagatgaggggagtaaataataaagagaactacctcatagggtgttgtgaagatgaaatgagttatacacgaagctctcagaatagcacatagtcaacacacagcaaatgttaactaccatgtgtgagaccttgcataaattacttaatctctctaagcctcagtttactcrtccttggaggaggatgaatgcataaccacctggaagttcttgtgaggactgaatgaaatggttcctataaagcacacactttagtgcctggcatgtagtaagcattcaataaatgtcagatgctgttattat

SEQ ID NO: 460560 - DNA, 540 bp, Homo sapiens
ggaccctcctttggggctaggacaggtcgtgtctttatgtctgcygctcccaggacctgggcctctggaaagctgagcagaagcatgtgggtcacatccaggcgggagaaggaactgcagtcaggaatacaggcaccccaataagcaaagctccctatctctagcaggctcagagccttggggttcactacaattataactgctcattttaaacctttgaattttgtcatagtgtgaaaatatattttaatgcatttcacagtttgggataaccataagcaaacgaagaggcagctcctgggactgctaggcccacaaaggcttgcaagaagtcttcagaacaccatgagggagcagtgtggtagagcagctggattctttgcagaagggtatctagtcaatcatgcgagtggaagtgtgagtgactgacaggggagcagggccctctaagaacatagcaattaatatgataaaattcagaaaacattagtataaagtggctggacattgtggtgtggccttgacagccatatgtttttg

SEQ ID NO: 460561 - DNA, 627 bp, Homo sapiens
cttgtacaggcaggccttccactgtcacctggtcccatccctccttcctctcccctccatcacacccatcccagtcatgctggcstcctgttcaccaaacatgccaggcatcttcctctccctgggcatctgtgcttgctgttcagtactttctccagagatttttctaattttattttcacgagttcactctaaaaaatggtttgtttgtttttaaagacagggcctcactcagttgcacaggctggagtgcagtgatgcaatcatagctcactgcagcctcaagctgttgggcttaagcaatcctcttgcctcaggctcctgagtagctaggactacagacacataccaccacacctgactttaaaaaaatatattgaatgccttctatgtgccagggtctaccattttaaacaggatggtcagggaaggtgacacttgaacaaggcctgaaagaggtgaggggtttcacctgtagtcttctagaagtgtgttccataacccagtctccctctcttcaatgaaaagaagctgggactacagagaacaggtgtgtcataactgagtgtcataaaccatgactggaggctgagcacattgttgtctcaaataaaagcagggtgttgt

SEQ ID NO: 460562 - DNA, 605 bp, Homo sapiens
gtgactcttaggcatgttgctactttgataaaaccaccaagcaatatatcattttgttttttttttacttaaccctgtctagagagcagaaattaaaaggtgaagctgagaattgaacccaagtctctctggttccaatactaatattatttctttctaccactctgccttctgctatggatactgacctaaacaaggaaaaaaaatgaattattctaaaaactccctttacccctttgtctgattactctccatttaatatattacctctcacagagacattctgcattgtgctgacatttgttcaacaaacacaaatacwacataatattttgttgatcatttaaaatgtgctaggcactgtttttaaagttttgcatgtatcaacacattcaatccttacaatgacactatgaactagctacttgaataatttcatttagagatgagaacacaggcacagaaggttagataattggctcaggggtcatatagctagtaaatgatagaaccaggcttcaaagccaggcagccaatcaccagaatccacactcttaatgattgtgccctgtgacttttccaagctctacatgccaagatcaagg

SEQ ID NO: 460563 - DNA, 413 bp, Homo sapiens
cgtgtcactataatgggaatgaggaaagtcaattgcaaacattccacacgtagttttgaactaagaaatattacttatagtagaggaaactggaaagaatagtggttgttatatataagtaaggtaggtaagatacaagctaaaggctggcatgtgatcacaaaggaaaacaggagatactcctaacaccaaaacctaaatatatacaatattgatycagaacatgctctcagccttgcttagtttgaacttaaacatgattctatacgaagcttcccatctcttttttttttttttttttaattgtgacagggtctcgctccatcacccaggctggagtacactggtaacctcaaactcctaggctcaagcaatcctcccacctcagcctcttaagcagctaggactacagg

SEQ ID NO: 460564 - DNA, 563 bp, Homo sapiens
gcctggccccaagttttaaatatttaatagtaacatgattcattagtttcttatgcatccttctaatgtttatgcaaatataaatatgatttgtctccctcattgagagttgagtatccttagtttaaaaatccaaaatgctctaaaatccaaaacttttaaaatgccaacatgatgctcaaaggaatgctcattagagcattctggatttttgatttttggattaggsatgctaaactggtacacataatgcaaatattccaaaacccaaagaaatcagaaataagaaacctgcatatgctattttgtttcttgctttttcatttaacatcatatccttgagatcttttcaggccatagagagcttccttaatcacttttatagccacattatagtagttcaatgtaaggatgtcccatagtcttatctattcagtctcttacagatggatactagaattgtttcttatcttttgtttttccaaaacatgctacaattaataaccttgcacacaatcactttgtatatatgcaggtatgtctgtaggataaattcttaaaac

SEQ ID NO: 460565 - DNA, 545 bp, Homo sapiens
caaaataagcctaaataaatacaaaagcatttaggacctatgaatcagaagactgaatatgcacatatacaaaatgagaatcattctctcacatacaaaacttatataggtagtaaagatacagttgattaggtagatttgaatgttgaatcactgacatttcctgaaggtagagctacaaattacttttttaaatccactaacccacccccaccttacctcacttactctttttggccttaccacctactttagtcataccctatacatgttactcagaccaaatggctctcataaacaatctcagtatatgtgggttrataagtctatgaccattcctcaacatttagcattccttggtgcttgcacagttttgacatctacatgcaatctaggtaaaggaaaacggaaacaatttgtgagttaatgttccagaggtcagagaacatataatatgtatggtaagaaaatgtatagtatgtacaaaaaagataaatattaatgttttcaagatcatttacttatattctgataaagttttccgt

SEQ ID NO: 460566 - DNA, 545 bp, Homo sapiens
caaaataagcctaaataaatacaaaagcatttaggacctatgaatcagaagactgaatatgcacatatacaaaatgagaatcattctctcacatacaaaacttatataggtagtaaagatacagttgattaggtagatttgaatgttgaatcactgacatttcctgaaggtagagctacaaattacttttttaaatccactaacccacccccaccttacctcacttactctttttggccttaccacctactttagtcataccctatacatgttactcagaccaaatggctctcataaacaatctcagtatatgtgggttamtaagtctatgaccattcctcaacatttagcattccttggtgcttgcacagttttgacatctacatgcaatctaggtaaaggaaaacggaaacaatttgtgagttaatgttccagaggtcagagaacatataatatgtatggtaagaaaatgtatagtatgtacaaaaaagataaatattaatgttttcaagatcatttacttatattctgataaagttttccgt

SEQ ID NO: 460567 - DNA, 573 bp, Homo sapiens
actggagccagtaggacaagactggacttcttagtagtgcaagactagactagactccatgttctgagaaaggcaatctgatcttagccagtctaatcaaggattaaatctctaaaaatccctctaattggggactggtttatgtcagtctatgctggaaaacatcattccttctaatggtaaaaagatgaataagcaattctagagcagtggttttgtaaacactcaaggggttcaccttgcccactgcctagacagagctgatttatcaagaaaggggaaactacatggagaaagagtttttcatgcagagccagctgtgcagaagaccagagtttattattattcaaatcattctccctgaacatttggggatcagagttttaaagataattcggtggataggtgcttgggaagtgggtagcgtcaattgttgatggaatcatagggggtcaaagtaaatttttgttgctsttggtgtcttctgttcctgggtgggatggcagaactggttgagccagattaccagtttgggtggtgtcagctgatccactgaatgcaaggtctgctaaa

SEQ ID NO: 460568 - DNA, 570 bp, Homo sapiens
ttttccttctgcctagatgactataggattctatttcttttagtccttaaagttctagaaagaaagcttttattaaatttgattggaatatggtgagccttttcaaaattcaatttgaaaacttastttagttcataacattcttctattgtgtaatttttcatttccatttgctcattcacatcttcaaagataaaagtcactcatgttttagttctccattgtccatggtctacaactttcatcttctttctgatcaccttcattccatgtcattttccaccaaattccatgtgattattttcttcaatagcttcctcttcatgtccaattttctgccgtttaaattctcttccttggtacttttaatgtgattttcagttatttaatttcttctcatttgattcctctgcttttctagatttctcttatttttactgttgcatgggttctgtgattttttttttctagattaaaaaaaaaaactacctaaactctttgaaggaagtcgatgagatctagttgatttgcttaagaataaagggagtgattttcctgcttttccctctg

SEQ ID NO: 460569 - DNA, 499 bp, Homo sapiens
cccaccaactatattccagtagtgccccactccctcatatggtttggctctgtgtctccaaccaaatctcatctcaaattgtaatctccatgtgtcaagggaggcaggtgattggatcatgcaggcagtttcccccaggctcttctcatgatagtgagtgagttctcatgagatcttatggttttataactttggaagttcctccttcacagcacttctctctttcctgccatgttgtgaagagagtgcctgcttcccctacctccatgattgtaagtttcctgaggcctccccagccatgtggaactgtgagtcgattaaacctttttataaattactcagtcttgggtatttctttatagcagtgtgaaaacgcactaatacactccccaatcactgggacaagcaaaatcactctggtaaatttcaaaaaaaaaaccctggaagcagttcaatcccartagtttcttgatctataaatccagaggcctcttttctg

SEQ ID NO: 460570 - DNA, 622 bp, Homo sapiens
cctctgtgtctatctctgtccccagattccagaacatactggccaaactctctcaataccactcccactgtggacccacggagttccagggcccagagtccatagcgtgatgaacatgcatggggaggaagttctgtctttccttcttgcaggyattcctaatttctgtatttggttttcttggggcttccctcacttggtttacagcagcagggagagaagcattcactgttccccctatcggagacgggagacacccaagcatgagctttacttcgatggtactcttcagtctttcagatttctagtttcattttatataagcctgaggttaaaaatggggcctgacagttgctaggctggttctgctgtatgttagtacctctggcacagatttttccgatatcttacttcagaatatattgcccaatgttctccaatgtagagctttggctgaaattttgagatgaggaggaaaggtgtaaatatttgaataaatgaatgaatgtttatctcacagtgatttataaaagtgaaaaactagaaccatcctaaaagtccttcagtcaagaatttgctaaacaaattgtagtattcattatacacattgtgtgtttgttga

SEQ ID NO: 460571 - DNA, 569 bp, Homo sapiens
ggctacagactggcagataagctatcgaagagggaggaagaaaatgtggcagctgagctgggagagacaagagaggcatctagggcataagatgtaacgctcaaggttgtgcaaatgacctgaggcaagtggcctgagggtgaaggctgtattacatttgcaccctasatgcctctcttgactaaccctattcccagccttgttgaaaagaaaccaaaaagaacgaaacgtggaaggtagtactctgtccccacagattaccaccgtagatataaaggtttggatgtcccttaaagtctagtttctgtaaagataaccaaggcacttacccttgctctccgctttatcttctttcataggttagggataaaaggaatatcttattgacacaggaattttctctcagcccctttgctggactcgcagcaggtgcatcctgtctacttggcctgccacactcagtcccttgtgggagggagaatgtgagagagcgagtgcaggagccagctggccactccaggtgccaacacaggagtaagctccatgtggggcctgcagccagaccagga

SEQ ID NO: 460572 - DNA, 618 bp, Homo sapiens
atgtgaatggcatgggaatagaagagtggaaagcagttccaaggtttcaagtctgggtgatgcattacccttgccatgcccttgacagaacttcatgtaaaatcatttttggcagtggggaagatggggtggcagaaaccatagtgttttatatatgttcagttcaagatggttgaggtccctatctggatactctctttaggaatttgggttcggagggcttttagtaccactagagctgagcctagagagtagggtctcttcatgaggccctccaaaggggagggctttgcatgaatgtcatttggaccctgyctcagatgtgactcagtcttgtcctgttaatctatgggctaggatctcaacattcctgtggtttctttctgctctcacattgtccatttttggcatccacagctgtattagtccatttttgcgctgctgataaagacataacctgagactgggcaatttacaaaggaaagagatttaatggagaactcacagttccacttggctggggaagcctcacagtcatggtggaaggcaaggaggagcaagtcacatcttatgtggatggtagcaggcaaaaaaaaagagcttgtgcaaggaaactcc

SEQ ID NO: 460573 - DNA, 579 bp, Homo sapiens
agtacctaccccccagggagttaagtatgttccaagggaaatcagtaggttattgcaaggcttgaacaattgagagttaagggtgcaaatctctaaccgaaacataggagttatgctggtaagtgtacctgggctctgctaaacaggtgcaaaaaaatggagttctctggtagactcttggcaatgtgcccaccacgtgcacctccgcctgtcctccttaacccttgattyggcctttgaggcccctccattaaacccctgggctttacacattctttgtaaaacatcctaatatgtcacaaaaataatcagatactattttctttttcttttctttctttttttttttttttttgagacagagtctcactctgttgcccaggctggagtgcagtgacgccatctcggctcactgcaacctctgtctcctgggttcaggcgattctcctgccttagactcctgagtagctggaactataggcaggcgccaccacacccagctaattgttcatatttttagtagagaaggggtttcacgatgttagtcaggctggtctcaaactcctgacctcatgatcc

SEQ ID NO: 460574 - DNA, 573 bp, Homo sapiens
gttctagtatctggtgtcttaggttcccttgaggaaataattcaattcaatgcaggtggaagcactttttggtaactttgaaatcacaactctgaggctcagttgaacacagtaataattctttggatagacaatagatggcagtacagcatcaatttataacttataaactatagttaaacctaaacttttatgctacattttattattttggatgtacattactataaaacaagaattattaaaaaacttatttaacttgccttatattaggctacacatatttaaatgcttaaggaacaacttggtggtgtagaccaacattaggaaaactcgaactagatttatcagggccactttcaagggctttggagaggccctagcactgtcaatcttgagaaagtaagagattctcttttctttttattaaagaggcccgcccccttcttatataagctttaggtctcacaattctgggatttgtctgagaatagccatgcggctcttttaacttgggaaagggaaaacagtcttgcygttattaattttgctaccaacttaatctccagggag

SEQ ID NO: 460575 - DNA, 634 bp, Homo sapiens
tacaaaatgacaatatgcatcataaaaataaaaaatacccttaaaacatcttctttgcttttctattttattttaaaatggcacttatctaaactggcaatagtaatccagtaagtatctgtgaatgcaaaaaatatacctgatcaatatttattcatctttaaaactctgattaaatattatcttatttgcgaagttcccctaattcccagctggcattgtctgacatctcccatgttctcatggaattttgtaatatctcaaataatttatccatattattattcggaaattacatctcttctccacgtgaccwtttgcctctccagggcggggaactaacatcttattgacacctattacagtgcctggcatatagaagactgtaaaactgaagtataaagcactgaatatggccaaaagaccagagttgcgatttcagctcttctccagacggcctgtgatgtcttaggttaagtcattcatcctttctgggcatcagcttttgtatctataaaagagggaatgggaattggattagatagtgctctgtggagccctaggcattcctttgaggtacctcagggctgcaacaggaggaaggaggaagctgaggggagaggaactcaggctt

SEQ ID NO: 460576 - DNA, 475 bp, Homo sapiens
gcttatcctttgttccttatgtttggtacatgtgctatttatttattcacttcgtgcctgttaatgaggtgtcttgggagtttcttctttcagcaaaaatgraagggaatgaaaagggaattgttggaagtacattaactaactttgttacatacattaccgacaacttaatctaaaccaagcctttagaaatgaaaaataaactaattttatttatgaataaaggaaaagatagtgtatttagttgcatttaatactgtgttgttctttctgtcttacaattaggaaaggtatcagaatcaaggtatcagttgaagacataagagaacaagttaagtagaatgtgtttggctacagagaatggtacagaaaggaaccttaggaagtagaatttttttaggaataagtgtagggtagagcccaatctttaaattcagacaaagaaattgctgtaagattttgagcaaagacatat

SEQ ID NO: 460577 - DNA, 475 bp, Homo sapiens
gcttatcctttgttccttatgtttggtacatgtgctatttatttattcacttcgtgcctgttaatgaggtgtcttgggagtttcttctttcagcaaaaatggaagggaatgaaaagggaattgttggaagtacattaactaactttgttacatacattaccgacaacttaatctaaaccaagcctttagaaatgaaaaataaactaattttatttatgaataaaggaaaagatagtgtatttagttgcatttaatactgtgttgttctttctgtcttacaattaggaaaggtrtcagaatcaaggtatcagttgaagacataagagaacaagttaagtagaatgtgtttggctacagagaatggtacagaaaggaaccttaggaagtagaatttttttaggaataagtgtagggtagagcccaatctttaaattcagacaaagaaattgctgtaagattttgagcaaagacatat

SEQ ID NO: 460578 - DNA, 475 bp, Homo sapiens
gcttatcctttgttccttatgtttggtacatgtgctatttatttattcacttcgtgcctgttaatgaggtgtcttgggagtttcttctttcagcaaaaatggaagggaatgaaaagggaattgttggaagtacattaactaactttgttacatacattaccgacaacttaatctaaaccaagcctttagaaatgaaaaataaactaattttatttatgaataaaggaaaagatagtgtatttagttgcatttaatactgtgttgttctttctgtcttacaattaggaaaggtatyagaatcaaggtatcagttgaagacataagagaacaagttaagtagaatgtgtttggctacagagaatggtacagaaaggaaccttaggaagtagaatttttttaggaataagtgtagggtagagcccaatctttaaattcagacaaagaaattgctgtaagattttgagcaaagacatat

SEQ ID NO: 460579 - DNA, 418 bp, Homo sapiens
aggtttagagaaagagtggcagggagggtgtcttaaatgagggagtcttacagaatcacacataactgggggtcatctgtaagtgttgaataaatggtgagagtrgaatacatgattaaactgaaaaaagacaaatatgatactcacaccagtagaaagtaaaaagtaaaagaggaaattaaagaaatagctaatgaagaggattttggatttggcaagaagaaggatattgttgaatctgtccagctcttgacagtttcgggagtcgaggaagataagcaataggaactggagcaggagcctgagctttacgtacaggttgaaagaggggtaaaccctgggaagggaaaggttaacggctgtcaaaggggtagcacagttaagggaagggctgcatactaagatgggacaaactagg

SEQ ID NO: 460580 - DNA, 418 bp, Homo sapiens
aggtttagagaaagagtggcagggagggtgtcttaaatgagggagtcttacagaatcacacataactgggggtcatctgtaagtgttgaataaatggtgagagtggaatacatgattaaactgaaaaaagasaaatatgatactcacaccagtagaaagtaaaaagtaaaagaggaaattaaagaaatagctaatgaagaggattttggatttggcaagaagaaggatattgttgaatctgtccagctcttgacagtttcgggagtcgaggaagataagcaataggaactggagcaggagcctgagctttacgtacaggttgaaagaggggtaaaccctgggaagggaaaggttaacggctgtcaaaggggtagcacagttaagggaagggctgcatactaagatgggacaaactagg

SEQ ID NO: 460581 - DNA, 605 bp, Homo sapiens
tcacttgtgccgacagagtagagggtggggagtgcagtgtctctgctgagcattcaggctgccaggccaagtcctgacttttcctcggggacagggcgcttccctcctccctttggtccccgaggtgtaggtgcagtcactcctctccagtctgcccagcaataagctggtaaacacaaggttctgtgacacacccagaagaatttaaaataattctcagagccaggtgtggtagctcactcctgtaatcccaacactttgggaggctgaggagggaagatcccttgarccccaggaggtcaagggtgcaatgagctgtgttcacgccactgcactccagcctgggcaacaaagggagaccttgtctcaaaacaaaacaaaacgaacaaccctcagcctaccattccttcattggactgacaaaaaattggctatacctaaggaggaaaagaaatataaattaaaaattagccgggcgtgatggcgggtgcctgtaatcccagctacttgggaggctgaggcagggaattgcttgaacacaggaggtggagattgcagtgagccaatattgcaccactgcattccagcctgggtgacagagcaag

SEQ ID NO: 460582 - DNA, 605 bp, Homo sapiens
tcacttgtgccgacagagtagagggtggggagtgcagtgtctctgctgagcattcaggctgccaggccaagtcctgacttttcctcggggacagggcgcttccctcctccctttggtccccgaggtgtaggtgcagtcactcctctccagtctgcccagcaataagctggtaaacacaaggttctgtgacacacccagaagaatttaaaataattctcagagccaggtgtggtagctcactcctgtaatcccaacactttgggaggctgaggagggaagatcccttgaaccccaggaggtcaagggtgcaatgagcygtgttcacgccactgcactccagcctgggcaacaaagggagaccttgtctcaaaacaaaacaaaacgaacaaccctcagcctaccattccttcattggactgacaaaaaattggctatacctaaggaggaaaagaaatataaattaaaaattagccgggcgtgatggcgggtgcctgtaatcccagctacttgggaggctgaggcagggaattgcttgaacacaggaggtggagattgcagtgagccaatattgcaccactgcattccagcctgggtgacagagcaag

SEQ ID NO: 460583 - DNA, 605 bp, Homo sapiens
tcacttgtgccgacagagtagagggtggggagtgcagtgtctctgctgagcattcaggctgccaggccaagtcctgacttttcctcggggacagggcgcttccctcctccctttggtccccgaggtgtaggtgcagtcactcctctccagtctgcccagcaataagctggtaaacacaaggttctgtgacacacccagaagaatttaaaataattctcagagccaggtgtggtagctcactcctgtaatcccaacactttgggaggctgaggagggaagatcccttgaaccccaggaggtcaagggtgcaatgagctgtgttcacgccactgcactccagcctgggcaacaaagggagaccttgtctcaaaacaaaacaaaacgaacaaccctcagcctaccattccttcattggactgacaaaaaattggctatacctaaggaggaaaagaaatataaattaaaaattagccgggcgtgatggcrggtgcctgtaatcccagctacttgggaggctgaggcagggaattgcttgaacacaggaggtggagattgcagtgagccaatattgcaccactgcattccagcctgggtgacagagcaag

SEQ ID NO: 460584 - DNA, 444 bp, Homo sapiens
ccgcagtccgggggaggacgcttcaccaggtgctggccacgaacaggaggctttcctgggtgtgaggggtgcgccagggtcgcccacccaggagcggcccgcgggaggactaggcgaggcccctaacggagcccccagtgtgtgtgccgaagaaggctccctggggccccgcaacgcccgcagccagccccscaagggcgcgtctgatttgccaggtgagcctccggccgagggcgcagcgcacacggccagctccgcgcaggcagactgcacagcccgccccaagggtcacgcccaccctgctaaggtgctaactttggacatctacttgagtaagactgagggggcacaagtggacgagccggtcgtgattactcccagagcggaagattgcggtgactgggacgacatggagaagaggtccagcggccgtaggtcggggag

SEQ ID NO: 460585 - DNA, 586 bp, Homo sapiens
acttagtgcattattggcctaagcctytttcaaaaagtccctaatttatgtatcttggttgcttcttcctccttgtgctgcatgaaagcacaaaacaactgtgactacttgctgttaagtttattcatttcacaagtaatttatttaatactttctgtgcaagatattgtgctagtcactgtgggggaaaaaaaccctacaactgtgactcaggatattgccctgaaatttttatagccccatctggcacacaaaaagcacacaaatcaaataacaatacaagatgatatctgatgaaactgccaaacgaatgttaccatctgtaaatcctggggaagtgctagcgagcaagaaatcactgctggtgctttgggggagctgggccttgtgccttgatgataaatgcaatttgtataggtggacaggatagggaaggtactctatgaaactgataagaccctcccttctcacacttctgctccctcaccactcccacttagcacaggtgaataatgattaagtgcttaagtttttcctccattcacatatttgttcaaggagtgggtattttaacaacattatcatt

SEQ ID NO: 460586 - DNA, 585 bp, Homo sapiens
caacaatcaagagtcagacaacagtgtatcatggaatggacagtggtttggggcaatcacctatcaccgaacctgagtaagcaactttcagatagaaacaaaggcctgtctctagccttattctctttctcaaatgactccccaaaatctagtttctaaaatattcctcctctggattattttaaggataaactgaaatgtttgtaaaatgcccartacaatctctggggaagagaagggaaatggaaaagaaaaccatgaaataaatacatatttgacccaaaagcacaggcaataaaagcacaaagtagacaaatgggattgtatcaaactaaaaagcttctgcacaggaagggaaacaaaagagtaaagagaaaatctatagattgggagaaaatatgtgcaaatcatacattggataagggattaatatccaaaatatacaaggaattcagacatctcaacagcaaaaacaatctgatttaaaaaatggaaaaaggatctgaactggcatttcataaaagaagacatgcaaatagccaagaggtttttttttttgtttttttttttagtgctcaacatcac

SEQ ID NO: 460587 - DNA, 629 bp, Homo sapiens
ctactctgggctagacaacgtattatgtgcttaatatttatcatctcacatagtcatcamacagctttgcaaagcatctgtgctactgtcacctactttgtattaatcaggcaaatgtgattcagagaggttgattaattggcctatgatgtcatagctaaaaagtagctgacccttgagtttgccatctgcttaccttgctccctaatcccttcccttcccccttggcatagattgatggagacctgtggatcactaggatcaaggtacaggaccagatgggatcaattcacaaagtcacattttgttatatgttaactctttttagagatttcccatagaacattgattaatccaagactttgttctaacatgtttaaccgttaaagtggtaaccagtaccttgtttttatcaccaacgtttttagagcagatcttacttagctgtggccacaagacataggcttttgtttcatatgcaataccaggtaaatcctatagatggattatttcactcttagtggagaatatctacatatagatatgttaatcatatttagaggctatttcttatagaattctctatttactgacttcttagtttagttcttcttcaaagcagtcccctc

SEQ ID NO: 460588 - DNA, 628 bp, Homo sapiens
ggccaggccagaagcaggtcatctcctccctcagaactggccccagcctgggatttgcccactctgctcagctggctcctgcttggggaggactcccttgatgacctgtgtgggcagctctcgtggggcatcccagccaggattccacacattgtcaaggtgagacagggccctgggtcctctgctgtggcacaggtgtggacccagcaagctttgtgtggatgggcaaatttataaagctggacaaggtaatatttgaattttttaagtaacttacaaatattttaaattttaacattttatatttkttacataaaatgagacataaaaattagaagcataaaaatcaactttgggaggccatggtgggaggatcacttgagcccaagagtctgagaccagcctgggcaaaatactaggaccccatctctacaaaaattaaaaaacaaattagtcagggtagtggcgcgagcctatagtcttagctgcttggaaggttgaggtgagaggatttcttgagcccaggagttggaggctggaatgaaagaaaagtacaaagcactgtctatgtgtattcccatttgtgagcaagggttgtgtgtgtgtgtgtgtgtgtgtgtatgtgtgt

SEQ ID NO: 460589 - DNA, 578 bp, Homo sapiens
atgacctttcatctagtaacaaaagctagaaactcaacacccttacttcctcatttcccctcaccccrtaattcaattcattatgaagttcttattaaacaatccttatatttatgcgtttctctctgtctccaccacaattcttgcccaaacagccatcatacccttccagaatttctgaaagtgctgtctatttggtctaacagacaatctttccatcagttatcttcactgtccaggagcaagggccctgttcccagagctctctggtctttgaaaaaatctgaccctcagctcaataaagctcaataacagttaaagcaggctacctagtcagtagcagaagcagtggatccccacacaaatcaaaagactccaatactcaaagcctgtgagcctcccagaggtaacttactcataactcaggaatctaaaatcagctaggccatggaacaaagcacctttatttaaatctgtgtggcaagtctgcttataaacatggaggaacagagaaagattatcaatgttaataattgccatgtgaatttccagaccaatcaacctgtttttatgctaaa

SEQ ID NO: 460590 - DNA, 578 bp, Homo sapiens
atgacctttcatctagtaacaaaagctagaaactcaacacccttacttcctcatttcccctcaccccgtaattcaattcattatgaagttcttattaaacaatccttatatttatgcgtttctctctgtctccaccacaattcttgcccaaacagccatcatacccttccagaatttctgaaagtgctgtctatttggtctaacagacaatctttccatcagttatcttcactgtccaggagcaagggccctgttcccagagctctctggtctttgaaaaaatctgaccctcagctcaataaagctcaataacagttaaagcaggctacctagtcagtagcagragcagtggatccccacacaaatcaaaagactccaatactcaaagcctgtgagcctcccagaggtaacttactcataactcaggaatctaaaatcagctaggccatggaacaaagcacctttatttaaatctgtgtggcaagtctgcttataaacatggaggaacagagaaagattatcaatgttaataattgccatgtgaatttccagaccaatcaacctgtttttatgctaaa

SEQ ID NO: 460591 - DNA, 570 bp, Homo sapiens
ggggtgaggaacaaaaacagcctttgggttacagttcaggtgatgagtacactgtaggcctagaattcaccactctgcaatatatgcatggaagaatcctgtacttagactccttaaatatattaaaaatgaaatttaaaaattttatttaaaaaaggatttccaaattttcaaatgtgtattttaatgtcaattagatatacacttgacatcatctgatttttttttattgaccagtggttgcctgccatagaacatggctccgtggcaggggygcatcttcccccacactagatttagagaagttactgggtccaggtgctcctcagtgctctcaggtactgcttgacctgctggaaaccacaaagtagatgctagtattgtgtgctttgcagtctaacaaccctgaaatacaaatcctacccagccaccacttctagaaatacaactttgaataatatacataactttgcaaaattaagagaattcatctgtaaaatagtgattaaaaatagtgccttccagtcaggcgcagtgactcatgcctgtaatctcagcactttgggaggc

SEQ ID NO: 460592 - DNA, 541 bp, Homo sapiens
ttgaattctaaaattgttttttaaaataaatattgtctgatttaaaaatataaaatgttatttatatgtgataagtatgttgccataaattttcaaataaacatatcaatattgaaagctcattatgcaatattttttaatgagttttatagtattttttgcatgagtgaatcaagaaaatttctgaggataaactagaggatacagcaatgtaggcatatgattacactgcaaggatatgggaaacaatgaatattttatttagtattatccattaagtaaatatccaagctgatcaatttgtaacatgttcagtgatgagatgtcagttctgcattcagctgaactctcatcataacggtgtaccatctcaattgtaggacaaattaaagaacrtgattaatgtaatgatataaattattccagtgtatttcactgaatatatggcgtaggattctatattcagctttgacatttattttttctgggtcataatttgctcctctgatcaaagatcatttctcttttcatcactcagcat

SEQ ID NO: 460593 - DNA, 541 bp, Homo sapiens
ttgaattctaaaattgttttttaaaataaatattgtctgatttaaaaatataaaatgttatttatatgtgataagtatgttgccataaattttcaaataaacatatcaatattgaaagctcattatgcaatattttttaatgagttttatagtattttttgcatgagtgaatcaagaaaatttctgaggataaactagaggatacagcaatgtaggcatatgattacactgcaaggatatgggaaacaatgaatattttatttagtattatccattaagtaaatatccaagctgatcaatttgtaacatgttcagtgatgagatgtcagttctgcattcagctgaactctcatcataacggtgtaccatctcaattgtaggacaaattaaagaacatgattaatgtaatgawataaattattccagtgtatttcactgaatatatggcgtaggattctatattcagctttgacatttattttttctgggtcataatttgctcctctgatcaaagatcatttctcttttcatcactcagcat

SEQ ID NO: 460594 - DNA, 541 bp, Homo sapiens
ttgaattctaaaattgttttttaaaataaatattgtctgatttaaaaatataaaatgttatttatatgtgataagtatgttgccataaattttcaaataaacatatcaatattgaaagctcattatgcaatattttttaatgagttttatagtattttttgcatgagtgaatcaagaaaatttctgaggataaactagaggatacagcaatgtaggcatatgattacactgcaaggatatgggaaacaatgaatattttatttagtattatccattaagtaaatatccaagctgatcaatttgtaacatgttcagtgatgagatgtcagttctgcattcagctgaactctcatcataacggtgtaccatctcaattgtaggacaaattaaagaacatgattaatgtaatgatataaattattccagtgtatttcactgaatatatggygtaggattctatattcagctttgacatttattttttctgggtcataatttgctcctctgatcaaagatcatttctcttttcatcactcagcat

SEQ ID NO: 460595 - DNA, 633 bp, Homo sapiens
tattttataagtagaaatatttatgtctaataaatctgtaaactttttttataaaaagtaatgtcactttaatcagttaactctaaatgatctgtcctcactgaggactaattttgactgtgtgatatttttaaaaaataattttcaacttataaatttactagatagcttccaatattcttttccataacagttgtcaaagttactagtaacagaaactttctaactagaagaagttttttctcactatttttcaagtatgtatgtcatttggaagaggttacggagtaatgaataccagagaactagaaagaaaaaaaaaattcaggaatataggaattttattggaataataaaccagtataggaagaagtagatctcaaagtgaattctattttctaacaaaatgaattttaagataagtatgtttaatggcagattgactttaaatcaagaagaagagaagagaagaaatgtygatatattaaaagaaaaaattagacccgaagagcaacttaggaaaaagttagaagtgaaacaacaacttgaacagactctcagaatacaagatatagaattgaaaagtgtaacaagtaatttaaatcaggtaaatcaatctctggcaaaaatttt

SEQ ID NO: 460596 - DNA, 642 bp, Homo sapiens
cattgacagttaattctaaattttccagaggaacagaagtgtatttgaagtatattttgaagtgtacatttctgcatcttgtaataacactttttwagtagctttttatatattttatttggtagaattttattttcatttatgtcaatttgacttaatctgaacatatttgaatctgaaattatgtattgttaaaacctctcaattttttaaaggcatctgtgttttgttaaataataccttaggacaaatgtagtggattttagcaatatcaaatttgatttaatcaccccactggtattcataatttattttgaatattgttacaaatcatttgctcataatttctatttcaaggctcaaaaactatcatgtggatagaactttgtcccacagaaagatgattgtagctatctgtgatttattagctttgcattggatccccatttttcaattcataaggggtggcaaggttcatgtatagtacaaaagaagtgagtagaggagagaaacataggagctgaggtcaggagggatgtggagaccaggttaccaagggcctgtaaagtttgaaataaaattacttttattctgagataaaaatctattggaaaaatttcagcaggtgattgaatatgtgag

SEQ ID NO: 460597 - DNA, 642 bp, Homo sapiens
cattgacagttaattctaaattttccagaggaacagaagtgtatttgaagtatattttgaagtgtacatttctgcatcttgtaataacactttttaagtagctttttatatattttakttggtagaattttattttcatttatgtcaatttgacttaatctgaacatatttgaatctgaaattatgtattgttaaaacctctcaattttttaaaggcatctgtgttttgttaaataataccttaggacaaatgtagtggattttagcaatatcaaatttgatttaatcaccccactggtattcataatttattttgaatattgttacaaatcatttgctcataatttctatttcaaggctcaaaaactatcatgtggatagaactttgtcccacagaaagatgattgtagctatctgtgatttattagctttgcattggatccccatttttcaattcataaggggtggcaaggttcatgtatagtacaaaagaagtgagtagaggagagaaacataggagctgaggtcaggagggatgtggagaccaggttaccaagggcctgtaaagtttgaaataaaattacttttattctgagataaaaatctattggaaaaatttcagcaggtgattgaatatgtgag

SEQ ID NO: 460598 - DNA, 642 bp, Homo sapiens
cattgacagttaattctaaattttccagaggaacagaagtgtatttgaagtatattttgaagtgtacatttctgcatcttgtaataacactttttaagtagctttttatatattttatttggtagaattttattttcatttatgtcaatttgacttaatctgaacatatttgaatctgaaattatgtattgttaaaacctctcaattttttaaaggcatctgtgttttgttaaataataccttaggacaaatgtagtggattttagcaatatcaaatttgatttaatcaccccactggtattcataatttattttgaatattgttacaaatcatttgctcataatttctatttcaaggctcaaaaactatcatgtggatagaactttgtcccacagaaagatgattgtagctatctgtgatttattagctttgcattggatccccatttttcaattcataaggggtggcarggttcatgtatagtacaaaagaagtgagtagaggagagaaacataggagctgaggtcaggagggatgtggagaccaggttaccaagggcctgtaaagtttgaaataaaattacttttattctgagataaaaatctattggaaaaatttcagcaggtgattgaatatgtgag

SEQ ID NO: 460599 - DNA, 644 bp, Homo sapiens
aagtgagtagaggagagaaacataggagctgaggtcaggagggatgtggagaccaggttaccaagggcctgtaaagtttgaaataaaattacttttattctgagataaaaatctattggaaaaatttcagcaggtgattgaatatgtgaggaactttgatgttgatttgtgcttctaatacagaagaaggaaagaattccactgtttagaatttaccaccactagtcctgccttttttttttttttgagacttcagtaagttgtgaagaattacagattcattaagggaagaaattaccagtgagatgaatcttgtgtctagtaagacagtaccaatttggcagaaagattacaccttcttgtgtccttaagtaaattcactaacaagcagcartgtgcacaaatgaagaaaataaactgaatcaatatatttggggatctttttgaaagtaaatattgttaatttgataagatgattcacaaaatcaaaaacatgtcttttcaggtcattgtgagacaacttcaaaaaaaattggctgatcttaataaacagtgtgaggcttcactaaaggttacatcacattctcactctctgaggcatcaatagaggctacatcacattatcacattaatctcaaaggtga

SEQ ID NO: 460600 - DNA, 368 bp, Homo sapiens
agcccttctttataatctaatgattgggggccagggacaagtatatatcaaatgtagtggtgagctaaataatagcttacacaggtatctggtcctaatctctggaatgtgtagttgttcctcgatgtagaaaaagggtctttgggaatgtgyttaaggattctgtggtggagcaatagctctgattttccaggtgtaccttaaatggaatcacaagtgctactataggagagagacagagggtggcttaactggcagaagatgtgaaactgaaggagtgcagagaacttcaccccaaaatagtggtccctgatgtaacgtgcattttgaattaaagaccttcagagatcaacagaggctggaggaga

SEQ ID NO: 460601 - DNA, 368 bp, Homo sapiens
agcccttctttataatctaatgattgggggccagggacaagtatatatcaaatgtagtggtgagctaaataatagcttacacaggtatctggtcctaatctctggaatgtgtagttgttcctcgatgtagaaaaagggtctttgggaatgtgtttaaggattctgtggtggagcaatagctctgattttccaggtgtaccttaaatggaatcacaagtgctactataggagagagacagagggtggcttaacyggcagaagatgtgaaactgaaggagtgcagagaacttcaccccaaaatagtggtccctgatgtaacgtgcattttgaattaaagaccttcagagatcaacagaggctggaggaga

SEQ ID NO: 460602 - DNA, 368 bp, Homo sapiens
agcccttctttataatctaatgattgggggccagggacaagtatatatcaaatgtagtggtgagctaaataatagcttacacaggtatctggtcctaatctctggaatgtgtagttgttcctcgatgtagaaaaagggtctttgggaatgtgtttaaggattctgtggtggagcaatagctctgattttccaggtgtaccttaaatggaatcacaagtgctactataggagagagacagagggtggcttaactggcagaagatgtgaaactgaaggagtgcagagaacttyaccccaaaatagtggtccctgatgtaacgtgcattttgaattaaagaccttcagagatcaacagaggctggaggaga

SEQ ID NO: 460603 - DNA, 560 bp, Homo sapiens
ttttacctaatccaatggtataatctccaaaattatcaaaaacctacattcaagaatacttgttatggtctttttcatgaattttcttgtaaaagaagtaaatttttggctgtagccaactataaaccactttttgaaatgaatcaaagtaaagcgatattgtctatgaatgacaaaagacagaatagccatggttaaagacacaattgacaaggaaatttgattatttctatggctaacaaaaacctgtgaatgccaagcaacatcccctccactctttcagtggttatttagttattcagcttagaataactgaaaaaataggctcctggagttttatgtacattttatgaagaatgcatttgaagtaaaatgaaattggggtgcattagttaagattcagtttggcttaaaaaattatttatttctccatgcaataaacatctggaagartgagaactctgctccacaaaaacatctggaagtttccagttccatttagctcaccgttccataatctctttgttctcataactcaaggtagaatccaaattccagca

SEQ ID NO: 460604 - DNA, 527 bp, Homo sapiens
gctctagtttcaatcttctgaacacgacgtttgaatctttgcttccatggccttgcacatagtacttttatctctcgattagcatgtttccatcttttctacctatgtcaactctattcatccatcaagatctaattcaagctctatctattcctcacatcctcccttggccacttctttcttctgaattcctatttattttcctgttttttttttttttttgcaattggcatatactgctaggtagcactcattttattttttctgtggaaagaaaaaatactaactgaatttttgtatatatttattaatatccagataggatatcataattaaagtaatcagatcaagtttctaaaatattactggctcttgttttccattcccaaacacytgagagatactgtccacttaacaagtgaaacagtggtctgtatatccagcatttgtagcctacaatctccaaagtgtgtttttattatgaccttactcctccttactgtccatatttcacaaaaagaagttat

SEQ ID NO: 460605 - DNA, 527 bp, Homo sapiens
gctctagtttcaatcttctgaacacgacgtttgaatctttgcttccatggccttgcacatagtacttttatctctcgattagcatgtttccatcttttctacctatgtcaactctattcatccatcaagatctaattcaagctctatctattcctcacatcctcccttggccacttctttcttctgaattcctatttattttcctgttttttttttttttttgcaattggcatatactgctaggtagcactcattttattttttctgtggaaagaaaaaatactaactgaatttttgtatatatttattaatatccagataggatatcataattaaagtaatcagatcaagtttctaaaatattactggctcttgttttccattcccaaacacctgagagatactgtccacttaacaagtgaaacagtggtctgyatatccagcatttgtagcctacaatctccaaagtgtgtttttattatgaccttactcctccttactgtccatatttcacaaaaagaagttat

SEQ ID NO: 460606 - DNA, 519 bp, Homo sapiens
gcagagatcaaattgtgataaattccatttttccttgcatttgagaactacaaaggaggggaaataagcattcttaatgcattaatttcctaccaatagtatacttaataataattttactatagtctcaacgtatggtcccaaaagaatgctttgtaacaaatcatctgagtctttgtaacaaagtgtcagagtattatgctttttaaaccaagaccttaatcatgcatgaaagtgtgcgtgattcttttaagttaagttgaagtcttgcaatgtctcccaggctgctttcagactcctggrcctctcagatgatcctcctgcctcaccttcccaagtagctgggattacaggcatgtgccatcgtgccctcttatgtttttaatattctgtattttttatttatatttgttgatttaatgtattttactcttttctttaatagaggatgtgagttctgtagagtccacattcaggtaagactttgcggttttttaaaacgtatatgttaactcagaa

SEQ ID NO: 460607 - DNA, 202 bp, Homo sapiens
taaaatccaaaatttccatttgccagtattaaagctctttttgytaaagttcacccaatttgcacattgctgacatgaaaattcttgggaaaaaatcttgaaatgtttagttcattcatcaacatcaatctcacaatcatgggctttgaactgtaattattcacattgttcccacttcactacaatgcaaaatatgtaacag

SEQ ID NO: 460608 - DNA, 486 bp, Homo sapiens
taatgcttaaaatattgtaggagaggtattatttctaggtttaaattggaccaattttttcttgctttgaaataggcacaaaatatacctttccaggtgaatatttatcaatgtgtttgatcagaaagatgcacaggaatggttaggttgcataatgtcatgatgaagtttagtgaactcctggtgtttgcatgtccctcaacaagatgaacataagacttttcataytggcctggacatttcaagcgtgtgtcttatctcttactggaactaaagaccagtggatgaaaggccaagttgtctttcttgttacccaaaccacacatttgcagtaaaaagaaaaagagtaagacaatttcacttaagaatgcccttgttgaagcagtaaacatgttaccatttaaaattttgatacttgaatatatatctttttaggtttgcgttatgaccaaatgggaaatgtacataggccatttctgttgcaca

SEQ ID NO: 460609 - DNA, 595 bp, Homo sapiens
ggattaataaaaagattaataaaattgtgtatagcatgyatgtatctctctatgtatgtgtgtgtttgtatcctctattcacattagctaggcaactgtttccaatttctccaggaattttataaaagcaatttttatgtaagtaatttattggtagtgaagtagacaagagtaatcacagtgatgatgatgatgatgatgaataacaaccattttcctggtacccctttaaaccctttgcatacattatctcctttaatcttagcatttgttcagttgaggaaactgaaactaaaagatcgctttgccccagtcacacagccaggaagcccagcagagattcacactcgggtctgactggggtccacgtctgtgttctgtatactactgtgcccctcttgctccctgcctggtagagccaaaagagtcagcaagaaaataagaaaaagtagtttgagacatatttgaaaataaattcacaatacaaaaaggatctcttgcccaatcattaaagaataataaatcaataataaattatgcaagtaacatctgccaatataaatatgcagtgtgactagaaaccaataacaaaaag

SEQ ID NO: 460610 - DNA, 628 bp, Homo sapiens
ggacagtcgggtaatactgccagaaactccaggcagttcaaagaacactaaggacccaaagcttcaaaggggaaggagagagaaaagcactgattcttagtgctttcttcttgaagttccatgtttggaaggttctgagatctgtgtctccatggatgctgacagctagcctctgttcttgttcacatttagttttgggggtgtccttagaaattctaagatgtcgtcatccttatggtaaaaggcaaggtaaaaagataattaatgcatcttaatcatttcaagcatctcataagagctcttcattattcaaacttgcatcaatatttgrtacttttgacatatatatcagcactttgaaatacttctctgcacgtattgggaaagtagtgagcaatgacagtttgttgaatgaattaaagaaaaaatgtgttcctgagggataaactaagaccaaagaccattattctgtagtataaccaacggagtcatataatttgattttttcagcacccaggatgcagacacaaggaaaaagtggtggttcgcttgacccaaaattggagatttgtcaggttaagtggggtgggacatatgagactgctgatgagaaggcagaggaaaaggt

SEQ ID NO: 460611 - DNA, 628 bp, Homo sapiens
ggacagtcgggtaatactgccagaaactccaggcagttcaaagaacactaaggacccaaagcttcaaaggggaaggagagagaaaagcactgattcttagtgctttcttcttgaagttccatgtttggaaggttctgagatctgtgtctccatggatgctgacagctagcctctgttcttgttcacatttagttttgggggtgtccttagaaattctaagatgtcgtcatccttatggtaaaaggcaaggtaaaaagataattaatgcatcttaatcatttcaagcatctcataagagctcttcattattcaaacttgcatcaatatttgatacttttgacatatatatcagcactttgaaatacttctctgcacgtattgggaaagtagtgagcaatgacagtttgttgaatgaattaaagaaaaaatgtgttyctgagggataaactaagaccaaagaccattattctgtagtataaccaacggagtcatataatttgattttttcagcacccaggatgcagacacaaggaaaaagtggtggttcgcttgacccaaaattggagatttgtcaggttaagtggggtgggacatatgagactgctgatgagaaggcagaggaaaaggt

SEQ ID NO: 460612 - DNA, 527 bp, Homo sapiens
tgaggccagaccaacttcagtggtatcagctgaggatgccccgtgacatggcaggctcatgcctagaaattaggaggataagatccctccaactcaagcccatggggattgcttactcttctctggtgccagaagagggcaacacatgaatctctctgggaacttagatcaacytaggagttgacaatagagatagggaaagggaagaaacctccaaagactgaagatgctccccaaagtggctaagaattggaaagcaactgaaataataatctgattttaaaggtcactgattgctgtagatttattaaaattactctgtggagattggagctttaggaaagagttgaatttagatacaaaaaaaaataaagaataaagttatatttaggcaactcaattgttagtgcgtaagttttgaccctgctattatatatgcatgtgtatatatgtcatcactaatttctattacaactataaataactagctaacatttccattttatggttaacgagtgtgaggctta

SEQ ID NO: 460613 - DNA, 536 bp, Homo sapiens
ttgtgatttgcatttccctgatgatgaatggtgttgagcattttttcatacacctgctggccatttgtatatcttcttttgagaaatgtctatccaagtcctttcttcactttttgttgggattatttgtttgtttgtttgtttgtttgtttgtttttgctggtgagttgtttgagttcyatgcatattctggttattaatctcttatcagatgaagggtttgcaaatattttctcccattctgatggttgtctctccattgtgttgattgtttcctttgttgtgcaaaaggttttagtttcatatcatcccatttgcctatatttgctttagttgcctgttctattgaggtcttctccatataatctttgcccagaacaatgtcctgaatcatttccctggtgttttcttctgttaatttcatatagtttcaggtcttacatttaagcacttaatccattttaagttgatttttgtttatagtgagagatgggggttagattcattctcctatatatggatctctagtttcccca

SEQ ID NO: 460614 - DNA, 606 bp, Homo sapiens
gctgggaagcccaagatcagggtgccagcatggttggrttctggtgagggtcctcttttgggttgcaacttctctccgtgtcctcatgaaagaggcaaataaactccctcagcctctttttacaaaggcactaatcacattcataatggctctatcttcatgtctgaatcatcttctgaaggccctaccttttaatatcatcatcttgagggggtagaattttaacacagggatttcaaaagaacacaaacattccgaccataggatataatattctcgtccttcaagataggagtctggagtcacttcctcttcaaggtttcttgctatgcttccccagaatcctccttctgaaggaagcatcttgttcttcctttaatccccgcccttccttagttgtacggctgttgatttttcagagtacaaaatccttaaaagctgggtggaagtcttatgcatgtctaaatccataacatcttgcaagaacccaataaactagcaaataaatgagtgatagataatgtagagtatgaaatttgggggaaaatttagtttgatactatgtaaaattcattatggaaaataagctggtctaatatattagat

SEQ ID NO: 460615 - DNA, 606 bp, Homo sapiens
gctgggaagcccaagatcagggtgccagcatggttggattctggtgagggtcctcttttgggttgcaacttctctccgtgtcctcatgaaagaggcaaataaactccctcagcctctttttacaaaggcactaatcacattcataatggctctatcttcatgtctgaatcatcttctgaaggccctaccttttaatatcatcatcttgagggggtagaattttaacacagggatttcaaaagaacacaaacattccgaccataggatataatattctcgtccttcaagataggagtctggagtcacttcctcttcaaggtttcttgctatgcttccccagaatcctccttctgaaggaagcatcttgttcttcctttaatccccgcccttccttagttgtacggcwgttgatttttcagagtacaaaatccttaaaagctgggtggaagtcttatgcatgtctaaatccataacatcttgcaagaacccaataaactagcaaataaatgagtgatagataatgtagagtatgaaatttgggggaaaatttagtttgatactatgtaaaattcattatggaaaataagctggtctaatatattagat

SEQ ID NO: 460616 - DNA, 557 bp, Homo sapiens
caaaattaaaaagcagagatatgtttttgttttaggggagagggacattgggggattggctgacaagcatatggcaggaagtgatggaaacaggtttaaacaagtagagtgagtcccagtaatgcagggccgtaaccaccaaccaggaggcgttgaacttccgaggctaaggcataggcattatgtgttgcaaatgattatgaagaacggagtttggagaatctgaactcaggagctggggacagtggagaagttattctaattacagatttatgagacaatgaggaggttcttcagtaatttttyatttaataaaaggcttgagaaaattttcctcctagaattccttttgattgatatgaaacttggggtatagatacaattggaataagactttttataaaagagggtaataaggggttggcttgcataggtacaaaggaatcatgtttaacttatcctctgacatttttcaagtactctagcggcaggggtggtaagggtaatgacaggttagagttactgtttagctacatagaaccacaaagcaatgaata

SEQ ID NO: 460617 - DNA, 565 bp, Homo sapiens
gattcagttttcagtatttgtgacagtgcctggcatacaggaaatgctcaataaataaatatctattgcatggatgcctacatgaattcttagcctgggcagagcctgggaggactctttacagcatggattgtgatactcctgcctaagagagcagacacccccgccgatagaacaaatgctgcctcgacagagagtgagggcaactagatgcatgggagaagagctttgtggttacactggtccagctcttgaatatggcccttcagagtctggtcttactcatctataaaatgggatacgtcatacaagactgaaggaagtattaagtagagtcgctataattgtgaaagtatctagtatactccttaatactgttaatrctgttctgtggactttccatatgctattttggacacttggacaaagatcagtgcatcaccataattgaggggtgaaagaataagaataaatatttgctgagtgtttaaaatatatgttaggaatgtcaaatactatcttctgtttacaaaaactgtgagataattgtctgtgaattatacag

SEQ ID NO: 460618 - DNA, 409 bp, Homo sapiens
tgaggaatgaaagaatccacagataaaatattggaaagagtattcatgtgtgaccccctagaacaaaatgctacagggtcaaagaatggagatatggtttggctctgtggcctcactgaatctcatcttgtagctcctataattcccacgtgttgtgggagatagagggtgggagatgactgaatcrtgggggtgggtctttcccctgctgctgtcgtgatagtgaatgggtctcgtgagatctgatggtttaaaaaaacaagagtttctctgcacaagctctctgcctgctgctattcacataagatgtgacttgctcctccttgccttctgccatgattgtgagacctcctgagccatgtggaactataagtccaataaacctctttcttttgtaaattgcccagtc

SEQ ID NO: 460619 - DNA, 570 bp, Homo sapiens
tgagactaaatctcacagagggataaatgcttcgtatatgaactaggatagaggcagctttaatgccaggaaacaggtgaggaagcagaacagtcactgggtagactactttgcaggggaaagagaaactggctgaacttttaacaatcatgggctctatggaatattgaaaacatacaagcttcagacaaagagcaagttctcactattcaccaattctcaaccttgggacttttaacaagtgctcagcagcatgtgggcaattgagtctagatagggagcaaaaagagattttcagtggcacagaaatcccgggacagtgctggagagcagagcggaatgtcagttacatggtgcatggataagcaagcccagatgaaaggagggaccttttacagcttaaagcttttgaaactggtagtaaattaaaactaactaaagctataaacccaaccccaacttagctcaattcctgatttgatcagagagatcagcccttgtggaggagaaatattttccactycagtctctgtaattggcttatatacaatatctggcatataatacaca

SEQ ID NO: 460620 - DNA, 349 bp, Homo sapiens
attaatgccttaaaagtaattgtaaagcattttgtatagatgtcgaaatattaaagcatattccctctgaatgtgagtgagttcaaatatagaagcaagttcctcctctttagagaattcaaaatgatttgattgttgaattgcatgccaagtgaacaagaactactattttgtaactagggcattcttaactctgaatacattggatgtgaacagatgtagagaacagacacaaaggacaaagatggatttatggcattataaaatttaaaatgtgaatctgcataaaacrccaaaaatgttttaaagtaaaaaaaaaaattcaactaaaaggtagtcaatggttgtt

SEQ ID NO: 460621 - DNA, 526 bp, Homo sapiens
tttcctttctacctgggtctaaaaactttactggttttagaaaggaaggatgtaagatatcaaagtataaatattgttcattcacagcagctcatatatcctttcaaacaatataatcacggacatgatatagacaggaagaataacgacattctttagttaaccaaaatttcattgaaggtgtatatttgagttttgtttatggttttttaaagctggtttaagttaaacattattttagtctttcagtatgtcaggcactgarctgaattataacatttactctgacctagtaccctactggtggtgacatcataagattaaggagatggagcttattgtgatgactattttgcagttgaaataggggaggcacaggcagattgagaaactgctgtaactcacattgctaagttcgttttagagccagaattctagtcaggttataaaacacacactgaatcaccattctgccttatctcggccaacggtgtttagtcctttcatttaaatatacaaaaataaa

SEQ ID NO: 460622 - DNA, 526 bp, Homo sapiens
tttcctttctacctgggtctaaaaactttactggttttagaaaggaaggatgtaagatatcaaagtataaatattgttcattcacagcagctcatatatcctttcaaacaatataatcacggacatgatatagacaggaagaataacgacattctttagttaaccaaaatttcattgaaggtgtatatttgagttttgtttatggttttttaaagctggtttaagttaaacattattttagtctttcagtatgtcaggcactgagctgaattataacatttactctgacctagtaccctactggtggtgacatcataagattaaggagatggagcttattgtgatgactattttgcagttgaaataggggaggcacaggcagattgagaaactgctgtaactcacattgctaagttcgttttagagccagaattctagtcaggttataaaacacacactgaatcaccattctgccttatctcggccwacggtgtttagtcctttcatttaaatatacaaaaataaa

SEQ ID NO: 460623 - DNA, 567 bp, Homo sapiens
aatatcacttgaacccctaaaacatatacaaatattatgtatcaattaaaaataagtamataaaaataaaaaggtaaaaaatgcaagccaaaaatgaatccgaaccttaagatcaacaagactgattatatgttttcccctctcccaggcagcaacagccccagtttactcattttcctctctagtttttaatttcctcttcattcctggtacccaaggagatcccattcactgttaagtgtttatgaatttaaaatctttttggttatatcttatctagaatttccaggtgcttatagaacaaaatcagaaaataaaatatgacttttggctcctgatcccggcaggatgggaaaataagataacctcaacacttacgtcatcatcctgccagaactgaaagtcacaaggcttattttggggcatttttcttcccagagatctaagcctattcattgttaatgaacaccatcaacaaaggaggcaatgttttctatttgaaatagttccgggttaaatgtcagaagacaagtaggctccaaatgtctctgccaaagaattattcaa

SEQ ID NO: 460624 - DNA, 572 bp, Homo sapiens
atgagacagtaaatatgtgtttatactcaggaacatgcattttaattagcaccttagttattctgacagaggttgatggatgacatttaactggaagtggcactggacttcatctgaggaacaccagagataataataggagagccatggtataccataaaaacaaaacagtatgagaaacgaaaaccctcagccaaataacaragagatcaatgggcaatcttgaagatctactacatacagaactgttacttatatactagggtatggggaacggggacacagacataaaatacgaagttctctctctctctctcattctgtgtgtgtgtatgtgtgtatgtgtatgtgtgtgtgtgtgtgtgtgtgtgcatgagcaaacaatgtaatctctgcccttatagactctgtcactccacaggggtctctaggcattaacctttgaaaacttaagtaaccataacagagtaaaggggtaatgaaaaataatcattttaaaaaataaatttttatttttctactaaacctcacaatgagttatttccttagacacttgtttggaaaagcatgtg

SEQ ID NO: 460625 - DNA, 488 bp, Homo sapiens
gtatgtgtgtgtgtgtgtgtgtgtgtgcatgagcaaacaatgtaatctctgcccttatagactctgtcactccacaggggtctctaggcattaacctttgaaaacttaagtaaccataacagagtaaaggggtaatgaaaaataatcattttaaaaaataaatttttatttttctactaaacctcacaatgagttatttccttasacacttgtttggaaaagcatgtgctttgctatcttctgactgtcatttctgactggagctgagttggcttttgaataaataataataacaatattaccgggtctatgctcttaacctatattcatatggaaattgcagtgaagtagagtacagttctcttttacaatgttctccaaaatcaatggacgaccaggcagatttacgtttaattgactaaacatatatagatgtggagatatagatagataaatagatagagagatagataggtatagagccatat

SEQ ID NO: 460626 - DNA, 548 bp, Homo sapiens
tgtatttggttacttatccattaatgtggataaatacagaatttttagaccartacagaagatggagagagaaatgtgttaaatcattttttaaaatgtaaagtcagatacaaattaagaactgtgatgattattttcttataactgattatctcacattattatgctttttggtgacattttgcaatatcattattgaactttgacaatggtatctgagctgaaagaaccttctgttaattatcagctagaactgttatgcttgcagttctcattttcaatgggtgtgaggattggccaacctaaaacaatgatacaaataataggttaaagaagcaaaaacagcaaaattcaggcaaagaacattgattaatgaattttttaaaattcttaaaggtcatgtactcaagtttgactaagcctcaggcagatttaatgaacatgaccagagcctgctgtatgcagtaggtaacccaggctgactccaaatttgctgacattacagggttgttatttctggaaggatatataattctggaataatttct

SEQ ID NO: 460627 - DNA, 420 bp, Homo sapiens
taacactctcctcaaaacccactgtgcagcttcaatgtcaccctcatgtttcaggttctgttayggtaacactccacctccaggtaccaaaatctgcattagtaatttatcactttataacacatttctccaaaaactagacagttaaaacaacaaatgtttactatcttacacaatttctggaggtcagaaattaaaagccacttagctgtgtttttcctggctcagggtctctcatgaatctgcaatcaagctattagctgggtgggaagccagcgctcaggggtcaaatgaagcggcagaatctgttttctggctgagtcacgtgtttgttggaaggcctcagtttgtggtttactattggctacaggctttggttccttatcacgtgggcctctctacagtttactcacaggatga

SEQ ID NO: 460628 - DNA, 481 bp, Homo sapiens
aactcactcactgtcacaagaacagcatgggggaagtcgtccccatgatccagtcacctcccaccaggtccctcccttgacatgtggggattacrattcgagatgagatttgggtggggatacaggcccaaaccatgtcaggtgataccctgctgccttgatggccttagacaggaagcatcagccacagcaccttttcaagatacttacagaacccgcctatcccatgtagactgatacctgtgcaataaaaagtggtcacattaagtgaccagatttttttaagtttctgtagtgttgtggttatcatgttcacctatcacattcgtcttacctaaggccagatgtctgcctttatcatgagatctcagccagcagagaagttcttctccaggtacttctggagtcttcagtgggtgacttacattagctcacatattagtcctggctgatgcttcctatagcttcaggaatgattaca

SEQ ID NO: 460629 - DNA, 396 bp, Homo sapiens
atagaactagttattcattsactgggcatcattttgtgcacaagaggtgaaaaataatattgcccaggttgacagggaaatgagatggttggggtatgttacaaatggtaaccttttaacctgtgattgctgtatttgtcctgttccaaaattggactccctgtaagttgccagtttttcagtgacagtgatgagtgggaaacctctagtgacaacttcccactgttaacctcagcagttaacacctgtattattatacaacagtctggagccacaggccaggctgtgagccacggtgaagggcgacattaataagggatgaatgggagatgagaagattcagcccatggagaaataatgtcagaaataatgtgcaaacaggtttgccactcctgt

SEQ ID NO: 460630 - DNA, 426 bp, Homo sapiens
actagttattcattcactgggcatcattttgtgcacaagaggtgaaaaataatattgccyaggttgacagggaaatgagatggttggggtatgttacaaatggtaaccttttaacctgtgattgctgtatttgtcctgttccaaaattggactccctgtaagttgccagtttttcagtgacagtgatgagtgggaaacctctagtgacaacttcccactgttaacctcagcagttaacacctgtattattatacaacagtctggagccacaggccaggctgtgagccacggtgaagggcgacattaataagggatgaatgggagatgagaagattcagcccatggagaaataatgtcagaaataatgtgcaaacaggtttgccactcctgtttggacatggctctggttgtgtgcagatctcaaag

SEQ ID NO: 460631 - DNA, 396 bp, Homo sapiens
atagaactagttattcattcactgggcatcattttgtgcacaagaggtgaaaaataatattgcccaggttgacagggaaatgagatggttggggtatgttacaaatggtaaccttttaacctgtgattgctgtatttgtcctgttccaaaattgkactccctgtaagttgccagtttttcagtgacagtgatgagtgggaaacctctagtgacaacttcccactgttaacctcagcagttaacacctgtattattatacaacagtctggagccacaggccaggctgtgagccacggtgaagggcgacattaataagggatgaatgggagatgagaagattcagcccatggagaaataatgtcagaaataatgtgcaaacaggtttgccactcctgt

SEQ ID NO: 460632 - DNA, 583 bp, Homo sapiens
gtttaccgatatagtatctcctcctcccctcactccatcaacccccacgcgacacaactttccggaagtaagcaaaatccgttatcaaggtgaaactccggggaccaggctccacagctgccataaactggatggcaygttagaagccggtgggtgtaggtgaggcacgctggcgcccgcgggcccttctccagccgctacccagtgggaatccgcggggctgaagccccgaaaccaggctgagcgtcccagagcgcaacctccctttcccccagcagcgccggcgccgcagaagccgcgtgtccccaggcgcactcccccaaggtgaacccccgccccccacggaggcggctgggtcgcgggtctgggcggggcgctccggacgccctcccgccgctgcgcacccctcccgcgagctgccagctccctcggcctctccacccaaaactggcccaaccgccaatcgtctgcctctcacctcctacagcaggtgacccatggccaatcgccaggggtctctttgccaggagccgccagggccagccaatcggggcgacccctccgccggggaggggacgggaaa

SEQ ID NO: 460633 - DNA, 595 bp, Homo sapiens
gggagccaccctggctcctttcctaagctctgcctagacactgactccaattttccttcttccatgtgttaccttgccctctcctcttctagactccaggtctctcctcttgacttctttctctttcctttccatgcctcatctcctatttccttctcttaatttttttctaggtataaactccctagaaggaaccatcctagatgtcaggggcctaagctttttgtagttctgagcagggcctttctgctttttcccatcccccagagatccctcctttcctgggtcccctttatttctacatctgcccccattcttgctctccttttatcccccagttcctcaccttcattctcagccttcacaggagacagtgtcagagaatgtggagcatcctgcccaggctcacaacaggttcttgaaaaacatccattaagcccagattggagtctccccatctttgtttcttcgtcgtcccttcccaggccctggaygatcctccaccctccctgcttgtaagcaggaggcccctccactggcaccctccttctgtccagtgaggggcaggggcgtccaggcctctggaagctcattc

SEQ ID NO: 460634 - DNA, 566 bp, Homo sapiens
aacgaaacttcgtccctggtgaggtcctggtaagtcccaggcccacaggctgagggtcctggggcatgtagtgcyacatctccctcttcagtgaaacaagaggctctcacagagttcctctgaaagcctctttcatcaacaagtccatttgtgattctgtctcttcttgtggtgaccaccaggaaaacgagagagcagagctgcattctagggttttgctatgactcttctaggcccaatcttaaaactgagatgatcatgccaaacccccagctcctcccctacactccagactcagagtaagctcattcaccaggcaagtgcaaaaagacctagaagatctgcccagccaagaaggtatgtatttcctccttgaaacagcattttcaggaagactctagattaagaattagaaagccaatgggaaaacttctgaccttattgcttgaggcgatcctcttgcctagaggtcttcaaaggtgattccttaggtcaggaagaaaatagtagaactacaatttatatgtagttttactgttaaaataatgagctttactgatatttta

SEQ ID NO: 460635 - DNA, 594 bp, Homo sapiens
tttcagtgagcacgccggtcgctgcggtcctgcggccactgccgccgcgcttgtcagcccgggccgagcgaccttctctgcccggaacccagccccgccaccgcactccggagcctccggcctcccccaccccacccccgccccccaacccggggcttttcagggctcggcctgggcgtttcgcctttgtgctttgtaagagaaagccttttcttccagggcacaacaaacttgggcggagagcttccgtgtggcccsccgggcgaggccgcccacggtggtgaggccatccgaggggatgcccggttcatcccccagtccaggagcctctccgagagctcgcggcccaggtcgaccccagctggcgagggcgcgcaggagtcccgaagtagcggggactagggcagccaggaggcagggggaaagctctcgcttcccgttaagcacaccctgcattctcgggtcgtggatgcagctccagcggagagcccgtgttccggccctgagccaggcgcgcgtcgcactgggtgggtgcatggggcccgggccataggtgtgggggcacagccctacctggccggcccgggtcgtctg

SEQ ID NO: 460636 - DNA, 594 bp, Homo sapiens
tttcagtgagcacgccggtcgctgcggtcctgcggccactgccgccgcgcttgtcagcccgggccgagcgaccttctctgcccggaacccagccccgccaccgcactccggagcctccggcctcccccaccccacccccgccccccaacccggggcttttcagggctcggcctgggcgtttcgcctttgtgctttgtaagagaaagccttttcttccagggcacaacaaacttgggcggagagcttccgtgtggccccccgggcgaggccgcccacggtggtgaggccatccgaggggatgcccggttcatcccccagtccaggagcctctccgagagctcgcggcccaggtcgaccccagctggcgagggcgcgcaggagtcccgaagtagcggggactagrgcagccaggaggcagggggaaagctctcgcttcccgttaagcacaccctgcattctcgggtcgtggatgcagctccagcggagagcccgtgttccggccctgagccaggcgcgcgtcgcactgggtgggtgcatggggcccgggccataggtgtgggggcacagccctacctggccggcccgggtcgtctg

SEQ ID NO: 460637 - DNA, 450 bp, Homo sapiens
atacggatctgcttttggtgtgtattttagaaaaaagtttccacctagatcctggccaaagttgmaaacagtcaagtgatgtggaggttttgtagacacatgtaaccatctggcaattcagatatgtggctgtcagttttctctgtggaatgcgttctggtttaagatgacctagaagaaatgaaagttgtgtttttgctggggagacatggtgctgtgtccagtacattctgttaacagatctgaagctttaggaaaatctggagctatgtgagtgaagaaggaaccttttggtacagtcttatgagaaatccagcccagtaagtttgagtgtgacttaccaggcaagagttgtctttttccactgaaattcaggctagacttatggctttacatcaatcttagtgcagcagagacagaaagctgtagggagggggcaagggccagccc

SEQ ID NO: 460638 - DNA, 450 bp, Homo sapiens
atacggatctgcttttggtgtgtattttagaaaaaagtttccacctagatcctggccaaagttgcaaacagtcaagtgatgtggaggttttgtagacacatgtaaccatctggcaattcagatatgtggctgtcagttttctctgtggaatgcgttctggtttaagatgacctagaagaaatgaaagttgtgtttttgctggggagacatggtgctgtgtccagtacattctgttaacagatctgaagctttaggaaaatctggagctatgygagtgaagaaggaaccttttggtacagtcttatgagaaatccagcccagtaagtttgagtgtgacttaccaggcaagagttgtctttttccactgaaattcaggctagacttatggctttacatcaatcttagtgcagcagagacagaaagctgtagggagggggcaagggccagccc

SEQ ID NO: 460639 - DNA, 604 bp, Homo sapiens
attgttccctggcagggcctgagacctgaccttggatgtctatagcacttcatcctataaccaggcattcttgagaatatccatttggtgcttatgtggctctgaggctcatcatcatctagggtcctgcttttaaagtaactttctaaagatrtgtcactagaaaatgctttctgataacatatgctatcttaaccaccagaggacccatgagcacccagaaccatgcttggcacagagtagatactctggaaatatttgctgaatgaaggagggccattgccctgctgatgtttagtgagttagattaagggtcctcatctttttactaaagttcaggcttagctctatcctttgccctacccggaaacgtgacaggtctcagggcctagagtactcgcttggccgttaaactaagccacatagcacccgggattcttggcagagtttcttggcaaagtttcctctgggaggtgcattgctcaggcttgactttcgcgagggaggttaggcatgtagtgccaagagtattgaagaaggaaaaaaagaaagcgaagcaaaccgttgttctagcctggcacacgtcggcatgctaaaaacagtt

SEQ ID NO: 460640 - DNA, 604 bp, Homo sapiens
attgttccctggcagggcctgagacctgaccttggatgtctatagcacttcatcctataaccaggcattcttgagaatatccatttggtgcttatgtggctctgaggctcatcatcatctagggtcctgcttttaaagtaactttctaaagatatgtcactagaaaatgctttctgataacatatgctatcttaaccaccagaggacccatgagcacccagaaccatgcttggcacagagtagatactctggaaatatttgctgaatgaaggagggccattgccctgctgatgtttagtgagttagattaagggtcctcatctttttactaaagttcaggcttagctctatcctttgccctacccggaaacgtgacaggtctcagggcctagagtactcgcttggccgttaaactaagccacatagcacccgggattcttggcagagtttcttggcaaagtttcctctgggaggtgcattgctcaggcttgactttcrcgagggaggttaggcatgtagtgccaagagtattgaagaaggaaaaaaagaaagcgaagcaaaccgttgttctagcctggcacacgtcggcatgctaaaaacagtt

SEQ ID NO: 460641 - DNA, 352 bp, Homo sapiens
gttaaggtgagtagctaaactgtatatatgaaaaagaaatgataatgtaaaataacagacagtaagggcactaggatttcaagagagagagagagtcatccctgaggctggctttcccagaatgtgatctaaggactgcctgtttcagatcacttgtgctggtgatagtggaggatggggacagggatgggggtggggtgaagaatgttatttataatgcagattcccagggcccacactagacttcatcttcagaatcacaaggaatacagcctaaaaactgtgtattcagcaagtagccatcctargtgattcttgttttccttaaggtttaggaatcactcatctaggg

SEQ ID NO: 460642 - DNA, 630 bp, Homo sapiens
tgcttactatttgttttgctctttcctttgcttctgtcaaatctctgtttttgggatgtgagtttagactccttactatgattccctttagcgagggcataggacacaccaaaatgcctcaagcacaaaatgccaaggaggacacctcagtgacaggatgggaaaatggaatcataggagggagaggagaaaaataagaaagaggaaaacggagagcaaaagaaggggaagaaaagaaatgaaaataaaatgatgcataggaaggcagcggtgagtgcatggagctagcagtgagactttctaatagtcttgttgccagtctcctgggggctcatggggctctcaaagaaaaatttatgggatggaaaaaatgtggtagggatttaataaatatttgattaactgattgattaattcattaaggagcttggtattttaagtaggttataagaaacaagtttgttagaactgcaaaggcatgaactggagacagtaaaaacattgaaaaccacatggaaagatgaataagttgagagagaagaagaaccctgaaaactgatctratggtctggaataagaagaggggtcggcactggagataatcaactagtcataaaactacataaatac

SEQ ID NO: 460643 - DNA, 677 bp, Homo sapiens
tggggaacaggatctgaactttgcaggcttccagaatgattctacctgagctacatgtggatacagtgagtcctttttgtagtcaccatgacaacaggggacttctagtccatatccttctactggattcaaattacacccttctgtaattcatctggtcaaagtttgcaacctcactcaggttgcaagaatagaaacttctaccacaatttgagtagatacgtgagcctcttaagaattttttttttgttttttgagacaaagtctcactctgtcgcccaggctggaatgctttcagctcagtgcaacctccacctcytgggttcaagtgattcttctgcctcagcctcccgagtagttgggattacaggtgcatgccacccaactcagttaatttttgtatttttagtagagatggggtctcaccatgttggccaggctggtctcgatctcctgacctcaggtgatccgcccacctcggccttccacagggctagcattacaggcatgagtcactgtgcctggccatcttatgatattttaatgtacttgttttttaacaactacatgcgtgacctttccacccatctcccaaaattctgctgtaattggtctggctaaagcctaggcatcaggatttttcaaatctcctctggtggctctaatatacagccaag

SEQ ID NO: 460644 - DNA, 677 bp, Homo sapiens
tggggaacaggatctgaactttgcaggcttccagaatgattctacctgagctacatgtggatacagtgagtcctttttgtagtcaccatgacaacaggggacttctagtccatatccttctactggattcaaattacacccttctgtaattcatctggtcaaagtttgcaacctcactcaggttgcaagaatagaaacttctaccacaatttgagtagatacgtgagcctcttaagaattttttttttgttttttgagacaaagtctcactctgtcgcccaggctggaatgctttcagctcagtgcaacctccacctcttgggttcaagtgattcttctgcctcagcctcccgagtagttgggattacaggtgcatgccacccaactcagttaatttttgtatttttagtagagatggggtctcaccatgttggccaggctggtctckatctcctgacctcaggtgatccgcccacctcggccttccacagggctagcattacaggcatgagtcactgtgcctggccatcttatgatattttaatgtacttgttttttaacaactacatgcgtgacctttccacccatctcccaaaattctgctgtaattggtctggctaaagcctaggcatcaggatttttcaaatctcctctggtggctctaatatacagccaag

SEQ ID NO: 460645 - DNA, 579 bp, Homo sapiens
atgacagtaagttataatatgggatagtggttgaaacttcaggccctagaaacaaactgtttaggtttgatcttgagtgaatttcttaccttctctgtgccttagcgtcactaattgtaaaatgggaataataattgtgctatcataaacaataatggtggatgctgcagctcccagaactacagccacaatatcaggagcaggagcggcagtgatggcatgtcacctgcaggtattttatgcatggggtttgtaagaaggagataactgtcactactcatatgacctctctgacagtctgtatggtgtagtgtgcaattattttcagcaagggtactgcatttatggagaccgctgcagatatgaacatagcaagccactgaaacaggaagaagcaactgctacagagctaactaaaatgttgtcccttgctgcttcctcaastctcatagatagttggaccacttgtcaaaataaatacaggcaaagctgagtcaagaaattcaaactttgcaactatatgagcaggttcagaggactgggtgaatactattgagtttgttcctgggcaaccctact

SEQ ID NO: 460646 - DNA, 458 bp, Homo sapiens
ctggcagtcctacccaatgcaatcagagaagagaaacatataaagggcatccatgttggaaagaggaagtcaaactatccctgtttgccaataatatcatcatatacccagaaaaccctaaagactccactgaaagactcctagatttgataagtgaattcagtgaagtctcaggttacaaaatctatgtaaacaaatcactggcactgccttacggcaccaatgacaaagctaggaatcaaattaagaactcaattccttttacaatagctgcaaaaaattacctaggactatacttaacaaggaggtgaaagatctctacaagtagaactacaaaacactgttgaaagatatcatagatgacacaaacaaaggaaayagatgccatactcatggattgaaagaattaataacatgaaaatgaccatactacccaaagcaatctatagattcaatac

SEQ ID NO: 460647 - DNA, 589 bp, Homo sapiens
caggcctttccatacatcctctgcaatttaggtggaggctcccaaagctcatctcttgtgttctgcacacctgcaggcccaacaccacatggaagctaccaaggcttggggcttgcaacctctgaagcaatggctaaagctgtaccttggctctttatagccacagctggagctggagtggctaagacaaagggcaccctgtccccaagctgcacagagcagcagggccctgagcccagcccatgaaaacatttttccctcctaggtctttgggcctgtgatggaacagtgtattagttcagtcttacagtactataaagaactattgagactagataatttattttttaaaaaagagrtttaattgacacagagttctgcatgactggggagtcctcaggaaatttgcaattatggcagaaggagaagcagatacttctcacatggtggcaggtgagagagaacaaaaagcccagggggaactgccatttataaaaccatcagatcttgtgagaactccctcactatcacaagaacagcatggggaaaactgctgccatcattcaatcacctcccaccaggtccctca

SEQ ID NO: 460648 - DNA, 630 bp, Homo sapiens
aaatagcttcaaaagggcaaatctaggaggtattggtgttaaagaggaggtggagaaagagataggggtagaaagtttatttaaaggaataatagcagagaacaaacctagagaaatatattaatattcaagtagaagaaagttacagaacactaagtagaattaacccaaaggtgactacctcaaggcatttaaattcaaatagccaaaagtcaaggataaagaaatgaccctaaaagcagcaacagaaaagaaacaaataacatacaatggagcttcaatacatttagcaacagacatttcagtggaaatcttacaggccaggagagagtggcatgacatatttgaagtgctggacgaaaaaatatttcatgctagagtaaaatatccagtgaacatattcttcaaagatgaaggagaaataaatatattccctgacaaacaaaagctgagggcttttatcaacatcagacccatcctacaacaaatgctaaaaggagtacttcaatcagaaagaaaagaacactaatgagcaataaataatcatctgaagatacaaaarcacacagaaaaacacagaatagtttaacactgcaactgtggtgtgtaaaatactcttatcctaagtag

SEQ ID NO: 460649 - DNA, 544 bp, Homo sapiens
caatagacccacagctagtaacatacaaggaatggggaaaaactaacagccttttccctaaggtctggtacacaacaaggatgtcccctgttaccactgctattcagcatagtactggatgtcctagctagagcaatgagacaagagaaagatataaaatggcattcaaattggaaagtaagaagtcaaattgttcttgttcacagataatataattttatatttggcaaaacctaaagactccaygagaaaactactagtagtgataagcaaattcagtaaagttgcaggatacaatatcaacatacaaaaattagcagcatttttatatgtcaaaagtgaacaacgtgaaaaagaaacaaaaaagtaaacccatttacaatagtgacacaaaaaatttttttacaaaaaattaaccaaacaagtgaaagatctctataatgaaaactataaaacactgataaaagaaattacagaagacacaaaaaatggaaaaatattctatattcatggattagaagaatcaatattgttaaaatattca

SEQ ID NO: 460650 - DNA, 544 bp, Homo sapiens
caatagacccacagctagtaacatacaaggaatggggaaaaactaacagccttttccctaaggtctggtacacaacaaggatgtcccctgttaccactgctattcagcatagtactggatgtcctagctagagcaatgagacaagagaaagatataaaatggcattcaaattggaaagtaagaagtcaaattgttcttgttcacagataatataattttatatttggcaaaacctaaagactccatgagaaaactactagtagtgataagcaaattcagtaaagttgcaggatacaatatcaacatacaaaaattagcagcatttttatatgtcaaaagtgaacaaygtgaaaaagaaacaaaaaagtaaacccatttacaatagtgacacaaaaaatttttttacaaaaaattaaccaaacaagtgaaagatctctataatgaaaactataaaacactgataaaagaaattacagaagacacaaaaaatggaaaaatattctatattcatggattagaagaatcaatattgttaaaatattca

SEQ ID NO: 460651 - DNA, 583 bp, Homo sapiens
tacatttgagggtttaatgtatcaattggcagtctcaaggaacactgatacttggaggttcagaccattttcccaaactgcccatgtttcatcaatgtgcaatgggaacaatacaggtagtggcatggtaagcactagctccactttggtaaacagactgtaaaagtgataggagttcatctatggctaataaatcaggacaacctagaaactcgccatcatgaagcacaatacttgttaacccaaaaagggacactagagagagctatcttccaggaaagaagctgtaactggaaagaagcctggagagacaacagtgtcaaatgaatagagaaattgaatactgacactaataaagaactatacccaccagtaatgctaccagagggcttgtgccctcactcaagaatgattgttcatatttkcatattcgctatggaaagagtttgttggaaaatggtagtaatcttaaataattgcaggacattactgggcagtgtggcttttatcattgttctctaattgctctaatacccagaataaaaaaaaaaagaatgtatctttcttgtgccacaactggctg

SEQ ID NO: 460652 - DNA, 389 bp, Homo sapiens
agcctcatttattctatgcagcaaatgcggttagaattcatatataccttatatagggacacaattacatcataaaagtcatggtacttagtagccaagctgaaattcgtaacaggcagtattagctttccagtgctgcaaagcaatattactacaaacttaatgtcctaaacaacacatatttatctcacagttgttctgggtcacaagtctgggcacaatttagatacattttttgtatccaggttgacaaagctgtaagycaagtgttgactggagttttggtctcatctgtggcttgattgggaaaaggatctgcttccaaactcatgtggttatagacagcattcggcttcttgtgggctacttgagtgagggctttagtttct

SEQ ID NO: 460653 - DNA, 569 bp, Homo sapiens
aaatcagcttgtcaatttcttaaaaagtacttttgggaatattttttaagttaagctgaatctatagaccaattttggggagaatttatattttagttttattgagtcttttcaagcatgaaagaaaaaatatctctttaattatttatgtcaactatatttttcagcaagctattatggttaagtttaatcatctttgtcaaatgtgggtcattacatatattattatcgctaattttattgtaaatgatacctctatttattttcaactgttttagggctggagtatagtgctagagtgtttgtatgttgaacttgtatactgtagctttttctaaatgcagttattagagcttactgagactttcttcatacacagttgtgtctttcatgagtaataatggtttcacatctttctttctaatatgttgcttttrattatttattgtcttatcatttttgctaagatattcaatataatgatataaatcctgagagaggacgttcttgccttctaatcttaaggcagaatatatttaatatattattatgatgatattaactctaaa

SEQ ID NO: 460654 - DNA, 579 bp, Homo sapiens
aaacattttgaaagactggtgtaggttcacactgacttatatccttaatactaattcatatttgcacttctggcaaaacagtttctctcactaatcaatactgtctctctgtataaaatcaccaatgaccttccagtcatcaagttccatgacttttaagtttctcctcttgtaatgtttgacagtaccaatcaccttctctttcttgaaaatcttccctcgagcttttcttctgtcatctctttgttcacttccttctgtgcctcactgcctcaacccatcactgaaaatgttcagaactcacatttctttccttcctgcatgctctttctaggtgacctcattgcttctatggctcccactattctctctaagctcagcactccatatccacgtagtgctcatcckcaccccaagacatttccatgtcccacaattccctcactcaacaacagcaaaaacagaagtgtgctgagatatataatgcatctgcctgcaaccagacgctaacaacagaaatatgaacaatagatttccttgtttttatttaaatatccgaagattatcctagccacccag

SEQ ID NO: 460655 - DNA, 613 bp, Homo sapiens
gcccttcttaacagttcacagtgcattttcacttagactatacaaccaataatacatccttccaaaaatttaatagattaaaatttgaatttccaagatcagactctcaaatcaatggctgtagataaygggatcgactttacctcacaagccaaaaccaacagagctctgacttactgaacatccttcatgaccacatacaaattgactcaaagcaaaattcaattgtaatataccagaccaggtagcctcaatgtcacaggatttagtggttctctgaactctgggaagcagagtgcaaattgcttttgtgtttctgcatgaggccattggggagaggaggggggatcataattcaacaaattaagaaccatcactccagaacaccaagaagaaaaggtcacttcctcgccaccctgccccctttcaaaacattatctctttttttaaatctccctcttcatgttatgacacaaaacatcatctcttaatgctgatagtgataggatacttaaataactggattagaaaattgccaaatgctatgataatttatggaagaaaactttcctgaatctaagaaacactgacaatttccccaagtgcccggtgg

SEQ ID NO: 460656 - DNA, 613 bp, Homo sapiens
gcccttcttaacagttcacagtgcattttcacttagactatacaaccaataatacatccttccaaaaatttaatagattaaaatttgaatttccaagatcagactctcaaatcaatggctgtagataatgggatcgactttacctcacaagccaaaaccaacagagctctgacttactgaacatccttcatgaccacatacaaattgactcaaagcaaaattcaaytgtaatataccagaccaggtagcctcaatgtcacaggatttagtggttctctgaactctgggaagcagagtgcaaattgcttttgtgtttctgcatgaggccattggggagaggaggggggatcataattcaacaaattaagaaccatcactccagaacaccaagaagaaaaggtcacttcctcgccaccctgccccctttcaaaacattatctctttttttaaatctccctcttcatgttatgacacaaaacatcatctcttaatgctgatagtgataggatacttaaataactggattagaaaattgccaaatgctatgataatttatggaagaaaactttcctgaatctaagaaacactgacaatttccccaagtgcccggtgg

SEQ ID NO: 460657 - DNA, 580 bp, Homo sapiens
agacgtttgtttaaaaaccctagcttctcatctctgtcaaatgcagcttccaataaaatgcaatcactttttactcctgaatcatatcgtagatgcctctgtgaagtagaaacaaatcaaaatgaaagtggtacctcagggccactcaacggactactcatattttgattcctcagctaaccaataaaaatgtatcatgccctactatgagtaacgctgtgagctgcacttccactgtctaagcaagcaacagagttaagaaatcccaacatatcaaagaaactcagtgatgttagagctmgaaagcctgcctaagagaaccctcatttactgctggtgaaatgtaaatttgtacatgcttgctagaatgcaatttggcagtctgtacaaagagccttcaaatccgtcaccatacatacagggcagagtttggctgctgtggtggaaagggcaggaatgtggagaaagacacagccttgaacccagacacacaccctaaagactgagtctgagcttacatgaaagacccccaacccctagcactagcctagcacagagtaacaagcaagagtagtcaact

SEQ ID NO: 460658 - DNA, 592 bp, Homo sapiens
attatactcttatagcactaatcatgaggatataataatatgatgtcttggatttgcttcaaaataatacaagaaaagggtttgacttttggtcagtatatagatgagtcatgactgaccatggggtgacaattgtkgaagctgagttaggtacccagaggttcgttataatattctgtctatgttaatctgcaatatgtctgacattttttataattaaaacttcttttgaaaagacaaaaatcaggccaggcacgatggctcacgcctgtaatcccagcactttgggagactgaggtgggaggatcacctgaggtcaggaagtcgagaccagcctggccaacatggtgaaactcagtctctactaaaaatacaaaaattagccaggcgtggtggcaggcgcctgtaatcccagctgctcaggaggctgaagcaagagaatcgcttgaacccagaaggcggaggttgcagtgagctgagatcacactattgctctccaccctgagcaataaagcgagactccatctcaaaaaaaaaaaaaggcaaaatcaacaaaaaatatgtatctgtaagaagaaacagtatacctcaa

SEQ ID NO: 460659 - DNA, 625 bp, Homo sapiens
cggcaggtcaaagcacagcctggagccgactgtctgtgtccaaatcccacttcaccacttgctgcataactggagcagatgattcagcttttctctgccttaactgactcatgtaaatggggatattaaaatatcacatatggattattatattgactaggaagttaatgcaatacagcatgcatagcagttagtaagcactcaataaatggtagatattattattttctctcttgtgggagcaacaaaagtgaaaagaatgaccctttggtaactggggatctgagtatwcacagactgtaccaatcataaccacaatcaccaaaaaaactacatttgtggaggcttagtgttaacacagtcccaaaacacttcatctattgattcccttatatggctagaatttaacattaattcttttttcatttttcaggaataataaagaacatcaataaaattataggcataatttttaaacaattttattgaagaataattatatgtaataaaattcactggccgggtgcagtggctcatgcctgtaatctcaccactttgggaggccaaggcggggggattacttgaggccaaagtttaagaccagcttgggcaaaaaagcaaaagc

SEQ ID NO: 460660 - DNA, 646 bp, Homo sapiens
cacaccaaactggaactttgctttttattgtgtttttctttttagacaggtttattgagatataggcataatttagtaaaatcactgtttttcacataaaattctatggactttgacaaacacacacagcagtataacatatagcctcatcactacaaaggactgagtactgtaagatccttgtccctttgtaatcaacctttctatccaatcagctcctggaaaccaatgatatggtttctgcttctgtagttttgcattttccagaatgtcwtataaaatagaatcaaagagtgtgtctggccttttgagcctggcttctttcatttagcataaggcatttgaaattcatccatatcacatcatgtatcagtggcatgtcccttttcattgctgagtagtatttcattgtatgaatgtattgcagtttatcattttgcctgttgatgaacatttggggtgtttccaattttggtgattacaaataaagttgctataaacatttataaataggtttttatgtgaacatgtttcatttcccttaaatacctaggagtgggattttcatgtcgtgtgtttcactttatcagaagcttccaaactgttttcctgagtggcattcccttcaaccatgtgagggttccag

SEQ ID NO: 460661 - DNA, 646 bp, Homo sapiens
cacaccaaactggaactttgctttttattgtgtttttctttttagacaggtttattgagatataggcataatttagtaaaatcactgtttttcacataaaattctatggactttgacaaacacacacagcagtataacatatagcctcatcactacaaaggactgagtactgtaagatccttgtccctttgtaatcaacctttctatccaatcagctcctggaaaccaatgatatggtttctgcttctgtagttttgcattttccagaatgtcttataaaatagaatcaaagagtgtgtctggccttttgagcctggcttctttcatttagcataaggcatttgaaattcatccatatcacatcatgtatcagtggcatgtcccttttcattgctgagtagtatttcattgtaygaatgtattgcagtttatcattttgcctgttgatgaacatttggggtgtttccaattttggtgattacaaataaagttgctataaacatttataaataggtttttatgtgaacatgtttcatttcccttaaatacctaggagtgggattttcatgtcgtgtgtttcactttatcagaagcttccaaactgttttcctgagtggcattcccttcaaccatgtgagggttccag

SEQ ID NO: 460662 - DNA, 568 bp, Homo sapiens
ttcaattgttccagcatcatttgtttcaaaaacattcctttctcactaaattgtccctgcatttttgtaaaaatcaactgactcttcatgcatgggtctacttctgaactctctactctgtttcattcatctctgtgtctgtcattttgccatcactgcactgtctggttattgtagctttataataagtcttaaaatcaggtaatgtgagtccttcccttttctgctttttcaagattgtttaggctaytctagttcctttgtcttgtacaatttagaatcagcttgtcaatttctttctaaaaattgcttctgagattttgcttgggatggagttgaaattatagatctctctatataagattatagattaatgagaattgacatctttatattaaatttgccaatccctgaatattgtataaatattcatttatttaggtctttgatttctttcatcaatatattgttgaatatacagattcaacaatattccagcatatatatcttgcacatgttgttagatttcatgttttgaaggctattatagattgtactttttgaaatt

SEQ ID NO: 460663 - DNA, 586 bp, Homo sapiens
gggcttaactcttgtcttttataaactgctgtctacttgatatctctgttaggatgtctagcctaggttttatctaaatctaaaatatacacagtagcagtcttgatttcttgacacaagcctgtttcttattttagtgatagctgtaccatttctttattactcaagccaaagtcctaatgaggtatctttgattcctcttttccctcattcaccagattcaatccatgagtgattccctttgagttacctccaagttatatccacctacttctctctatcctcactactattatgctaatccttcatgcttctgggaacctccaccctagtcagctcaacaggagtgataagtgcagagattagggtggagacattttggataaggctcttataggttacagtaagaagtttggtcttactctaaatttgatgggaaacgacttgaagattttaagtaggaagckacatgatgtatatttttgacgatctctgtaaatgctgtgtgggaaatgagggatccgttggagttgggaaggattgtagcaaaggagtgagtggactgcgtctgggtattatatagaca

SEQ ID NO: 460664 - DNA, 543 bp, Homo sapiens
gtatgttagaaataaactattgttattcccccaaagttaaaaaacttatatttcatatagtgtagaaattatgcatcatcaaaatatctacataaaatcttatgcatagagatacattgactattgcatgcctctcaaaaaatctaggttcttaaatcgaaagcctccttagaatatacatggcccagattatggctgtaataaccactggcaaggtgcaggaaattcaaaagtcaaaaatgcaattattcgtttcacctgcctgcattgaaacgamcatccaggctctcatgaggttgcctgctaggatctgtcatatcaataacagttgctctaaatcatgcccagtcacacactggtttgatttcccatctgtactccatttacctaccagaagcgttttgatttcaaggcttagtggaacctaattcagcaagaaattccctgagggtgaccttagttctctccacctgagtccctgcttagcacaaacactgggaaccttcagtatcttgaaggcagcttatagtcaagaaaagtcag

SEQ ID NO: 460665 - DNA, 532 bp, Homo sapiens
ataatttgagtgagaatgagccacacattatacattctaaacatcaatgtaaaaaaaaaacatagcctaatatgttggctttcaaactgttttgaactggwcccacagaaatagattttactttgcaaccctgtatacacttaccttgcattatatgtgcacatgtaaacaaatgtcaacaaaacctatacattacttgaaatcaagtctaatatttactatctttaaaattctacaaaaaagactgattgctattcactaaatttatttctcaattcactattggaccttgacttgcagtttggaaatcattgatctaataaatcttatggttccataaattatattaaatacatacatactttgactgtgtcagaacccaacaatgtctttggggaccttgaaggagaatcagaagaatgctgaaaaaaaaagaaaggaaggaaagaagaagagaaaaggaaagaaaaggacaagcctgtgaggcatcatactaaagtagaggaaaatgaagagaagcaaagcaaatgtt

SEQ ID NO: 460666 - DNA, 456 bp, Homo sapiens
taacaattcaaaaatcttgattcttaacggagatgcaactccagttctctcttaccagagcatcagcaccatgataaacgttctgaatttcagcctgcttttagtatttgacccttggggatttcccccacttttttttatgagctcagctttatactgggttgaacacacacaaaattgtcagtattcaactgaaaaatacttgccaagatggcaatttcatgtggcttgacttgttttttaatccatttttaaattgatcmtcgattataggtattttacaacaggaagtttttcaagcaatctagtttcaatatgctttcaaagtttgaaaatctatagctagaaaggttacacaaaaaatatatgccatgggttctgaagacagttacaaaagaggttaccaaaaatgcaataagcaattgtaggcacaagacagttattttcaagagaaat

SEQ ID NO: 460667 - DNA, 554 bp, Homo sapiens
tacaagatatgctgtttgttgattttttttttttttttttttttttttttgagacaaagtctcactccattgcccaggctgtagtgaagtggcagtgatgcaatcttggctcactgcaacctccacctcccgggttcaagcaattctcctgcctcagcctcccwagtagctgggattacaggcacgtaccaccatgcctggctaatttttgtatttttagtagagacggggtttcaccatgttggccaggctggtttggaactccagacctcaggtaatctgcctgccttggcctcccaaagtgctgggattacaggcgtgagccaccaagcctggcctgagatatgtctttattatagcattacaaccttttagtgttacaaaatctatacatttagacacattaaatgaagcatttatattgttcatgcttaaggagtattatatttttaagtgatcttacagtttttaatatactgaccttttgttcttttgaatctattattgtcttaacaagggatttaagtgaaaagtttgatgttctacaactaaat

SEQ ID NO: 460668 - DNA, 610 bp, Homo sapiens
ttttttattttcaagagaaagtaaggttaaaaaaaattaaagatcttaaggctcataaggaaaattgatatttggatgcctgagctacaataaattaaattccacttaggatgcccttatttgaacattagaacattttttttttttttttccctccgttggagtctttattgtaaatgcacacaggggcatcatagtcagggctagagtttgaagtctgggtgaaacaaatgtttctgcagagttcagagtcttggctgccaatatatttctaacatggtgctgttgaattaactatttcaaagtgactcaaggggaagctggtatttcccttgaatctgagttttaatagcattaacaaacaaggaagaattttataggagtcctaaaattatgggctctttctaacatttatttgagtcttttatcaagttcttctaatgaattttaggattattttggcttatttcatcaaggaagtttggtgtaagaacttgttacctaatgagtgcccctccttgtaagttcatatttcaagttacatggttcatgccrtaaataaaccacacttgctttaacatcgttcagaatggtacatttaacaattgga

SEQ ID NO: 460669 - DNA, 558 bp, Homo sapiens
ctatctctctgctctataaagcacctgatatattttgagtcttgaataaatgtcactctgcaatactttcttcaacagatatttggtctttcatgtatatgacaactgggaaaatacagattgagacaagtctctatcttccccaaactgagaaatatctcccacttaagaaactctgatttttctcaaggggaaaaatgaataagtaacatccaattgtgcatgaagtcatgccatagagtatacacatgagaacaatattcctccattaagtgctgccaaaaaaaaaaaaamaaaaaaaaaaaacgtccaggcagttcctgatttctatagccacctgtaattatggagatgcctgatatctgggccatgatcctaagttgtccacacctctgtctctttttttcatttgacttcctgcttcatttcttctttcttcttctcctattcctgcacttcctgcactttctccttctcttctactcccttgtgaggcagaaaataaatgcaactccaggactcaggggctacaaggctgtaaaaccaacatggtacttt

SEQ ID NO: 460670 - DNA, 638 bp, Homo sapiens
attcatgaatgtactgagaactgatttacactgggtatagacatttttgaagtgcctgaaagacaaatagctgttttgcaactctgaaacacacctctaccagatgttcactggagacattttgccagttaagatctagtctgtgtcaggaactatagtgtctatagagataaaaaaaagacataccccctgttttcagagggtkcacaatcctgttgaataaatcataagataaccacagtataagtcgagtcatgtcactcatctcctaaatgatgtccgtcagttctacatcaagtcatgtcaactctcctctgaaagctctctaatgcctcacctttttactgagagtaaagttcaaagccctggtagtgcctacaaagcaatgcctacaagggtgctgtatgacctgatctttcatatccctaaccagcctctctttttccaatcttatttcctagtactctcccttccaccccttcactgtttctactctagcttacacattatatgatactgcctcctctaggagtttgtatttgctcttcccttgtctggaactcccttattccttctttttcagtttttcaaatgtccgtttaaacatcaccttatcagacagatctttttaatgagcc

SEQ ID NO: 460671 - DNA, 638 bp, Homo sapiens
attcatgaatgtactgagaactgatttacactgggtatagacatttttgaagtgcctgaaagacaaatagctgttttgcaactctgaaacacacctctaccagatgttcactggagacattttgccagttaagatctagtctgtgtcaggaactatagtgtctatagagataaaaaaaagacataccccctgttttcagagggttcacaatcctgttgaataaatcataagataaccacagtataagtcgagtcatgtcactcatctcctaaatgatgtccgtcagttctacatcaagtcatgtcaactctcctctgaaagctctctaatgcctcacctttttactgagagtaaagttcaaagccctggtagtgcctacaaagcaatgcctacaagggtgctgtatgacctgatctttcatatccctaaccagcctctctttttccaatcttatttcctagtactctcccttccaccccttcactgtttctactctagcttacacattatatgatactgcctcctcyaggagtttgtatttgctcttcccttgtctggaactcccttattccttctttttcagtttttcaaatgtccgtttaaacatcaccttatcagacagatctttttaatgagcc

SEQ ID NO: 460672 - DNA, 626 bp, Homo sapiens
tagggtagggattattttttaaattatcttttttctttttcatgcttcatggtcaatatggccttrtaggttatagaattatgcaatagattcccatataggtcttaaacttgttacacagtgaaagttagaacctaagctctcgggtcctggcacctagggtctgatgcacacatgttctacaagaactttaggttctttttagtattctaaccttgatatggtcaggctttgtgtccccacccaaatcgtatcttgaattataatccacataatccccacatgttgagggcaggaactggtgggaagtgattggatcatgagggcagttcccccatgctgatctcatcatggagagtgagttctcacaaaagctgatggtttttataaggggttgtttgctcttgcctacacttctctctctcgccaccatgtgaagaaagtccttgcttctccttcattttctcccatgattataagtttcctgaggcttcccaagccatgcagaactgcgactcaattaaacctcttttctttataaattacccagtctcagacagttctttatagcagtatgaaaatgggctaatacaaacttggaagtcccacttcatttatggcatcca

SEQ ID NO: 460673 - DNA, 626 bp, Homo sapiens
tagggtagggattattttttaaattatcttttttctttttcatgcttcatggtcaatatggccttgtaggttatagaattatgcaatagattcccatataggtcttaaacttgttacacagtgaaagttagaacctaagctctcgggtcctggcacctagggtctgatgcacacatgttctacaagaactttaggttctttttagtattctaaccttgatatggtcaggctttgtgtccccacccaaatcgtatcttgaattataatccacataatccccacatgttgagggcaggaactggtgggaagtgattggatcatgagggcagttcccccatgctgatctcatsatggagagtgagttctcacaaaagctgatggtttttataaggggttgtttgctcttgcctacacttctctctctcgccaccatgtgaagaaagtccttgcttctccttcattttctcccatgattataagtttcctgaggcttcccaagccatgcagaactgcgactcaattaaacctcttttctttataaattacccagtctcagacagttctttatagcagtatgaaaatgggctaatacaaacttggaagtcccacttcatttatggcatcca

SEQ ID NO: 460674 - DNA, 586 bp, Homo sapiens
gggcttaactcttgtcttttataaactgctgtctacttgatatctctgttaggatgtctagcctaggttttatctaaatctaaaatatacacagtagcagtcttgatttcttgacacaagcctgtttcttattttagtgatagctgtaccatttctttattactcaagccaaagtcctaatgaggtatctttgattcctcttttccctcattcaccagattcaatccatgagtgattccctttgagttacctccaagttatatccacctacttctctctatcctcactactattatgytaatccttcatgcttctgggaacctccaccctagtcagctcaacaggagtgataagtgcagagattagggtggagacattttggataaggctcttataggttacagtaagaagtttggtcttactctaaatttgatgggaaacgacttgaagattttaagtaggaagctacatgatgtatatttttgacgatctctgtaaatgctgtgtgggaaatgagggatccgttggagttgggaaggattgtagcaaaggagtgagtggactgcgtctgggtattatatagaca

SEQ ID NO: 460675 - DNA, 520 bp, Homo sapiens
ctgcctcctcatctagcagaatgcaraaatatttctgaacaaatataaaatgaaataagtaatgatcagtctagtggaatttcttgcttaaattgttgccagttcttcctaaaactcatcaaatctctggcatcatcctaccttgaagcagatctggacctgatttggagtaattcacctctcgtcctaagatctatgactgcattattgcacatcacctctgaaacactccagcatagcaacgtttccaagcataacaacaagaagagtgtgtgagctggcgaaattgggatgacctttatttgaatatctgtatatatagtggaaaatattattaataaagtttgacacatttttcaatatactctgatattttggaaggaatatgcttccattgtaatgacatttttctgtctctcaagctcactaaaatgagatcttacctgtatgctatctaatatttaataattccatctcagatatttcctctgcacttaaaagtaatttataaaatgtagag

SEQ ID NO: 460676 - DNA, 586 bp, Homo sapiens
gggcttaactcttgtcttttataaactgctgtctacttgatatctctgttaggatgtctagcctaggttttatctaaatctaaaatatacacagtagcagtcttgatttcttgacacaagcctgtttcttattttagtgatagctgtaccatttctttattactcaagccaaagtcctaatgaggtatctttgattcctcttttccctcattcaccagattcaatccatgagtgattccctttgagttacctccaagttatatccacctacttctctctatcctcactactattatgctaatccttcatgcttctgggaacctccaccctagtcagctcaacaggagtgataagtgcagagattagggtggagacattttggataaggctcttataggttacagtaagaagtttggtcttaytctaaatttgatgggaaacgacttgaagattttaagtaggaagctacatgatgtatatttttgacgatctctgtaaatgctgtgtgggaaatgagggatccgttggagttgggaaggattgtagcaaaggagtgagtggactgcgtctgggtattatatagaca

SEQ ID NO: 460677 - DNA, 499 bp, Homo sapiens
attagtgttcttggacacacttcatgaaatgctcttttggtttgtgattctttttccttcttttaatctcatcttcctttaggattgcttccttaattgatcagtggaaattagtattgctggaatattcaagtacatataaaagtagctaagcaagatggaygaacctgatgatatgttttgttcatgttgacaaggcctaaaacacagcccaatcaatcaaagttccttgcacactgaacaccaattgctaattatgcttgcagtcaaatgtagtgaggaactccttgacaggaccacagacttaagactcaccccctacaaatattgagtatgatagtatttcacatagctcttcatccacagagatgcccaagatggctggcgtctatttagttatttcattaaagtattcaacagagaactacagaaagcaactgggaaaccatagccattgaattgatgtatgcgaggtcgtcattctggcattggctctgga

SEQ ID NO: 460678 - DNA, 524 bp, Homo sapiens
aaaggaatctatcctttctgcccaaatgttaataagctcaacaaaataatgcattatttctgcttcccagccctgttcatagcctttcctggggttgagctaaccaagtgattgtcaaggctgcgtgaaagtgatttgttctcttagaaactcacactcagtgataattcagagacactgccactttttgtgcctatttccatccttgtgagcttactcaccaaagcaaggatccttgcatttttatttattctccaatttccaggagagttctgtaatttgaaagactgcaaccattttggagaaagcaatttcaaatttgaactcattttctaagccaaaaatacrctggctttgcttaatggaaagcagtgccatcctcctaagagttcattagccctctgcacttttgtttcttcacatgaacagcaggacattgacttccagtaaatgtttgtgaagctcagtgatgcaaaacagcctgacttaagtctggactcacagaaaaagcacggccctcaacc

SEQ ID NO: 460679 - DNA, 572 bp, Homo sapiens
gagtgtgtgtgaaggtgagccatgacaaacattggaagtcctcatggggacatttggagtgggtgtgctgttgaggcatcccaaatggcttttaagtggactacctgatggaatctgagaagacggttagtaggttacatggccctttgttgagtttcctggttagttgctgtgaatcccttcctctcttccctgctcccaggctcccccagctactcagttatgctgattttttttcagtattctgggtggggcaagaaagagataggcctcttgagtgcatcctgcacagctgggaaggccrggagctcattcactatgctttttacttcccttcatgggagaaacttgtggaccacgtgggtctctcttgtcactgacctatgccaaattgggggaggagtaatgtgggtaaaatgaaactgttcttcttaccttcttcagtgcatcacttcttagatttttggtccaagaacatgctgaagcttctctggactctcagactcccacaaagttaatctttttcatgggtggctgtctaaattggtgcactgtagggagatgagggtaga

SEQ ID NO: 460680 - DNA, 572 bp, Homo sapiens
gagtgtgtgtgaaggtgagccatgacaaacattggaagtcctcatggggacatttggagtgggtgtgctgttgaggcatcccaaatggcttttaagtggactacctgatggaatctgagaagacggttagtaggttacatggccctttgttgagtttcctggttagttgctgtgaatcccttcctctcttccctgctcccaggctcccccagctactcagttatgctgattttttttcagtattctgggtggggcaagaaagagataggcctcttgagtgcatcctgcacagctgggaaggccgggagctcattcactatgctttttacttcccttcatgggagaaacttgtggaccacgtgggtctctcttgtcactgacctatgccaaattgggggaggagtaatgtgggtaaaatgaaactgttcttcttaccttcttcagtgcatcacttcttagatttttggtccaagarcatgctgaagcttctctggactctcagactcccacaaagttaatctttttcatgggtggctgtctaaattggtgcactgtagggagatgagggtaga

SEQ ID NO: 460681 - DNA, 564 bp, Homo sapiens
gtagaacaatgtttttatggagaaaaagagctaaagtcamatgctggtggagcataaaacgctcacttgaagaacaccttggtaatggctccagctaactgtaccatgacctaatcctgtggctggaacctctggggagtcttatccacctccccaaatccatttgacaagctcaggtccaataccacttctttcatgggctattctctgatcttctcagaatgtctatcttctattgaatttgccacaatattttgtttgtactactcttgagacatcccacacaaccttgaattataattgctcacatgggtgtctcagcatttattctagaccataagatacttaaaaggaggaattgtgatttctttgacagttttgtctcttagaatttaagggtgagggtgcttaataagtattagaaataacggataagtaaaatattcagtgctattaaaaatactattaaatctcaacacctccaggggttacatatctgaaaaaagatatcatacatatctatataaattctaaaataaattgaaatagtccatatcaaaaacc

SEQ ID NO: 460682 - DNA, 481 bp, Homo sapiens
gggacactcgtgtaacacaacygtaatattacatttcctgctctgacgttttaatgatcatctaacccagtcctaagacaaagccttagatgattgtattccagtcagggtgagcttaagggacagaggactcacccagggagaaaaagaatctttcacaattgatacattactttctaacttcattaggtaaacatttctttgattcaaaactgtattctgtaaagtaattgtcttatctcaggctgctataacaaattatcatagactggatggcttaaacaacaggcatttacttctcacagttctggagactgggaagtccaagatcaaggtgccaacagatctgtgttggatgaaggctcgctatgcttcctggtttgcacacagctggttgtatccccacatggtggagagcaaagagagagagagggaccttctggaaataactaggtcatgaggctggtgctcttatgaagag

SEQ ID NO: 460683 - DNA, 567 bp, Homo sapiens
tattttgtcatttcatcttgaatcatctggcatcagattcacactgaatcaaaattcaggtgatttataaaggcacattaagttctattagtattaatgggaaatatgcatgtgtatcaatacatgcattagtggagacagattccctgaagggtttttgctttggggcgaaagctactatttgtgccttttgcacaatggaagtagaattgtgcctaytaaataagtgttcaatatcgatgcccagcagaaaaaggccttatttttaaagatgcaaataaaacggtattttatatttgtaattaaaggtattatagcaaatggccacatcttattactgctatttagaatttgtcatttaggatttattcttattagtaaccgtattcagtcagtttctatatagttgaaagagtagttgtttggtcctttattcccatgtcaaagatgaagaaataggcaaagtttggcctatttgatttatatagaaaggcattccagaagtagaataacaaacagtgtcagaaaagacagtttctccaattcccaaaacaagaaaaagctaaa

SEQ ID NO: 460684 - DNA, 368 bp, Homo sapiens
ttcctgtgttctgatattatcttctttccatttttaaaaattaaagctggtattcccttgtgaatattttcaacacccactctgatttttttcctcactggcccattaaatccagaagtctgggattagttgcctgggactataaggacctatcaaaatgacatgtgtttytttttttgtttttgtttttcccctgaaggatggtcaagcttagtatttgatctagtacttaaatttgcaacatgttgctacaagtaatagaatgttgcattataaccgtctgtttaaaaactctaaagaaattactttaccaatgatttattttactaactgaaacaaagttatagacaaataagcagaagaaaatc

SEQ ID NO: 460685 - DNA, 421 bp, Homo sapiens
ggggtttctctccacccacttctgactagatcgttgtgcataaaggaaaaatgtgaagtgaacaaatagttattggggagtggattcaaaagtgcaatttccagagcagtcacagggtaagatcaggcagtttcaggctaatctccaggaccacaacactggaygatgacagctgatgcccagagaggggtgactatggttggagggtggaccctgatgtgccttcagattgccagagattaaagtctttgtgatactgctcagtgttctgcattgaacgtggacattttcatttcatgtgctgaatgtagtgaattcatttctagaatgttcagtttatcagcatatcacatcctcaacctttctgcatcaacaggcatttgccatataatgaacatatatgtgtatttgttaagacagg

SEQ ID NO: 460686 - DNA, 421 bp, Homo sapiens
ggggtttctctccacccacttctgactagatcgttgtgcataaaggaaaaatgtgaagtgaacaaatagttattggggagtggattcaaaagtgcaatttccagagcagtcacagggtaagatcaggcagtttcaggctaatctccaggaccacaacactggatgatgacagctgatgcccagagaggggtgactakggttggagggtggaccctgatgtgccttcagattgccagagattaaagtctttgtgatactgctcagtgttctgcattgaacgtggacattttcatttcatgtgctgaatgtagtgaattcatttctagaatgttcagtttatcagcatatcacatcctcaacctttctgcatcaacaggcatttgccatataatgaacatatatgtgtatttgttaagacagg

SEQ ID NO: 460687 - DNA, 599 bp, Homo sapiens
tgtcccacactacagccttgtcataagtcctacctatgaagagtcctgtctctgtgagaattcaagtcttttctcgctgaattatccagaagagactcctataaactttcagggaaactgaaactaraaagtgtaccagagactccatttgatttatgtttcctgggaaccttcaacctttattgacaatattgaacttccttatagggagatgcatgcttggtactttgttttacaaaactaaacaatatatgatttaaggtattcatgcatgctagataaaaattaaaagaaattcaaggggaatgatgagcacaaaagtcaggatagtagaaatgtaatcagggacacaaagaaatgctaaggagttaataattttctgtttttaaaatctcgatggtgaagataaaagcatattattatttttatttaaattatatttatgtggcatatatccttttatatatttcacaataaaaaattctattagttataaataaaaaggcatattttaaatatgtctaagtattatattattaagctagaatatgctttcataaatgattaaaacattaatgaaatattagattgctaacact

SEQ ID NO: 460688 - DNA, 546 bp, Homo sapiens
agttattgaataagtaaaatattcattaatttcattttcatatcaagcttgacaaatgcaatgggataaaaaaatcaaacatattttcaagcatcttcataaatgacagcacaatagcatgataaagtttgaaatatgtgaagatttcttctatgttayatatttgtcatgattgattaacttgaagatttgtgttacaaactattaatttcatttaaagcatattatttcattttatggtgccaatttcctgttgtgaattatttttgcttttgacataattacctggttattttggcattgtgtaagtgtaggtctttctttgccagccaagttccctttctttgccaggaaaggcatgggaccacttcaggggaagaaatgggaacagctgtcctatctagcgttagtgccaacttgagtctttttaggccagttcaggccagtgacactctaggaagctcatgcaccaaactggaaaagtttattggtcttcttattaacaatttttgaggaaaatgtattatgtatacaaaatcttcctgc

SEQ ID NO: 460689 - DNA, 580 bp, Homo sapiens
ttttctccacttttcttaaaaagcatttaccaattcattaatttttcctttcttttctggctccaaatggccatctctcagctatgtgctgatggaaaggcaaccttagatggtgaggtttatagagagaatgatctgtttcaatgtacattatacatgaagactgaagaatakggttgcttaaggactaaaccttatttgccctcaagcatttaggttatagaaatatttattgtagttaccaacaagaaactggactataaggtgcacagtgctttctaaagcataactatttgtggtcagagtgatttatttattttcatttcatatttacctttcagatgccttggtcatggggggcttattccttttataggtcatgcattttaattgtcatttacaccttggcattagcacatcgatttagactgttagtttttacatcatacttgaccttcaggacatagatgaattacttttgaagttacagaatgcctaaaaaagagatgtacatttttctgtataataactcaaagaaatagtttgattgaggaacatcattagcgagactaaaaaaaaa

SEQ ID NO: 460690 - DNA, 562 bp, Homo sapiens
taaataaatgtatattcacttctcaaaactataaactactgttcattttgtataaaagtcttgattaaagcaaaagaaaattgaaattgatatgttgctgcttaaatgtgtaaggtactattatactctgtaggtgccaaaactgtctcatccccaaagcatctaygtgatagatgctggcaagtagaaaccatggtgatatgggcatgaatgaacgtatatggttgtggcttagtcagtccatgtagactacaaatggaaggtaatgcagttatattttaaagtcatttctgcatgattgatttttgtctgataatttaattatgggcactatttattggaagagtttgcttcttattctagacatttgtccttacttggcattctattatgctgccatgacacattgcactacttaccagtaactgattatgacactttcaggctgattctcatcctggcaatgatgcagaaaggttttcagtactgtgtgctcagacagcactatacttggaaaggaagcttttgctgctgctgcgaaattggaccaagagtaccaagt

SEQ ID NO: 460691 - DNA, 578 bp, Homo sapiens
aagcactcagggtctttgctccttccccaatctaagggcagcaagggcagtaccactgcagtggcagaggagtttttggttgtctctgggagctcwtccttggagaaaagtggaaccactgccactgggaatgttcagccagggttagggtgactgcacagctggcccaagctggggcctctacttggggaagagcaggggctcaagtgctcccagggagaaaagactgggctcctctctgtatggtgactgtgttgtgctggaagtgcgagtaaagccctcagactctttggttcttccacagaccaaggtcagcagggccagaaccactgccatggcagtgccagagagagccctagggagctctaggagccactccccagggaaacacaaagccactaccagtggttgtacatagctggggttagggcggctgttctgtggtcctgagctggaggccctgcctggtgaagagtgggggcatgggggttctcagtgaagagagactgggctcctctctatttggtggctgcagtgtgctggaggtgccactgtaacaaccaggccctttgttcctt

SEQ ID NO: 460692 - DNA, 590 bp, Homo sapiens
tattgttctccacagtggctgtactgttttacgttcccascaacagtgctcaagggttctaatttctccacatcctaattattagtgatgctggtcatcttttcatatgcttattattatataccttctttggataaatatctattcaaattgtttgcctctttgtttttttttttttgttgttgagttttaggagttctctatatattttgcatattaatccattatcagatatacagtttgcaagtatcttctcttattctgtacatcacatctttactctgttgatactgtcttttgatgcaacacattttttaatcttcatgaagttcaattcatcttttttttctttgtgtctttggtgtcatagtcaagaaatcaggttaaatgcaatgttgtgaactttttgtcttgcattttcttttaagagttttacagtttcaggtcttacattcagttctttgatccacttgagttaatttttgtacatgatataaggtgggaacccaatttcattcttttacatgtgagtatacagttttcacagcaccacttactgaaaagactgtctttgctccattgaatgctct

SEQ ID NO: 460693 - DNA, 535 bp, Homo sapiens
agacttaaacatacctaaatagatttagtttctctctctctctctttttttcttttgagacagagtctcgctctgtctcccaggctggagtgcagtggcgccatctyggctcattgcaggctccgcctcccgggttcaagtgattctcctgcctcagcctctcgagtcgctggggctacaggcgcccgccaccacacccggctaatttttttgtatttttagtagagacggggtttcaccgtgttagtcaggatggtctcgatctcctgacctcgtgatccgcccgcctcggcctctcaaagtgctgggattacagacgagagccaccacaccctgcctactttctctctttttagggaagtcagaaaacattcctcagttttcacagaaatctggactctggatgtaggcaaaaacttcaatcttagggccactggggcaaccggaagtcagactggtcttggactccctgctattcttcactgcacaacgctagtgttgtcactgcattgtcagaatcaattaactcctaagt

SEQ ID NO: 460694 - DNA, 535 bp, Homo sapiens
agacttaaacatacctaaatagatttagtttctctctctctctctttttttcttttgagacagagtctcgctctgtctcccaggctggagtgcagtggcgccatcttggctcattgcaggctccgcctcccgggttcaagtgattctcctgcctcagcctctcgagtcgctggggctacaggcgcccgccaccacacccggctaatttttttgtatttttagtagagacggggtttcaccgtgttagtcaggatggtctcgatctcctgacctcgtgatccgcccgcctcggcctctcaaagtgctgggattacagacgagagccaccacaccctgcctastttctctctttttagggaagtcagaaaacattcctcagttttcacagaaatctggactctggatgtaggcaaaaacttcaatcttagggccactggggcaaccggaagtcagactggtcttggactccctgctattcttcactgcacaacgctagtgttgtcactgcattgtcagaatcaattaactcctaagt

SEQ ID NO: 460695 - DNA, 611 bp, Homo sapiens
atctgttcatgtagggaacctgagggatgtttaaataaactggaaatggctatgtgtttggagaggatatggtatataacacctgtgattagtgcatacggttagccacaggtgtacaaataaaatcatccaaaatgaaaaaaaaattccaaaatgactcatatagtgacttcagagaccatattctgtatttgaaattttatactctacttaaattgaacagctaaggaaaggtgtacaactatgattttatwccatgattttttttaggtgatactgtatgtttattatggaaacacaaaattggttttcttagcacactttactgtacatagtagatatgaaataaataagatgggaataaaagattcagcacataagtagctaaagtacctcaaaaccatgtgtattaacctaacaacccatcttcaacatttaaaaagcagaggttgatggaagttatgggagatatagacaagtgtacagacatagttggacattttaatatgcttttccaaatatctggtagaataagcagaaaaaaattaatgaggatattgataatttgacaaacattaatcaaatttacctgattgatctgtatagaagta

SEQ ID NO: 460696 - DNA, 467 bp, Homo sapiens
tgattaggacagtgaaggatgtaaaaataatatgacaactaattaacaggaaaaaaaagatagcacttataacaccacttgcattcttagaaagtagatgctgtttatgacaggccattttttgtttgattgttttctgctaagctgtttgatggattkgggagttgggttctgagagaagtgctgagataaagagatgaaagtggcaaaaaaaagtgaggtccatgatgtcagaaggctttgctctagttggggtaacctgtctttgacacaaaaatctttaataaaccagacagaatgcataaaatgcttggtatgagtagaccttgctttgctatatgcttatatccaatgaaagaaatgtattttatatccagagtaaaatgaagacttttaatgacaattcaggtgttggaaacaatgagaaccatgaaggtgtaagccactaagaattcttaaaggtcata

SEQ ID NO: 460697 - DNA, 631 bp, Homo sapiens
tcagtattttatttcaaggtgaagagaataatatatactttctaaaactgataaaaagatttaaaattattttatatgaarcacctaaattagtgctaagttagtgttggtttcatagcaaatccataataaatattagctattagtaatggtgattaaagttaatttaaatagtccttttgttatataacctagattttattagaaaataatgtaactaaaaacagtgctttctaaggagttcaaactactgatgtgatttcaataaatgaaagttgtaagaactcagataatatcttcatataaaggtgtctaccagaatcagaattttcccaaaattgggaaatcatatgcttcatcttggttaatattttgtggaggagcagtggttctcaccatgactgtaaattaaaatgatctggggatgttttaaaagtacacctactaaataagataatctgcagatggtatctatgtttgtttatggtaatttgcaaccaagattgagaaacctgctgagttaatttctgcactgggtgtaggtttggaccagctttgaattagtcatctcatgataggatgatctgattctgctattactggacacattggtgtaattggtatataccaa

SEQ ID NO: 460698 - DNA, 631 bp, Homo sapiens
tcagtattttatttcaaggtgaagagaataatatatactttctaaaactgataaaaagatttaaaattattttatatgaaacacctaaattagtgctaagttagtkttggtttcatagcaaatccataataaatattagctattagtaatggtgattaaagttaatttaaatagtccttttgttatataacctagattttattagaaaataatgtaactaaaaacagtgctttctaaggagttcaaactactgatgtgatttcaataaatgaaagttgtaagaactcagataatatcttcatataaaggtgtctaccagaatcagaattttcccaaaattgggaaatcatatgcttcatcttggttaatattttgtggaggagcagtggttctcaccatgactgtaaattaaaatgatctggggatgttttaaaagtacacctactaaataagataatctgcagatggtatctatgtttgtttatggtaatttgcaaccaagattgagaaacctgctgagttaatttctgcactgggtgtaggtttggaccagctttgaattagtcatctcatgataggatgatctgattctgctattactggacacattggtgtaattggtatataccaa

SEQ ID NO: 460699 - DNA, 631 bp, Homo sapiens
tcagtattttatttcaaggtgaagagaataatatatactttctaaaactgataaaaagatttaaaattattttatatgaaacacctaaattagtgctaagttagtgttggtttcatagcaaatccataataaatattagctattagtaatggtgattaaagttaatttaaatagtccttttgttatataacctagattttattagaaaataatgtaactaaaaacagtgctttctaaggagttcaaactactgatgtgatttcaataaatgaaagttgtaagaactcagataatatcttcatataaaggtgtctaccagaatcagaattttcccaaaattgggaaatcatatgcttcatcttggttaatattttgtggaggagcagtggttctcaccatgactgtaaattaaaatgatctggggatgttttaaaagtasacctactaaataagataatctgcagatggtatctatgtttgtttatggtaatttgcaaccaagattgagaaacctgctgagttaatttctgcactgggtgtaggtttggaccagctttgaattagtcatctcatgataggatgatctgattctgctattactggacacattggtgtaattggtatataccaa

SEQ ID NO: 460700 - DNA, 631 bp, Homo sapiens
tcagtattttatttcaaggtgaagagaataatatatactttctaaaactgataaaaagatttaaaattattttatatgaaacacctaaattagtgctaagttagtgttggtttcatagcaaatccataataaatattagctattagtaatggtgattaaagttaatttaaatagtccttttgttatataacctagattttattagaaaataatgtaactaaaaacagtgctttctaaggagttcaaactactgatgtgatttcaataaatgaaagttgtaagaactcagataatatcttcatataaaggtgtctaccagaatcagaattttcccaaaattgggaaatcatatgcttcatcttggttaatattttgtggaggagcagtggttctcaccatgactgtaaattaaaatgatctggggatgttttaaaagtacacstactaaataagataatctgcagatggtatctatgtttgtttatggtaatttgcaaccaagattgagaaacctgctgagttaatttctgcactgggtgtaggtttggaccagctttgaattagtcatctcatgataggatgatctgattctgctattactggacacattggtgtaattggtatataccaa

SEQ ID NO: 460701 - DNA, 587 bp, Homo sapiens
agttcctccaatttatttttaaattaagaaatttagaaccatggcattcagartatataccctgattattgaaatgtgctatatgaattgcctaagatctaatcagcacattgttgataaatatttcatacatattttaaatttccatatttttactgcatttcagtatcacaaattgtatttttcattcaatgactggcctatcaacctaatacatatttgtaaatcttaattcaaactcaatgagtatggatccatacaagcttaaactgcaatttcgcacaactgtagttttaaattacaaatcatgaatgcatttaatgtgctctgctgtctggaaagtggtttagagagctacatgtataaaaggtggcacaaaacactctagggcaaggagaaaatttgctatccttttgctattaatgattactcttaattccaccttcctgtatttcccatagttacctaattttcccttaagaatatactttttttcatcttttcatatttatgtttcaaatcatagaattttatgaacattctaaatgtgtgcagcttttagggagcttggcctcttacaaaggcag

SEQ ID NO: 460702 - DNA, 511 bp, Homo sapiens
aaaagttaggtgaacagaaaatcaaaggtattatttgtatgagtacatttgctctctgataatgagtagacaagaagtaagtgaagaagagacagtggcatagagtgtccattcttattgttttcattttaaatgacaaactgtgttggtacactgacaattttgaatgccatcatatcctttcaagaattgcgtggagaatgatttgtactatcattgacaatatggragtatgttgattcttgaggttttaattttgaaggagactctaacctccctcagcctttatttctcaatgcttctaaaatgctttgttaatgtctattataaaccccttagttattttagagttattaatgtacctcttcactaatctgtaaattccctgagggtgaagagataaccttacacaatttgatatcacagcatctagaacagtgcctaggctttggaagaatgtacaatatatgttaggttaattaataagcacattcatggaaagttgggaaga

SEQ ID NO: 460703 - DNA, 559 bp, Homo sapiens
tacatcactaccatagtacttatcacagagtattcaaattatgtgcttacttgccagcctttcttattttcacaaaaaaaaaaaaaaaaaaaaattaaaaaatgcggaaacacaggtgttatggtttaaatgcatctccccaaaaagcatgtgttggaaacttactcctcaatgcaacgatgttaagaggtagaaccgttaagagattattaggccataaggactctgccatcattaatagattaagrccaatattgcaagagtggttttattattgtgggagcagtttccttataaaagcactagtttagcggccttttctcttgccctctctttgcccttctgctacaggatgacatggaaagaagtccctcacaagattctggtctcttgatagtggacttcccagcttctagaattgtgagccaataaatgtctgtttactatacattacccagtctgtggtattctaacaggacaaaacaaactacaacagcagcataagatggttctatgaccatgtgacagtagtcagataataaatttctctaaaggacag

SEQ ID NO: 460704 - DNA, 349 bp, Homo sapiens
cacagaagaaaatctttcgggacatcatttttgtatgtttyttatgcactactcattgggttatttggtcctgactccacgcaaaggcagaggtttccttatagtcagcttcctttaactgagccagatgcccttgaacactgttccttataaccacaaagcctcacagaagggaaggcatttacaggtacataaaacagtaattaattcagcttttcccatgtccacaaataggttttactttaaaatccttcaattctggatgcctctgacccattcgtcatcatctaagtccaacctctgctcagacaggttcttctctctagggctcctgatcttagctggttct

SEQ ID NO: 460705 - DNA, 637 bp, Homo sapiens
cttagaaactcgacaaaaaaaatgggtatcttgttactgtttgtcagcataacctaccttctcttattatctgtcagtctgaaatacccctcaataataaaaatgtcaagacttgaaatttgcctctaagtttgtaagggagccaactcactattttcccattcatttaacatcaaaagagagaacctcattctgaccccatcacaccttcatctctggctcaaacagagacccattctggagcaggaaggacctgggccctggtgattgggacaaagagaaaaatgatagtaatttgttgccaaaatctgactttactcctggcttggttaggaaggcctcacctggaagtctctttttattcacrtattgagcctctattgaacatccactaacaggcctgtgatggatacaaaagtagaaggcatccatatagaatgagggcagttgttaacttctattttgaaaacaggagaggaaaaaagggtacctgcctataactggaagcccaagagaaattctgggtaatccatcacatcttcctctgtaaggcaaggtattttgtccatgtctatagggaagcccctgggcagtttacacactagttacaggcacattgtttagagcaagctgtgaa

SEQ ID NO: 460706 - DNA, 586 bp, Homo sapiens
ttagcatattagtttcctaagcctgccgtaaaaaatcagcataactaggtggtttaaaacaacagaaatttgccgggcatggtgactcatgcctataatsccagcactttgggaggccgaggtgggtggatcacttgaggtcaggaattctagaacagcctggccaacatggtgaaaccctgtctctactaaaagtacaaaaatcagccgggcgtggtggcgcatgcatgtaatcccagctacttgggagactgaggagagaggatcgcttgaacccaggaagcagaggttacagtgagctcagattacaccactgcactccagcctggctgacagagtaagactccatctcaaataaataataataattttaaaaacccagaaattcattgtctcacagttctagaggctagaattcagaaatcaggctgtcagcagggccatgcttcctctgaaggctctagtgaagagtctttccttgcctctgtcagcatctggtggttgctggcattcctacatttgtggacacatctctccaacttctgtctctgtcattatgtggctctccttgtgtgtctgtcagtgg

SEQ ID NO: 460707 - DNA, 572 bp, Homo sapiens
gtgtgtccttgaggagagtgaccttgaatgaagtgactcttcggaggaaggcaaatcccactgagggactcagctgagagctgccagctgccaacacacccagcagcagggaaacaaatgctgcaatcctggagggaaagagctgagcagagcatctacacagaggtgaagtccacctcctgggcaaacccatccataaagaatcctgcagacagatgagttggcggcacttcctaatcttatcctctttgyggcatatcaaaaataataatatgtgtacggtgcattggggtaaaaaattaggctgcttgtggtcagaagggacaggctcagggacttcagctgcctgccacatggcaaccagacagccctgaggactgaggggatcaaggtttcagcaaactcatttaaataacttgagcctatgcacactgcttgggaggtggtgaattaaggtcttaaggacaggttttagtgggtgcaaagattataggaatcttttgggaaaggcatgtggtcactagtgtataagaagtagacataattcctcctgtcacatttgtgtaaggttc

SEQ ID NO: 460708 - DNA, 576 bp, Homo sapiens
tttggtactttctttaaaatggctctttcatcttttagctcttgtaatgttttactggattccttagatttcttggattggttttcamctttctcctgaatctcatgatcttcattgccattctgtatggaattctatgtctgtcatttcagccatttcaacctggttaagaaccattcctggggagctagcatggttatttggaagtaagaagacactgtggcttttagagtcaccagagctctttatattctctgatgctcttaagggtttgactgtggtgtaagttggattcagttgattggctttatttctggacaatttcagggggccaagactcagctcaggactccagtgctgcatgcgctaactttgggaagttgggaccaggcccatggctttgttctctggccacttgaggttaagcacctgctctgcttgaggggctgaggtattcctggtccactgccaacaacagtccaatgggcaggggtggggggtgctggcaaaagcacttgattgggatggcaaggtctgctcatgtgcatgcactgctaaggcaactgggggaggtta

SEQ ID NO: 460709 - DNA, 419 bp, Homo sapiens
agtattggtgctaggccaagcttcctttctytctttctttcttttctttttttttttttttgagaaagaaaacagttttatttttaaaataaatattaaaccagagtgggatgtatatcacaagcaatccactaagagcttgcaaagacagaaaggaatctccttttataaagctaaataggtacaacccattacattcatattttcaaaataaaattgctaacattctagtatctttttgagtggaagtagattttgcaatttgaaatcaggtgagggctgacaaatttccacattcccccaagggacaatactgtgccctctgaggtccatacctagatgtgaaattggtgggttgaagcatgagctcactttcaactttgttagaaatagcagcgactctccaagtgaccctgcta

SEQ ID NO: 460710 - DNA, 584 bp, Homo sapiens
tgacaacatttagtgaggatttgctgtgttatatttagggttgtctcgatctatctctctttctttttcttttttccatattccaaattgagattggcagtgaaggcattttgtcttccactctcagagctctcaccagatgaatctcagatcattatctccagcccgacatttctcctgagctccggtccacacatttttacctgagtacttcattttcacatgctcaaaaaattgtcttccacmaatggctgctcttttctttgacttttttaaacctaaaaattggttttgagctctcttctttgctatatttcatatctaattaatttccatggtctgttagttctgctatgtgacacatctttactttctctctcttcatttccatccttactatcataatccaagtcctcattactatttccctagattattacaagaactatctaactagtctttcttgctgcagatttgattcttaaccccattctcccattctaatctacagattctgccaggtaatctctaaaaagagtctctttcattatgtcagtcttaagagcatgctgtggctcttagtt

SEQ ID NO: 460711 - DNA, 584 bp, Homo sapiens
tgacaacatttagtgaggatttgctgtgttatatttagggttgtctcgatctatctctctttctttttcttttttccatattccaaattgagattggcagtgaaggcattttgtcttccactctcagagctctcaccagatgaatctcagatcattatctccagcccgacatttctcctgagctccggtccacacatttttacctgagtacttcattttcacatgctcaaaaaattgtcttccacaaatggctgctcttttctttracttttttaaacctaaaaattggttttgagctctcttctttgctatatttcatatctaattaatttccatggtctgttagttctgctatgtgacacatctttactttctctctcttcatttccatccttactatcataatccaagtcctcattactatttccctagattattacaagaactatctaactagtctttcttgctgcagatttgattcttaaccccattctcccattctaatctacagattctgccaggtaatctctaaaaagagtctctttcattatgtcagtcttaagagcatgctgtggctcttagtt

SEQ ID NO: 460712 - DNA, 592 bp, Homo sapiens
ttcactaccaatcacaacattgttagctttgatcaggcctttgatgaggctttctggtgcttactgttctctgtcttctgccttcatgctccctggaattttactgtctccctcataggctagttgagatgtggaagaaataatctatgtagagcatttggcacatccccagctcctcccatgtttgctcggctcagatacctactaaagtgcctgctgcataacagacaatttgcagattaattggaaaaccagaawaatacccaggatgcctgacttctattctggtaccccttttacattaacttttttttttttaatcagttatgttacatatgcttactcatatattgtcttcatatcccatgtggcaaagcagatacatgtgttgtaacaccttattggttagagactgccttcctggttctactcattacattccaatcgtggcatatcctctaaactttcttttcccttcataaatcctctttcttttttttccccctcacagttttcctgaacaggttgactattaattgtgtctgcttgatgtggacaccaggtggcgctggacatcagatttggagaggca

SEQ ID NO: 460713 - DNA, 629 bp, Homo sapiens
aagagtttaaggttatctctcttcttccctgaacgttgctgttatcctgttcttttttcaaggtgcccagatttcatattgttcaaacacacatgctctacaaacaatttgtgcagttaacgcaatcatcacagggtcatgaggcgacatacatcctcctcagcttacgaaaatggtgggattaagagattaaagtaaagacaggcataggaaatcacaagcatattgactggggaagtgataagtgtccatgaaatcttcacaatttatgttcagagattacagtaaagacaggcgtaagaaattataaaagtattaatttggagatctaataaatgtccatgaaatcttcacmatttatgttcttccaccatggcttcagccggtccctccatttggggtccctgacttcccgcaacaagtttctgccgtttaccagttgtatgtgacaaggaagttacagcacctctcactgtttctcatttaaaaagcagggatagtcgtggaacttatactaaggtgtgacgatggttgattttatgtggtaacttgactgggccttgggtgcccagatatttggtcaaacattattctgggtgtttcttggaggatgtatttggataaaatta

SEQ ID NO: 460714 - DNA, 590 bp, Homo sapiens
agcagctactgataggatgaatgtatgtttaggaaatccaagagtacagtaataaaatgtcctgaaatgacattgaaagtcaaggaagtataaaatatatgagttggatggaaaaaaaatggagtgatctggtagtcactaccttaaagaaggatcaaactttgcttcactaatgctgggacagtatgatgtcatgtaacttctggtatgatgcaaaataatacttcaatataacctatgaagtaatcttgtaaaaaaatgctacactgaatttaatgaagttagattacaaaaaatataacagataacgccaggcatggtgtctcacgcctgtaatcccagcactttgggacgccgaggcgggcagatcacttcaggycaggagttcaagaccagcctggccaacattgtgaaaccccatctctactaaaaatacaaacatcagccagaagtggtgatgcatgcctgtagtcccagctacctgggaggctgaggacggagtgtggcaggccagttctcattaattcaggcttccattgcaactgtcccagcactgactgagtagctaagttaaacattaaaaggtgatt

SEQ ID NO: 460715 - DNA, 558 bp, Homo sapiens
ttcagcctgcacacatattaatttaatatatttatatgcaacacagagtcatttattaagattttaattggatctcaatttttccaatctaaagattttaaatgaattccagatatcataaaactctttgtcatccactacataaattatgcctccataggagactgtgactggaagatccattagaaaatgttatgggaaagtcattttttttaacattctgagccaggataggaaatgatcttctttttctagaaatcattgcactgttataattgtgacctaggaaatttttcatatcctaaagcaggcrtctagctgtccaggtccacacgtgtgtctgtagctatgtttaactgcatcttggctatgcccttttaggtagctgtttatgagaatacactgacatatggggttaagcttcatttctctccttttcgatagtaggacattccaaaatgtcatccagtttgcattcccaagacttgagcttactgctatttcaaacctttgcacagttcttctaatccagaattcgtcaacatccctgactatact

SEQ ID NO: 460716 - DNA, 559 bp, Homo sapiens
aaatgcacaacatccaaaacaagaagtaaacaaagctccggggagaagaaaataagacacggtaacaatggaactgacmgtcttctcagcaataataggtagataatagaataatgtattttaaatgttgagggaaaatagctatcaatctagaaatctttgagtatgcaactgttgttaataattaaggctaaataaacccatgttgtaaaaaagacagaaaccatccgatcagaattttgttatttaactttactgcaacatgctttatatacaataaagtacagccattttaagaacactgtttgatcgcactcttgtaactaccaccacaatcaagatacagaacatttctgtcaccacgaaaggtttcctttattccttccccagtcaatttccccaccccacccttggccccaagtaaccactgctctgctttctgtcactataaattagatttattttttcaagagtcttttaaaaaatgcttttagactgcatgtaatctttgtgtctggcttccttcactctgcttaatgttttttgagattcatccatg

SEQ ID NO: 460717 - DNA, 648 bp, Homo sapiens
gctactgctatttcaccaagattagcagggggttgcttccaggatgagaaaccattattggttctgcataacagagactgatgtctacaaggatagccagatgcactccgcaatcccagctaattacccacaggtgatggggaccaagctctgtgtcttgacacacacacacacacataaacacacacacacacaaacacatacacacaaatctagtttcacagataattacacattacacaggctagggatttggggttttatattcttggcagtgttagactcagaatgtatatattgttaaaaagcatttcctctacatgtataaagggaattttccacaatcaatttaccatccttatgttcataaatgtatgtgtacaggcgctcccccagagagcacagtaacctggmaccagggagtaaatatgatacaagttcacggaacttttctgacataaaaatcaccagacgaggaaactatttcaatgtaggtttaagaaggccccaggcaaactattctcaaatccaacatcaaacaacacaaggcaaaaccagaagactaatactcaatttcaaatcagctaagtgttctaagtaaaaacaagtactatcaactaaacagaaaccctgctgcaaggcaattag

SEQ ID NO: 460718 - DNA, 579 bp, Homo sapiens
ggagacaaaaatctatgtgggagctacaaattagatctccttgtttattttctaagagtccaataaagatttgaattgctgttaattacttttgcttgatggattggagttctttctgtgacactctgtgagaggagagagaaagaaatcaactaggcagatagggcaagggtcctaagtagwattcccttctaacaaaaaagcagcttctaacacagaaaggggcctcctgtgtgacatacagacatacagtgggccccagtaagcacagtcctctcccttcttggaaatactcagacaaggaggtttgcacagcagggagtgcctgcagcagcactgataagacgagctaccctggaccaggagcgtccactgtagagggtcccgcctcctggcctttttcacacatgcgcagtgggaagagataggcaacatggagtaactcagactaaggagcccgcatgagcactagaaaaagtggggtgggaactgtcagaaatttgagccttatgtaaatgaaacaccctccccaccagcttgtctataaaaacccttgcatttcattgtaaaatggcaacc

SEQ ID NO: 460719 - DNA, 579 bp, Homo sapiens
ggagacaaaaatctatgtgggagctacaaattagatctccttgtttattttctaagagtccaataaagatttgaattgctgttaattacttttgcttgatggattggagttctttctgtgacactctgtgagaggagagagaaagaaatcaactaggcagatagggcaagggtcctaagtagaattcccttctaacaaaaaagcagcttctaacacagaaaggggcctcctgtgtgacatacagacatacagtgggccccagtaagcacagtcctctcccttcttggaaatactcagacaaggaggtttgcacagcagggagtgcctgcagcagcacygataagacgagctaccctggaccaggagcgtccactgtagagggtcccgcctcctggcctttttcacacatgcgcagtgggaagagataggcaacatggagtaactcagactaaggagcccgcatgagcactagaaaaagtggggtgggaactgtcagaaatttgagccttatgtaaatgaaacaccctccccaccagcttgtctataaaaacccttgcatttcattgtaaaatggcaacc

SEQ ID NO: 460720 - DNA, 584 bp, Homo sapiens
cctttggagtgtccgcatccttgatttcctctgccgtgataacaagaacttccagtaatacccagacaatgaggctggtttcaactctttgccctggcttttattcaagttacatacacacattgtcatctgccacgctgggaaattgatatcacttagtaaaccacaaagctggtgttagaatggggtttgtgactcttgtggatgagcatccaatgacaagatacatttgctttttacatataaatatgtctccctggccgggcgcggaggctcacgcctgtaatcccagcactttgggaggccgaggctggtggattgcctgaggtcaggagttcatgtgtggccaacacggtgaggccccttctctactaaaaatacaaaaaaattagccgggtgtggtgacgygcgcctgtaatccagctactcgggaggctgaggcaggggaattgcttgagccagggaagtggaggttgcagtgagccgagattgtaccactgcactccagcctgagcgacagagcaagactccgtctcaaagaaaaaaaaaaaaaaagtctccccaagaaaaccatagaatgctta

SEQ ID NO: 460721 - DNA, 539 bp, Homo sapiens
ggctacttgatcattggcagagagttctacctggcctcacctttccaggtccttcttcatacctccctaggcaacagctatttatgaatctggacactcccttgaaaattagatcattcttatcacataccattttagactagctacctaactttggactagtatgtccctgaaaatatttttatctccctcatattgaggagagatcatgcgcctgaatggaacccagacattcaagttacctcttaccagtcccttgggtagccattctgtccccaaaaggaacatgaaaaatcttaaagccctaagcatgtttttagcatgcacttcatttaaatcacatctttctagactcagcaatagagggttttttttggcacacagttgttgggtgatacattcatccctgtaatactttacrctgttagatttgcctatcatgttgtggtccccatagttctgaagtattatccaacatatttgttacacttccccatctgtatcacttgctaatatgactttcatgacagcaatagatt

SEQ ID NO: 460722 - DNA, 566 bp, Homo sapiens
ctaataacctctgcagacttgaaaagtcctattcaaaaataagtgtctgtgacctttcagtcctagcatataattaaaagtgacaggtaaccagtgtttccccattggccagtgaaacatggctgggttggagatgttatytaagctgtggtagttatggaatgaagcaccagttctctctacttatctaaagttaaatttgtttattgaagttgaagctgtacttttttgaaacataaaggactaagctgggcatggtgactcacacctgaaatcccagcactttgggaggccaaggcgggaggatctcttgaacctaggaggtcgaggctgcagtgagccatgattgtaccactgtacttcaggcttggtattagagcgagaccttgtctcaaaaaaaaaaaaaaaaaaaaaaaaaaaacccataaaggaccgaatggcctctatcttactgaattttaattaaaatcaacatttattagttgtcttctatgtgctaagcaaactgtaagagacatacaaatgatttacactaaaatagtatactaagaggataatccatgtga

SEQ ID NO: 460723 - DNA, 566 bp, Homo sapiens
ctaataacctctgcagacttgaaaagtcctattcaaaaataagtgtctgtgacctttcagtcctagcatataattaaaagtgacaggtaaccagtgtttccccattggccagtgaaacatggctgggttggagatgttatctaagctgtggtagttatggaatgaagcaccagttctctctacttatctaaagttaaatttgtttattgaagttgaagctgtacttttttgaaacataaaggaytaagctgggcatggtgactcacacctgaaatcccagcactttgggaggccaaggcgggaggatctcttgaacctaggaggtcgaggctgcagtgagccatgattgtaccactgtacttcaggcttggtattagagcgagaccttgtctcaaaaaaaaaaaaaaaaaaaaaaaaaaaacccataaaggaccgaatggcctctatcttactgaattttaattaaaatcaacatttattagttgtcttctatgtgctaagcaaactgtaagagacatacaaatgatttacactaaaatagtatactaagaggataatccatgtga

SEQ ID NO: 460724 - DNA, 579 bp, Homo sapiens
acaatatatgtatattactctttattaaaacccataaaaactcaaatgacaccagtggcaaataagaagttgtaaataagtcatggccttcttaagcccatggatttgcagctagctcytgacaatgtgtctctaacctccttgctggattcagtcacacatcactgcacaataggcattctctgctctttaaaaccctgagatgccagtgccattctcatttgcatttttaaaaagagaaagaaaaagaggaagttttggagattaaaaaaacaggtacattgtacacaacactatgacaatccaatgggggtacatatgttctagctgtaagctggtaggcatttagacttttgctaccagccccactgggctcaaataacctttctcaatggtgtcagatgcatagcagagtaccaagtcccattcccacaaggggaataagcagaccactgacattatggccacctttcacccagcacagaaatttcaagctgccttacttttagcagcagctgggcttgtgttctataagactgagtaaaactcagcagaacttctttggaaacttgtgcctgg

SEQ ID NO: 460725 - DNA, 500 bp, Homo sapiens
  misc_feature (1)...(500): n = A,T,C or G
aagaagacattaattaatgtgctaaagttgacgacctactgaagtgaccattacaggtggtggtgttgattctttatcctcctgaccatgggaaccttcactgaccttggtgcatctggaggggtcaggaagtgactctagggggttwatgcatgttgtcactttgatgctgcaactgcagtcatttcttctatcacaggcatggtttaaaatggcaattcataannnnnnnnnnnnnnnnnnnnnnnnnnnnnnnnnnnnnnnnnnnnnnnnnnnnnnnnnnnnnnnnnnnnnnnnnnnnnnnnnnnnnnnnnnnnnnnnnnnntgggcacagaagcatctccttagagactgagatggcctggaagcatcccaaagggaatcatctgatgagtagagatttcctttagaaggcccccactccaggcacacttgggcattgcttgggtacacacagatgcttgcaacagaaatcaacgaatctaacaggatttccaagg

SEQ ID NO: 460726 - DNA, 591 bp, Homo sapiens
ggtgcaaattatccaaaattaaaaataaccagggttggcatggtggttcacacctgtaatctcagcactttgggaggccaaggcaggcagatcacctgaggtcggaagtttrgagacttgcctgaccaacatggagaaaccccatctctactaaaaatacaaaattagccgtgtgtggtgatgcatgcttgtgatcccagctactcgggaggctgaggcaggagaatcacttgaacctggggggcagaggttacggtcagcagagatcgcaccattgcactccagcctgggcaacagagcaaaactccatctcaaaagcaaacaaacaaacaacaacaacaacacacccgtaatacctggaaatactattaattatgcacttggactcctgggatgaagaaagctaacagagagttaattttcctaacggtattttcgctggtatcaaggaaaaaatcagtgtaagttcatttccctttataggagggtctaagattttccaacacgttcaagatttgctcttaaaaatggacctactagcacctcctaactacccacactttccttagcaaggcaccagtttgtgtgggg

SEQ ID NO: 460727 - DNA, 560 bp, Homo sapiens
caactgtttactgctgtgtttcacaaaaggtagataacatacactttaacacatactttcccaatttcacaaagatcataacatttccaaattccatcccaaaagatttgtaatgttttcctgtataatattttaatcaatgcttacaagtaaacttttagtatcacctgaaatttgtatagcatttttatccagatcccaaagtgtcctatttgcatttcaaaaaatcatttccaaatgtgaataatgatttttccagactgagttaaaaacaaatttccttcgtttctatgatgtcttctatgtctacctctgataggagagcagaggtaaaacactggcatttgcattcaggtagtttttaaacaagtcgtcctcaccaaaaagttaaaaattmttttaggctgtaagaataagttgttttgttgatatctgtattattaggaaaagacccatcttgaaacccaactgaatctctccaaaaatagaaggacacatatataaaaaaaattcttattaattgtatgagaaaggccaacgtgagttacagttttcttatt

SEQ ID NO: 460728 - DNA, 664 bp, Homo sapiens
ccttgcggtttggctttctatctgccatgggggttacaagcactggttctggagtcacaggcctagttcaaactctggctctttctgtgggatcttgggctccacctgtttagttttctcatctgcaaaatgggaatgataacaatttcaaaggattgttgtgaggattaaatgagggaatgcttgtaacatgtggcatgtggtaggtactcagtaaacgtaagtgyattctatactgtaaagtactatgcaaatgtaagaatgttttacttgactgtaatataagtattacattactatgatgtgcagtggaaatgttctgttatgcttcttacttttatccattattccttttgatccatcagaggccagcagaaatagtagacgaggaagaagatggagagaaggcaaacaaggatgcagaacagaaagaagacttttcaggaatgaatggtgaccttgaagaggaaggaggtagggaggctacagatgcccctgagcaagtcgaggagattctggatcacagtgagcagcaggcacgccctgctcgtgtaaatggaggcaccgatgaggagaatggtgaggagctgcagcaggttaataatgagcttcaactggtcctagacaaggaaagaaagtctcaaggagctggcagtggacaaga

SEQ ID NO: 460729 - DNA, 579 bp, Homo sapiens
atacacaaaaaaataagaaatcaaaccaaaaaaatactttgggagcagaaaggaggctggagtagctggagtgcagtagggagaaggaggaaaggacaggctggcgggcacaatgcagggcctcctacaccaaagaaagaaggctaagtttcagcctaagcataattagactccactgcagatttttataaacatcaccccagctgccacatggagaagagactgcagaaagcaagaatggaagcaaggagaccaaaaaggaggctggtgagttatccaagtcagagatggtggtagcttttcctgggggatgactgaggaaaaaaagaaaagtgggtgaagcctmgatacatgtttacagtagaagctggaacttgctgaaagaagtttgtggctagtaagcgaaggagacctggaacagtcaggtggacagtgatgctgtctactgggacagagaacatttgcacttgctgtggatccagagttcagtcttggacattacatctgagatgcctatgagacctccagatagaggtgccattcatgcaggcaggctggggctccatgaagtcagggcta

SEQ ID NO: 460730 - DNA, 579 bp, Homo sapiens
atacacaaaaaaataagaaatcaaaccaaaaaaatactttgggagcagaaaggaggctggagtagctggagtgcagtagggagaaggaggaaaggacaggctggcgggcacaatgcagggcctcctacaccaaagaaagaaggctaagtttcagcctaagcataattagactccactgcagatttttataaacatcaccccagctgccacatggagaagagactgcagaaagcaagaatggaagcaaggagaccaaaaaggaggctggtgagttatccaagtcagagatggtggtagcttttcctgggggatgactgaggaaaaaaagaaaagtgggtgaagcctagatacatgtttrcagtagaagctggaacttgctgaaagaagtttgtggctagtaagcgaaggagacctggaacagtcaggtggacagtgatgctgtctactgggacagagaacatttgcacttgctgtggatccagagttcagtcttggacattacatctgagatgcctatgagacctccagatagaggtgccattcatgcaggcaggctggggctccatgaagtcagggcta

SEQ ID NO: 460731 - DNA, 511 bp, Homo sapiens
tgatttaagttccttataattcaagatgttaggctttcatttggatgcatagtttgcagatattctattctgtagcttgtctgtttactctgttgatagtttctttggtgtgcagaagctctttagtttaattaggtcccacttgtcaagttttgtttatgtttcaattgcttttgaggatttagccataaattctttgccaaggccaatgtccagaatactgtttcctaggtcgtcttctaggattcttgcagtttgagattttacatttaaatctttaatcattttgggttaattcttgtatatggtaaaagccagctttcccagcaccatgtgtcraatagggagttctttccccattgcttatttttgctgattttgtcaaagatcagatggctataggtgtgcagctttatttttgggttctctatctgttccattggtctgtttttgtaccagtgccatgctgtttgggttactttagccttttagtatagtttgaagtcaggta

SEQ ID NO: 460732 - DNA, 577 bp, Homo sapiens
ttcgaagttagtacacagtgctgctttcaggattcttcattagcagatgtttaaaagtcactgctctaaaatgacttggaaatgcttataaatatgaatttcctgtaattcacattttatcagaactcctatcagctgtatcacagcttgaaaaataccaaaaatgcattagaaaaatctttctgtttaaaactagattgatcccacatttacatggcaaaagaaggccattacttggcaggcagtaaaagcttcmtttcagagagcttgagaaaaaactcaaaataattcacttcgacccaggccatttgacaaccgttagacttaactttacaaaataaaatgaaatcctaccacctgctgcttaaaatctccaattaatgctgtaaacagtgccttcatttaaaaaaccaatgagtaaatttctgcaagctgggtgcagacatttctacaaatttgctgtaaccttttgctcttgtctgcagtaagaagagccttccagattccaaaaagaagccagagctgatttatacctaattgtttaagagctaaactctttttgttcattagcttcagt

SEQ ID NO: 460733 - DNA, 637 bp, Homo sapiens
ctgtatttgtttcatgaaataaaaattttgtgaaatgacagttacccttccagggctgactgcataatttgtggggtccagagcaaaatgaagatgtaggacctcatgttcaaaaagtagggaagaatgctgctaaaagtagttacatatgtctttttccatttcttctcygcttcttgacctgtcatggatttgtttttttgttgttgttaatttgtttgctacttactgtcattctgagtaaataaaaattaaaaatgtccattattaatactaattttactatttttattgtgcaatgccaattttaagtgcaaaacttaagagcatgaaattaatgaaattacacaattggtatttcttattttgtacctgcatatgcatcttgttcttattagaagaatggaaatactgtacaaagctaactcaactgtttttattttacttcttgataggtatacattctaccaaccctctttaccttaggcttactgttgagtaaggactgaagaaaaggagcgatgggtagccttatatttcactttccttctcttttgtcattttcagtgtaagaggttggctgatataattaagaaagaacaggacagaattatccttggtcatctttatttcttag

SEQ ID NO: 460734 - DNA, 637 bp, Homo sapiens
ctgtatttgtttcatgaaataaaaattttgtgaaatgacagttacccttccagggctgactgcataatttgtggggtccagagcaaaatgaagatgtaggacctcatgttcaaaaagtagggaagaatgctgctaaaagtagttacatatgtctttttccatttcttctccgcttcttgacctgtcatggatttgtttttttgttgttgttaatttgtttgctacttactgtcattctgagtaaataaaaattaaaaatgtccattattaatactaattttactatttttattgtgcaatgccaattttaagtgcaaaacwtaagagcatgaaattaatgaaattacacaattggtatttcttattttgtacctgcatatgcatcttgttcttattagaagaatggaaatactgtacaaagctaactcaactgtttttattttacttcttgataggtatacattctaccaaccctctttaccttaggcttactgttgagtaaggactgaagaaaaggagcgatgggtagccttatatttcactttccttctcttttgtcattttcagtgtaagaggttggctgatataattaagaaagaacaggacagaattatccttggtcatctttatttcttag

SEQ ID NO: 460735 - DNA, 637 bp, Homo sapiens
ctgtatttgtttcatgaaataaaaattttgtgaaatgacagttacccttccagggctgactgcataatttgtggggtccagagcaaaatgaagatgtaggacctcatgttcaaaaagtagggaagaatgctgctaaaagtagttacatatgtctttttccatttcttctccgcttcttgacctgtcatggatttgtttttttgttgttgttaatttgtttgctacttactgtcattctgagtaaataaaaattaaaaatgtccattattaatactaattttactatttttattgtgcaatgccaattttaagtgcaaaacttaagagcatgaaattaatgaaattacacaattggtatttcttattttgtacctgcatatgcatcttgttcttattagaagaatggaaatactgtacaaagctaactcarctgtttttattttacttcttgataggtatacattctaccaaccctctttaccttaggcttactgttgagtaaggactgaagaaaaggagcgatgggtagccttatatttcactttccttctcttttgtcattttcagtgtaagaggttggctgatataattaagaaagaacaggacagaattatccttggtcatctttatttcttag

SEQ ID NO: 460736 - DNA, 514 bp, Homo sapiens
aaaggagaaatctctctgttaatcacttatttaacaacttgcaaatctgtgagatatttctttactttgacattcgatgatcctcaggaaggggagttgggagggaaaattgatctctgataatgctcgaacagccttggatgcatctgcagggcttgatttcttatttaacttgtgagtgctagcttatcaaaatgcaggtatgcaggagatactgagaaacagattggtaaaagctgggcaatatcaacaaattggtatgtgcttgaagaaaccaaagccaggtaaccaaaggtactttcttcttggactctcttggtcataacattgggattgcctagtttatttgttcgatacgaggtgsttatgaagtcaggttacagccattctctatggtctgctgacgtttacatcctaagcagctatattataaatatggaaaactaaaagtgtggagaaattcgttgaaagcccattagtttcattatagtaagaccaactctgcaacagccca

SEQ ID NO: 460737 - DNA, 513 bp, Homo sapiens
ccaaactcgttccccctatcaaaaatagggccacatacatacaaacacatacagatacctttccctttcttttttctttccactataattttgtaatacttttggttaatatctatacattatttctactatgtaaatgttattcttagttgaaycatttaggtgtactctagttacatttcctttcttgggtaaccctttttccctgttgcctaggttaataattacctattttttcacttgctttgttttatatgtacctgttactaagccatctccaaactctgcaagaacttactgtcctcttgatacattcacatacattcagtgatactgaaatcttcattttatttttttctcaatccctccagtcagctgcctcaagctggtaagttgttctctagatctgcttttcagagttatcctggtatttttcttcaccattattttgagaatttcctttgcttccttggtggatggttctcttctttttttggattctatgtcttcctc

SEQ ID NO: 460738 - DNA, 597 bp, Homo sapiens
cttcaatttttgtggaactcacctctagttgccttcagagaaaagcttcatgggagacacatttttctgagactttgcatgtctgaaaatatcttttttttttctctaatcaaacttgactgtaagtatggtgaagtatacaattctaggtttgatataatttctctcagaattgtgaggggattcttcaattttcctttccattcagaatggtagttgagaagtttggcattctgtttctttaaatgtaaccctttttcctttctctgaaggcttttagactattttctttgttcctggtgttctggaaatttccaattatgtgtcttggtatgggcctttttgcttattggactgggtactcaatgggctttttaattcttaaaatatgtgctttcagttttggaaaaaaattgttkctttgataattttcttctcttcctttccctactgtttccagaagtccaggtatttgaatataggacctccccaagtgattatctaattgtctctcctacttttcatctctgtggatttttaactttctcactgaaaaaaaataaaagcctcaacttttatcttcctttgattatttcc

SEQ ID NO: 460739 - DNA, 605 bp, Homo sapiens
tcttctaccccaaaacctgtaacaaatccacacactttcccaaatttgaaacttcataaatgttacatggaaaaaatggacatctaaggtagtctttttcatttttattgatctccagtttctaggtctaggttattttagggagagagaactaatgggtggcaatgaggaggagggttgggtggtgagacaggatatcttcactaaaaaattctaatttgtgctgttatttatgatagtatatgccttaaacattaaaataatatccctcaggaattctgatgtaaatataagaaatatcacatttactgctaaagtgggctggacatgagctgtggtctctctttagatggctttccccgtttttaatttttgttgcygctgttactgtcagaggtgtgatatgagtttaaagtgtaagtcatttgggcagccccatctgcctgtggaaataccttccaagtaattgatgctttcagtattttgtggcttatttccatataattttcatattccatcttctttccccttaccactcaggaatcctgagttaaccttagtaactgcatgcatattctctagaaaacctgaatacttaacgattt

SEQ ID NO: 460740 - DNA, 572 bp, Homo sapiens
ttttttttttttttttatctgactgttgattacattaggtctatttcatctgtggacattcataaaaatacttatgatttaagcactcttttgtatgtacattatatatcaacaaaaagctcatttttatgttattttcttaaaatttttaatttttctaattttattctttacagaggtagtcaagttaaaaagcttattttttaaatgtgcccctgttgcrtgtgtgtgtgtccgtgtaaacagctggatgctcagatgagaagactctccaaatgctgggtatttctgctagttggagccaaacagaatacagcacatgaaaaaaataaacatgtaaaagaaacattcatcagaaagctaacaattgtccctttataaaaacgtgtttgggaggccactatttaaagttatgccccatcatataatgtgagaaattagaaatgtaaataacctttagtccaaagtggcttttaaatcctctaataatggaaaatccgatatcatgtagacagcactacaccaagaataattttacattataaattgaggaaaattcatcaactcagttt

SEQ ID NO: 460741 - DNA, 572 bp, Homo sapiens
ttttttttttttttttatctgactgttgattacattaggtctatttcatctgtggacattcataaaaatacttatgatttaagcactcttttgtatgtacattatatatcaacaaaaagctcatttttatgttattttcttaaaatttttaatttttctaattttattctttacagaggtagtcaagttaaaaagcttattttttaaatgtgcccctgttgcgtgtgtgtgtgtccgtgtaaacagctggatgctcagatgagaagamtctccaaatgctgggtatttctgctagttggagccaaacagaatacagcacatgaaaaaaataaacatgtaaaagaaacattcatcagaaagctaacaattgtccctttataaaaacgtgtttgggaggccactatttaaagttatgccccatcatataatgtgagaaattagaaatgtaaataacctttagtccaaagtggcttttaaatcctctaataatggaaaatccgatatcatgtagacagcactacaccaagaataattttacattataaattgaggaaaattcatcaactcagttt

SEQ ID NO: 460742 - DNA, 570 bp, Homo sapiens
ttataaaaatgctaaataaccatcatcatgcttctaaattataacctcagggtgaatgcaggaataaagtctaaagagaatttgattattctcccaactaatttctaaaaattaaacaggcagcttgcctcacagttgaacagctgccttatatccatctagctactaaagaagctttatttctctgtcccttctgtctgaggcttgctcagaaaataaaaatttctaagatgtgaactcatccatctaaaagttatagagtgctgtactaattaggtctggaactctgttttarctagcaaaccttaccaaattgaaaatataataaatctcaaccatgctgggataaaaagtgccagagaaaatatggagaccatttgtcaatgatggtgctcaatggttcaagtttttgtcctgggaggctactcttcttgactcccagaacaatgacagcccacactgcttattccaatattggattgaattattgagaactctggtaccaatgtggggtaaatgacagaattcttttatttaagagaaacagtcattgttcccttttgctcctaa

SEQ ID NO: 460743 - DNA, 576 bp, Homo sapiens
gaactcatccatctaaaagttatagagtgctgtactaattaggtctggaactctgttttaactagcaaaccttaccaaattgaaaatataataaatctcaaccatgctgggataaaaagtgccagagaaaatatggagaccatttgtcaatgatggtgctcaatggttcaagtttttgtcctgggaggctactcttcttgactcccagaacaatgacagcccacactgcttattccaatattggattgaattattgagaactctggtaccaatgtggggtaaatgacagaattcttttatttaagagaaacagtcattgttcccttttgctcctaatacattctttgtctagtctgacatggraactgtctatgcttttaattgaatcttttaaacaattctgcagttacagaagaatagtaattcattttaagattgcaaaattttcacctcatacaaaaagagcaattttagaattctcagctaacatcttctccatatccttcattaagtacattttaaatccattttcttgctttttttttttttttggtgttcaactactctgcagaatgt

SEQ ID NO: 460744 - DNA, 555 bp, Homo sapiens
aatatataaggagctaaaacaactcaatagggaaaaaatctaatactctaatttaaaaatgggcaaaacacctgaatagacatctctcaaaagatgacacagaaatagcaaaaaagtatataaaaagatgctcaacattattgatcattagagaaaagcaaatgaacactacaattgagacatcatctcaacccagttattttattcggaagacagacaataagggatgctggcaaagatgyagagaaaagggaatacttgtatactgttgatgggaatgtaaattagcatagcagaacagtatggaggttcctcaaaaaactaaaaatagaactaccatatgatccagtaatcccactgctagggatatacccaaaagaaaggaaatcagtatatcaaagagatatctgcactccatgtttattgcagcactattcacagtagacatgatttgggagaaagctacgtgctcatcaacagatgaatgaataaagaaaacgtggtatagacacacccagagtattatcaacccataaaaaaagaatgagatactgt

SEQ ID NO: 460745 - DNA, 532 bp, Homo sapiens
cccttattattagctaatgaactctcaaaaacattcccagtaaatacatgtcattaactactggtaagcagggcaggggcagggaggtgtattgtcctggttctgcaactgtctatctttatacattaactccaaatgtatcttcctggaggcaaaagggtctaggagaggaaggaggataaaaataatagctaacaatcattgggttcttaatatgtaccaggtattctataaaattgtattcactcaatcctcatgctagccctagttactagctcactagcctcatgctagtgagatagacactactrttaccacgtcactgtagagatcagcaagtggggtttagaggataaatcttgtgtaagatcctgtagccagtcaggggcagagcagctgcctccaaaaccactgtaaatccactgccttaacaatcctctcactcctgcacctttctgcagaaccagccagtgtctattggatgagaaatggtgacttcccctacagtgatcaattaatctacaaatacctt

SEQ ID NO: 460746 - DNA, 655 bp, Homo sapiens
ctttcttattctgaacatgaattttctggtaacacagccaacaggacatttgtttttagcatctacctaacactaatgcttacattaatcttaattaaatcacagatccatatctcattaactattaacctggttcttatgcaacctgagcttgtgaagtgcatattttgaaactcaattgcacagttttacaaatacatttttttggatttcatgttgccaggattgttcttaagtcttctacatttagtcttagcatctcttctttccggtgcatccttacggactgctgccagacttgatatttccattctgtttatgtaagtcctctgcccaaaaaacaaggtaagtcaaacattttggcctggcattcaaartcctgtgtaataaggcactttagtagctccaaagtgcttatggagaaagcatggcagtgtggacagagcatctgtcaaataggcagcaggtctagtttctagtccgactctgatacttgttgtttgctaacttagaaagtcactcagactcaatttccttaactgtattaaaatgagaacaaaagcaacccatctacctacttcaaagttttgtgcatgttaggaaagataatgcatgtggaaatgaaggcctataaaactgcaagttgctgataata

SEQ ID NO: 460747 - DNA, 670 bp, Homo sapiens
atgaaaatcatgttaaaagtctgctggtactgaagcaatgcccagtgcatgcttggaacacatccctgggagctctccttcactctgcttgcttgcttaccttggactgattttcctggattgaaccttttccaaattatccctgcttctgatgtcttaccagttccatgccatgaggtagccagatgcagaatttagttcagctcaggtcttggggtatttataaccctatgctttttacaactaatccatagttttgaatctgtgcctgatagacatataatgaattctaggggtctttgacttaatagtagtgccccaaattgatatttattgaatgcttattctgtgtcaggcactgggttaaggtcttacatatattgtctcttttcaggtcagagtgctgaaagtattccctcctcaacaggtgagaaagcgaggcttataaaggttaattgacttgcttaaggagtgatagggcttgattctaagcctgtcttgtgccaaaacccatagccttgggcaggacctcatcgtttctgtcttttcccacctgacagctaatcatgaactggcacttatacctatgctaytgaaaatcatttattgtttacattcaatttatatgtacctgtatatttgaattgtacataggtggtgtaaaccaaaa

SEQ ID NO: 460748 - DNA, 617 bp, Homo sapiens
gtggtggataggtttttgatgtgctgctggattcgggtggctgttttgcttttttaaaaaaaattattcacagaaactttaggaagcatcgtgagatactgcctcaaggagtgctagccagatggtcatttaaaactgcattcttggctgcagtatttaaataagtacatttataaagccaattaaaataatttttctatttaaaattgaaaagaagttatcaatactaatttgccttgatgcctatttaaatgcctaactccactttgacttaattactgatttttctattggaagttaatacataatttttaaagcaatactttctcytcaaatctaaaataatgctgcctagcttctatagaaaagtatgttgagtgacctgcctatacccaaacttctttatcaaagcattcctgatatcagcacttactgtacgtgccacagaatttcctcttaacaagtaatatggacttgtattgacaactaactttataaatatctgtgttttgtatgcactgtgcttataatatatctaaaatgtgttttgtattttatcaaaactttgtttacttccatttttgttttattgtaattcaaaccacaaatctattttt

SEQ ID NO: 460749 - DNA, 617 bp, Homo sapiens
gtggtggataggtttttgatgtgctgctggattcgggtggctgttttgcttttttaaaaaaaattattcacagaaactttaggaagcatcgtgagatactgcctcaaggagtgctagccagatggtcatttaaaactgcattcttggctgcagtatttaaataagtacatttataaagccaattaaaataatttttctatttaaaattgaaaagaagttatcaatactaatttgccttgatgcctatttaaatgcctaactccactttgacttaattactgatttttctattggaagttaatacataatttttaaagcaatactttctcctcaaatctaaaataatgctgcctagcttctatagaaaagtatgttgagtgacctgcctatacccaaacttctttatcaaagcattcctgatatcagcacttactgtacrtgccacagaatttcctcttaacaagtaatatggacttgtattgacaactaactttataaatatctgtgttttgtatgcactgtgcttataatatatctaaaatgtgttttgtattttatcaaaactttgtttacttccatttttgttttattgtaattcaaaccacaaatctattttt

SEQ ID NO: 460750 - DNA, 574 bp, Homo sapiens
atcacttggcatattaagaacaaagaaaatatcaagttgaatgaaacaagacaatcagtagatgccaacactgacatgataaagatattagaattatatgacaaagatttcaaagaagccattataaaaatactttaataaacaaatacaaacatacttaaaacaaatgaaaaaatagaaaatgtaagcaaagaaataggaagtctcaacaaagaygtagaagagataagcaaccaaatgggaaaatgggaactgaaaaatacaataacttacataaaaatacttgatgaatggacctaacatcagaatagatgaaacagaggaagcagttagtaacattgaagataaggtagaaattacccaatctgaaaaaaagagaaaatagactgaaaaaatatacaaagcctcagagacctctgagactacagcaaaaaaaatcctaacaattttgtcactagacttctgaaaggaaaggaaaaagagagtgggtctggaaaagaaccaaaaaaattaatggctgaaaacttccaaagttggcaagagagctaaacctacatattcaaggaggcaagta

SEQ ID NO: 460751 - DNA, 475 bp, Homo sapiens
atgcaccataataaagtattcacagagattattatttttttcttctcatctacctctttttttccctaaaggagagctgattttaattggaattctaatacaattccattacagtcaaggtctgtaaaggaaatagaggaccttgcatgtgagggcgatctggctgcaacaatctttcatgccattgattgtcagggttgatttggctgctctggctacctaggtgagtctccccttccttcctcgttgctccatgtgcatcccttctgaagctgcatgcttggtcaaaggggaggaccatttccaagagaggactggtctttggtcaaggatatacaagtaactgcactcccctgctagaacctccaaataayctctcaaggaaatacaggacccacaagataagcctccttcccattttttgtcaattgacagcagctaattttctaagccttttccttaatcctttgtttag

SEQ ID NO: 460752 - DNA, 487 bp, Homo sapiens
taataacaaaaaagttaataataatgtagcaaagcgaattaaaatgtaaatattattgggaaggtgtaacaccttagtttccaaaagatgttatgaaattaattacaattaatgattaaagctgggcacagtttttacacttgatcttagctgaaaggctgagaagtgatgggcacagttttygtatgtttttctagtttctaatagctaccatcatctgtattgtctttcatctccactgagaatgtgaaccacctaagcacaggaattttgtctatcacctcccctccatcatgccatatatatcattgagaaagtgctcaataactgcttgtggaaaaaaattacataatttaataaaagaaaagaagaccgattttgatcttctcagactcacttattgcaaatcttaaatttgtgattgatatagttatttcaaagggtatcatgaatcattttaagcttaatgtccttaaattaaaagaaa

SEQ ID NO: 460753 - DNA, 528 bp, Homo sapiens
aatcgcttgaacccgggaggcggaggttgcagtgagcccagatggcaccactgcactgcagcctgggtgacagagtgagactccatctaaaaaaaaaaaaaaaattatagatttaattgtaattgtattcatttacacttccaaaaagacaatttgattcaatagattaactactaaatcacaccagaattataacaacatgttatattatgacactttctactggagatccccattaatcattagttcagagcctccttaccctaaactggactattaagaaaagacaacattgaaccataagccatttagatacaacttataccacaataagaaacctaggtggtttgcttgggacttaccttaccctctccttaggtgttttttttttttcctcttccacttttttgatcagacctttctgatcatttcactgtttctagtcagtcttctgtgattctcttctctaatgtccttgttttctcttctctttcctaarcaagttgtttgcttaaggtaacaagtcac

SEQ ID NO: 460754 - DNA, 579 bp, Homo sapiens
cttttttttctcaccctacattataattttcatcagccacctccaaccaatcagtaaaatctaatatatctgtgcagtcttctgtgtaattaatacgataaacaaaggggcagagcagtaaakagaaatgagaattgtcccacattttcccatttttggtactcatgagaacagagatgctacctctcaggggtttcggactagcaaggaggaaaaattttgcccgttagtggagctagagatgatgaaaagaacttgatttagagaaaaattgctagatagacaacttgagattggatatataatacccttctattttaccctaaaatgccagcctaaagacttttaaggagaagcaaaacttgacacctttgttttaacagatgtattgaataaattataatgtaatatccattccagctcttatcaaggtactggtcatcacaattaagtagtttggatgagggcactgactttgggctaagagaatcttctctttttgcctcagctgttctgtttctgttaagacactgtctgggctgagatatttaaatctggtttcaaggctgagtctgctgg

SEQ ID NO: 460755 - DNA, 582 bp, Homo sapiens
tgaagttctagttagaccatttaggaaagaaaaaggaatagaagatattcaaattggaaggaaagaaataaaattatccctgttcacagacaatatgaacttatatgtagaaaaccctaaagattttatacacacagacaaaaatgctataatagaattaataaattcagcaaagctgcaagacacaaaaccaacatgcaaaaatcatttgtgtttctgtacactaacattgatcaatctgacagggaaattwaaaaaaaagaactccatttaaaatagcatcaaaaagaaaaacaacacttagaggaatagacttaaccaaagatgtgaaaggcttgtacattgaaaactacaaaatgttgctgaaaggaataaaagaaaacacaaaaaatgaaaagacatcctgtattcatggatggaaaggcttaatatcgttaagatgtcaatgctacccaaagtgatctacagattcaattccattcctatcaaaatcccaacccaattttttgcatacatagaatagtccattctaaaatttacatgtaatctttattagccaaatagctacaataatatggaaaa

SEQ ID NO: 460756 - DNA, 582 bp, Homo sapiens
tgaagttctagttagaccatttaggaaagaaaaaggaatagaagatattcaaattggaaggaaagaaataaaattatccctgttcacagacaatatgaacttatatgtagaaaaccctaaagattttatacacacagacaaaaatgctataatagaattaataaattcagcaaagctgcaagacacaaaaccaacatgcaaaaatcatttgtgtttctgtacactaacattgatcaatctgacagggaaatttaaaaaaaagaactccatttaaaatagcatcaaaaagaaaaacaayacttagaggaatagacttaaccaaagatgtgaaaggcttgtacattgaaaactacaaaatgttgctgaaaggaataaaagaaaacacaaaaaatgaaaagacatcctgtattcatggatggaaaggcttaatatcgttaagatgtcaatgctacccaaagtgatctacagattcaattccattcctatcaaaatcccaacccaattttttgcatacatagaatagtccattctaaaatttacatgtaatctttattagccaaatagctacaataatatggaaaa

SEQ ID NO: 460757 - DNA, 582 bp, Homo sapiens
tgaagttctagttagaccatttaggaaagaaaaaggaatagaagatattcaaattggaaggaaagaaataaaattatccctgttcacagacaatatgaacttatatgtagaaaaccctaaagattttatacacacagacaaaaatgctataatagaattaataaattcagcaaagctgcaagacacaaaaccaacatgcaaaaatcatttgtgtttctgtacactaacattgatcaatctgacagggaaatttaaaaaaaagaactccatttaaaatagcatcaaaaagaaaaacaacacttagaggaatagacttaaccaaagatgtgaaaggcttgtacaytgaaaactacaaaatgttgctgaaaggaataaaagaaaacacaaaaaatgaaaagacatcctgtattcatggatggaaaggcttaatatcgttaagatgtcaatgctacccaaagtgatctacagattcaattccattcctatcaaaatcccaacccaattttttgcatacatagaatagtccattctaaaatttacatgtaatctttattagccaaatagctacaataatatggaaaa

SEQ ID NO: 460758 - DNA, 543 bp, Homo sapiens
tacctcttctatggaaattcactacagccatcagttgcaccactgcaattgcacacttcctactggatgcaacacatagtgagtactaatacgtgccaagccatgtatgttggttggcattgtggaaaacatgcagtctggtaagacatgattctaacatataartgttaatcaccctctagaagtaataacccgtgtaatggcaggtatactaacactttacatgtttttctcatttaattctcaaaacaatattttatgcccactttacaataaaaagggtaaacctgacttcattgtgttctacctgtgagtgatattatgcagatatccaatggctttcagttacatcctttgaacacgatttttaacattttaaagtgtttataatcttctctttaatccatgtgctctgaaatttcatggtaaagctcatgtgtatttttcccttcttttcagggggtgacattcattctcttgaatactcaggtaattttctcaggctggaaactcatgtctttggttctagaaataaaagttaat

SEQ ID NO: 460759 - DNA, 543 bp, Homo sapiens
tacctcttctatggaaattcactacagccatcagttgcaccactgcaattgcacacttcctactggatgcaacacatagtgagtactaatacgtgccaagccatgtatgttggttggcattgtggaaaacatgcagtctggtaagacatgattctaacatataagtgttaatcaccctctagaagtaataacccgtgtaatggcaggtatactaacactttacatgtttttctcatttaattctcaaaacaatattttatgcccactttacaataaaaagggtaaacctgacttcattgtgttctacctgtgagtgatattatgcagatatccaatggctttcagttacatcctttgaacacratttttaacattttaaagtgtttataatcttctctttaatccatgtgctctgaaatttcatggtaaagctcatgtgtatttttcccttcttttcagggggtgacattcattctcttgaatactcaggtaattttctcaggctggaaactcatgtctttggttctagaaataaaagttaat

SEQ ID NO: 460760 - DNA, 430 bp, Homo sapiens
ctagcgtctttcaatccagaacatttccttggcctttgtctttcacaacatggacattattgaagaatatagtattttatggagagttactcaattggggtttgactgttatttcctcctgagtaaattaagcatccttagtttgaataccccatagattatgttttgtccttctcagaacaatgtatctggaggcacaggatgtccacctgccactaattagtgttaattttgattaccaagtcaatttgttgtccagtttcagcacagtatagctgcaacgtgagcattctgtgaggagacaactgagactrggcaaatatcctactctttattaaactttcctccctagttttaacactcactgaaaattcttatttgaatcagtttttaatataatgtctgcaaaatagttacttctttcaaattt

SEQ ID NO: 460761 - DNA, 551 bp, Homo sapiens
atggtgtaactcagtttgagtctgaaagcytgagaaaggagagcctttggtgtaactcctgtagtcaaaagacccaagaaccatgagccccagtgtctgaaagcaggaaaagatggatgtcccagctcaagaagagaaagtgaattcatctttcctctgcttttttgttctatctgggtcctcaacagattggatgatgttggcccacattgtgggtggtgaagagggctctttactcagttcactgattctcttctggaaacacccacactgacaaacccagaaatgttttaccagctgtctgggtatcccttaacccagtcaagttggcacaaaattaatcatcaggtgaactttggcacaaaattttggcacaaaattaatcatcaggtggtatcaacatgactagctccaggaaagaaagaaaaacttattggtatttttattgggattacaataaatgtataagtaatcttttggagagaactgacatcttaataatattaaggcatcctaaccaagaacataggatgtatttccatttattcaag

SEQ ID NO: 460762 - DNA, 551 bp, Homo sapiens
atggtgtaactcagtttgagtctgaaagcctgagaaaggagagcctttggtgtaactcctgtagtcaaaagacccaagaaccatgagccccagtgtctgaaagcaggaaaagatggatgtcccagctcaagaagagaaagtgaattcatctttcctctgcttttttgttctatctgggtcctcaacagattggatgatgttggcccacattgtgggtggtgaagagggctctttactcagttcactgattctcttctggaaacacccacactgacaaacccagaaatgttttaccagctgtctgggtatcccttaacccagtcaagttggcacaaaattaatcatcaggtgaactttggcacaaaattttggcacaaaattaatcatsaggtggtatcaacatgactagctccaggaaagaaagaaaaacttattggtatttttattgggattacaataaatgtataagtaatcttttggagagaactgacatcttaataatattaaggcatcctaaccaagaacataggatgtatttccatttattcaag

SEQ ID NO: 460763 - DNA, 546 bp, Homo sapiens
gagcctttggtgtaactcctgtagtcaaaagacccaagaaccatgagccccagtgtctgaaagcaggaaaagatggatgtcccagctcaagaagagaaagtgaattcatctttcctctgcttttttgttctatctgggtcctcaacagattggatgatgttggcccacattgtgggtggtgaagagggctctttactcagttcactgattctcttctggaaacacccacactgacaaacccagaaatgttttaccagctgtctgggtatcccttaacccagtcaagttggcacaaaattaatcatcaggtgaactttggcacaaaattttggcacaaaattaatcatcaggtggtatcaacatgactagcwccaggaaagaaagaaaaacttattggtatttttattgggattacaataaatgtataagtaatcttttggagagaactgacatcttaataatattaaggcatcctaaccaagaacataggatgtatttccatttattcaagcctacttttgaaacattcaggagtatttcatagag

SEQ ID NO: 460764 - DNA, 469 bp, Homo sapiens
attacagaagactatcaaacayataagatgcaagcttaaatgcctaggggtccaggcagagagtgtcaatgtgtggagctgccgctatatgacaatagggagtggtggggactgtgcccgactgggacattcattaacctcttaagttcaaattcatatttaaaaacactgctctgctggtcaaggaaaaacatacatgggggctacattaactctgttggactctttttgggtgcacatactcttgttcgagtgtctagcagctatgtaaagttgacttaattgacacaattttgcaaataaggtagaggctctacaaggtcaaggtcttggccaaggtgacttagttaagtaggagggcaaagataagaagttgaaattctatggacccaagcctggatattttttttaaaaaactagcagaggcaggaagaagccagaaatggtaactaattattttgcatttact

SEQ ID NO: 460765 - DNA, 582 bp, Homo sapiens
tacatttttcaaggtcagagggcactctctcattaatggcactctttcactctcctgtaaaaatcttgaattctttgagactcatgtcattgaattgcagtgcctcatataatggccttcatactgccaaatcctgaagacatttctcagtcctatcttactgatcctctcagttgtattctacactggttaccatgttctcattgaaactgttgattctcttgcctttggtagcattgcttcttccccatgtccttcacaaggctctgtccatctctggttgtgagctacattgtgccatccacsgcttcaaggctgtacttcccagagctctatctttattccaccatgtcttctgcacatacttattttggattatcttgcttaccatcattgtctcatcaatatctagatgaggatttctctattactaaatttacgtctgaacttcaggttggtaaagtcattgtttgtagactctgttcaagtggatgactcacaagattatcaaaatcaactttaaatacccaaaccctttatgttccttgacaaatcctgcttctcttactacatttttcattt

SEQ ID NO: 460766 - DNA, 598 bp, Homo sapiens
tatcttactgatcctctcagttgtattctacactggttaccatgttctcattgaaactgttgattctcttgcctttggtagcattgcttcttccccatgtccttcacaaggctctgtccatctctggttgtgagctacattgtgccatccacggcttcaaggctgtacttcccagagctctatctttattccaccatgtcttctgcacatacttattttggattatcttgcttaccatcattgtctcatcaatatctagatgaggatttctctattactaaatttacrtctgaacttcaggttggtaaagtcattgtttgtagactctgttcaagtggatgactcacaagattatcaaaatcaactttaaatacccaaaccctttatgttccttgacaaatcctgcttctcttactacatttttcattttaggaaatggcagcatcatctatcaaaaaacccagaaaccttgatgtcattcaagacttttctctcattccacataatttctgctaattttattgaaataaaaaatattatatagcactaatttccaggcactgtactacgtattctaaaaacattaatttaatcttta

SEQ ID NO: 460767 - DNA, 515 bp, Homo sapiens
agatttttctctatgtaattgcctaagtggatgtccctgctttttgtacatctttcctctatgtgagaatccagggacacaggcaccttccactttatggctcatctatctcctrgggactgctggtcttttgtatcaagctggctgaagtaaaagtaaacattgggaatctatattggcttcttcaaaacctcagcctgcaatcacaggcattgtttcttttcccatccatcaataaaaactggtcacatggccacataaaagggaaatgttggctgccacgggaccacaatgttttgcctgccagttaaacatctgcttcagagccttcccctctggctaccaaacgcttattggtacccttttttctacatatagcagatttactcccttctccaggaggatcatcccaattctcaattttcttcctttatctgtcttaaaattcagtagctttgacaatatcaatcaccttcatcagatccagaggtggctccccaagacctgatgttacc

SEQ ID NO: 460768 - DNA, 641 bp, Homo sapiens
cttttggctaaaactctgtgtttctgcaccattgttcagccattgttctactcatattaagtcactgtgcaatgcctctctgtgccaaagggtatggcctaccttgaaccactaacgtcccttgagagtgcrttattttctctttctaatgccaattccttggactttccatcgtctgctgtcagaccttcagttttcacatggttctccatcataaagaaacactttcttctccaaatattcagcctagaagaggattccacagtagagagtcttggacgtccatccatcaggatcttctttatcatttctataaggaggtaagcaatctggggtgctgcatcagagggtggtcaagtgcagccatgtactacagttggaattattgtttattctggcccactctattgcaattctctgtatgtacatgtgatttttctctcaagaattgtattgcaccgccttgaaacatggctttttgagtgggcctatctgagtccttcagccatggctggtatctcttactcggccatgttggcaatgtcttgtctgcatatttctaaactctatatatagggctgtagccaatcagggacagtctagagcttttcttccaagaacactttgtcatttaaatggct

SEQ ID NO: 460769 - DNA, 585 bp, Homo sapiens
aggaaggcaaatggcaagatatgattttaataatgaccagataatagaggcaaaagaaagggaagagccaaaggaaaaggcttcaaatgttcagattcttgctgattagagggagagcaattagcagcagtaggctagaaaacaggaggagaaacagactggaggaagagtacacagggaagataaatacaactgtagaattacagtatggtggctgaattatgaatggaaattaaacaaatcattataacaatggggttttttcatcactgttactgtagaaatatgattaattctgaatctttttgcagcttgtaaatattaagcatycaaattaaaagtagtttttccataggagcacattttgaaaatacaagtcattcaacacaaccataaacactccaaacattattcttcaggcttattgattactgcacttaaaataacgttttagttctttaatagatattgagattttgttttgaaaagaaggaaactgagcattcttagaatctagactagccaatcccagagtgagtcactgaggtcagtaaaacaaacagtctttagcccaaacccaaggaa

SEQ ID NO: 460770 - DNA, 378 bp, Homo sapiens
gccgcaaattccaagattaagctgctgacagattcagtgtcgggagagggttgatttcctggttcatagatcatcttcttactgtgtccttatatggcagaagaggtgaagaaactctccagggcaagggagccctttggagtctcttttataaggcatcarttttattcatgagatttctgccttcctgacccaatcacctaccaaagattctaccacctaatatcatcacgttggggattaggatttcaacatatgaattttggggggacacaaacattctgtttaatgcagtacaattttataggcatgttacaattcaacttcatcagattatatgccattggcctaaatgctttcacattatgtacttttaaa

SEQ ID NO: 460771 - DNA, 378 bp, Homo sapiens
gccgcaaattccaagattaagctgctgacagattcagtgtcgggagagggttgatttcctggttcatagatcatcttcttactgtgtccttatatggcagaagaggtgaagaaactctccagggcaagggagccctttggagtctcttttataaggcatcagttttattcatgagatttctgccttyctgacccaatcacctaccaaagattctaccacctaatatcatcacgttggggattaggatttcaacatatgaattttggggggacacaaacattctgtttaatgcagtacaattttataggcatgttacaattcaacttcatcagattatatgccattggcctaaatgctttcacattatgtacttttaaa

SEQ ID NO: 460772 - DNA, 640 bp, Homo sapiens
cacaataagaataatgaatccagtactattttcctttacaaagcaaacagtggacattttcagagtgactacattgggcctggcactgagtttaacactgtaggggatggaaaaacaaatgaaacataaaaaaactcacacttcagagaagaaggtaaacacataaacaattaccaaacagtgcattgcatggcctaatggcsctttaacagcagttattacaacagtatttagtaaagaattagtgagagaatgttataaatattatattgacatcatcaactcaaaatcatgagtgttgttatcttgtgtctacccatttctgtcctgccaataccactagataggccactcctggactcttaaagttttctgtttcatcagaggactgcactgttttacaaagaaaattataatattaatttttaaatctccattatgtattcaaagcttcttaatagacctcaaagatgatcttatattagctagatacagaatcatctgaaacatagactaaagtggaaataaatagcttttggcaaataacagaaggaagatgtttctttctaacaaaaatgtgacagtgttacgtcaacccaccaagtctcccagggattcaaaaaagcagctaaggtgtcag

SEQ ID NO: 460773 - DNA, 640 bp, Homo sapiens
cacaataagaataatgaatccagtactattttcctttacaaagcaaacagtggacattttcagagtgactacattgggcctggcactgagtttaacactgtaggggatggaaaaacaaatgaaacataaaaaaactcacacttcagagaagaaggtaaacacataaacaattaccaaacagtgcattgcatggcctaatggccctttaacagcagttattacaacagtatttagtaaagaattagtgagagaatgttataaatattatattgacatcatcaactcaaaatcatgagtgttgttatcttgtgtctacccatttctgtcctgccaataccactagataggccactcctggactcttaaagtkttctgtttcatcagaggactgcactgttttacaaagaaaattataatattaatttttaaatctccattatgtattcaaagcttcttaatagacctcaaagatgatcttatattagctagatacagaatcatctgaaacatagactaaagtggaaataaatagcttttggcaaataacagaaggaagatgtttctttctaacaaaaatgtgacagtgttacgtcaacccaccaagtctcccagggattcaaaaaagcagctaaggtgtcag

SEQ ID NO: 460774 - DNA, 640 bp, Homo sapiens
cacaataagaataatgaatccagtactattttcctttacaaagcaaacagtggacattttcagagtgactacattgggcctggcactgagtttaacactgtaggggatggaaaaacaaatgaaacataaaaaaactcacacttcagagaagaaggtaaacacataaacaattaccaaacagtgcattgcatggcctaatggccctttaacagcagttattacaacagtatttagtaaagaattagtgagagaatgttataaatattatattgacatcatcaactcaaaatcatgagtgttgttatcttgtgtctacccatttctgtcctgccaataccactagataggccactcctggactcttaaagttttctgtttcatcagaggactgcactgttttacaaagaaaattataatattaatttttaaatctccattatgtattcaaagcttcttaatagacctcaaagatgatcttatattagctagatacagaatcatctgaaacatagactaaagtggaaataaatagcttttgrcaaataacagaaggaagatgtttctttctaacaaaaatgtgacagtgttacgtcaacccaccaagtctcccagggattcaaaaaagcagctaaggtgtcag

SEQ ID NO: 460775 - DNA, 546 bp, Homo sapiens
aataaactgacacaaaatcagaagtaaaactttatgggtgaggttatgcaagaaagaagtaggaaagtatactcaatagacctcaaaaatatcaaaagatgaggaagtatgtatatttaaatatttaaaatgtttaaatgaagattgaaccacttaaatgtgtacctgattttttgtaattccccaatgtaatcaattttttgtttttttcttttttgagacggagtctcgctctgtctcccaggctggagtgcagtggcacaatctcggctcactgcaacctccacctcccaggttcaagtgattctcctgcctcagcctcctgagtagctgggattacaggcatgtgccaccaygcctggctaattttgtattttcagtagagacggggtttcaccatgttggtcaggctggtctggaactcctaaccttgtgattcacccgcctcggcctcccaaagtgctgggattacaggcgtgacctaccgctcctggccgtaatccattttttaaatgaactgaccaaccactagcacatagtaggaga

SEQ ID NO: 460776 - DNA, 518 bp, Homo sapiens
aggaacagtagtcagaaacctcagaaatctacctggaatcctattgtactatggctgaactggcactcaaaccatgaaacacagtccttctcactcttccttcccctttccacaggcaaaagacctttacccaatggccaccaccaccacaggcccatggagaatattgccaggctaccactgatgttcacttaaagcccaaaagctctttagtcagcttttggtgaatgcttccaggcctggtactcaccctttagggcagcaggctaccttcttgcccagggcagctccagaaatgccatccaagagccaaggcatagaatcagggacctagaatccaggaccccactgtggcagtgctggtaactacctgatttttggttcttaagaaagtgctttttgtgtagatagttgttatatktggtgttcctgcagggagaacaattggtggagccctctattcagccatcttgatccgcccttccagctgcatggtaatttcaccgcttttaaaacta

SEQ ID NO: 460777 - DNA, 603 bp, Homo sapiens
ggaaaatttctccttttgaggtctttttgccttagggcattatccactggatgtgagacaacaattctaacggaaatcctcactttgttgtctgatcttgttggcctagaagaatcagaaaacaaaatctgaaactgctatgacatcaggtaagtgtgagcgagggatgacttcaaaagaaaaagagagagagccgaattgggagaacttcagaatgggtagaggcctgaagcatgtttgtatgaggcagaatccaacagtctagacaagattaaagaagctcatacagattttattccctgcccctcagaataatgaaacaattagaactcgaagaatagccaagataattgcctactaagcaaaataagcaacttaaaaaaacaacaaaaatgagattgtcaactatttattactaaacatttcaggggaggtcaaccactaagaaaataactaatacacacacacgtgcacacacacacacgcactaagtagaatttaaatgtacactgtttarcacaaagaaaagcaataatagagggatagacaaagagaaaagacatagtgcgcgcgcacacacacacacacacacacacgcacata

SEQ ID NO: 460778 - DNA, 573 bp, Homo sapiens
gaaatgtgctagcatttgctttttcactaatatctaatctatttaatggtcctacttaaagtaaccagtcaactaattgattgttactggccaatgagataagaaacttgtgataattggtgtatctctacactgtttctgtcattggaaacattttcctgtggaaaaataaaatgacagctgaattaaatagaatacttgaagacgttattttattgtggtgcaaactccttgtcgcattgtgggctagggaagtattgctaatattacatttaatcatacacatttattatgtaggttcatactatttcttacctgagaccaggaaaaatagcttagagctctttactctcttaaaartctctttaatgaatcacttttccaagccttctctagtcttttattcttgcaaatattggaggtattggtcaccgattatttttgatttcttcttgcaggtcccattgacatgtgtctttttgttttgttttgttttgttttgttttttgcatttatctctcatcctcacctttgaagtcatggccaatacattaaaataaaagaatacataat

SEQ ID NO: 460779 - DNA, 573 bp, Homo sapiens
gaaatgtgctagcatttgctttttcactaatatctaatctatttaatggtcctacttaaagtaaccagtcaactaattgattgttactggccaatgagataagaaacttgtgataattggtgtatctctacactgtttctgtcattggaaacattttcctgtggaaaaataaaatgacagctgaattaaatagaatacttgaagacgttattttattgtggtgcaaactccttgtcgcattgtgggctagggaagtattgctaatattacatttaatcatacacatttattatgtaggttcatactatttcttacctgagaccaggaaaaatagcttagagctctttactctcttaaaaatctctttaatgaatcacttttccaagccttctctagtcttttattcttgcaaatattggaggtattggtcaccgattatttttgatttcttcttgcaggtcccattgacatrtgtctttttgttttgttttgttttgttttgttttttgcatttatctctcatcctcacctttgaagtcatggccaatacattaaaataaaagaatacataat

SEQ ID NO: 460780 - DNA, 592 bp, Homo sapiens
tttttgctttttttgttctaacttgtaacctcaaaacctctattgctgtctgacatatggtaggagcttaagaaatatttctttaatgaataaataaatcattacmataaggtaaatttatttttcttgattatcttagctgttacatttatttcatctgtatattcttgaccaatacaaggctggaagcttctcaaatatgttcatgtaaatgtctgcacctgcctccagaaaataatggatttttctttctcctcttcatttcaaatattatgtttgtttgtttgtttctttgtttgtttgttttgcattttacagatctacctgggactaaaaaggtagagaaatctaggatatgtagtttatgttttttcctctgtgaggcacaggtatccatagaagggagaataatgatataaaattgaatcaggtaacctattacatgattccaatgtatttcaactgaagctaactttactatcagctgacacgtagatattagacccagatctggcctactggatacatatccttatccataagtttcaggtccaatgtgagccaacatcaaagtttgagtttgagtctgtgt

SEQ ID NO: 460781 - DNA, 592 bp, Homo sapiens
tttttgctttttttgttctaacttgtaacctcaaaacctctattgctgtctgacatatggtaggagcttaagaaatatttctttaatgaataaataaatcattaccataaggtaaatttatttttcttgattatcttagctgttacatttatttcatctgtatattcttgaccaatacaaggctggargcttctcaaatatgttcatgtaaatgtctgcacctgcctccagaaaataatggatttttctttctcctcttcatttcaaatattatgtttgtttgtttgtttctttgtttgtttgttttgcattttacagatctacctgggactaaaaaggtagagaaatctaggatatgtagtttatgttttttcctctgtgaggcacaggtatccatagaagggagaataatgatataaaattgaatcaggtaacctattacatgattccaatgtatttcaactgaagctaactttactatcagctgacacgtagatattagacccagatctggcctactggatacatatccttatccataagtttcaggtccaatgtgagccaacatcaaagtttgagtttgagtctgtgt

SEQ ID NO: 460782 - DNA, 592 bp, Homo sapiens
tttttgctttttttgttctaacttgtaacctcaaaacctctattgctgtctgacatatggtaggagcttaagaaatatttctttaatgaataaataaatcattaccataaggtaaatttatttttcttgattatcttagctgttacatttatttcatctgtatattcttgaccaatacaaggctggaagcttctcaaatatgttcatgtaaatgtctgcacctgcctccagaraataatggatttttctttctcctcttcatttcaaatattatgtttgtttgtttgtttctttgtttgtttgttttgcattttacagatctacctgggactaaaaaggtagagaaatctaggatatgtagtttatgttttttcctctgtgaggcacaggtatccatagaagggagaataatgatataaaattgaatcaggtaacctattacatgattccaatgtatttcaactgaagctaactttactatcagctgacacgtagatattagacccagatctggcctactggatacatatccttatccataagtttcaggtccaatgtgagccaacatcaaagtttgagtttgagtctgtgt

SEQ ID NO: 460783 - DNA, 592 bp, Homo sapiens
tttttgctttttttgttctaacttgtaacctcaaaacctctattgctgtctgacatatggtaggagcttaagaaatatttctttaatgaataaataaatcattaccataaggtaaatttatttttcttgattatcttagctgttacatttatttcatctgtatattcttgaccaatacaaggctggaagcttctcaaatatgttcatgtaaatgtctgcacctgcctccagaaaataatggatttttctttctcctcttcatttcaaatattatgtttgtttgtttgtttctttgtttgtttgttttgcattttacagatctacctgggactaaaaaggtagagaaatctaggatatgtagtttatgttttytcctctgtgaggcacaggtatccatagaagggagaataatgatataaaattgaatcaggtaacctattacatgattccaatgtatttcaactgaagctaactttactatcagctgacacgtagatattagacccagatctggcctactggatacatatccttatccataagtttcaggtccaatgtgagccaacatcaaagtttgagtttgagtctgtgt

SEQ ID NO: 460784 - DNA, 386 bp, Homo sapiens
ctgaacaggggatgtggcagggaaacagacagaggctggctaaaggaaataaattacactgaggaggaataagtgctagtgttctacatcatagtagggtgattatagttaacaataatttattgtatrttttcaaatagctagaagagaggattttgaatattcccaacacaaaaataataaatttttgaagtgatggatatgctgattatcctgaattgatcattacacatttcatatacatgcattgaaaaatcactctatatacaataaatatgtacaactatgtgtcaactagaaatttttaaaaaatacaattttaaaaatacagataacatatcagaattgcccaaaaaggatttacacttttagcaactccattattg

SEQ ID NO: 460785 - DNA, 580 bp, Homo sapiens
acatgcattgaaaaatcactctatatacaataaatatgtacaactatgtgtcaactaraaatttttaaaaaatacaattttaaaaatacagataacatatcagaattgcccaaaaaggatttacacttttagcaactccattattgcctctaacatatggtttatagatgaagaaactgaggcttgaaaagttaatgaattgttttcaagtttatggagttagaatggctaagttaaaatttcagccttgttttttgtgactccatagcccaggaactcttactaactttctgtaatttaagtgacttttatttgtatactgactaaaaatgacttgaaattatcctccttttcttaacaagtgacttctagtgaggctagagatacagccaaattccgtaaattgaactctgttgtacctagctctacctctgttcactagatcagtgtttttcaaattgtgagtttaaaattagtttaatgagttatgacttgtctttaaaaataaagaaaagatagaatatgacagcaggtataaaattaacatattatttcagatatgtatgtatacatatatatt

SEQ ID NO: 460786 - DNA, 580 bp, Homo sapiens
acatgcattgaaaaatcactctatatacaataaatatgtacaactatgtgtcaactagaaatttttaaaaaatacaattttaaaaatacagataacatatcagaattgcccaaaaaggatttacacttttagcaactccattattgcctctaacatatggtttatagatgaagaaactgaggcttgaaaagttaatgaattgttttcaagtttatggagttagaatggctaagttaaaatttcagccttgttttttgtgactccatagcccaggaactcttactaactttctgtaatttaagtgacttttatttgtatactgactaaaaatgacttgaaattatcctccttttcttaacaagtgacttctagtgaggctagagatacagccaaattccgtaaattgaactctgttgtacctagctctacctctgttcactagatcagtgtttttcaaattgtgagtytaaaattagtttaatgagttatgacttgtctttaaaaataaagaaaagatagaatatgacagcaggtataaaattaacatattatttcagatatgtatgtatacatatatatt

SEQ ID NO: 460787 - DNA, 561 bp, Homo sapiens
ttatggggcacatgcctgtagtcccgtttgctcaggaggctgaggcaggagaatggcctgaatcygggaggtggaggttacagtgagccgagattataccactgcactccagcctgggtgacagagagggactccatctaaaaaaaagtaataataataataataaataaataaatgtacataaagtagagcttcattgtatatgtctgtctgtatataatatgtatatatgtgtgtacatgtatttattttaaaatagtttatatagaagaagatctagaaggctatatggcataatagtcatgatggttatcttcagggggtgagagtagagtagattttacttttcttaactttgcttagttatattttccaaatgctctcatagtgaacttatattgttctatgatgagttatagttacctgatatagtaaacacaaacaaatgcaaaatctttgttttgggataagaacattaacatttaatttacaacagctctattttatgagctcatggattaaataaaaagaactgtctagttttacctctagagctttctg

SEQ ID NO: 460788 - DNA, 561 bp, Homo sapiens
ttatggggcacatgcctgtagtcccgtttgctcaggaggctgaggcaggagaatggcctgaatctgggaggtggaggttacagtgagccgagattataccactgcactccagcctgggtgacagagagggactccatctaaaaaaaagtaataataataataataaataaataaatgtacataaagtagagcttcattgtatatgtctgtctgtatataatatgtatatatgtgtgtacatgtatttattttaaaatagtttatatagaagaagatctagaaggctatatggcataatagtcatgatggttatcttcagggggtgagagtagagtagattttacttttcttaactttgcttagttatattttccaaatgctctcatagtgaacttatmttgttctatgatgagttatagttacctgatatagtaaacacaaacaaatgcaaaatctttgttttgggataagaacattaacatttaatttacaacagctctattttatgagctcatggattaaataaaaagaactgtctagttttacctctagagctttctg

SEQ ID NO: 460789 - DNA, 607 bp, Homo sapiens
ttccatacaatgtaggttgtattgttctattttatagataaagactcaaaagtcataatctattatactaattcaaatggctttttragagtgtttctgaattataagctcattgattttaggtcactaaatttatggtcttttgattaaagatgttcaaattcctctgctagaatattattgaaatattgtgaaatataatcatattcacaactctattagtaaagtaaaggttatttaaaaactaaatgtttattttgtgccactgtgttagaaaccctataaatttgtcttatcaaaatttgtaccaacattatctattcataggttaaaaaaaaaaactaatattacagggattgagtatcttgcctataaccagcatagctaagtccaagtgaattacaacctgtactattagatataatactataatgacatcaggaaaaaagcagaaagaaaagacaaaaacgcaaaaaccttaaagtttctcaatgttaaagaaaagatcagaaaagagattgatctgatcagacttgctaactgatgagctgatagcctggtaattaagaaaaccacaatctgaggttacgtgttgttttaaaacttg

SEQ ID NO: 460790 - DNA, 596 bp, Homo sapiens
gggaatcattctttcctcttttacttttgtaagataatttagctagctatacaattctagtttgctgtttgttttttcaacacgtgctgtatttaagtatatcttacttccatagtttctgatgagaggttcactgtacttctcatccttgcttcactataaataggttgtgcttttcttctgacttctttttcaaaatgtttggttggtctttggttttatgcagtttgaataaaatgtactttttccatgatagccattaacatattgatcatagtaacttaatttccttagaataatttgagcataactgagtatggctgtaatgattacactgtatcttaatagtacatacttttatttttaatagakcatatttttggaagctagatatgttatatcaggtaataggaaaagagaggagtagatctttagtataaatatttatgaaaatctcactgagattttggctgtgctttatgtttaatgaagtaaaagatatgaaatgcttcaaattcctccattatttttctccctattttctttgtgttacttatgtgctcctcctaacactattttagtctctgtggtaaaat

SEQ ID NO: 460791 - DNA, 596 bp, Homo sapiens
gggaatcattctttcctcttttacttttgtaagataatttagctagctatacaattctagtttgctgtttgttttttcaacacgtgctgtatttaagtatatcttacttccatagtttctgatgagaggttcactgtacttctcatccttgcttcactataaataggttgtgcttttcttctgacttctttttcaaaatgtttggttggtctttggttttatgcagtttgaataaaatgtactttttccatgatagccattaacatattgatcatagtaacttaatttccttagaataatttgagcataactgagtatggctgtaatgattacactgtatcttaatagtacatacttttatttttaatagatcatatttttggaagctagatatgttatatcaggtaataggaaaagagaggagtagatctttagtataaatatttatgaaaatctcactgagattttggctgtgctttatgtttaatgaagtaaaagatatgaaatgcttcaaattcctccattatttttctccctrttttctttgtgttacttatgtgctcctcctaacactattttagtctctgtggtaaaat

SEQ ID NO: 460792 - DNA, 548 bp, Homo sapiens
aaagtcacattgaatgttatctaaatgttattctgcatctatagagatattgatgctatttttgctttagttctgtttatgtgatgaatcaaatttattgatttgcatgtgttgaaccaaccttgcattccaggggtgaagcctacttcatcctagtggataggctttttgatgtgctgctggacttggtttgtctatatgttgtcaaggatttttgcattgatgttcatcaaagatattggctcaaagctttctttttctgttatatctgcccagttttggtatcagtatgatgctgacctcatagaatgagttagggagaagtccctcatcttcaatttcttggaataatttcaggaggaatsgtactacctcttgtttgtacatctggtagaatttaactgtgaatctgtttctaatctttcttttttttttttttgcatggcaggctatttattactgactcaatttcaaagcttgctattgatatgctcagggattcaatttctttctgtttcagtattgggagggtgtatgtgtccaggaat

SEQ ID NO: 460793 - DNA, 568 bp, Homo sapiens
aaatttctctcttattactgccttagttgtgtcccagacacaactaagtatggtatkttgtatctttgttgtcattattctcaaagaacttcttgatttctgccttaacttcattatttacccaaacgtccttcagaagcaggttattcaatttccatgtaattttattgtttggagtgaatttcttagtcttgatttttaagttaattgcactgtagtccaagagattgtttgttatgaatttagtatttcttgcatttgctgaggagtgttttccttcagattatgtgatcagttttagagtatgtaccatatggcaatgaggagaatgtatattatgttgtttgggggtggagagatagatatatatcaggttcatttgttccagtgctgatttttggtcctgaaaatctttgttaattttctgtctcaatgatctgtctaatattttaaatgggttgttaaagtatcccactattgttgtgtgggaatttaagtctctttgaaggtctccaaaaactggctctatgaatctgggtgctcctgtgttgggggaatatatttttaa

SEQ ID NO: 460794 - DNA, 568 bp, Homo sapiens
aaatttctctcttattactgccttagttgtgtcccagacacaactaagtatggtatgttgtatctttgttgtcattattctcaaagaacttcttgatttctgccttaacttcattatttacccaaacgtccttcagaagcaggttattcaatttccatgtaattktattgtttggagtgaatttcttagtcttgatttttaagttaattgcactgtagtccaagagattgtttgttatgaatttagtatttcttgcatttgctgaggagtgttttccttcagattatgtgatcagttttagagtatgtaccatatggcaatgaggagaatgtatattatgttgtttgggggtggagagatagatatatatcaggttcatttgttccagtgctgatttttggtcctgaaaatctttgttaattttctgtctcaatgatctgtctaatattttaaatgggttgttaaagtatcccactattgttgtgtgggaatttaagtctctttgaaggtctccaaaaactggctctatgaatctgggtgctcctgtgttgggggaatatatttttaa

SEQ ID NO: 460795 - DNA, 568 bp, Homo sapiens
aaatttctctcttattactgccttagttgtgtcccagacacaactaagtatggtatgttgtatctttgttgtcattattctcaaagaacttcttgatttctgccttaacttcattatttacccaaacgtccttcagaagcaggttattcaatttccatgtaattttattgtttggagtgaatttcttagtcttgatttttaagttaattgcactgtagtccaagagattgtttgttatgaatttagtatttcttgcatttgctgaggagtgttttccttcagattatgtgatcagttttagagtatgtaccatatggcaatgaggagaatgtatattatgttgtttgggggtggagagatagatatatatcaggttcatttgttccagtgctgatttttggtcctgaaaatctttgttaattttctgtctcaatgatctgtctaatattttaaatgggktgttaaagtatcccactattgttgtgtgggaatttaagtctctttgaaggtctccaaaaactggctctatgaatctgggtgctcctgtgttgggggaatatatttttaa

SEQ ID NO: 460796 - DNA, 584 bp, Homo sapiens
tcacttcctaccattctagtcaataaagagtaaattttactttaaattactaaaaaaaaaatcaaagctttctaaaatatgctaagaatttrggacattaaacctttgttgtggaggtaataccactcattcaatttttatttctaattcagaaacactaaacgaaacttttaattaaatacaatttgtatgtattcagtgctattctctcccgatttcttgtgtagggtaatggaactgaaataaaaattagtgaaacactctatatccacatggattttgctagtacacagaagacaatagaagactagataaggtgagaatcaaaatgaagtacaatattactatgtgttacagacaaaagtttgatcttgttgaaggagattggaaaaaccttcatggaaatggtgacattcctaatgattgttcaataatgtgcagcctccagaagagtaagcccgagggaggctggaagatccagtgccatcaggaaaagacacagatgcaaaatcaaaagatttgactcaacagcttagggaatagaatgtaagcaagacttttttggtacataataatgtggaaat

SEQ ID NO: 460797 - DNA, 572 bp, Homo sapiens
aatgattgttcaataatgtgcagcctccagaagagtaagcccgagggaggctggaagatccagtgccatcaggaaaagacacagatgcaaaatcaaaagatttgactcaacagcttagggaatagaatgtaagcaagacttttttggtacataataatgtggaaataaataaggaaatataaatctgggagagaaaattaactcaaaaatacagaatactttgyctgacggagtggtagttcacaccggctttaccggatgaaaagttgttaaaggcctgtaagcagtggaaaatggtgtcactagagatttgggagctctttgtctaataataaattggatagattgatgttgttgaagaaacagtttatgtaaaaaggttattacttctttcattaggaataaagaagtaatagattaaacaagggtagaagcactgaaaattctcaaaggatagcattcatttgagaaacattagtgaattagaatttatatagtgaaagcatagtcatactcaatataatgatgcttaatttaaatgtacataaaatacatagatttataaatgtacc

SEQ ID NO: 460798 - DNA, 572 bp, Homo sapiens
aatgattgttcaataatgtgcagcctccagaagagtaagcccgagggaggctggaagatccagtgccatcaggaaaagacacagatgcaaaatcaaaagatttgactcaacagcttagggaatagaatgtaagcaagacttttttggtacataataatgtggaaataaataaggaaatataaatctgggagagaaaattaactcaaaaatacagaatactttgtctgacggagtggtagttcacaccggctttacmggatgaaaagttgttaaaggcctgtaagcagtggaaaatggtgtcactagagatttgggagctctttgtctaataataaattggatagattgatgttgttgaagaaacagtttatgtaaaaaggttattacttctttcattaggaataaagaagtaatagattaaacaagggtagaagcactgaaaattctcaaaggatagcattcatttgagaaacattagtgaattagaatttatatagtgaaagcatagtcatactcaatataatgatgcttaatttaaatgtacataaaatacatagatttataaatgtacc

SEQ ID NO: 460799 - DNA, 606 bp, Homo sapiens
tctaataataaattggatagattgatgttgttgaagaaacagtttatgtaaaaaggttattacttctttcattaggaataaagaagtaatagattaaacaagggtagaagcactgaaaattctcaaaggatagcattcatttgagaaacattagtgaattagaatttatatagtgaaagcatagtcatactcaatataatgatgcttaatttaaatgtacataaaatacatagatttataaatgtaccatgtagaaattattggattattaaatataaaacatttattcattctacaaatagttattgatcatctaatgttagtgaggagctactctacacattcgaacaaaagagacatttaaatacatttaaattcaaatgggaaaagaataccatagacaatcaaagatgttaattttagtctataaaatacatagaaatactgacatatatgatccattggtatggttgtcaggcaaaatctaagaaaaactatttaagctaaattccaaattataaaaagcataccttgagaaaaggagtrttactttattagaaactatagaaagttcaattgaaaaagaactctgtttaagtcacataa

SEQ ID NO: 460800 - DNA, 593 bp, Homo sapiens
cttggaataagcattgttaaaaagaaacagatataaatatcaaggaattgaagcaagwaacaaattagagggcggtaagaggcatcgctagtggaatggagatgagcaaaacacctgtgagtatctgctctgtgtgtggctatatgttgtgtgtgtctgtgtttgtgtgtatgtgcagctgattgaggaaggtgattaaagacaaagttttttgagagcaataacatttagctttaacatttctctcctttcattttttttctttgctgagttttgagaataacaaagtgaaagtgttggccatatctgttcctttgggttttttaacttttatttaagttcagggttgcaagtgcaggtttgttatatgggtaaacttgtgtcatggggatttgttgtacagattatttcatcactcaggtgttaagcctagtaccaatcagttatttttcctgatcttctccctcctcccatcctccaccctctgataggcccattgtgggttgtttttctctatatgtccatgtgttctcattatttagctcccacttaaaagtgagaatattcagtatttggttttctgttcctatgtg

SEQ ID NO: 460801 - DNA, 484 bp, Homo sapiens
agaaatgagaaaaatggaaagaagtggtttgaatctggcttagacactattgaaagaatctgcagaaatccctcctccctaaacatacacacagagaaatattgcataggttttctaaaaatggaaggagaaactaccaaactgtacagcctggatgacattaattacagagtgaaatgttaaccaacatttaaaatgatggatttctatggattgtcttcaaataattatattgaatgtcagcatatgattaatatatgaagactaatcattgtaaattgatatcaattaaactatcataaaccttaacttataaaatgtattactcttttcattcaagatttctgcttataaaggctgactttcaattattactttttgatttatagtagtaacctcamcatctaatattattccactatttgctgcacagaaattagtatctgtaccatgacaaaatcatcattatttttttgacagagat

SEQ ID NO: 460802 - DNA, 607 bp, Homo sapiens
acttcactcccaacttgcaaagatgaatgctgctgggaaaaaaaagttcagttacataaagggtgtaattaagatgagtaatctatgatcttccatcctgttgtgtctatttttgcttggcatttttttttcaaattawttcataccttactttcattctcaatgatgactctattatttggttgagaatttttgtgcacataaggttcatgagagatattaatctgtagtggctgtggtttatatacgatttacttttcctcccacaaaactcgtgttgaaatttgatccccagtgtggcagtgttggtaccagggatgatggtctggattatgggggtagattcctcatgagaggcttagcactccccttgaggttgtgtgtcctcattctggcaaaatgggattcgttcttcagagaataaattagtctccattggagtaggttcttataaagtgaggttcctcttcctatttggttgttcttcacatgcacctgctttccctttgagtttctctgccatgttttgatgcagcacaaggctctcaccagaagccaaacagatgctggcaccatgcttcttgtacagcctgaactatgagtcaaa

SEQ ID NO: 460803 - DNA, 607 bp, Homo sapiens
acttcactcccaacttgcaaagatgaatgctgctgggaaaaaaaagttcagttacataaagggtgtaattaagatgagtaatctatgatcttccatcctgttgtgtctatttttgcttggcatttttttttcaaattaattcataccttactttcattctcaatgatgactctattatttggttgagaatttttgtgcacataaggttcatgagagatattaatctgtagtggctgtggtttatatacgatttacttttcctcccacaaaactcgtgttgaaatttgatccccagtgtggcagtgttggtaccagggatgatggtctggattatgggggtagattcctcatgagaggcttagcactccccttgaggttgtgtgtcctcattctggcaaaatgggattcgttcttcagagaataaattagtctccattggagtaggttsttataaagtgaggttcctcttcctatttggttgttcttcacatgcacctgctttccctttgagtttctctgccatgttttgatgcagcacaaggctctcaccagaagccaaacagatgctggcaccatgcttcttgtacagcctgaactatgagtcaaa

SEQ ID NO: 460804 - DNA, 550 bp, Homo sapiens
tggggttcttatttccctgtatatctttccttgccttactgaaggttacctgaaaattacttaggatttagtttctttatttatagtgtattgagtgcatctctttatgtaaacacacacacacacttcgaatccatagatataatggattcaggtggtacatatgcaagttggttacatggatatattgcataaaggtggggtttgggcttcttgtgtacccatctcctgaacagtgaacaatatacccaagagataatttttaaaccctctctccctcccaatctccccccctttggaggmctcagtgtctagtattttcctccatatgtccatgtgtatccgttgtttacctcctgcttacaagtgagaacatgcggtattgattgtcttttcccgagttatttctcttggggtaatgtaatttttgtagaggttggcctggtgtttctaatacacctatgtgacttatattagtctactggtttgaatattttactcagtacttgagtgaaacagggaaaccacatttcccttaattcttcttatc

SEQ ID NO: 460805 - DNA, 602 bp, Homo sapiens
gagccgataataaatctctctatcttcttctctccctctctgtctctctctatatatatgtatacacacacacaattatatacatagacacataattttttcatattatacataataagaaattatatcatacaatatgaaaaatttatattacatataatatgaaattatatcatataatatgaaaaaattatgtctatgtatacaattttatatatatgaaaaattatgtatatatyctctattgcttctatttctgtagagaatcctgatcaatatagaggtaaagtcatgaagccctgagacacaggtacacattaagtagccagaatgagaaattatccaaaaagaaatgattagtaacaggaatatttacgggtaggtggagggcaaagaataattagaactcaattaaagaacaattatagaaatttataaaaataataaaagaaatggtattattaaagcaaaaatatgagaaaaagtaatggataatatgacatgctgaaaaagctaaagaaaacaaatataaagtattttttccatatagaatttatcaattcactggtgacctagtaagaattgtcagtttgtagaaaaag

SEQ ID NO: 460806 - DNA, 622 bp, Homo sapiens
aaaattaaacagaacaaagcacatatactatacgtgagttttctatgtctattatttgtatatacttcatacatacaaatgaggacattgtactgtctacgtttatgaaatctattatttatttatgaagataatcattaatcagctaattctagaaaaggcgaatggaaaacgatactatgaatacatactgcaatccattcagcctattattcatcctcacttatcacctcttagccatgaaatctaatggagacttttcagttcttatcatgacttgtttttagcacaccttcctcaaatgttccatatatttactctgtgcttggctcttcatttttcccccttttgtttgagtcctgagctcacctctctcccaatcccttgctttgtttttggttatcttatgacctgtttctgaattctttttcagtagagctacatgtaagatggaaaatagtttagttgaatgtgtgagaatacaatggcygtcattttgttttgctaataagtgctggcaggcaggagtggagacatctgagtttctcaaagataataccctcggcagagctacatgagagtgggcaaaaatgcataaccaataaaatctcaaggtgtggca

SEQ ID NO: 460807 - DNA, 583 bp, Homo sapiens
acaatggccgtcattttgttttgctaataagtgctggcaggcaggagtggagacatctgagtttctcaaagataataccctcggcagagctacatgagagtgggcaaaaatgcataaccaataaaatctcaaggtgtggcaaagatttatgagtttttccatagttacagagtaagcagtaaaagttctataggacaaacacagattttaagacatccttatggaaaaatcatccttccaaggttatggagataggattctctctggcaatgaagcaaggatagctaagataatcaattccagaaaatgatgtgctggaccttaagataactatgtaggacatataaacttttcaaaasatccaagaatataaagaggtacataatattagaattgactaagaggtagtgttgggcctaaaagaaggaaaaatatatggcatcaatagtggagccaaatgataatcataattctaatgataagaaaatcttctcactgccgatatatagtcaatccacaagtggactggtatctcctacaatgatttccttttttctgatgacgggaaatagggagaatatga

SEQ ID NO: 460808 - DNA, 583 bp, Homo sapiens
acaatggccgtcattttgttttgctaataagtgctggcaggcaggagtggagacatctgagtttctcaaagataataccctcggcagagctacatgagagtgggcaaaaatgcataaccaataaaatctcaaggtgtggcaaagatttatgagtttttccatagttacagagtaagcagtaaaagttctataggacaaacacagattttaagacatccttatggaaaaatcatccttccaaggttatggagataggattctctctggcaatgaagcaaggatagctaagataatcaattccagaaaatgatgtgctggaccttaagataactatgtaggacatataaacttttcaaaagatccaagaatataaagaggtacataatattagaattgactaagaggtagtgttgggcctaaaagaaggaaraatatatggcatcaatagtggagccaaatgataatcataattctaatgataagaaaatcttctcactgccgatatatagtcaatccacaagtggactggtatctcctacaatgatttccttttttctgatgacgggaaatagggagaatatga

SEQ ID NO: 460809 - DNA, 583 bp, Homo sapiens
acaatggccgtcattttgttttgctaataagtgctggcaggcaggagtggagacatctgagtttctcaaagataataccctcggcagagctacatgagagtgggcaaaaatgcataaccaataaaatctcaaggtgtggcaaagatttatgagtttttccatagttacagagtaagcagtaaaagttctataggacaaacacagattttaagacatccttatggaaaaatcatccttccaaggttatggagataggattctctctggcaatgaagcaaggatagctaagataatcaattccagaaaatgatgtgctggaccttaagataactatgtaggacatataaacttttcaaaagatccaagaatataaagaggtacataatattagaattgactaagaggtagtgttgggcctaaaagaaggaaaaatatatggcatcaatagtggagccaaatgataatcataattctaatgataagaaaatcttctcactgmcgatatatagtcaatccacaagtggactggtatctcctacaatgatttccttttttctgatgacgggaaatagggagaatatga

SEQ ID NO: 460810 - DNA, 506 bp, Homo sapiens
  misc_feature (1)...(506): n = A,T,C or G
cattggaataaattcatatgtaaactgatctgggatgccagttctcctgatgccaggttcaatgcttatctcattacatcatccttactctctgcaaagaatctctgtcttagaaaagagattttgtccacacagagctttctaagcagcatagcccaaatgcctgtcctttgctctgtggaaccaattattgagatygtgtattatgataactttcagcacacacactgggcttttcattttcagagtgcccaattttgataaagcactttggagcttgcttggaggttctgtatataaaagccatgtcatggataaagcaggtttaacacctgtgagtgatagcacaatatgagggtcaccaggagcagagacactgccactgttagagcaggtagagaagacttatagcagactttgatgaatgactcagcctcaagtccacagatgtaaagctcattaaatgcaatccagaattacttnnnnnnnnnnnnnnnnnnnnnnnn

SEQ ID NO: 460811 - DNA, 597 bp, Homo sapiens
  misc_feature (1)...(597): n = A,T,C or G
atgttgctgatatttacttactactggtaatttggcttctctaaagttgacagtttgttttatttgtattttaaaaatttatttgcatatcatcagagagtattcctggtttgcttttggagcaaaataccaaactatagacacaaaaatatcccagcaactattatcattagcttgttttccttagcactgaagtaactccctgaaacttgctagtgattatttgataacaagatcaccacgttgtctgtaaaatggtgatctaactaaatakgctaattttctcactttttagaaattcttccctgctaggttatcctgagaataggacctgagctttgaaatctgtgaagaaaattattccaaagctcaaaactctccttcaccattactgcaggcctccttagccctgacctttctcactggcactgactgtagttgacagtgttgctgactttcctcctntggcactggggggatggtacttctttggcccacttgaggtcaggtgcagctaggccagttagtttgtgcaatgaaatgagaggaggagtgtattagtctgttctcatgccactaataaagaataaatttacc

SEQ ID NO: 460812 - DNA, 570 bp, Homo sapiens
agagggagagcaagagagatatttagaatgaggatccctcttggtagctgatatggtacatgaaaacagactaatacagtagccaaaagaattcaaacgaattgataataaaggattggagttctctggtgtgcaggcactatccccagtgtaaatattctcttcagttcttmcctacatcaagcaggccacctgtctttagttccctaaacttaccactcatttcttccccacactcaataatccataaccctcatacagagtactggccaatcccacagccttaatgaattctccctcactctccaccaccaacacacataccaaaccctgactagaatagagctcaacacataatttcttactgatgctaattgggttaacagctcaaggtctgactgtgggtctctgggtagtgcccatggctcaggtcagtgtctcccaaacctagagaaccatcaggatttctgagtgagccccttgcaatttcagattcccatcctgtcccatcagaatctccacaggtgagggatggacatctctgcttttaaaaggctattcttatcattt

SEQ ID NO: 460813 - DNA, 565 bp, Homo sapiens
gaaggagagctctaaaatacaacccaggctgtcaattgataattctggagggctttcctctaggaagatggagaaaagagtttcagccagactgcaagccagcttcaagtcagttcaggcatgattagatctaggtgatttgttctttgttactcaccagagtagagggtaaatcaactctagagagggataactttatcccaagcctgtggaaaatatattttgacatatcaagaattaggatcaagagaaaggatgtatggtaaaaacaaatccaaactcttcagaggattataataggattcagccttgcaaacagcattsacaatgtccacagtgtaagcaacaacaatgaacacaaaaactcaaagcagaaaaatgcaatcaattttcaagagaaaagacaaaatggaggataccaagaagactcacatgttgaaattagccttcaaggacttttagtagctattgtaactatgctcattgatgaaaaataaattactgatttcttattagaaactatagaaccaaaaagataacaaaataacattttcagagtgctaaa

SEQ ID NO: 460814 - DNA, 610 bp, Homo sapiens
cagcattgtttcatatgtgtattagtcatatactcttctataaattgtatattgatattctttgactttttgtattgttggttttttcttatcgctttgtaactactctttgtatgcaatatataccatatatggtatacaccatactgtttgtatgtgatatatacacatatgtacactctttgtatgtaatatatatgcattttctttcaaatgcattgcaaatattttccccagcttaaaatttgatttttatgttagttttttgccatttttatgttagtttttaccatcatttttaaaggtatatgaggtaaaagacatcttttgtttttgtaatgsaatgaactatttaattctattatatgtggttcttctatttataatttctattggtatttaattctctcgaagcagttaggtaattcttatagatattaatgacaggatgtctgtcttcctaaattatttaattatttttattttgacccacctatgattgtgaaaaagttcacttttacaattagggaacttttaacatctgctaggaaatgcatagatgacttcatacgttttttatatggctatcctgaaaaagtcatttcctaga

SEQ ID NO: 460815 - DNA, 629 bp, Homo sapiens
cacatggttttgccttaagcccagtaagaaaaagacagaaaatgaaaacaacagagactgtagatatctataaagctttcattgttacctttaaacatgcacccatctccaaatctgtaaaccctacagggaggaatagacagtacaaaactgctttgctggttgctgctggcaagagaaggaagccctgaagctgtagtgaagactctgagctaaactgggccactgtttctgcctttctctgctctgggtaacctgtcttgacattttttctttctttctttttttttttttttttttttgagacggagtcttgctatgtcgcccaggctggggagcagtggcgtgatcttggctcactgcaacctccgcctccagggttcaagtgattctcctgcctcagcctcccaagtaccttgggactacargcacccatcaccacacctggctaatttttttgtatttttagtaaatatggggtttcactgtgttagccagggtgggcttgatctcctgacctgatgatccacctgccttggcctcccaaagtgctaagattacaggtgtaagacaccacaccggttgactttttttctagatcatccctaccattatcataagaaatgaaa

SEQ ID NO: 460816 - DNA, 492 bp, Homo sapiens
catacgtatatattgtggctttaagggtgctgatggacatcagaggcccttctacatttccacttggtacttctaagaatgccagataaggcagaaggactggtgaagctctgaccaattttactgaacatgactgatctctcarcctacttttgttagcctaatagtgtatataaaggatactcaagggtttctttgcaaaacgagtactctcttataccacccgttagaaccatgtggtccagcagagtatataatgtgcagtgaaggatacagaggagtcataaactgaccattataacaaaatgaaatctgcatctcaccttggtctgtctgggtctttattgcacttcattagttctaaagcaagagtctgcttcctcacaagtctctatgactctaactttacctacctccaagactataatctagtctagagatgactttctaaaacatttttattatgcatgtttgacttgggggcaaggaaac

SEQ ID NO: 460817 - DNA, 492 bp, Homo sapiens
catacgtatatattgtggctttaagggtgctgatggacatcagaggcccttctacatttccacttggtacttctaagaatgccagataaggcagaaggactggtgaagctctgaccaattttactgaacatgactgatctctcaacctacttttgttagcctaatagtgtatataaaggatactcaagggtttctttgcaaaaygagtactctcttataccacccgttagaaccatgtggtccagcagagtatataatgtgcagtgaaggatacagaggagtcataaactgaccattataacaaaatgaaatctgcatctcaccttggtctgtctgggtctttattgcacttcattagttctaaagcaagagtctgcttcctcacaagtctctatgactctaactttacctacctccaagactataatctagtctagagatgactttctaaaacatttttattatgcatgtttgacttgggggcaaggaaac

SEQ ID NO: 460818 - DNA, 412 bp, Homo sapiens
ataccaggaaacaccaataaaagagtaaagaaataaaacagggaaggaaaggaagccagaaattggcgcgtaataaagcagattaccaatctgggtaactgaggctctattctgcgggcagatgctgacagacactgtggaatatgcctcagggtgactcagcagagggatgaagagggttggctatttattcttctactcccatctgtcaataatggaaggctgcatctgggggcattctctcctctgtacttacaggctgcattgaacacaagccgaaagactgttctcaggcagatatgacagtgtctgcacttacatgycatggcatgactggaataacaaggatcaaatggacatgggaggattctcaacagctacagaaacttttttttatttattcctcattaat

SEQ ID NO: 460819 - DNA, 575 bp, Homo sapiens
tattttgtgcctaggatactatctatatttcacatctcatcaaatatattcatcttaataataaactcccaaagtgctagaattgtatattcaatcaaaaatcatttttccatcatttatatttgtcttttaggtccccctctctaccacacttattcttgattggatacttccatacacattgtggctcttaaaagttgctgaatagcctccatgtcaagaattaaaaagttagtcttaatggtctctttcccattttttccccttcccaattaattttataacaaagttagttaagagtttggccaaagagagaaaaaaagtctgaaaagaaaaagcctcagaaaaggcttaaaaatcattttgcggtcaatgatgcaggaacgattgttctaccatggattatccctggaaatactgtctagccaaagtgttattaataacaagatgccacaaaaatgttgctgatcacaaaagctgtcatgtttactgtcatctgcagtgctgtgttscaaaagagagcagtaagaactgatgcacttgatgatgtgttctgtcttgcttgacagtaaact

SEQ ID NO: 460820 - DNA, 574 bp, Homo sapiens
ttaaaatttcaacatataaattttggagatgaaaacattccattcactgcaagtaggactcaaggctagcaaagacacagaagtcaaggaagcagtggttaaaaccacatgttctggagttgaattgtctagtttaaaatctagcactatcttctatgactgtttaaaattgagcacattccttcatttttcattgcttctttttcctcatctgtgaaaaaaatggatataattgtactcatctcttaatattgtctaagtgttgggaataaagcagcaaacaaaactgataaaacttgtgcctttcaggagaatcgcttgaacccagcaggcggaggttgcagtgaaccaagatcacrccactgcactccagactgggcgacagaacgagactccatctcaaaaaacacatgaaaacctatgtctttgtgaatgagttatttggggctattcatatggaatataaatgtgagagcagtttgagagatggattagaatagcaagcaacaggacacatagcacataacatgcaataaacattgcttatgataattatttgagaatcaagaaatat

SEQ ID NO: 460821 - DNA, 534 bp, Homo sapiens
cagctcctttttcaaatctcaaggggcatcgccacactgtcttccacaatggttgaactagtttacagtcccaccaagaccgcacgttgtgcacgtgtaccctagaacttaaagtatatataaatctcaaggagctctgaaatggtagcaaagaagtcagagagaaggcaaaagggataggagtaagtttgactatactttatagcttaaagtcagacagacagagagttacagatgggaaggtgagtgaggtaggaaaaatctaaaatttgaatgaagactaaagcattgaccaataatttggactgagatagtctaataacaacattgagacmatgttttgtgaattaaagcaatcacaaggctgtttattacctaatgatgaattaatgatatcaaggcagggtaagactatccccctttcaatgcacagaaggtaatgaaaatacagttacatcttaattgtgtcatgaaatatggttgttcaaactctcagttatacatactgggatgtctagaatagaaggagaatgc

SEQ ID NO: 460822 - DNA, 574 bp, Homo sapiens
ttaaaatttcaacatataaattttggagatgaaaacattccattcactgcaagtaggactcaaggctagcaaagacacagaagtcaaggaagcagtggttaaaaccacatgttctggagttgaattgtctagtttaaaatctagcactatcttctatgactgtttaaaattgagcacattccttcatttttcattgcttctttttcctcatctgtgaaaaaaatggatataattgtactcatctcttaatattgtctaagtgttgggaataaagcagcaaacaaaactgataaaacttgtgcctttcaggagaatcgcttgaacccagcaggcggaggttgcagtgaaccaagatcacgccactgcactccagactgggcgacagaacgagactccatctcaaaaaacacatgaaaacctatgtctttgtgaatgagttatttggggctattcatatggaatataaatgtgasagcagtttgagagatggattagaatagcaagcaacaggacacatagcacataacatgcaataaacattgcttatgataattatttgagaatcaagaaatat

SEQ ID NO: 460823 - DNA, 391 bp, Homo sapiens
ggtgactcaaataacacctggagacatttttagcgaaactagggcatggggctatkggctgtcaactttagctatgcaagattttgactttggggtttattgtagggcatagcagttttattcctaagcaaatagttgttttggggcagatgggacaattttatcattagtgtatagcccctgctggcctgagtagatactggctgagctactgcagtttgatcttgatctttgaactgtgttatcacacaagcactgtccatggtcttgtaactcagagaacacttattatggttttgcccacagcggggtagtgaatctgattaaaaaacatgaaaagtagttgcaagtgcttactatacagagaatctactctatcttcagtggaatt

SEQ ID NO: 460824 - DNA, 391 bp, Homo sapiens
ggtgactcaaataacacctggagacatttttagcgaaactagggcatggggctattggctgtcarctttagctatgcaagattttgactttggggtttattgtagggcatagcagttttattcctaagcaaatagttgttttggggcagatgggacaattttatcattagtgtatagcccctgctggcctgagtagatactggctgagctactgcagtttgatcttgatctttgaactgtgttatcacacaagcactgtccatggtcttgtaactcagagaacacttattatggttttgcccacagcggggtagtgaatctgattaaaaaacatgaaaagtagttgcaagtgcttactatacagagaatctactctatcttcagtggaatt

SEQ ID NO: 460825 - DNA, 670 bp, Homo sapiens
gaatgagttatttggggctattcatatggaatataaatgtgagagcagtttgagagatggattagaatagcaagcaacaggacacatagcacataacatgcaataaacattgcttatgataattatttgagaatcaagaaatataaatcaaattggacaaatttatttttgaaaagaagttcttgctcacaatttgtaaagaagaataaartatgataaattatacaaaaaactgacaaatgtatgcttttttaacagtaggatttatttatgcaactaatgtttattgggcatctgttacctgctgagtactattctaggtgctggaactctagcagtaaatgagatgagaagtcacagagacttatacttgtgggtggtagagaaactccagaaaattatacaattttgtggttattgaatttttttaaataaaatcatttcactgtactataggaacttgctattttagaataaatccttttcaactgttactataaataattagacatttatttggttcatatatttagtttttttaaagtgtgataagcttatactattacaaatacagttacccttgaacaacataagggtttggggcaccaatcctcccaagcaatcacaaaaccaaatataacttttgactccacaaaagcttaactactaa

SEQ ID NO: 460826 - DNA, 669 bp, Homo sapiens
catggccaggctgtgaattttctaaacttttatgctgtgcttcactttcaattataagttccaaatttaagttatttctttgctcctttatctgatgataggctgttagaagaagccatgccacattttgaatgtttttctgcttatagatttcttctgccagatactctaagtcatcactcataagttcaaacttccacatattcctagggcatggacacaatgcagtcaagttctttgctatgacataacataggtgacctttataccagttcccaacaatttcctcatttccatctgagacttcatcagcttggatgtcactatccatatttctatcagcattttggtcacaaatacttaagaagccactcaaaagtttcaaattttcccttatcttcctgtcttctttcaaggtctccaaactcttccaacctctgcctattatccagttccgaacgtatatttatagcaatgctccactcctcagtaacagttttctgttttagtccatttgtgttgctataaaggaataccygaggctgagtaatttataaagaaaataagtttattttggctcatggttctgtaggctgtacaagaagcatggtgccagcatctgcttctagtgagggcctcaagaagcttatgatcatggtggaagtcaaa

SEQ ID NO: 460827 - DNA, 566 bp, Homo sapiens
agaatatgaagggtcaaggccttggtttagaatggtcttgcagttaaatccacattgctcctcctctctgctcccagtaatctcagaaggacccacgaaaaagtagggattgatatctgggtaaaggctgccctaataaatgcccttctagctgtctaaaggcttaatatttaagcctaatgccttaagagataaagactttagggaacattagaagtgaggtgcttatcatgcactcatctattttctgtgtagagggatttccccaatactcttgacttcttatatcatttctaactccgttaggaagtgaggtgatttacccagttaatamatactggaggagaactgggcataagtagcccagtaccttcctccatctttctttgagatggaactgcttcagctaagatacactacattaatctgctcctcactgctgtaagttttgtagcaggagttccccaaaaaagaagccctgtggtttcttgtactgctgtgtttaggtggataggtatgcccatttctagagtatattatgaaaaaccccatagttgccaaaaatc

SEQ ID NO: 460828 - DNA, 562 bp, Homo sapiens
ctggtgtacagtaatgatcatgaatagggatgtaacatcatttaggccaataaaatgataaaatagggagtattttcctaaggcttctaagaggttttttttaaaaaaaaaaaaaaccataaaaagaatccaagaaacagatagcatttcttcctctgcaaattttcatgcacatgtgtgaggttcataactgcagaacatcgmtgccagcccaagaataaagctgacacccagagaatggtgaagttctgacgcctgtcttatttctaaacttccagttatgcaaaccatcaaatttctttagtagatatgagattttcccccaccccatgttgcataagctcctgaccacagtagcaccaggtcatcaacatcacagttgggtcactgggacatggcttacaaaaaaggaactgataaagaacacaagtatctggggactcagtacagacttgaggtgaagtcaattggaaaaggggtggctccaggatctactaaacaaatgaaccctactccttacatttcactaatgttccttacttcttttagctgatttaccata

SEQ ID NO: 460829 - DNA, 580 bp, Homo sapiens
gtgaagttctgacgcctgtcttatttctaaacttccagttatgcaaaccatcaaatttctttagtagatatgagattttcccccaccccatgttgcataagctcctgaccacagtagcaccaggtcatcaacatcacagttgggtcactgggacatggcttacaaaaaaggaactgataaagaacacaagtatctggggactcagtacagacttgaggtgaagtcaattggaaaaggggtggctccaggatctactaaacaaatgaaccctactccttacatttcactaatgttccttacttcttttagctgatttaccataaagcatctgaagcctgattaattttcaatcccagattcattggcacatgtttaatatacaattcttaacaagaatggtttgtcagacttctcagttcttgaaggagaaaactaaaatggaaaacagaatgtcaaaagaagaggtagttaaraagcaagaacagtcacagcaaaagtaacagctgacaacttgatatggagggaagcaaacagacagaattccattatcacactttataataatggcaggttataaaac

SEQ ID NO: 460830 - DNA, 664 bp, Homo sapiens
ttataatgtttttgagtgtattattttgtagtcttcttagtggttgctctrggtattacaatatacgtaacttatcacagtctactggtatcagtgttataccatttcaagtgaagtagagaaaccttatatcaatttaggtccctttaccctttccactttttaaatattaattgacttatttcatctacatacatgtgcaccacatcagatggtattatagtttttgcttcaaccatgaaacataaggtaaagaaaattctattattcatacttctgtttttattcattctactgttctttacttcctgaaggtacaagtcttcttttgttaaacttttcctttgtgtttggagagttctgtgtagccattgtgttggggaaggtttgttagcaacaaattctctcagttttctttctgctgagagtgattttatttctccttcattgctgaaggatggtttagttggatataggattcagagttgacaattcttataatacttgaaaatcttgtatgtcatttccttctggcctctgtggtttcagatgaaaatatactgtcattttaattgatgcttctttatatgtaatgtgttatttctgttcctttatatgtaatgtgttattgcactctggctgttttaaatatttttctttatct

SEQ ID NO: 460831 - DNA, 573 bp, Homo sapiens
cgtaacttatcacagtctactggtatcagtgttataccatttcaagtgaagtagagaaaccttatatcaatttagktccctttaccctttccactttttaaatattaattgacttatttcatctacatacatgtgcaccacatcagatggtattatagtttttgcttcaaccatgaaacataaggtaaagaaaattctattattcatacttctgtttttattcattctactgttctttacttcctgaaggtacaagtcttcttttgttaaacttttcctttgtgtttggagagttctgtgtagccattgtgttggggaaggtttgttagcaacaaattctctcagttttctttctgctgagagtgattttatttctccttcattgctgaaggatggtttagttggatataggattcagagttgacaattcttataatacttgaaaatcttgtatgtcatttccttctggcctctgtggtttcagatgaaaatatactgtcattttaattgatgcttctttatatgtaatgtgttatttctgttcctttatatgtaatgtgttattgcactctg

SEQ ID NO: 460832 - DNA, 573 bp, Homo sapiens
cgtaacttatcacagtctactggtatcagtgttataccatttcaagtgaagtagagaaaccttatatcaatttaggtccctttaccctttccactttttaaatattaattgacttatttcatctacatacatgtgcaccacatcagatggtattatagtttttgcttcaaccatgaaacataaggtaaagaaaattctattattcatacttctgtttttattcattctactgttctttacttcctgaaggtacaagtcttcttttgttaaacttttsctttgtgtttggagagttctgtgtagccattgtgttggggaaggtttgttagcaacaaattctctcagttttctttctgctgagagtgattttatttctccttcattgctgaaggatggtttagttggatataggattcagagttgacaattcttataatacttgaaaatcttgtatgtcatttccttctggcctctgtggtttcagatgaaaatatactgtcattttaattgatgcttctttatatgtaatgtgttatttctgttcctttatatgtaatgtgttattgcactctg

SEQ ID NO: 460833 - DNA, 613 bp, Homo sapiens
ttaacaattctagcaaagagagattaaatgtaatgaccacaggtgagacagatgctctaacaactcattgaagagctctgaaaaagtgcagcctacgtgttcaactgctaggaggaaataagggcagccaggttaatatcaaatagcatgaaatagcaattaacagttataagcaaaaagtgtccatgacattcttgatggtgtctcccaaatttggctagagtctcaaaatmacccaaggagtgattttcccagtactaaagattatcatgcagtaggttgaggtcaagtcctagttgatgttttcttttttagattaatcaggtgcttctaaagtagccagccagctgtgtacacttgtttagatcctggcatttgggaacctctgtaaataaaaaatatatacttggaattgtagggaagacaagtccattgaattcattcaggtgataaagttgtctattaacacagatatgtagggcctgaggaagagactgcagttagaatagaaattatcaaaaatgaaaagagtagccagaaaagcacaatcaaaggcttgccaagttgcctggaggtcactcacaggaaccgacaggctgctcattaacattat

SEQ ID NO: 460834 - DNA, 575 bp, Homo sapiens
ccgcgcctggctgatgcttggctttttatgaaaatgtttttcaataatattccaaagaatattaaaaaacaaatttgctcttcttttataaggaataaaattaatatgtgccagggaaataattttccttgaagaaaaaaccagaaaattaataatggagtaagattattactgttgtgctatgtccttgagtttcawtagaagaaagagtcacactgacttgaaattaatatttgttttggaaaacattgatggattctctaactgtatcttaccatctcttatcgcatgcttgcctgtcatcatccataaagtattcatatctgttaaatctccttgaggagtgagcctaatccttatgcgactgtcattgaaggccaagaattatcctgtgagggtgtttttggtttttttttttcaatcactttgattctttaagccatctttaccacccttaagccgttttgtaatgtctaaagctgcttgcacaaaaagctggaggcagtttgtgaactgcgtaaaagaaccaggcttaggagcctgtctaccaaaccatatacttttgcatggaattg

SEQ ID NO: 460835 - DNA, 515 bp, Homo sapiens
gatgcattttttttatatattggtagattaaatttgctaacattttgtcaaagatttttgtgtctattmcttagcaaaaaacttgataccaggttttggtatcaaggttaattgggaagtgtttactcttccagtattttttgaacgtgtgtgcttaatattggtaatatttcttcctttaatagttgatagaagtcaccagtgaaaccatatggttaaaaaagcaagaactaattttatctgtttacaagaagtacactgaaaataaaaggatggaaaataatctatcatgcaaactggaagcatatgaaagttagtgaggctacagctttatcagaaaaatgtaaaatataagacaaagactttaaaaagagagacagagatttttgataatgataaacaggataattcatcaggaagatgtagcaaccgtaaatgtgtttgcaccaagtaagagattctaaatgtacgaagcaaaaactcacagaaaaaaagagagaaatacaaaaatatgc

SEQ ID NO: 460836 - DNA, 515 bp, Homo sapiens
gatgcattttttttatatattggtagattaaatttgctaacattttgtcaaagatttttgtgtctattccttagcaaaaaacttgataccaggttttggtatcaaggttaattgggaagtgtttactcttccagtattttttgaacgtgtgtgcttaataytggtaatatttcttcctttaatagttgatagaagtcaccagtgaaaccatatggttaaaaaagcaagaactaattttatctgtttacaagaagtacactgaaaataaaaggatggaaaataatctatcatgcaaactggaagcatatgaaagttagtgaggctacagctttatcagaaaaatgtaaaatataagacaaagactttaaaaagagagacagagatttttgataatgataaacaggataattcatcaggaagatgtagcaaccgtaaatgtgtttgcaccaagtaagagattctaaatgtacgaagcaaaaactcacagaaaaaaagagagaaatacaaaaatatgc

SEQ ID NO: 460837 - DNA, 593 bp, Homo sapiens
tcaacttaaaactttttactattattaaaacgaggtaactaataaatgatatttgactacttgaataattttaaggaaaagatacaggcatatgtcaccatacagttttaaattaacttttaaaatttttatatgtagactggctatcaagcaatgctatgtacaaatgtcttgaggattatatattttaaaatttgtttaagttctaaaaaaaaagtgtgcttatagaaaatatagctacaaaattattaatttttcakcttctagttctcttttgcccgaaaagcaagttgattattttggttaaaggtggtaattaatataaaaaattgagataatgctagctataatgcttccataggaataaaaatatgcatacaaattataagtagcttgtaattttaataagctgtaaaggttattaatatgataaatttagtaatatatatatgaatgctgattaatttatttcttaaagctaatgtttagagttttcattttaccctttatttccctctactcatatatatttgtatatgtctaaataaataaacagagtattaaggattaattgaaagatttataataaaaag

SEQ ID NO: 460838 - DNA, 578 bp, Homo sapiens
cgaggctcttaaaccctaaaaatgtgtcacctttctattctggactaatactaagattatctcaaggtggcattttcttttactgcactaggcttaagaaattcagctttgcttcatcaagtctctgcttatctttaaaaaacattctttgtcctttagaaaatcaacagttgacatattaaaatgattctgtgtaattaagtaaaatatattagttacagggagatggattacataaggtaaagctatttaacagaatagatgcttacaaatagtcatgaaagaaaagaaaggaaaagaraattaacgtgtatttcataaccctgaggaatactatttgacttttaaataaattacctcatttaattccccaaaaatccagtcaattttccaaaattttaggtagaaatagaactggtaagattaaatatcttgccaaagcctccatgtttagttgtgataagtgggttgtgggatgtgataagagatcaggtcttctaactagcagtcttgtattgctactcttttttccaactctgcaatgctcaaatatttatgtagaattaaccccaagactt

SEQ ID NO: 460839 - DNA, 578 bp, Homo sapiens
cgaggctcttaaaccctaaaaatgtgtcacctttctattctggactaatactaagattatctcaaggtggcattttcttttactgcactaggcttaagaaattcagctttgcttcatcaagtctctgcttatctttaaaaaacattctttgtcctttagaaaatcaacagttgacatattaaaatgattctgtgtaattaagtaaaatatattagttacagggagatggattacataaggtaaagctatttaacagaatagatgcttacaaatagtcatgaaagaaaagaaaggaaaagagrattaacgtgtatttcataaccctgaggaatactatttgacttttaaataaattacctcatttaattccccaaaaatccagtcaattttccaaaattttaggtagaaatagaactggtaagattaaatatcttgccaaagcctccatgtttagttgtgataagtgggttgtgggatgtgataagagatcaggtcttctaactagcagtcttgtattgctactcttttttccaactctgcaatgctcaaatatttatgtagaattaaccccaagactt

SEQ ID NO: 460840 - DNA, 434 bp, Homo sapiens
gtccagctcagcagtatgtaattatagtgaagatagcagagagccagtgaagaattgtatacatattcagagtggaattttagaaacaactacgctggtagcactgtggtttcttttgattaaattctgtccaccagcaggaccccattatctgagcatrcttttttcattctattctcttaattcattcaaatcttgttgcctttcatcattttctaaataatttaattcagtaacaattacatttcatttcaggaagaaatgaataaatttcatttatggcacttattacaacatgaatcaggataagtatgtaaatattcaggatattgtaaattgttttttgaaattgtactttgatcccatatcatagactaacagtaaaaaaaaaattcaaaatggtaacaaaatcattccgtttttaaatgagcttc

SEQ ID NO: 460841 - DNA, 434 bp, Homo sapiens
gtccagctcagcagtatgtaattatagtgaagatagcagagagccagtgaagaattgtatacatattcagagtggaattttagaaacaactacgctggtagcactgtggtttcttttgattaaattctgtccaccagcaggaccccattatctgagcatgcttttttcattctattctcttaattcattcaaatcttgttgcctttcatcattttctaaataatttaattcagtaacaattacatttcatttcaggaagaaatgaataaatttcatttatggcacttattacaacatgaatcaggataagtatktaaatattcaggatattgtaaattgttttttgaaattgtactttgatcccatatcatagactaacagtaaaaaaaaaattcaaaatggtaacaaaatcattccgtttttaaatgagcttc

SEQ ID NO: 460842 - DNA, 518 bp, Homo sapiens
acattggtttgaacaaagataaatgtagttttttaatttatcacaagacctctgccttagttcatttgtgctgctataatgaaatactgagtaatttataagctgtggaaatttatttctcacaattctggaggctaggagtccaagatcaakgtgccagcaagttcagagtctgttgagggcccagtctccccttccaagatgatgtcttattgctgcatccactgaatggaattgttgctgtgtcttcacatggcaaaggaacagaagaacagagcctaaactggtttcctttagcccttttgtaaggcattaatccattcatgagggcggggtcttcatgacttagtcacttctcagaaggccccacctcttgatatcaccacatggggattaagttttaacatgaattttgaaggggacataagtcaaaccatagcaatttccatgagttcttaatatgctaatgcatatgggattatgatctcctctcagcttatgtctaagaggaagatgta

SEQ ID NO: 460843 - DNA, 589 bp, Homo sapiens
acctggccaggttgtgcaatggggctgggtgtgaatctggaagacaagagtcagacaatgagaccatatcgtacttggtaggtcataggaaaaattttggactttactttgaggacagagaggagtcattgaagtatttgcagcaagagagtgacataatcatatttgtgttttcaataggtcatctagctacrctgtggagtgagaacaatagaaagagaaacacaggaataaatgcaagagatgataatggtttgaactaggtcaataggcagttgcgatgaagaaaaacaggcttgttcaggaaatgtttagggtatttaatgtttaggagatggtgattgttaaatgtggaaagtgagagaattggaggaatcaaaattgatgccaaggtttctgtcttgagaaactaggtcagtggtactgctgtttgctgagattggtaacatgggaggaggaggtttgggtagaacagtaattgctaacactaagtaaatgcttacaacttgaagatacaattttaagtgttttgtatgtattctagtattttacagatgaggaaactgatagaggtaatataatgtgccct

SEQ ID NO: 460844 - DNA, 626 bp, Homo sapiens
atttttacagaaatgggagaaatgtttttttccgcaaattctggaagtttctgttctacactgtaatttgtgtaaaaatagaaaacatattatagctccatgtttcaagtgaggaggtaagcatgctagtagcattgaactgagacaggattgtatcctaattcgattctgccattccaaagctgtgtgatgatgggaaatctctcgcactttttgagcccattttcgaatttgctagatgggaataaaacctatttcacgtacttcgcagggctgtttaaggatttaatgatacaatgcgtgtgtgtgtcctactttaaagtattctagactgtataccaaaattaaatttctaagctttaaatattacaagaatgccttccaagggcactggataagctgttttgttttgttttgtttctgcgtttctctagtgcagtgcctggagatgaccaccaaacggaaaatcatcggccgtctggtrccatgccgatgtttccgaggtgaagaagaaatcatctcagttttagattactcccactgcagtcttcagcaggtgccaaaggaggtctttaacttcgaacgaacattagaggagctttatctagatgccaatcaaattgaag

SEQ ID NO: 460845 - DNA, 584 bp, Homo sapiens
tatccttttaaattcaatgcaccaaaattattmctgccataataaacattgttaaaaagcagttttaatagaattctttttagtcttttggtagttatggattaatcactttcgctaagcttaaagcaaacactaaatacaccatggaatactatgcagccataaataagaatgagatcatgttctttgcagggacatggatggagctggaggacattatccttagcaaatgaacacaggaacagaaaaccaaacactgcatgttctcatttataagtgggagctaaatgatgagagcacaaggacacatagaggggaacaaacgctggtgccttttggagggtggagggtggaggagggaagagatcaggaaaacaagttatgggtattagcctgatgaaataatctgtacaacaaacccccgtaacacaactttgtctatgtaacaaacctgcacatatatccttgaacttaaaataaaaagtttaaacaagcaattttaaatacttgaatgtcagacattttctgcttctcacttctcaattttccgctcagtcaaattttcttttatgtgtgcttcagtc

SEQ ID NO: 460846 - DNA, 581 bp, Homo sapiens
ttttaaaatttcatgttaacactaattcccttaagkgtttgtctttcataaacaaggaatgttctgtagccttggcataagtagccccacatatatctatggagggctctccttagatcctgggtttgaataaaggtctaaaaaatgaccttttaaaatgtctcactttctcaccaatgattttgtgcatgattctatcctccagtagaaaacttagattcacctgacgtaagtcatgtatccactcttcgattaatgtttccagaaatacaagaacctataactaacaaggctgcatgattttgtcccccagcgccaaatgtatacaatttttctgaatatataaaactacatccaggacaaaactatctcatatatatgcatatgtgatacataaatgatcaaaatttgactctgtttaatctctttcctaaagcatctttttttccatatatgttctttaattgcaattattttggcatttaaatgaatgccattatttctttcaataaataaataatgtagattaactctctaaagccccaaggaagagtgagatgaaggacatgaagattagcaaa

SEQ ID NO: 460847 - DNA, 578 bp, Homo sapiens
taatcactttcgctaagcttaaagcaaacactaaatacaccatggaatactatgcagccataaataagaatgagatcatgttctttgcagggacatggatggagctggaggacattatccttagcaaatgaacacaggaacagaaaaccaaacactgcatgttctcatttataagtgggagctaaatgatgagagcacaaggacacatagaggggaacaaacgctggtgccttttggagggtggagggtggaggagggaagagatcaggaaaacaagttatgggtattagcctgatgaaataatctgtacaacaaacccccgtaayacaactttgtctatgtaacaaacctgcacatatatccttgaacttaaaataaaaagtttaaacaagcaattttaaatacttgaatgtcagacattttctgcttctcacttctcaattttccgctcagtcaaattttcttttatgtgtgcttcagtctgcggcccagtctgactctgtcattaggatcactggctttctgtaatcatctttaagtttaaaaaccatcccagaagctgagatgccagtggctgc

SEQ ID NO: 460848 - DNA, 631 bp, Homo sapiens
ctaccttgaaagattgtcttactcctatcttatttttatcatctactgaccctgtggtaattcttcttcacgttatatattatataacataatatatgtgaaatgtgagtatggtgtctgcaaaacataacctttcaacaaatgacggtaattgctatgagctacaatacagtaaagaatacaaaaaagctggcctctccctataaaatgagaaatgatagttgcactttccagaaaggaagttatcttctattccaaattaacagtgatataaaatgaaataaatcttttgcagatgttttttcttcyaaaatgtatgtggaaattaattttaataaaatcctagagatatgtatcccttctatgcatagaggcaatttgttgtttctataacgaacctgaaacagcactaagagagttaagaccagtcagagattagaggaaacaacaatattctacctctttctttagaaccattttactgcttcttggtttcctggtaataatgcaacctcactaacttgctattgatttttcattttggggtgtgtgtgggtgtgtgtgtgggtgggtgtgtctgtgtgtgatatttactgcttcttgctttcctggtaacaatgcaacctcacta

SEQ ID NO: 460849 - DNA, 365 bp, Homo sapiens
tatctatcatgttactatttattttctctttaactcacctacttatatttttttctctcctttattaatttcttttggattttggaaataaacagatacttcttgttattccatttttaatttgttaatttattagatatgcattcttatactgttcttatagtggttactctagagatttcacattcatcttcaacttttacagtctaacatgaataattaytactagcaattccctgatattgctagaatcttagaaaattttaactccatcttgtgccattatgaagacatttttcacagtttaaggatgacttagaacctatttctattcgtgtttatatagtcaatatccatttatattt

SEQ ID NO: 460850 - DNA, 556 bp, Homo sapiens
tgtgtgttatatgtaaatagaggatttcaatttctaccattataacattctgagagatttcatcttgtggaaaagacatcagaaaaaaaatctcccttaagacagtgaaatggaygttatctggtaccgttaaaaactaacaacagtaaaatgctagaatgtttttcctcagacctgtatccttctggagacttcaagctgaagacatttaggaatcctccagaagtggacaaactttgagagtatgataaagtttttgccaaagaccctcagatcaagtagacaatggcaaggagtaaatatcttgcacctaatgccaacagaacaagaaccagatatctagagtcacagacagttatggttcaaactgcacgtttttattttcccagctattttctttcctctttcctgttttaaagttgtggattattaaccgattttttttttagctggtaactatgattcttgaaagtttctatccttaatattggtttttgcatttgtaggtattgatataattcaaatcctggcaggaatttaatttcttatgatttag

SEQ ID NO: 460851 - DNA, 417 bp, Homo sapiens
cagaaaaatcaaattaaaatttttatttacttatttatttgagatgaagtctcactctttagcccaggctggagtgcattggcatgatcttggctsactgcaacctccaccttctagtttcaagcaattctcatgcctcagcttcctgagtagctgggattagaggtgtgcaccaccacacccagttaatttttgtattttttgtagagacagggtttcgccatgttagccaggctgatctcgaactcctgacctcaagtgatccacccacctcagcctcccaaagtgctgggattacaggcgtgagccaccgtactgggccaaattaaaatgttttaaaaacatactaaatacaagtctggagaaatggccttagatgtcagaacaatgccaagttgctgcaaaagtttcaggatg

SEQ ID NO: 460852 - DNA, 417 bp, Homo sapiens
cagaaaaatcaaattaaaatttttatttacttatttatttgagatgaagtctcactctttagcccaggctggagtgcattggcatgatcttggctcactgcaacctccaccttctagtttcaagcaattctcatgcctcagcttcctgagtagctgggattagaggtgtgcaccaccacacccagttaatttttgtattttttgtagagacagggtttcgccatgttagccaggctgatctcgaactcctgacctcaagtgatccacccacctcagcctcccaaagtgctgggattacaggcgtgagccaccgtactgggccaaattaaaatgttttaaaarcatactaaatacaagtctggagaaatggccttagatgtcagaacaatgccaagttgctgcaaaagtttcaggatg

SEQ ID NO: 460853 - DNA, 617 bp, Homo sapiens
ttattattttaattttttattaaggaagtaataaaaatgattgtcaagggcagcatttcaggaaaaaaaaattgtgaaaggagaataaataatcttaggtatgtgtgtagggaaagcaggtgataagcattcatgcccagccctgagaatagcttcctggtaaggtctgtgtccaagtttgtcagtgatgccatgagccagccttgaccaaacatgctaggtgccaggtgatgctctgtgggttctctcatacaaccttcatgacgctctcaagcaacggtactgtattattcccatttcacagaagaggaaactgaggcatagaaggaatgactgatttgtccaacaccagggcaaggattttagattttattgtaagcataatggcaaagggactgtgtcagatgtcttgggggcctggtggaatcccaacccccagcctcactgcaaagcccatcgctgtaaccccggcactttcctgcctcctctgcttctgctstcacgtctgtgtccccagtcgggcctttctgaggcccactgaagggagtaaactcctgagacccatctctccaagtggggagtgaatgatggcaccggccctgataacaggaggtgtg

SEQ ID NO: 460854 - DNA, 597 bp, Homo sapiens
cttgttactcagtcttggccagaagtgaaaattccactgcattggttcatttgtaatttttccagagcatgggctaacagcagctgaatgtaaaataccaaacacaagcaaatgcagcaagcctggtatgagtacagttctgctcagaatgccctatcttcttcctcttcctcagtttggttacatgttctattttgggagaactaattttgcaattcctgccaatttttatgcattttgcccttgtttccataattcagcacctccatcatctcttcatcacctccatcaagatactttcacttccttttaaaagcaaagatctctatttaatgtaatgcttctcagtttattatttacatttttattttttcaccatgctatcatttttactgggattgtcactgctttggttaatgctctggttacaaagtggcattgctgtggggcagtcagctgtaaccctacttcttcccataagctctctgattttagtgcacrggtttgcataactcatggcctttcaagaaagcattatcacatgatggcagaaacacttgtctatattcttttcacagataacatcctatgcacact

SEQ ID NO: 460855 - DNA, 519 bp, Homo sapiens
ggtcccgagatgtctagatggggcaaatcacaagctaagtggtgacttggggaaccacacagatcacctcctttgggttcccccacctctggcttatttcatcagtgaggtatgtttcagagaacttgagtgataggtgtggccatagttgagagtggagcccagtggcctcctcatggtgaratggagtcatttccctatttctctccggtgatggcatctttcaggctgtcccagcccagccagttttgagcagtctaaatcttcctgatctcactgcatcggtcaagacaggagccagtcttggcatcctatgggttgttggactgaggccgagttccctaatgtgaatcagcaactcttctgcacacaatgaagtgggtgaagtttccccatgcatgtcagcattctcgcccctgtgcaacacctccagcctggggggtcactctcccctccccttcatgtgtgctggcaggcttgctgccttttgcttgagctaaagtcttctgaatttagaac

SEQ ID NO: 460856 - DNA, 519 bp, Homo sapiens
ggtcccgagatgtctagatggggcaaatcacaagctaagtggtgacttggggaaccacacagatcacctcctttgggttcccccacctctggcttatttcatcagtgaggtatgtttcagagaacttgagtgataggtgtggccatagttgagagtggagcccagtggcctcctcatggtgaaatggagtcatttccctatttctctccggtgatggcatctttcaggctgtcccagcccagccagttttgagcagtctaaatcttcctgatctcactgcatcggtcaagacaggagccagtcttggcatcctatgggttgttggactgaggccgagttycctaatgtgaatcagcaactcttctgcacacaatgaagtgggtgaagtttccccatgcatgtcagcattctcgcccctgtgcaacacctccagcctggggggtcactctcccctccccttcatgtgtgctggcaggcttgctgccttttgcttgagctaaagtcttctgaatttagaac

SEQ ID NO: 460857 - DNA, 519 bp, Homo sapiens
ggtcccgagatgtctagatggggcaaatcacaagctaagtggtgacttggggaaccacacagatcacctcctttgggttcccccacctctggcttatttcatcagtgaggtatgtttcagagaacttgagtgataggtgtggccatagttgagagtggagcccagtggcctcctcatggtgaaatggagtcatttccctatttctctccggtgatggcatctttcaggctgtcccagcccagccagttttgagcagtctaaatcttcctgatctcactgcatcggtcaagacaggagccagtcttggcatcctatgggttgttggactgaggccgagttccctaatgtgaatcagcaactcttctgcacacaatgaagtgggtgargtttccccatgcatgtcagcattctcgcccctgtgcaacacctccagcctggggggtcactctcccctccccttcatgtgtgctggcaggcttgctgccttttgcttgagctaaagtcttctgaatttagaac

SEQ ID NO: 460858 - DNA, 252 bp, Homo sapiens
tcatagggcatgctggtatggacaaagttggatactgttaatcagcacagcccttcccactggagctctgcttttgattttacacaactccagggggcaccattcacatcaaagtcatcatagactcagtcatcagaccattttcaacatawggcgttaaggtgtcttgagaaagtgagaggcctttttctagcggggctgctttccatatgctctggtccacccttccaagaaccacagatagcccatgaa

SEQ ID NO: 460859 - DNA, 539 bp, Homo sapiens
tgagccaccgtggccggccaaggctgaagcttttcatgccttctgaagaggaaaggctaaaaacgtcacccttaaagggggacagaaaaccctgtgtgaaagaccttttccagaggcttttagtgcaggcacttcagcgaggtgagcctcagggttctcatctgtgacatgggcattcacctgccctgcccccagggatgagaggatggtgtgtttctgtagccatcacaccaacaggtgtcttatacagagcctttgaggctgcctgtgagttctgcccattctcccccgacagaagagctgactcatgagtccaagagtcatggaacaaacagatatctgtgtggatggtcactaaaaaggcaagtcagggaacatgtggtgatcccagccactgctactttgaatgacaccyagttccatttaaataagaaaccccagaagcacagtggagatctcccccttgaaaccacagcatatccacaaaaaaaaaaaacccatctaggaatttgatgtgggctcagctgtgtctgaggcag

SEQ ID NO: 460860 - DNA, 628 bp, Homo sapiens
gcgacaagagtgaaactctgtctcaagaaaataaataataaaatactgtgcagcagttccctggcagatattatgaaatgtgccaggctgggaggctcaagactctataaattgctgaatctgtgtcccctgcttcactcccagcaagagagaagtaacagaggtgagagtaagaagaagaatgatactagtagtgggtgacatttgttccagcatttctgagttccaacacgttatggtactcaacacattaaatgtattaattcatgtggttctcacaatggccctggaagatgggtgctatttgaagacccattttgcagatggagamactgaggcacagaggcactaagtcacttgcacagggtcacatagccagtaaatagcagattcaaactcagtcagtccctattctgtttctttttaactttctattttaaattaagtttagacttacagaaaagttgcaaagatagtacagagttccctgaagcccttctcccgctttccctaatgtgaacctcttacataaccatcgggcagtgatcagaactagaaaaatgacataggtgcagtgcttttaactaaactacagactttatttggattttaccagtttttccagaaa

SEQ ID NO: 460861 - DNA, 627 bp, Homo sapiens
tgcatttaaaactcaggagattttacatacaaatccagaagccctggctacattagactcacattcttatggggcagaggttggctggagctgaatagtgttctatcagtgaggaatgcttttagctgcaagtaataacaagcccaactaatattggctaaactataatcacgttcattgtgtatttaacaagaactctctaccccaaggttcgtttggcatctcaattatataatcaaaaatcagattcattttatccttctcccattttggcctcagcatatgagccttttgcttctactctcatggcttcatggcccaacatggctgcagtcactccaggaacatcctcacatgactcgggaggaggtgtggggagtgaaacaaaagaatagtctttcccagaagcccccttggccaaaactagataatatgggccattctgaagaaggatccagcatcacatcctgcaagggaggccaggaatgcaagactyagtcttcatcagcctgggcagagggaagctatcaggggagcgaggaatcaggcatgcctgttgggaggccaagtggtatctgccacaaaccgctgctccctaaatacagcttggcattccagtttgccaca

SEQ ID NO: 460862 - DNA, 579 bp, Homo sapiens
ccactaggtagttttccagtcctcaccttccttccatcctctaccctcaagtaggtccttgggtctattgttcccttctttgtatccatgtgtactcaatgtttagctcccacttataagtaagaacatgtggtatttggttttctgttcctgtgttaattcacttaggataatggcctctagccctatccatgttggttcaaargacatgatcttattttttatggctgcgtagtattccatggtgtatatataccacattttctttatccagtttgccattgatgggcatctaggttgattctttgtctttgctattgtgaatagtgctgcaatgaacatacacatgcatgtgtctttatggtagaaaaatttatattcctttggatatatacccagtaatgggattgctggtatatatccaaatggtagtttcattttaagttccttgagaaatcttcaggccgctttccacagtggctgaactaatttacattcccatgaacaatgtataagcattcccttttctctgtaaccttgccagcatctgttattttttgactttttaataatggccat

SEQ ID NO: 460863 - DNA, 591 bp, Homo sapiens
cttgctgctgtaacaaattattatgacctttgtgtcttaaaacaacacagtgatattttacagttctggaggtaagaaatgcaacatggctctcactgaactaaaattgaggggtcagcagggttatagtattggaggctccagaggagaatcacttccttgcccttctacctgcagaggccacctgccttccttggctcatgaccctgcatcattccagtttctacttacattgtctcatctccttctctaactcctgcccccgaccccttataaggactgttgtgattccactgggcccactcagagaatccaggatcatctccccatctcgaagtccttaagtcagtcacatcaagaatatttattttttwaaaaaagaatatttattgcagcagcatcatagcaaaaggctggaaacaacctggataccatgccattaacaggaaacaggttaaatcaatcatggtgcatccaccagtagcatactatacagctgttaaaaagaataagttagatatatttgtgctactatgggtttctctttgagctattgtgataggttaaaaaaaaaaagcaggaggcagaatt

SEQ ID NO: 460864 - DNA, 557 bp, Homo sapiens
tacaaacaagtatattcagtatttatcaaaaccatgcaaagcccgggcgaggtggctcatgcctataatcccaacactttgggaggccaaggtaggcagatcacctgaggtcaggagttcaagaccagcctggccaacatggtgaaaccccatctctactaaaaatacaagaattagccagtgtagtggcgggtgcctgtaatcccagctactcagggggctgaggcaggagaatcacttgagcccaggaggtggaggttgcagtgagctgagactgcgccattgcactccagcctgggctacaagagcgaaactccatctcaagaaaaaaaaaatcaaaaatactctatgtttacttctataaaggagttagattctaggctcagatcattagaaacaggtttttcacaacrtgagtgttcatcaggagatatgaaagtcacatgggttgtgggacaatttttctttctgtacaacttcctacagtgcattagaagacattaatatccttggcacccccaaataccactatccctctcaactattacaacgaacaa

SEQ ID NO: 460865 - DNA, 613 bp, Homo sapiens
aggaatccgtggagaccataagtgggaatataattctacgtggcatgacatcttatgaatcttcccccattactactgtgacttaattgtttttcmcactacatattacataccatcccactgacaaccttattatttaagcatatcacacactcctgcagttcctttgcactttctttctctgcctggagtgtgcttctgtaaatgtcagttactgactttcctacctccttcctgtctttgctcaaatgtttccacagcagatgagcaggcctttcttgatcactgtatgtaggtaaagttacaacctctaccacatcttctaactcctttttgaatttattgtacttcacatcatttagcactatcttacagaacataggtatgttttattttatttctatcacctgttacttggatgaaagttctcagaaagtaaaaacttccccagttcctgtaacaatgcatggcacacaatactcatgcaatatttaatgagtgagtaaaagaaacctgatatccatgatacaggggcatgttgagagtaaaaacaagcatccagagcacttgcagaaaataatcttacagggaagaggtcaagaactcagtcata

SEQ ID NO: 460866 - DNA, 573 bp, Homo sapiens
tctaaatttttaaaataataatgtttagatgcccgcagcagtcctcttatctcattatttctatccttgttacagaagtggggatatgcgatctcagaatatttctttttcttttcttttttcttttttctttttttttttttttttttttgagacggagtctcgctctatcgcccaggctggagtgcagtggcacgatctcggctcactgcaagctccaactctcgggttcacgccattctcctgcctcagcctccsaagtagctgggactgcaggcacccgccaccacacccggctaatttttttgtatttttagtagagacgggatttcaccgtgttagccaggatggtctagatctcctgacctcgtgatccacccgcctcggcctcccaaagtgctgggattacagctgtgagccaccgcgcccgacccaatctcagaatatttctaagaactaaccattgagcttaaaggagaaaataattttaagtaagattaaactttctaattacccagattatggttttgtctttcctagggcattcaatggatgtagagagcagtaagttct

SEQ ID NO: 460867 - DNA, 573 bp, Homo sapiens
tctaaatttttaaaataataatgtttagatgcccgcagcagtcctcttatctcattatttctatccttgttacagaagtggggatatgcgatctcagaatatttctttttcttttcttttttcttttttctttttttttttttttttttttgagacggagtctcgctctatcgcccaggctggagtgcagtggcacgatctcggctcactgcaagctccaactctcgggttcacgccattctcctgcctcagcctcccragtagctgggactgcaggcacccgccaccacacccggctaatttttttgtatttttagtagagacgggatttcaccgtgttagccaggatggtctagatctcctgacctcgtgatccacccgcctcggcctcccaaagtgctgggattacagctgtgagccaccgcgcccgacccaatctcagaatatttctaagaactaaccattgagcttaaaggagaaaataattttaagtaagattaaactttctaattacccagattatggttttgtctttcctagggcattcaatggatgtagagagcagtaagttct

SEQ ID NO: 460868 - DNA, 550 bp, Homo sapiens
taatgatcaactgtatgccaacaaacttgaaaacctagaagaaacgaatgaattcctgaatgcatacaacctaccaagattgagccatgaagaaatagaaaacgaasgccaataatgaggagatttaagcctgatgttaaaatctcaaagaaaaatccagtacctggtagattcactgattaattccaccaaacatttaaagaagaaccaatactaattctacctcaaatttaccaaaacaattgaaaaggaaggaacacttccaaactcattcaaaaagatcagcatactctgataccaaaaccagacaaggacacaacaacaaaagaaaactacaggtcaatatccctgatgaacatagatacaaaaattctcaacaaaatactaccaaaccaaattcaacaacacattaaaaagattactcaccatgatcaagtgggattcgtcccagagatgcaaggatgtttcaatatatgcaaatcaataaatataatacaccacattaacagaatcaagaacaaaaatcatatgatttctatttcaatatatg

SEQ ID NO: 460869 - DNA, 553 bp, Homo sapiens
tagttcttgtgccatggttttcagctccatcaggttatttaagatcttctctaygctgtttattccagttactcattcgtccaatctttttccaaggtttttagcgatgggttcgaacatcctcctttagctaggagaagtttgttattaccgtccttctgaagcctacttctgccaactcttgaaagtcattctccatccatctttgttccattggtggtgaggagctgcgatcctttggaggagaagacatgctcgggttttgagaattttcagcttatcttctctgttttctccccatctttgtggttttatctacctttggtctttgatgatggtgacctagagatggggttttggtgtggatgtcctttttgttgatgttgatgctattcctttctgtttgttagttttccttctaacagtcaggtccctcagctgcaggtctgttggagtttgctggaggtcctctccagacccgtttccttgggtatcacccacagaggctgcagagcagcaaatattgcagaacagcaaatattgctgtctgatc

SEQ ID NO: 460870 - DNA, 597 bp, Homo sapiens
aatctgtaattaaaaaaagaataaagcctaatgtagagcatattctagactttacatagtatcaaaacacgcacactctgcgaaatgcttacacagttttacttaatttcttatttactcaaaaaatatagataagaaatatatatgaaagcataacaacttctttatgagacaaaataacaatgattcgtgcttctgcaaggaaagaatatgactttggagttagatgctcttggctttaacccttagatcatatatttttatatatcaactttggataagccactgaaactctctaaacttctgttttctattccaagtgggtgtgatgatcttgattcataagattatcaggaggattaagtaagggattacttgaaagcacctattccactactttacatatcacaayactgaatatagtttagtttcattctaatcatatacattcaaagcaaagttgaatagaattaggttaaaacttgttcgctttattttacaatatcaaatccttatatttaagtaaaaaaatgtatgtgcataatttatttgtttctaatcacttcccaatagtggttcagtaagtttttgatgaag

SEQ ID NO: 460871 - DNA, 583 bp, Homo sapiens
ccaatttactgtattagttcgttttcatgctgctgatgaaaatgtacctgagactgggaagaaaaagaggtttaatgaactaaagctccgcatggctggggaggcctcacaatcatgacataaggcaaggaggatcaagttacgtcttacgtggaaggcagcagggaaaaaaaaagagcttgtgcaaggaaactcccattttttaaactatcagatctcatgagactcattcactattacgagaacagcacaggaaagacccatcaccataattcaatcacccatcaccagattcctcctgtgatatgtgaaattgtgcragttacaattgaagatgagatttgggtagggacatagccaaacgataccaccatatctttttctttctttcttatttattgattgatttatttttaagaccgggtctttctctgtcatccagactggcgggatcacagctcactgcagccttggcctcccaggctcaaggagtcctcccacctcagctttcctgagtagctgggactacaggtttgcaccatgatgcctggctactttttgtattttttgtagagaaggggtt

SEQ ID NO: 460872 - DNA, 600 bp, Homo sapiens
agagtttaggaactattaccatttacattatgtagtaaaatttggaaattattcaatgttttttattaagggaagaatctgaatgaaaatattmtatatacttaagacttgagaaagacaagcatgggggataatggtattggaaagaaaacctgtatggaagcagttgtaatcatcaagtcatgaaaaaagagggtcaaaactcaagaaaacatataagaaatggaaatgaaggggttgacaaaaggaatgtcactttgacatgtgccattcatatccttttgggccttattcatattaggaatatttcaagctcattgaacagaaactacgatatctattgggttgtgtgctgtgcaaaacctattttctatgctcaataaatgttcaaccataatatcaatgaagaaatacttgacataagcacaaagactttatgtaggaggaaatcatttgtagaatcattaattaactctgtcttttgaataattttccatctttttccatttttcttgttagggaaatggcatctccattcatcaaatagatattcaatgtcagcaaatcaccctactaagaaccagggtgacaagaataagt

SEQ ID NO: 460873 - DNA, 566 bp, Homo sapiens
taaaacacccaactaagattattctttcagcattttgcttaattgctttatttaagtgtcagttatgctttttcttgtttgcataaaggattatccaacacatcccagcaaaggcatgattttatttaggtaacatggttagaagaattaatatattagaacagaactatctagtagaataataatgcaaattgtaaaggagtgccacatgtgtaatttgaaattttttgatagatatatttaagatagtaaaagaaaaacataaaagtaattttagtaccatactttatttagccccaaatatctaaaacattattacgccaacaaatagacaccataaatattattgaaatattccacatgactttttkatactaagcctttaaaaaccagtatatatttcacatcttcagcacttctcagttttactggccacataatagtgttcaattgctactgtattggacagagtagcactagaaaattgaaaaaagttcagctgattttaaaaaggtgctgtagtaaagagaattgtttgtgaaatacagagtaatagagaactgtta

SEQ ID NO: 460874 - DNA, 549 bp, Homo sapiens
ataataattggaattttgattgggattttgatgatccaaagattaactagagaatagtggactcttactactatkatgcctcctagtccatggacatattatatttctctattatttaggtcttatttaacttctctcaacaatgttttgcacattattcgtttgatttattcataagtttttaaatgcactatgctattggaaataaaataatttaaaatgtaattttccaaagttctattattagcatacataaatgaccaatttttgtatattgactttgtatcatttaattttgctaatctaactttaattctagtagtttttggtaggatcttgtgtattttcaatatagacagtagttcatatatctatcatgatggataataatattcaatcctaaaaacaactcatcctagtagactctattttctttatttcataaaaagagaaaatgagtcaagtgttacgtgacttgcctgaagcctcctcactcacaggtgctagagctgggattcacattggatacatctgaccccacagccagag

SEQ ID NO: 460875 - DNA, 577 bp, Homo sapiens
tggcatggctcaaatggtgagcaatggctagggaggttgackggctctgtgtctgggttcaatcttgtggcatctgctggagttgggttttccaacatgtctcctgcactacactggctggcactgctcctgctctctatacacccagattgggcttcctcgcagcatggcaggctcaggacagttggactttttgcatcccagctgcatttccctgatctagcattcaagaagacaaagaaggaaactaaacgacttcttatgactcagcctcagaagacatatatatagcctggaaattagggatacgattcaactggaaaaacaaaaacattgtgggcaagagtagatgagatttattccacaaatggagaggttataattagctttcagcttagtaggtctatttatgatcacagcaggaaaggtagaacacatgggcatagtggcgtgaatgtggggatttagtaatgagagaatagaagtttctcttctatttgactcaattttctctgttaaatgagaagaaaagccaacagttgaaaacagggcgtcagtgggcttgagttagaagatg

SEQ ID NO: 460876 - DNA, 518 bp, Homo sapiens
ttttcaaaataaagtaaatgtggttccacaatgtaattgtttttttctctcgctagattttagttttcccaagtcatccaatttttctgtatggtgaagccagagcccaaaaattcttggatatccttataaggtaaatagtagggtgcaggtcttcttgtgaattctgaatggtctaaggaaagggtgacttcacagtcaaagctgtgccactgatggcctgamcagaagatgaaaagagggactagaggtaactgagagagggttagggaaaccagcatgatcccaggtgtgtaatatcagctttggaagatgatcaggctttcatcaagctaaaaggaaatgggctacctgccttaccagccagaatctttagcagaatttccagcagaatgaccagaaagcaactttaaccaagtactctacagagatcagttggaaagcacagaacagggtgatgagtggaagacccctactcttgtactgccaagtgatagagcaagcccctcacagacaca

SEQ ID NO: 460877 - DNA, 534 bp, Homo sapiens
gacttgggaccttgaaggagcccagggcactggtaggactactgacagataagtgggctgtgttgtgtgtgacctgtatattgggagggggtaagggaagaggctggagagaaaggctggggctctgttatgaatgatactgtataatactcaaaggaaattggcttttctcctgaaagagatggattcattaaggaaatttagattgtgacttyaatgttcgttttcatgaacatcactgttcactaaaatcaaaacgagaaatatgtttggagaaggcgttaactagattagtaaatgttgattcttgttagcttatcagctaaaatattgcatagtggcaaggaagagcaaatagcttggctggaatgtaggtttcatttatatcaggaaaatcaggctgtggagtctagaaactcctacgtaggttttacctaggagtgtgactaatggaatagagaagtttaatagcaccagcacatttcagaaggctgctgaatagtagacagttgcaaatacattatattgagggat

SEQ ID NO: 460878 - DNA, 530 bp, Homo sapiens
tttaagtaggtaaatagcagtaaaaactagaaatgacagaaaaaaggcctagtacatgtaagaatttagtatatgataaaggataaacaaaagtattacgtaatatatgkttctgggacaatagtttacacagtgcgatatacgttcacttagatatttactttctgaatagtttctagacatgttaaataattaaatattaaaataatcaactggaaaaatagataagacttttttaaatggaaaaagcacataataaatttataaaattaaaatttataaatccatacatcttttgtttgttaaaaatttatactctgggggacagccaatatggctgactagatgcagccaggaagagcttctcccatagagagagaccagaccaagtagactggcacactccaaacggatctttggaaataaagcattgggagtggacagagggaggatgcagaccctgggctgaaacagaaggaaactgggaactcttcacagggttgccaagtagctggactcgttcctggcct

SEQ ID NO: 460879 - DNA, 622 bp, Homo sapiens
caaaagcaattgcaaaaattgacatgggtgtctaattaaaccaaatattttctgcacagcaaagaaactatcaacagagaaagcagacagctacgcatctgacaaataatctataaaaaaacttaaatcaacaatcaaaaagcagacaacattaaaaatgggcaaaggacatgaacaaacacttctgaaaagaatacatgcatgcagccaacaagcatatacaaaatgctcaayatcacgaatcattagagaaatgcaattcaaaactacaatgagataccatctcacaccagtcagagtgactgttattaaaaagtcagaaagtaacaggttgatgaggtcgtggagaaaaaggaatgcttatacacttctggtggggatgtaaattagttcagctactgaagagtgaagtttggagatttccaaaagaacttagaaccaccattccacacagtaatctcattactgagtatatacccaaaagaatataaaccattttaccaaaaagacatatgcactcgtatgcacatcacagcactgttcacaatagcaaagacacggaattaacctagatgctcattaatagtggaccagataaagacaatgtggtacatatatacca

SEQ ID NO: 460880 - DNA, 585 bp, Homo sapiens
attaaataaccagtcagtgtaaaggaatgaaggattagccccatttcctcaattagggcaattctgatggacttgcccaagtcaagagctcctcattggattgtctgaggcttctaactacagcacaatccagctccttcctctgcccaaccctgcttctctcatttcctggaggttttgtttcagggtgcattcctcaataaaacttcttcatacaaacttctccctttgagtctatctccagggactctamgtaagataagtggcaacaaaagtagtccaaggaaaataacacaaaatgggattaggatttctgacaagatggctggcaatgaggaccccattggtggtaagtgttaaactctgcggcggtgcaattttaaaaatatttactgatgcaaagtctgaagctgtggaaataaattcactaactgatgaaatagccaaggcatttgagaagtatgagtgaagcactagctataaagaccatgaaatcggacggccaatggagccaaaaccaagggtattctgaaacagtgtggaagtcagaggctctccaaggcagccataaagaaactttatccc

SEQ ID NO: 460881 - DNA, 585 bp, Homo sapiens
attaaataaccagtcagtgtaaaggaatgaaggattagccccatttcctcaattagggcaattctgatggacttgcccaagtcaagagctcctcattggattgtctgaggcttctaactacagcacaatccagctccttcctctgcccaaccctgcttctctcatttcctggaggttttgtttcagggtgcattcctcaataaaacttcttcatacaaacttctccctttgagtctatctccagggactctacgtaagataagtggcaacaaaagtagtccaaggaaaataacacaaaatgggattaggatttctgacaagatggctggcaatgaggaccccattggtggtaagtgttaaactctgcggcggtgcaattttaaaaatatttactgatgcaaagtctgaagctgtggaaataaattcactaactgatgaaatagccaaggcatttgagaagtatgagtgaagcactagctataaagaccatgaaatyggacggccaatggagccaaaaccaagggtattctgaaacagtgtggaagtcagaggctctccaaggcagccataaagaaactttatccc

SEQ ID NO: 460882 - DNA, 585 bp, Homo sapiens
attaaataaccagtcagtgtaaaggaatgaaggattagccccatttcctcaattagggcaattctgatggacttgcccaagtcaagagctcctcattggattgtctgaggcttctaactacagcacaatccagctccttcctctgcccaaccctgcttctctcatttcctggaggttttgtttcagggtgcattcctcaataaaacttcttcatacaaacttctccctttgagtctatctccagggactctacgtaagataagtggcaacaaaagtagtccaaggaaaataacacaaaatgggattaggatttctgacaagatggctggcaatgaggaccccattggtggtaagtgttaaactctgcggcggtgcaattttaaaaatatttactgatgcaaagtctgaagctgtggaaataaattcactaactgatgaaatagccaaggcatttgagaagtatgagtgaagcactagctataaagaccatgaaatcggayggccaatggagccaaaaccaagggtattctgaaacagtgtggaagtcagaggctctccaaggcagccataaagaaactttatccc

SEQ ID NO: 460883 - DNA, 559 bp, Homo sapiens
ttgtaaacaaccaaatctcataataactcactcactatcatgggaacagtaagggagaaatccacctccatgatccaatcacctcccaccaggcctctccatcaacactgaggattagaatttgatatgaaatttggatggagacacaaattcaaaccatatccatgcccaagtgttaattacaaagttagagaatctccagagaagattaaaatttcarctccagcagatctgctacacaagttggaggtctgatggactctgacacttcggataagaacatctgggtcaatgcaccagaaattctggactccgtagattcttccaaaccctctgcactgaagaatgtgtccctgtttctcctttaaaggctagtgctccccttgctttataatggcacagaagcctctgctttgcagactataaatgtttccttagagtctacctatatatacctgcctcttttgctgaccaccagccccagaatttggagtaaatctaagcatattctaattgagaaattgcctggcctccaaggggagaataactagaaaagctg

SEQ ID NO: 460884 - DNA, 559 bp, Homo sapiens
ttgtaaacaaccaaatctcataataactcactcactatcatgggaacagtaagggagaaatccacctccatgatccaatcacctcccaccaggcctctccatcaacactgaggattagaatttgatatgaaatttggatggagacacaaattcaaaccatatccatgcccaagtgttaattacaaagttagagaatctccagagaagattaaaatttcagctccagcagatctgctacacaagttggaggtctgatggactctgacacttcggataagaacatctgggtcaatgcaccagaaattctggactccgtagattcttccaaaccctctgcactgaagaatgtgtccctgtytctcctttaaaggctagtgctccccttgctttataatggcacagaagcctctgctttgcagactataaatgtttccttagagtctacctatatatacctgcctcttttgctgaccaccagccccagaatttggagtaaatctaagcatattctaattgagaaattgcctggcctccaaggggagaataactagaaaagctg

SEQ ID NO: 460885 - DNA, 559 bp, Homo sapiens
ttgtaaacaaccaaatctcataataactcactcactatcatgggaacagtaagggagaaatccacctccatgatccaatcacctcccaccaggcctctccatcaacactgaggattagaatttgatatgaaatttggatggagacacaaattcaaaccatatccatgcccaagtgttaattacaaagttagagaatctccagagaagattaaaatttcagctccagcagatctgctacacaagttggaggtctgatggactctgacacttcggataagaacatctgggtcaatgcaccagaaattctggactccgtagattcttccaaaccctctgcactgaagaatgtgtccctgtttctcctttaaaggctagtgctccccttgctttataatggcacagaagcctctgctttgcagactataaatgtttccttagagtctayctatatatacctgcctcttttgctgaccaccagccccagaatttggagtaaatctaagcatattctaattgagaaattgcctggcctccaaggggagaataactagaaaagctg

SEQ ID NO: 460886 - DNA, 623 bp, Homo sapiens
tctcctggaaaaggtgctaagctgctactagtgtggctcttggaagcttgtaagaaatggtggttgggtctcaatgaaagaaaaatgcagacccccatgggagatgatggaggaaagcttacaggccctgaggagtgggcatgctagtgaatacaacacttgaggccagaaccccrgctgagcataacccatgggacatcccaaaggatgctctatataccaaataaagagtgtgctgtgtgtggaaggcagcattatcaagacactcagtatggcggtcctccgtgggaaaggctgtgatggaatgcagctcacaagtagcaaaaggaagaacagaatctcaaagtaacagaagctgcgtagcacacacaagtgaaaacatgcaacagacagaaaaatctggaggtcagagaaaggtcagaatggtgaagaaagggagtagtaggggctgtcctgtattcggtggtattttaatttggcattaatttttgcaactccaaaaattccaattccaccatctccacagtttggagtaaatctcagcatattctagaactataccttttagcaagacttttccatgtgagccaaaagatatgtataaagatgtgtaagataacagc

SEQ ID NO: 460887 - DNA, 623 bp, Homo sapiens
tctcctggaaaaggtgctaagctgctactagtgtggctcttggaagcttgtaagaaatggtggttgggtctcaatgaaagaaaaatgcagacccccatgggagatgatggaggaaagcttacaggccctgaggagtgggcatgctagtgaatacaacacttgaggccagaaccccggctgagcataacccatgggacatcccaaaggatgctctatwtaccaaataaagagtgtgctgtgtgtggaaggcagcattatcaagacactcagtatggcggtcctccgtgggaaaggctgtgatggaatgcagctcacaagtagcaaaaggaagaacagaatctcaaagtaacagaagctgcgtagcacacacaagtgaaaacatgcaacagacagaaaaatctggaggtcagagaaaggtcagaatggtgaagaaagggagtagtaggggctgtcctgtattcggtggtattttaatttggcattaatttttgcaactccaaaaattccaattccaccatctccacagtttggagtaaatctcagcatattctagaactataccttttagcaagacttttccatgtgagccaaaagatatgtataaagatgtgtaagataacagc

SEQ ID NO: 460888 - DNA, 623 bp, Homo sapiens
tctcctggaaaaggtgctaagctgctactagtgtggctcttggaagcttgtaagaaatggtggttgggtctcaatgaaagaaaaatgcagacccccatgggagatgatggaggaaagcttacaggccctgaggagtgggcatgctagtgaatacaacacttgaggccagaaccccggctgagcataacccatgggacatcccaaaggatgctctatataccaaataaagagtgtgctgtgtgtggarggcagcattatcaagacactcagtatggcggtcctccgtgggaaaggctgtgatggaatgcagctcacaagtagcaaaaggaagaacagaatctcaaagtaacagaagctgcgtagcacacacaagtgaaaacatgcaacagacagaaaaatctggaggtcagagaaaggtcagaatggtgaagaaagggagtagtaggggctgtcctgtattcggtggtattttaatttggcattaatttttgcaactccaaaaattccaattccaccatctccacagtttggagtaaatctcagcatattctagaactataccttttagcaagacttttccatgtgagccaaaagatatgtataaagatgtgtaagataacagc

SEQ ID NO: 460889 - DNA, 623 bp, Homo sapiens
tctcctggaaaaggtgctaagctgctactagtgtggctcttggaagcttgtaagaaatggtggttgggtctcaatgaaagaaaaatgcagacccccatgggagatgatggaggaaagcttacaggccctgaggagtgggcatgctagtgaatacaacacttgaggccagaaccccggctgagcataacccatgggacatcccaaaggatgctctatataccaaataaagagtgtgctgtgtgtggaaggcagcattatcaagacactcagtatggcggtcctccgtgggaaaggctgtgatggaatgcagctcacaagtagcaaaaggaagaacagaatctcaaagtaayagaagctgcgtagcacacacaagtgaaaacatgcaacagacagaaaaatctggaggtcagagaaaggtcagaatggtgaagaaagggagtagtaggggctgtcctgtattcggtggtattttaatttggcattaatttttgcaactccaaaaattccaattccaccatctccacagtttggagtaaatctcagcatattctagaactataccttttagcaagacttttccatgtgagccaaaagatatgtataaagatgtgtaagataacagc

SEQ ID NO: 460890 - DNA, 579 bp, Homo sapiens
caattctcaggagactgagggaactggaagtcatgagtggggcttcattgaattttgatgccaagaaacatggtaggtctgaatgaaaataagtcacagtatggttggcataatttgactttgcttcttttgctgactgaagccttctcctacaaccatttcccctccattcctagctcaccactctcatctccctcacattctctaagacaactctagagtttgtgtagcttgttttccctttcattcttgcctctccccacgccctgacttttttccaatttattaagtcatgctattcatcacaccccaactcaattttataaagagaatgtagtgaaaactgtagtaactgaaaaggaagtagagcattataaatactcagaaaagctctggatcattgggtggtttcgcaagcaaacaattattactgctgagacatttaatcttatgaagcaccagaagagtttcacaagcttttaaaattttgtgcatataaatgcaaggagaaagagctgagtgcaagcacaaatgatrcatatttttaaaatatctaagcaaagaacaaaagatgattac

SEQ ID NO: 460891 - DNA, 590 bp, Homo sapiens
gggaagtttcctggggaacacacagagcactgcttgaacctacatggagcctaaaaggcagcaatcagtgtgctgggcagatggagcaaaacgtgaatctgggccccacctcccaagtctctgtctcctgccgtgaacagctgcagctcttgctgtatgttaggttgggagagagtgtggccagggtatgcccacatacccaagacaggcctcactgacattgtcatgggacyaaggggcatctgatcacatgcccccttgcccgctggtccttcccaagactgcctgcttggcctttcccaccatggagggagtgggtagaaagcatggcttccattgcccgactcagtggtttgttcactgcctgagagcagttcaacaccccatcactgctggtacttgaccccgaggaggcaggggacaaatctgctggcctggtctcagttccccaggacttgagcacaccacccacgaatatggggatgagatatgtggcctgatctccagcaggggaggagcccccactgttaaaacacagaagagtgtgactggtttctgcagcaggtctggaatgtctagaatggcacagc

SEQ ID NO: 460892 - DNA, 612 bp, Homo sapiens
ccaaaaaaggggtgagtgaaggaccctggtgtacctcattcccatcgtggacctctgagatcctagctacaggagttcccatgatcgctccagacatttagcatgggaagtttcctggggaacacacagagcactgcttgaacctacatggagcctaaaaggcagcaatcagtgtgctgggcagatggagcaaaacgtgaatctgggccccacctcccaagtctctgtctcctgccgtgaacagctgcagctcttgctgtatgttaggttgggagagagtgtggccagggtatgcccacatacccaagacaggcctcactgacattgtcatgggaccaaggggcatctgatcacatgcccccttgcccgctggtccttcccaagactgcctgcttggcctttcccaccatggagggagtgggtagaaagcatggcttccattgcccgactcagtggtttgttcactgcctragagcagttcaacaccccatcactgctggtacttgaccccgaggaggcaggggacaaatctgctggcctggtctcagttccccaggacttgagcacaccacccacgaatatggggatgagatatgtggcctgatctccagc

SEQ ID NO: 460893 - DNA, 458 bp, Homo sapiens
aggttttattttgtctattatggattcaaaacttgagaagctctcgtgaggacacrgttccatctctgccatgtctgagcttgctgtacttttcaggggtctgttgtcagaatgtctctcttcttatgacaacacggctagctcagggcttacataccattctctcgtcctagaagttctaaacattctaagattgagcctcactagttctttttgaactacacaatcactcccactaatcagatgggctattgactgagcaagcctggtcatgtgttcacctctggatgatatggaagttcatgttggactgtgaaggagtgatgaggtccattccctttcttcccactggcaacaactgctctctagatttttatatttccttatagtgttactgcttctatgaatccttaaacactgtggcattggctgtttggggattttatataaatggaatt

SEQ ID NO: 460894 - DNA, 458 bp, Homo sapiens
aggttttattttgtctattatggattcaaaacttgagaagctctcgtgaggacacggttccatctcygccatgtctgagcttgctgtacttttcaggggtctgttgtcagaatgtctctcttcttatgacaacacggctagctcagggcttacataccattctctcgtcctagaagttctaaacattctaagattgagcctcactagttctttttgaactacacaatcactcccactaatcagatgggctattgactgagcaagcctggtcatgtgttcacctctggatgatatggaagttcatgttggactgtgaaggagtgatgaggtccattccctttcttcccactggcaacaactgctctctagatttttatatttccttatagtgttactgcttctatgaatccttaaacactgtggcattggctgtttggggattttatataaatggaatt

SEQ ID NO: 460895 - DNA, 458 bp, Homo sapiens
aggttttattttgtctattatggattcaaaacttgagaagctctcgtgaggacacggttccatctctgccatgtctgagcttgctktacttttcaggggtctgttgtcagaatgtctctcttcttatgacaacacggctagctcagggcttacataccattctctcgtcctagaagttctaaacattctaagattgagcctcactagttctttttgaactacacaatcactcccactaatcagatgggctattgactgagcaagcctggtcatgtgttcacctctggatgatatggaagttcatgttggactgtgaaggagtgatgaggtccattccctttcttcccactggcaacaactgctctctagatttttatatttccttatagtgttactgcttctatgaatccttaaacactgtggcattggctgtttggggattttatataaatggaatt

SEQ ID NO: 460896 - DNA, 458 bp, Homo sapiens
aggttttattttgtctattatggattcaaaacttgagaagctctcgtgaggacacggttccatctctgccatgtctgagcttgctgtacttttcaggggtctgttgtcagaatgtctctcttcttatgacaacacggctagctcagggcttacataccattctctcgtcctagaagttctaaacattctaagattgagcctcactagttctttttgaactacacaatcactcccactaatcagatgggctattgactgagcaagcctggtcatgtgttcacctctggatgatatggaagttcatgttgkactgtgaaggagtgatgaggtccattccctttcttcccactggcaacaactgctctctagatttttatatttccttatagtgttactgcttctatgaatccttaaacactgtggcattggctgtttggggattttatataaatggaatt

SEQ ID NO: 460897 - DNA, 553 bp, Homo sapiens
ctggctctgctggttcaatttatgataatatgcaaatagacttgtgttttcagaaatataatgtgaattttacaaaattcaagctaacataccataaaaagaaagaagacagggtctgcaaggcattttgatgggtcttctagaggaactgggaaatgggaattaatgtcawtatgattgtacaactggctttcttattgctataaatgatttttacatattttttctgcaattcttccaactgataaccttgccttccgcttgctgagaaaatagaagccacatttagaaaatactttcatctgaaaattctagaatttatggacctaccttgatttcaaactttgccctctacgttctctcctgttatagaagagattgttgcttcaatcaaacacatattaccctctccttacctcagccccacctggagctcaggatcctacttacccataatttcttaaggatatcaattctattacactccatttacacctacctaaatgtgtgtgtgtgtgtgttttcattcttaagtcaatcattccccttaaaa

SEQ ID NO: 460898 - DNA, 600 bp, Homo sapiens
ggaatccttttccttggcataatagtagtaagaggtatgtgtattagagttcctagtcttcttcctttctcartaatttacagacttattttatatattccagatgcaagtcctttggttgttataggcactgcaaatattaataacttctcaaactctttacttgtcttttcccttttaattgttttttaaatgaacaaatatctttattagtagtataataataaaatttattattttgtggataatgtttttgtgtgttttaaaacaaatatttaacaacctaagacactgaagatattatatatgtaatatgtaattatataaattaaaatttatgtgattttcaacaaattacatataatttatggttttatttgttcatttagttctataatctaccaagaactgattttgtggcatacttagagataagtcaaattttatttttctgcaaatatttaattgatagaacactacattaaataaatttctttactcatattaaatacatatagttccaggcttctaagtaatcatccttattattttcacaatatttcaatattctttcagtgggtgccctaaaggttacaacat

SEQ ID NO: 460899 - DNA, 583 bp, Homo sapiens
tgatgagaaggagggaaaaaaggggagagaacagctgcagagacagtccagacctagaagtttcttgagagagcccagacctacgagttccctgagccagggctgtgataccctttttggggctgtgcggttcctgaagtctccaagtttccgggctgcccaagtttccgggtgtcaccgcattcccggtgccagctgtggaagctgcttgcagtacacctggtcaagctgtagcctcacaaagagccagtgccgggagctgccagccccgctgcagccagtgtgcctgactgtgtgcggtggctggaccccatgcttccttgcgcacacagccctcgcygctccactagctcttggtaggcatgggattcaggctgggagtgcgagctaagggcagcctgccagaccaagtgggtggaacgaacctagctggcacgaacaaaacttgggcaaaggcaccaccgaccacagagatttctagccagaaaagcgtcaccccatgaatcacaggacattgttactctggctggttttctactccacatctcttgcccagccatataaccactcaagatacctgcat

SEQ ID NO: 460900 - DNA, 564 bp, Homo sapiens
cttgaagaggtccttcacatcccttgtaagttggattactaggtattttattctttttgtataattgtgaatgggagttcactcatgatttggctctctgtttattattggcatatagaaatacttgtgatttttgcacattgattttgttttctgagactttgctgaaattggttatcagcttaaggagattttgggctgagatgatggggttttctatatatataatcacgtcatcagaaaactaattttttgaaggaattcagtgaagaaaatcattaagttgtttaggtttacatatgatgaatacctktgtctactttacattctaatcaattcaacattgtttcctaggcacggctttctattctcaagtgtatccattaggctagacctaaaaatataattgaaataatatgtgtaatatatgtggtaagcagaattccaagattgtcagctaagagtctcagcctctggttattaaaacactaaagaagctactactctaaagggaattttccagtataattaatgttactaagtttttttgtttcacagattatc

SEQ ID NO: 460901 - DNA, 564 bp, Homo sapiens
cttgaagaggtccttcacatcccttgtaagttggattactaggtattttattctttttgtataattgtgaatgggagttcactcatgatttggctctctgtttattattggcatatagaaatacttgtgatttttgcacattgattttgttttctgagactttgctgaaattggttatcagcttaaggagattttgggctgagatgatggggttttctatatatataatcacgtcatcagaaaactaattttttgaaggaattcagtgaagaaaatcattaagttgtttaggtttacatatgatgaatacctttgtctactttacatwctaatcaattcaacattgtttcctaggcacggctttctattctcaagtgtatccattaggctagacctaaaaatataattgaaataatatgtgtaatatatgtggtaagcagaattccaagattgtcagctaagagtctcagcctctggttattaaaacactaaagaagctactactctaaagggaattttccagtataattaatgttactaagtttttttgtttcacagattatc

SEQ ID NO: 460902 - DNA, 564 bp, Homo sapiens
cttgaagaggtccttcacatcccttgtaagttggattactaggtattttattctttttgtataattgtgaatgggagttcactcatgatttggctctctgtttattattggcatatagaaatacttgtgatttttgcacattgattttgttttctgagactttgctgaaattggttatcagcttaaggagattttgggctgagatgatggggttttctatatatataatcacgtcatcagaaaactaattttttgaaggaattcagtgaagaaaatcattaagttgtttaggtttacatatgatgaatacctttgtctactttacattmtaatcaattcaacattgtttcctaggcacggctttctattctcaagtgtatccattaggctagacctaaaaatataattgaaataatatgtgtaatatatgtggtaagcagaattccaagattgtcagctaagagtctcagcctctggttattaaaacactaaagaagctactactctaaagggaattttccagtataattaatgttactaagtttttttgtttcacagattatc

SEQ ID NO: 460903 - DNA, 564 bp, Homo sapiens
cttgaagaggtccttcacatcccttgtaagttggattactaggtattttattctttttgtataattgtgaatgggagttcactcatgatttggctctctgtttattattggcatatagaaatacttgtgatttttgcacattgattttgttttctgagactttgctgaaattggttatcagcttaaggagattttgggctgagatgatggggttttctatatatataatcacgtcatcagaaaactaattttttgaaggaattcagtgaagaaaatcattaagttgtttaggtttacatatgatgaatacctttgtctactttacattctaatcaattcaacattgtttcctaggcacggctttctattctcaagtgtatccattaggctagacctaaaaatataattgaaataatatgtgtaatatatgtggtaagcagaattccaarattgtcagctaagagtctcagcctctggttattaaaacactaaagaagctactactctaaagggaattttccagtataattaatgttactaagtttttttgtttcacagattatc

SEQ ID NO: 460904 - DNA, 474 bp, Homo sapiens
agacataaacgtgtttgggggctaaaatttataagatagtagcgatagaaatatcaaaaatagattaaaagcataraccgatgttctctgaggagggaaaatataatgaataaaaatcacaaatgatcattttagccttgccaaagaatgatgtaaaatccttctccagaagcacacacaggaaagaaagtgaggaaaataaatacacaaatggtacagacatggaggtggagaagaaaaaagtgaaaagaagttatcaaacataaattctcatttcagggagtcgaactgagattctctgtggaaggtgggaagctcaaatatatgactggcagcttgaaattttttataaagtgagatgttttctatttactttcacgtcatgttgatatctatctgggaaacaggagatttggataccagctgtacctctgaggtacaatgggccaaaacccttaatacttatttttttaa

SEQ ID NO: 460905 - DNA, 532 bp, Homo sapiens
ggaactggacctctttttttcaccttatataaaaattaactcaagatagattaaagacttaaatgtaaaacccaaaactataaaaaccttagaagacactctaggtaataccattcaggacayagacactagcaaagatttcatgacaaaaacatcacaagcaattgcaacaacaaaaaaatgacacatgggatgttaaactaagggacatatttcaaattatccagacaattagttcctgagtcatagaaatctcaatacccaggttagccagtgctatgaatgtcacaggcttctccattttaacatatttctattgtcttagttttgtactgctaggatagttcagtttgtgaattctaaactcacatcagctatggcttcagtagcaaatttttattaatggcccactgctgatcaatccacaaactgatagaaaagggaaaaaaaaaaaacaagtaaatgatgtgaaaaaataagcatttcaaaattactcttaaattctatctacaagttgatttttaatttcaaa

SEQ ID NO: 460906 - DNA, 365 bp, Homo sapiens
aatgatagatatttcaggtcaggaattggggaaaacaaattaaaaattcatagtaatgccaaattcataaaattttaaatctcttgaacacttatttcaaccaaagcactatttttgacattgcacatatataatcttattttgtatccataatcatatttactatatgatactattggatagatgaaggaactatcccaaagasatgcaaagtcaactcccagtgttagatagctagtaaaggattttaggaaaggtgttcttagttaaggttttccctctcgaacatacactattaactgggaaggagctagtccttaaacaactggcctggaaagtaacagtataaatgagaagctttgagc

SEQ ID NO: 460907 - DNA, 637 bp, Homo sapiens
taactggtcacatggttgtagctggtattcataactactttattccactatccaccccatattccctttggcttcaacaagcaccttagttaattgtggttctttatctggtgcagtgatgcacaccttcattcttgaagggtccaggccatgagtaatcytgtctgggattgtgtttttgtagttttcaaactagctttaatcacagagtgtggtaatactaagataccttagtttctgtattcaagacatactttttgaaggtacttttctttacctccattgtccaatttctccctggtagtccagaaaaatcatcccagaaagcacagtaatgcccttatttgcctattaatttggaagcatgaatagttcaaaatggttaggttgtagtatcaactttcagttcagtagaattatcattgtgttccctggtagtaaccttccttcttttggaattaatactgctagtgcactagagcataagattacatgaataggaagcaaaattttttatagttggacactagcaaatagtgtgtggtgtcactcccatttccactccttgattcttggaattgtgaactctgtctatggtagaaacagcaccatgcattggatgccgatttagagcata

SEQ ID NO: 460908 - DNA, 589 bp, Homo sapiens
cctctgtcattctccaagatccatctgtcttccacacaggctatataggccagtcaaatgggaatgtggtgggaatcaccactcctgcatccttcaagtctttgacagtggcactaatacctgagtggcacttgaatccctttatatccctccagaaatacggtgttatttttggtttaatatttttctagaaggaagttcttgtgtcttccacrtggcctttcccaccataatagctcttattccacatgtcaggaaaacaatgtcgggatcctgcaaattgttgaatatgtctatttcaagtatgcattccaaaactgaagaaataatcacagaattgatttggggatccattaggtcccctcttttctgcttagtgggcccatatacatgaatttacctaagggaaaatgttattgatcacttgacctccataagaacatactctgactagtggaccacagtgatgttttgggtctcttggaattagtgtcagttcagaaccagtgtttagcagtccctgaaagatctgattattttcttttccccaatgaacagttaccttgcaaaaggccatgagtccttttgg

SEQ ID NO: 460909 - DNA, 510 bp, Homo sapiens
ttacttttggtaacacaataatcaacaagctaacactgcaggtcggtgcaaattattttgattactgctttgactctgctgttcattatggtractgtgcccatcttgcctttggcagctgagtgttgccacatggcctcccttaccctgggatctaattatcctcaatgcatttaagcttcccaattcagtgactacagttcccactgtaagttctgttctacaggaaagaaagaccaccgagcacttaaaggatgctggggctccccttacatatgtatttcttgcaatggtggtgaaatgtgtgtcttctagacctctcagcttgagtgagtaggtcttaaatggcaaatccactctaccattccaatatccctaagcctttgaatcttttcatctatagtaaacccaggcatatctggcatttctagctctctcattctgtgtcactttatggtacatgtttcagccaaccaatgaagcatactgttaagagttgtttctaacttc

SEQ ID NO: 460910 - DNA, 583 bp, Homo sapiens
agctaagcaggtctcaggccattgacacatagaacttttaaaataataaatgtttgttgttttaatccgcacgtttgtggtaatttgctgtgsaacaataaataatgaatgcttgggtacccaaaagtggtatgctgctataacaaaaacaggattggttttggaactggaaagagggctttgcagcaagggttggtgaaagacgaaagtaatttgaagaaactgctacttgaaccctcctggactctgacaaggctgtgagtgagggcgtctagtaaataaggtaaatactacagtaaattgagggaaggataagcttttctatgtaacataattaagtttagcaacactgtttcctgaaattatgtgaaaagtagaaaatgtctcaaatgaactgggtgatgtagataataagaatgccaaccaaagtattgaactgaccatgctccccggtttcttcttgctgtttataaaaaagtgcaagaaaatagagctacactaaggaagagctaataaaaataagagagtcatgattaacagtttggaaaattctcagcattcccaggtggcaaacgatgctaac

SEQ ID NO: 460911 - DNA, 641 bp, Homo sapiens
ggagtctagaggagggatagtattaggagaaatacctaatgtaggtgacgggttgatgggtgcagcagaccaccatggcacatgtatacctatgtaacaaacctgcacattctgcatatgtaccccagaacttaaagtataataaaaaaaagtccactcagtttttaaacactaattattaagtaagtgaatataatcatcgttgttcaaattcaattggaatatccaaagcacaaaaagggaatctacttgcagcttgttggggtaacagttttgtttacaagatgaccttccwgataatgcacttaatttgtgttttcagtttcacggtgagaactttcaaggtctgaaaacagaagtaagtttagaattttacaagttggaaggggaagagatatacaggcagaaatgatgttgacatcctccaaatcatactatgttgtaatgtactggagtattgttcaagttaaagtaagattgctgagatcctttacacattccagaaaaggatatgcctctggacatgatgctataatgaatggcaaaatgcatttgaataactgatgtgaaacaaagtttctaaaaggtaaattactaagttagcagacagaaagttttgctcaaggtgttcacatattata

SEQ ID NO: 460912 - DNA, 641 bp, Homo sapiens
ggagtctagaggagggatagtattaggagaaatacctaatgtaggtgacgggttgatgggtgcagcagaccaccatggcacatgtatacctatgtaacaaacctgcacattctgcatatgtaccccagaacttaaagtataataaaaaaaagtccactcagtttttaaacactaattattaagtaagtgaatataatcatcgttgttcaaattcaattggaatatccaaagcacaaaaagggaatctacttgcagcttgttggggtaacagttttgtttacaagatgaccttccagataatgcacttaatttstgttttcagtttcacggtgagaactttcaaggtctgaaaacagaagtaagtttagaattttacaagttggaaggggaagagatatacaggcagaaatgatgttgacatcctccaaatcatactatgttgtaatgtactggagtattgttcaagttaaagtaagattgctgagatcctttacacattccagaaaaggatatgcctctggacatgatgctataatgaatggcaaaatgcatttgaataactgatgtgaaacaaagtttctaaaaggtaaattactaagttagcagacagaaagttttgctcaaggtgttcacatattata

SEQ ID NO: 460913 - DNA, 641 bp, Homo sapiens
ggagtctagaggagggatagtattaggagaaatacctaatgtaggtgacgggttgatgggtgcagcagaccaccatggcacatgtatacctatgtaacaaacctgcacattctgcatatgtaccccagaacttaaagtataataaaaaaaagtccactcagtttttaaacactaattattaagtaagtgaatataatcatcgttgttcaaattcaattggaatatccaaagcacaaaaagggaatctacttgcagcttgttggggtaacagttttgtttacaagatgaccttccagataatgcacttaatttgtgttttcagtttcacggtgagaactttcaaggtctgaaaacagaagtaagtttagaattttacaagttggaaggggaagagatatacaggcagaaatgatgttgacatcctccaaatcatactatgttgtaatgtactggagtattgttcaagttaaagtaagattgctgagatccttkacacattccagaaaaggatatgcctctggacatgatgctataatgaatggcaaaatgcatttgaataactgatgtgaaacaaagtttctaaaaggtaaattactaagttagcagacagaaagttttgctcaaggtgttcacatattata

SEQ ID NO: 460914 - DNA, 559 bp, Homo sapiens
ttgcggtagccttaatttcttccttatttagaacacttactttcagacttaaattctgatttaagaatgagaatttttataaattatatgtgtcaattaattttaaaattaaatttaaaattatggttccattttggaatgttaattcattttcaaaattatttttttttcacagaaagtcacgcaacttagacttctttcagcaactttgacttttgcytctgttcaattttctatgaacacaattataattgtttctgttacagccttcatatttgtcatctttctgattattattctcatgtacatttttctctaaattaggtcaaacttttcaaccttgtcttgtacattacttgttataatagcagatcaatatttacaatactgttttttcctgtactatttctaattctattttaaattattctattatgtattcttatattatcatctttctcagctaaatattcaatcttacttatttttcttacattatctttatattttgcttaataaagtcaatatatatttgaaaaatatttttaatacagagcag

SEQ ID NO: 460915 - DNA, 616 bp, Homo sapiens
aatttatagttatatactttatataatagtttttcaaaaactattcaataacagaagacagctggaaaatttcccaagtacttacagattaaatatatatctaaagggaaagatagaccaaaaagggtgtctgaagaaaaattttaaagtattttgaactaaatgcaaataaaattaattttatcagcatttccgctatttggcaaaatcagagcatagatgaaaatttataaaattcatatgcatgtattaggaaataattttttcttgctatcagtactccagtcttctactttgagaaactagaaaaaggagaacaatttaagccctagtaaaacagaaggaaagaaaattaaattataacaaaaaacagtgaaattaaaaatagaaaactattggataaaaccaatacatttaaatatggtttttaatttaaaacaataaatttgataagcctctagccagaatatccaagaaaatattaggatataaaattacccatatcgtaaataaatgaaggagcaacactacagatttaaattwaaaaaatgcagagaacactcgtatgctgcgatagaagacaacaatctccaaaacacatagtcatcagattctt

SEQ ID NO: 460916 - DNA, 556 bp, Homo sapiens
ttcaaaccaacaacaatgaaaaaaagataaagaagagcattacataacagtaaagtgttcaaatagggaaaaaaaatgtaagtactctaaatatatatgcacccaacacaggagcaccaatattcataaaacaagttcttagagaaccattaagagacttagactcacacacaataataatgggagacttcaaaacccaaataacaatattagaccaatcactgaggcattaaacaaagatgkatattcagaacctgaacctgacacttgactaagtggacttaacagacctctacagaagtttccattcaaaaacaactgaatatacattcttctcatccacacatgacacatcctctaaaattgaccacttagttgttcataaaacaattatcagcaaattcaagaaaatcaaaatcatctcaaccactcttggataacagcacaataatatagaaataatatagaaataagatcattcaaaatcattcaaacacatagaaattaaacaacctgctcttgaatgactttttggtaaacaactacattgaggcaa

SEQ ID NO: 460917 - DNA, 556 bp, Homo sapiens
ttcaaaccaacaacaatgaaaaaaagataaagaagagcattacataacagtaaagtgttcaaatagggaaaaaaaatgtaagtactctaaatatatatgcacccaacacaggagcaccaatattcataaaacaagttcttagagaaccattaagagacttagactcacacacaataataatgggagacttcaaaacccaaataacaatattagaccaatcactgaggcattaaacaaagatggatattcagaacctgaacctgacacttgactaagtggacttaacagacctctacagaagtttccattcaaaaacaactgaatatacattcttctcatccacacatgacacatcctctaaaattgaccacttagttgttcataaaacaattatcagcaaattcaagaaaatcaaaatcatctcaaccactcttggataacagcacaataatatagaaataatatagaaataagatcattcaaaatcattcaaacacatrgaaattaaacaacctgctcttgaatgactttttggtaaacaactacattgaggcaa

SEQ ID NO: 460918 - DNA, 574 bp, Homo sapiens
aaaggaagggttcaggttttatataaaaagtttctgctcaggttctcaatctgatcagttttgggaaataaaggattaaaactagcttagttcagaggggtaggtgtagctgaattctgattggttaataaagttgaaacctgactggctggggcaggtgaagtctgattggttggtgttcaagcccaaaaccagaagtctctgtcagatgtttcttgcagatggtctgtggtgtggtagatttcctgtgccgtctattttggcacygacaacagaatctgatttggtgtagaaaggatctgatttggggtagaaagggaggtcctgtgatactttcacaacatctggggacatactttaacaatataattaacatttttatgttgcttatttttatgaaatgtcattgtagaatgcgttagtaaaattgacatgattctttacaagagtcatctgtagtcttcatttgaattttttttgccatgattcaatttaacaaatatatactaagaaaccactaactacaaagtaaaactatggattataaaacatatattttataaaggtggacata

SEQ ID NO: 460919 - DNA, 225 bp, Homo sapiens
tattccctgaatgtcatgtagtgagtcaacaatatcttaatgccacatatgagcagagattctaactaaatattgtaggagtactacargaagttcaaggaacttaaaacctctaagtaatacaagttcacttagttttactgttttagagaaaaagtggaacaaataacataaaatagatgaactttggctttaaaataaagacagatatgccaatgtttacta

SEQ ID NO: 460920 - DNA, 225 bp, Homo sapiens
tattccctgaatgtcatgtagtgagtcaacaatatcttaatgccacatatgagcagagattctaactaaatattgtaggagtactacaggaagttcaaggaacttaaaacctctaagtaatacaagttcacttagttttactgttttrgagaaaaagtggaacaaataacataaaatagatgaactttggctttaaaataaagacagatatgccaatgtttacta

SEQ ID NO: 460921 - DNA, 577 bp, Homo sapiens
agaatgagggagagaggtctaggatgaagcttgaggagtaggtaggagctatatacatatatatatatakagagagagagagagaattcacataccatacaattcactcatttaaggtgtacaatgcagtggtttttagtatattcacagatatgtggagccatcatcacagtaaattacagaacattttcatcatcttagagagaaatcctgtaccctgtagctatcccccacaatctccttattccccctaggcctaagcaaccactgatctactttttgtctatagatttgcttattttggacattttatataaatggaataaaaatacaatcttttgtgcctgacttcttttacttaatataatgttttcaaggttcatccatatgatagcatgtatcagtactttattcctttacatgggtgaataatattccatcatatagataatgccacattttgtttgtccattcataagtcaatggacacttgagttgtttccaccttttagttattatgaataatgttaccacaagcatttgtgtagaagttttcgtgtggacatctggtttgatt

SEQ ID NO: 460922 - DNA, 600 bp, Homo sapiens
cagagcctaatacatagtagatgatgggtaaatgtttattgaataaaattatttctcaaatgaaaataagcccatgtgtagtgatcttctatgcccataagatggcagcagaagaaygtctattgatctacttgagtgtgaagctagcaaagaccgttttgtgtttggatgagttcgcagatgagcctttctatcccattccatttaagtgttttaatatagggaatgcagattttttttggcacatgaaggccctttgtgcactttcaccctggcacttcttcacacaagagcgacaggtacaaggtataaagctccctggattgcaagagaggatacctagtttactctccagctaagcccacaatttatgccttctcaggcaagccatttaacttctcttgttcagtttcttactcagctaattggtggagttaggagatctatagggaatattagattataaaataatagcattctaagtcatcagtgactgccttagttgtgtgctcaatattgtgttaaaaactgtatgataaaaaagggacatgcccaagtgctctcatgatccaagacatcaaatgtacacatagtaaggca

SEQ ID NO: 460923 - DNA, 450 bp, Homo sapiens
tctgccaactaaatacacatgtatagcctatcaaaatacttaaagaatattgtgaaaattcacagaaacataacaaaatcaaagtcataactcccccatataccctttccgaagaagatcatgactttcaaaaggtccacttgctgaaagttcagtaactggaatactgtcctttagctcagatccaagtcctctggcattctacaacacaaataaaaaacattattaaatagaaaaaaaatttaaacacacacccagrcagctgtgtcaaaaatattgtttaagtaggagacagaaaaataagaggccctcaaaaagtccagactagacaattacagcaagccttaaacattatgatatgatagagacacacatggtacaatgaaaataccaaatttagatgtgggaaggattcctgaggtgatctctgaatgctgtcagtttgaaagg

SEQ ID NO: 460924 - DNA, 450 bp, Homo sapiens
tctgccaactaaatacacatgtatagcctatcaaaatacttaaagaatattgtgaaaattcacagaaacataacaaaatcaaagtcataactcccccatataccctttccgaagaagatcatgactttcaaaaggtccacttgctgaaagttcagtaactggaatactgtcctttagctcagatccaagtcctctggcattctacaacacaaataaaaaacattattaaatagaaaaaaaatttaaacacacacccaggcagctgtgtcaaaaatattgtttaagtaggagacagaaaaataagaggccctcaaaaagtccagactagacaattacagcaagccttaaacattatgatatgatagagacacacatggtacaatgaaaataccaaatttagawgtgggaaggattcctgaggtgatctctgaatgctgtcagtttgaaagg

SEQ ID NO: 460925 - DNA, 579 bp, Homo sapiens
agcatgaaggacagactaagattgggagaaagtaggaaccaggataccatttaagccactaatggtacgctaaggtagtgtcacatactggaaaggctttgaaaggaaggaaaaagtaggagtgaacctaagaaataccagaattcaaaagacagccagaagaaggggagcctgctttaaaggctatgccatcttcgaatcaaaagggcaaggaagtattgagaggttagaaagtagttcaaaagtagctaaaaagggatcataaagccctgaaaataggcttttggtgaccagtgtgaagagttgttttagtggctcagcaaggagaaaattccctttattttgagtcttacacycaagtttatgtcctattttaaatggtttgttacagtattaactaatacggggtacttttgagtatgctaaataagaagtaaattagatttgatgctggaatgatttaattatgtttacttaagctttatgttaaatagcttagaggatagaacattagtaatgatagctaacatttgttacatgtcaggccagggtttagttttttgcatatattgtttcaat

SEQ ID NO: 460926 - DNA, 601 bp, Homo sapiens
attcaggtttcaggtgcagaagttgacagcccagagtacactyataagtatgtgagtatgattataaaagcacagttgatcatctttgagaactaatgggagaaatgaaaattggttatagatggatacatattccacttttgtataaaggatctaactaaaaaataagattgtctgtggtaacattgatccctgaaactgtttcttaagtggactattgagtgagctgtgagcatttaatagggtaagcagtgatcatcagcatctgaatgaactcagcaaattaattttagttcactcttttactcagttgccaaatgggtcagtcaagggatcaaattatctgacaagggataagattgaggattacatggtggattattaaccgagtgaaagtagtgtagggtaaagtatatgaggttggtaactgtacccagagaacggtgattagggaatagtcaatttggagggaatattttgatagggctttttggcctctgtctacatcttaggtagtcaggtggacacataggaaggataagtatttttcaaggacttgtgggcaaccaaagaaagaatgtatattaggtttttggaaaaa

SEQ ID NO: 460927 - DNA, 342 bp, Homo sapiens
acctgtagtcccagtgactcagaggaggctggggtgggaggatcatttgagtccaggaggttgaggctacagtgagctatgattgcgccactgcagtctgggcatcagcgcgagagtttgtctctaaaaaataaataaattttttaaaagaaaggtaactaacagaaaggagcagaatctcacaattctggcttctgctgagaaagagatctcattattaccgtctttaaaaagcaatcaaatttaattgttccaaaggttgcagtaaatagctaaagagaaatggctccagattkccgctcgcccccagtcaggttttgcatatttcctcaggaagtgcca

SEQ ID NO: 460928 - DNA, 604 bp, Homo sapiens
cccatctgagaaaagtcttgtggggccacgccatgctccattcccatgacccagacaagcaactttctatctggatgtgaaccaggtgaatatcccagatggcacatcaaaattaggattagaggagggctaaatatagggacactttacaaagatgtgagtggagtgtaggggaaccatgaggaagagagcagtgtactggagcaagtaactgggactgttaccatccccagacctacagggtgaggagagggagtgagtactggctctggaaggaaggggccacgttgctcagtgrctgccttcagaagtacagtgacattggtgccctgctgcagccagtcctagacaatcccacagggaacgaacctgggaaaaaaacaactctgaactcactcctatctgggacctcctgccagtgttcctcacctgccaaggccgaaagggaaacccgtggctaagcggcctgtctgatgtcgtccagggctctctaacatcagcactccctggaaggcctggtacaacacagattgctggaccccaccacaccgtttctgattcagtaggttctggtgaggcctgagaatttgcatttttaacaagt

SEQ ID NO: 460929 - DNA, 597 bp, Homo sapiens
cacaacaatctaattaaatataaacaaatgctctgaacagacatttctcaaaagaagacatacaaatgaccaacaaatatatgaaaaaatgttcaacaccactaatcagcaaggaaatgctaatcaaagccacagtgaggcatcatcttacttcagttaagatggctattatagaagagacaaaaataacaaatgctgacaaagacgtgaagaaaaggacttttttttttttgacagaatctcactctccgtccaggctggagtgcagtggtggtgtaatctggctccctctgcttctagggttcaaatagttctcctccctcagcctcctgagcagctggagaaaaaggaactcttatgcactgttggtaggaatgtaaattagwgcagccagtatggagaacagtattgaaacacctcaagcaatcccactactgggaatttatccaaaggaaagaaaagcattatattgcagagacatctgcatccccatgtttattgcaacagtgttcacaatagccaagatatggaatcaacctaggtttccaacaacagatgaatggatttttaaaatacggtatatatacaccaaggaat

SEQ ID NO: 460930 - DNA, 452 bp, Homo sapiens
agcctcctgagcagctggagaaaaaggaactcttatgcactgttggtaggaatgtaaattagagcagccagtatggagaacagtattgaaacacctcaagcaatcccactactgggaatttatccaaaggaaagaaaagcattatattgcagagacatctgcatccccatgtttattgcaacagtgttcacaatagccaagatatggaatcaacctagrtttccaacaacagatgaatggatttttaaaatacggtatatatacaccaaggaatgctatttagccataaaaaagaataaataaaaccctgtcattctcagcaacatggatggaactggaggatattatgttaagcaaaataagccaggaatagaaatttcaacaccacatgttctcactcacgcagaagctgaagaaaagttgatctcatagtagtaaaaagtagaacagag

SEQ ID NO: 460931 - DNA, 452 bp, Homo sapiens
agcctcctgagcagctggagaaaaaggaactcttatgcactgttggtaggaatgtaaattagagcagccagtatggagaacagtattgaaacacctcaagcaatcccactactgggaatttatccaaaggaaagaaaagcattatattgcagagacatctgcatccccatgtttattgcaacagtgttcacaatagccaagatatggaatcaacctaggtttccaacaacagatgaatggatttttaaaatacggtatrtatacaccaaggaatgctatttagccataaaaaagaataaataaaaccctgtcattctcagcaacatggatggaactggaggatattatgttaagcaaaataagccaggaatagaaatttcaacaccacatgttctcactcacgcagaagctgaagaaaagttgatctcatagtagtaaaaagtagaacagag

SEQ ID NO: 460932 - DNA, 460 bp, Homo sapiens
tcagaatttcttgtctttgtaaatccaaacttttattaaattttaacacagtctgtctgcgtggcttacagctataatcccagcactttgggaggctgaggtgggagaatcactaggtcaagaagatgagaccttcctggacaatatggtgaaaccccatctctactaaaaatacaaaaattagctgggcatggtggcatgcacctgttgacctagccattcaggaggctgaggcaggagaatcacttgaacccaggaggcaggggttgcagtgagctgagattgcacaactgcattccagcctgatgacagagcgagacttcatctcaaaaaaaaaaaaaattaacacaatgtgtggaaaatataaaattagttagaagatatgtcttagaaattaaacttttagaagagttaatggtaagtggagaatgttaaayttaattttttattacatacttac

SEQ ID NO: 460933 - DNA, 557 bp, Homo sapiens
cctagccattcaggaggctgaggcaggagaatcacttgaacccaggaggcaggggttgcagtgagctgagattgcacaactgcattccagcctgatgacagagcgagacttcatctcaaaaaaaaaaaaaattaacacaatgtgtggaaaatataaaattagttagaagatatgtcttagaaattaaacttttagaagagttaatggtaagtggagaatgttaaatttaattttttattacatacttacagctcaacttaagttttyattcagaatcttttattttggtgtgaatgttaaatattcaaaaataatagagtgacacctgtggatttcacatgtgaaataaactttttcatattaatgttaaaatcttgaggaatttctcacacttgtataacgtacttttttattgggtgcagtttacaatttagaggttcagtctttagaggtttcactggtcaactccttggtcattttatctggaaaagttttaaagatcatggcatcttttgagttaaaaaatgtcttcagtgatctgggatgcaaactaattt

SEQ ID NO: 460934 - DNA, 538 bp, Homo sapiens
cgagacttcatctcaaaaaaaaaaaaaattaacacaatgtgtggaaaatataaaattagttagaagatatgtcttagaaattaaacttttagaagagttaatggtaagtggagaatgttaaatttaattttttattacatacttacagctcaacttaagtttttattcagaatcttttattttggtgtgaatgttaaatattcaaaaataatagartgacacctgtggatttcacatgtgaaataaactttttcatattaatgttaaaatcttgaggaatttctcacacttgtataacgtacttttttattgggtgcagtttacaatttagaggttcagtctttagaggtttcactggtcaactccttggtcattttatctggaaaagttttaaagatcatggcatcttttgagttaaaaaatgtcttcagtgatctgggatgcaaactaatttactctcttcagagtggtttaatcatgtgaaacacagcaagagctgccctttttgtgtcttccctatcattaccaccagcaccag

SEQ ID NO: 460935 - DNA, 557 bp, Homo sapiens
cctagccattcaggaggctgaggcaggagaatcacttgaacccaggaggcaggggttgcagtgagctgagattgcacaactgcattccagcctgatgacagagcgagacttcatctcaaaaaaaaaaaaaattaacacaatgtgtggaaaatataaaattagttagaagatatgtcttagaaattaaacttttagaagagttaatggtaagtggagaatgttaaatttaattttttattacatacttacagctcaacttaagtttttattcagaatcttttattttggtgtgaatgttaaatattcaaaaataatagagtgacacctgtggatttcacatgtgaaataaactttttcatattaatgttaaaatcttgaggaatttctcacacttgtataaygtacttttttattgggtgcagtttacaatttagaggttcagtctttagaggtttcactggtcaactccttggtcattttatctggaaaagttttaaagatcatggcatcttttgagttaaaaaatgtcttcagtgatctgggatgcaaactaattt

SEQ ID NO: 460936 - DNA, 538 bp, Homo sapiens
cgagacttcatctcaaaaaaaaaaaaaattaacacaatgtgtggaaaatataaaattagttagaagatatgtcttagaaattaaacttttagaagagttaatggtaagtggagaatgttaaatttaattttttattacatacttacagctcaacttaagtttttattcagaatcttttattttggtgtgaatgttaaatattcaaaaataatagagtgacacctgtggatttcacatgtgaaataaactttttcatattaatgttaaaatcttgaggaatttctcacacttgtataacgtacttttttattgggtgcagtttacaatttagaggttcagtctttagaggtttcactggtcaactccttggtcattttatctggaaaagttttaaagatcatggcatcttttgagttaaaaaatgtcttcagtgatctgggatgcaaactaatttactctcttcagagtggtttaatcatgkgaaacacagcaagagctgccctttttgtgtcttccctatcattaccaccagcaccag

SEQ ID NO: 460937 - DNA, 581 bp, Homo sapiens
agaagttctagttctctacagcactgttgggtgactgtagttaatgggaatttattgtgtgttttcaaataackaaaagaaaagattttgaatattctcactgcaaagaaataatacatgatttaggtaatggatatgataatgactctgacttgatctttacgcattgcataaatatatcaaaatatcactctgtaccccataacatgtacatttattgtatgtcaattaaagtaaatttaaaagagaaaaaatgaggtaaaggtaaatgtacagaatttaattactttttcttctataaaacccgagtcagtaccaagaagagtcaatttattagttttctaaaataaaaaaaatcaaaatcaccaaaaaagagcaatatccaagaaaacattgaaaaggaaacacaacatttagtaagaatagaaaacttgggcactgtatcaccctgttcctagataccgatttactgatggccatttaaatagaattttattctatctaattcatttatactcccagagtttgaaattacattttacctacaataaatgagataacacttgtaaattatatggtac

SEQ ID NO: 460938 - DNA, 454 bp, Homo sapiens
attacattttacctacaataaatgagataacacttgtaaattatatggtactctgcctaacacacgttaataactcaatagatgttagcaataaacttttastatagtagtcaaagtattaatttctcacattgcaatttccttcaaagacataaatacaacctttctaatgactccttgttcatcaagatacctcttcaaattattctatttgtttcattcagtatattatctgtgtataccgatattacactcttttctttttttgagatggaatctcattctgttactgatgctggagtgaggtggcatgatctcggttcactgcaacctccacctcccaggttcaagcgattctcctgtctcagccccccaagtagctaggactacaggtgcacaccaccatgcctggctaatttttgtatttttagtacagtcagagtttcaccctgtt

SEQ ID NO: 460939 - DNA, 604 bp, Homo sapiens
caataaattttattcatttcataagctaagtaaattttacttagaaataaaataatcataayctagagaaacctctttatgcctcagcaatgagatgtacagaattctacatatttgattaaactggacaaacttttacctgtaacaaaaactagcgtaactgtatatattgaaagtaatactcgtttaaatggctggcttcaagagatatcagagatataatttcaataagtctctctctctcacacacacacacacacacacacacacacacacgtgctgaatcagcattgctgatgaactacaggtaagaaaaacaaacatattaaatatgaacagcacacatactttcactcacatagtttgaacttaagttatgtaatatttatacaagctaaaatgtcatcttgaagagaaaaaaaatgcaagctcatatcctcttttacatgctttccaaaaatgcacaagaggtaaacattcagtgcccatgacagaaaaaggtgggttggggggataggagtgattgctaactacatcacaaccaaaaaaaaaagagaacatatttaaaactgtgatttctctccttttgttgtactactctatt

SEQ ID NO: 460940 - DNA, 604 bp, Homo sapiens
caataaattttattcatttcataagctaagtaaattttacttagaaataaaataatcataatctagagaaacctctttatgcctcagcaatgagatgtacagaattctacatatttgattaaactggacaaacttttacctgtaacaaaaactagcgtaactgtatatattgaaagtaatactcgtttaaatggctggcttcaagagatatcagagatataatttcaataagtctctctctctcacwcacacacacacacacacacacacacacacgtgctgaatcagcattgctgatgaactacaggtaagaaaaacaaacatattaaatatgaacagcacacatactttcactcacatagtttgaacttaagttatgtaatatttatacaagctaaaatgtcatcttgaagagaaaaaaaatgcaagctcatatcctcttttacatgctttccaaaaatgcacaagaggtaaacattcagtgcccatgacagaaaaaggtgggttggggggataggagtgattgctaactacatcacaaccaaaaaaaaaagagaacatatttaaaactgtgatttctctccttttgttgtactactctatt

SEQ ID NO: 460941 - DNA, 507 bp, Homo sapiens
cgtaattcatgacatgggaaaattatcataatggaaaaagaagcaagctatatacagtgcatgatcctatacacacacatacatacatacatatttcctatccctttatatgmataagaaaacaagcgggaggaaagtcgtatctttagtcaagtcttgtttactaacgtactattaatgattatcttttctttttctttatacctttttgcatttttcaatttcctaaaatagccttacatgccttttatcaccaggagaaaaattacttctaaagtaatttcagtcaacatgcatactaagaactcttcatatttatctgttagaagctgtgcatgaatgccagtccttgcatctgtcttggaactcacagagagctcttttcccatggctttaagcaatactcaaaaagactagcatacctgaatttcctagtcctatgtttttttcatccaacagccagtcttgtatttctagctgttttctaaacatttcaaccaaaccatt

SEQ ID NO: 460942 - DNA, 568 bp, Homo sapiens
tctcagtatttcaaggagaaattattcaagttgaataaattagagtctaaaccacagtctttccgaagcctatggagtgttattcatgaagcaggtactagacacaggggattctcaggtgctacttcagaagccaggatgcacctgcccctggtggtatgtgctgaacaccgtgtgatgatcctcagtcctgtctgggaagcccagggctgggggtgctgatgctatcagctgcctgcagcacatctccaggtgattctccagtccacacctaactgcatgtgttttacttcaggtgtcagtgtacatgaatccaccactctgacttcccaatctcatgacagtaattagttgtaacttattgtaacctcatggagcaactctaaagaaaccatagagagaaaaggagttttggaaaatgtgctcccggaagtgatagtaatgatggggaattgacagctgayggggaagtaaggtgactctttccacaaggctcaacattttgccagttatgaattgttgcaaaatacatttgaatgtgctttcaagtattaccagtttggggtca

SEQ ID NO: 460943 - DNA, 639 bp, Homo sapiens
tgagggccttgggtgtgaggatttggtggcactttcttacgacactggaggtctcaaattcaggatgtatgatatttattgcatatccttgcagtcatggtccatgcatgtttttatattgtgtgtttttttactttatattatgagtattttcctgattgtccctatgtatagtggctgaatcactgcagagtggtttagtggctgatagtatccttaccttgtcgagtgaggaactggggaaagaaggaagctgtgggcttttttagccaagttgacttgacatggctctactttgcttccctccatccagtgggaggttcagagaaggggctggaaacaggccctgttaagctctttctcttatctccctcccgtttcccacctcagagccctccctatcacacaaacactctcaacacaaaatcagtgactctgttgtcaaatacacagctcactatgaccccctatagcattcctaaggactggttagtatttgcttggatcaggtttgcgtgatagakacactgttcctcacttcttatgaccgaagctatcccactttggttaccaccccaagtattttttcttgtgaggaaataattccagccacatccatagttgacatcctcatgccag

SEQ ID NO: 460944 - DNA, 517 bp, Homo sapiens
gaatgtccagtatgtaagtcctagtaaactcatctattcatcaagctggacttgcccaaattattctttagtctctcgacgccttcccagtttggggggrtgttacagtcccaagttttccttataatgactaccacattcctaagcaggatccaggccaatgacaggatggaatattaaaatattcaactattataccatcagaacactaaggaaggacatcttggaaagatggaatgtttctctacctgagaaatagttattctcttttttttcaagtttaatttttaatttattagaacccagcaaataatgattttaaaagcagagtttccatcaaattaatacttaattcagggcaaaaatacacttaaaaaacctaaatcttaaggcagaagtaaaacattataaaaacagtatgtctaagacatatgtaaaatgtcagatttttaagagattcacatagtattttatagcactaaaatattgatacagtcagaaatattatcaattggtc

SEQ ID NO: 460945 - DNA, 577 bp, Homo sapiens
ctgcctagtactttccacagttaacagttttatcaatgctgcagcagaagaattatcaccaccttccagccttcaatgcctcttcacttcttctcactgactcctaagtgaatgcaatattttataagttttattaaggcagcattactacagggaacaatgtctacattcgttagtctacagactagtggttctcaaacagaaacacatttattccacaggggacatttgccaaagtccagagacatttttgcttgtcaygaccagaagaatgccataggggtctagtggtagtggctaatgatgctacaaaacaccgtaaaatacacatgacagctttttactacaaaaacatattcagcctcaaatgtcaattgtattaaggttgagaaatcttgttctagaaactactataataaaaatacttaaaaatatagcttctcaagcaacatagcaattttactttcttaaggtaactttccaaggtggttagggataagcagacatttcttgagctcatccaaggacctaatagagcaaaaatgtctctgtcattatctgtacttgattttcatct

SEQ ID NO: 460946 - DNA, 398 bp, Homo sapiens
cactccaaacactcagctgtaacctagcaagttgcaaaatatggagacatcgccaattcagtcatactatatgcaaaytatctgaatacttcaaagcattatatattgttgcattgtataaaaatgatgcaaaggtgagaatgcatgactattacctttccataaactcttatatttattagtttaaccactctaccaataagccagtttaaaattatcaatattcaactaatcaatcatatttaatttcttacagtctatcaaataactagaaccagtaggattattttggctctgaagcaagcagatacaccacttaatggtgaaattgtttattcagttaattcatgataatattaatcctttgaatagaataattctaaacaaacagtagaaag

SEQ ID NO: 460947 - DNA, 583 bp, Homo sapiens
tcctgccatagaatatttgcccatgcctgtacctttgatagtacaccttgttaacttgcaaagccaacttttcttcagattgcaggtataccgtgtgctcagatgagtctctaattaactcagagacgattcagcctgcctgttacctgatcacaactctctatagttttcctcaaaaaaactttttgtgtaacatctaccagattgtcatggaaaaytacctatataaaaagtaaaaacaatttttgttaaattagacacctaatatcccaaaaaacactgccactggtggaagtttaaaatatgattcaggtctggtggttagtctatttgctttctacctggagtctgaaaaaagaaagcataatactacttttgttggcaaattggaacacattatttactttaactcagactcatgtttaaagtttatgtaataaatttgtgttgggggttaaatttatcttcttgtttaaatttaaaattcttaagcctttattttatgaccaaactatctataaaatgtatgaaaatattctaataattctctgttatagagcatcaacctattgttttatcaatg

SEQ ID NO: 460948 - DNA, 557 bp, Homo sapiens
ggacagccttccttcacttgggtctgttttctctgtccactttagttcaaactggcagtacctccactgcataatcacacctctatttctgctgagatgtatgattaaatccataaatcatatccatggtgtctttatctaatggttgttcagcgacatccttaggattctcttttgaaaatactttctcattttctgcaatatagatgggctaatgattgtgtaaatcttcaagttctggttcttccttgcataaagatttcttcaattgcttgctctcctcttgwaggttactataagtgatgaggagaaaccaaaccactccttcaatcctttgctctgaaatctcctcagctaaatttctatgtttgttattcacaacttctgccttccacaaaacactagaagacaaggcagcagccattttgtttgctactttgtaacaaagattacctttcttccaatttccaagtacatgtccctcatttatatctgagaccacaacaaaatagactttaatgcccttatttctatcaacactcccctcaaggcaatct

SEQ ID NO: 460949 - DNA, 568 bp, Homo sapiens
gaaaccaaaccactccttcaatcctttgctctgaaatctcctcagctaaatttctatgtttgttattcacaacttctgccttccacaaaacactagaagacaaggcagcagccattttgtttgctactttgtaacaaagattacctttcttccaatttccaagwacatgtccctcatttatatctgagaccacaacaaaatagactttaatgcccttatttctatcaacactcccctcaaggcaatctacactttttatagcatgcacttaagaacttccagtctctacccattatccaattccaaggctgcttccacatttttaggtatttgttgaagcagcatctcagttcttgataccaaaatctgttttagtgtgctcagtctaccataacaaaatatcacattcctgaatgacttaaaccacagaagtttattttattgaattcacaaaggctggaagtccaagattagagtgccagcatagttagtttcttgagaggattctccttctggcttaaagactgcttcctttcactatgttctcacatgtgcccattggtaagtt

SEQ ID NO: 460950 - DNA, 329 bp, Homo sapiens
ggatgtttctcattaattaaaattctccttattacaataaagtaaataagatcrtctcctgaattgtccagtgcactttgtcttttaaatagcacaactttctacaggcatgcacattcttttataataatgtattaataaattcttgaggtaagaaaacattttatagtcataggtaaatgtcaaaagtttcttgtttataaactcacagacaagcacataaagagcttgaattatagcttcagctctagctctacaacttcaactacagattacaaataaacacacacaaaaaactcacacatttcttcccatggggcatgaaatta

SEQ ID NO: 460951 - DNA, 523 bp, Homo sapiens
tgacttctcactctatgtcataaaaggcattgcagcctctcctgtgttcttgcatcatttgctcaggggtaggtgactgtcaagttataaggataatcagaagccctgtggaaaggccaatctggagagcaactagggcttcscaccaacaaacagcaccaacttgcaagtcatataagtaaatcaatttggaagcaggaaagccatcagagatataaatgtctgcagcctcaactgacaactgattgcaatcaatgaggcaccataaaccaaatgtgctcagtcaagccatccttgaattactgattcccagaaaccaagagaccacatttattgctttaaatcattgagccttgggattatttattatgagaagtagacaactaaaacaaagttgaatagaaggataaatgtatattgactttcattctgattatgaaagctataaattgtagaagaagaggggggaaatttcaaagggccattaatctcccagggttcttaaaattcaaattcagaaact

SEQ ID NO: 460952 - DNA, 508 bp, Homo sapiens
tgggtttgatttgtccttattttcatttagttcttgagatgcattattagattgtttatttaaaatctttcttttgtttgaggtagttgtttgtcagtataaacttgccttttagcacagcttttgctgtatccccataggttttggtgtgctgtgtttcaatttttatttgtttaaaaaattgtttgatttactccttaatttcttccttgacccagtggtcattcaggagtctgttgtttaagttcyacattttttacagtttccaaatttcctcttgttattgatttctagttttatttcactatagttagagaagatacttgacatcatttcaatttttaaaaacttgttgagacttgttttgttttgtaacatatggtccatcctagagaatgtttcatgtgctgatgagaggaatgtgcactttgtagctgttggataaaatgttctataaatgtctgttaggttcgtttggtttaatatccaacttaaatccaatgtttct

SEQ ID NO: 460953 - DNA, 508 bp, Homo sapiens
tgggtttgatttgtccttattttcatttagttcttgagatgcattattagattgtttatttaaaatctttcttttgtttgaggtagttgtttgtcagtataaacttgccttttagcacagcttttgctgtatccccataggttttggtgtgctgtgtttcaatttttatttgtttaaaaaattgtttgatttactccttaatttcttccttgacccagtggtcattcaggagtctgttgtttaagttctacattttttacagtttccaaatttcctcttgttattgatttctagttttatttcactrtagttagagaagatacttgacatcatttcaatttttaaaaacttgttgagacttgttttgttttgtaacatatggtccatcctagagaatgtttcatgtgctgatgagaggaatgtgcactttgtagctgttggataaaatgttctataaatgtctgttaggttcgtttggtttaatatccaacttaaatccaatgtttct

SEQ ID NO: 460954 - DNA, 620 bp, Homo sapiens
gctattctccaaaactcttatgacaaaaggattccaccatattgtacgctttagcatttgtaactcgtcaagaattgtttttatttctcaagtgtactacttgtatatagacacatatatgaccttattttatcacacatccaccttaaaaatacatagcaagtaaaagtagctcttaaagaaagtagctcttaaaagtagctctttagaaagcaacattgggtgcaggaactaagaggactggctggtgcttttcatcagtagtaggtggtggtggctaaggtttccactgtgggcacagcccaacacagccctaycaaactgactctgcagatcaccaaatggctaacattacactgaaaagtgtagggaaaatattgatttgtttattttctatgaattgagctaactttcctcactagtcttgttgttaaatagtggagaaaaaaaatttgaaaaaaaaataaaataaatttgaattcaatggagcaaatttggtctaatgcagtacaatactttttaaaatctgtctttgcaaattaaaataaaatactgttatcttggattttctctacctcttgtttactcttgagcacccttagcaattttgtgtgccattt

SEQ ID NO: 460955 - DNA, 522 bp, Homo sapiens
ctattttgcaaccatctcactatctacagagctttttcatcttcctaaactggaactatgcacattaaacaataactgctcattttccctttcctaagctcctggagacctttttgtttctatcaatttgttttttttttctatttcactttttgtttttaacaatttgactactctaggtacctcatataagtgtactcatatagtgcttgtccttttgtaactgacttatttccctcagcataatatcttcaatccgtgttcatccatgttttaatgtgttggaaagtcatttattctgaaggctgaataatattccattgtgtgtatatagcacgtttggtttatacattcagctgtcaatgaacgtttgggttgttttcacctttggctatcgcaaattatgctgctatgaacataagkgtataaatacaagcataccttgttttactgcacttcactttattgtgttatacagatactgcttttttttttttaacaaattaaagattttggtagtcc

SEQ ID NO: 460956 - DNA, 639 bp, Homo sapiens
atgctgctatgaacataagggtataaatacaagcataccttgttttactgcacttcactttattgtgttatacagatactgcttttttttttttaacaaattaaagattttggtagtcctgcatcaaataagtctcttaggaccatttccaaacagtatgtgctcccttcacatctctgtgccacattctcacaacactgtaattctcaaaatattttcaactgtttcattattattgtacttgttacagtgaccagtgatccctgatgtcactattgtaatagttttgaggtgccatggaccacacccatataagatgcaaacttaattaatatatgttatgtgtgttgtgactgctccaacaataggcagttcccatatatcttcytctccttggacctccctatttccacagaacaatattgaaattaggccaagtcacaacactacaatattctctaagtattcaaacacaaggaagagttacaagtctctcactttatatcaaaaggctaaaatgagtaagcttagtgaggaaggcaggttgacagctgagataggtcaaaagttaggcctcttgtgccagttagcaagttgtgaatgcaaacgaaaagttcttgaaggaaattaaaagtgcta

SEQ ID NO: 460957 - DNA, 592 bp, Homo sapiens
attgctttcaaaatgttactggtcattgacaatgcacctggttacccaagagctctgatggagttgtacaaggagattaatactgttttcatgcctactaacacaacaccaattctgcaamccatggatcaaggagtaattttaattttcaagtcttattatttaagaaatacattttgtaaagctatagctgccatagacagtgatttctttgattgatctgggtacaaattacctcccccataagagaaagattcaagttgcttcaaaaattaaaataatttgtgagaacgtgtattagtgtgttctcacactgctaataaagacatacccgagactgggtaatttataaaggaaagaggtttaaatggctcaaagttccacatggccagggacacctcacaatcatggtggaaggcaaaggaggagcaaagtcacctcttgcatggtggcaggcaaaaagagcctgtgcaggggaacttccctttatgaaaccatcaaatcttgtgagacttattcactgtcacgagaacaacatgggaaagaaccaaccccatgattcaattacctcccaatggatccctgccatgac

SEQ ID NO: 460958 - DNA, 595 bp, Homo sapiens
agagtgaaataacttatttacaaaatgagataatgtactgtgaagtatgtatcttgtaagagatttatatcaagacattaaaaaactacaactctacaacaaaaagacaaaacaacccaattaaaaacaggcaaaggatttgaatagacattttgctaaagatatgcaaatggccaatgagtacaacatgaaagttattaaaaaaccattagttwttaggccattgcaaatcaaaatcacaatgacataatgttatacctactagtatcactatagttagaaaatgtagaacaagagttgacgagtaactgggaaatttggagaatcatactttgttggtctgcatttaaaatgatgcagctgctgtggaagacagtttggtgataccttaaaatgttaaacagaattaccatatgacccagcattttaatttggtatcccaatgaatgtaaaacatgaattcagataaatgcacactagtgtttatagcagcattattcataacagccaaaaggaggaaataacccacgtgtgtctatcaacagatgaatggataaacaaaatggggtgtgtgtgcatactgtggaatataatt

SEQ ID NO: 460959 - DNA, 595 bp, Homo sapiens
agagtgaaataacttatttacaaaatgagataatgtactgtgaagtatgtatcttgtaagagatttatatcaagacattaaaaaactacaactctacaacaaaaagacaaaacaacccaattaaaaacaggcaaaggatttgaatagacattttgctaaagatatgcaaatggccaatgagtacaacatgaaagttattaaaaaaccattagtttttaggccattgcaaatcaaaatcacaatgacataatgttatacctactagtatcactatagttagaaaatgtagaacaagagttgacgagtaactgggaaatttggagaatcatactttgttggtcygcatttaaaatgatgcagctgctgtggaagacagtttggtgataccttaaaatgttaaacagaattaccatatgacccagcattttaatttggtatcccaatgaatgtaaaacatgaattcagataaatgcacactagtgtttatagcagcattattcataacagccaaaaggaggaaataacccacgtgtgtctatcaacagatgaatggataaacaaaatggggtgtgtgtgcatactgtggaatataatt

SEQ ID NO: 460960 - DNA, 595 bp, Homo sapiens
agagtgaaataacttatttacaaaatgagataatgtactgtgaagtatgtatcttgtaagagatttatatcaagacattaaaaaactacaactctacaacaaaaagacaaaacaacccaattaaaaacaggcaaaggatttgaatagacattttgctaaagatatgcaaatggccaatgagtacaacatgaaagttattaaaaaaccattagtttttaggccattgcaaatcaaaatcacaatgacataatgttatacctactagtatcactatagttagaaaatgtagaacaagagttgacgagtaactgggaaatttggagaatcatactttgttggtctgcatktaaaatgatgcagctgctgtggaagacagtttggtgataccttaaaatgttaaacagaattaccatatgacccagcattttaatttggtatcccaatgaatgtaaaacatgaattcagataaatgcacactagtgtttatagcagcattattcataacagccaaaaggaggaaataacccacgtgtgtctatcaacagatgaatggataaacaaaatggggtgtgtgtgcatactgtggaatataatt

SEQ ID NO: 460961 - DNA, 595 bp, Homo sapiens
agagtgaaataacttatttacaaaatgagataatgtactgtgaagtatgtatcttgtaagagatttatatcaagacattaaaaaactacaactctacaacaaaaagacaaaacaacccaattaaaaacaggcaaaggatttgaatagacattttgctaaagatatgcaaatggccaatgagtacaacatgaaagttattaaaaaaccattagtttttaggccattgcaaatcaaaatcacaatgacataatgttatacctactagtatcactatagttagaaaatgtagaacaagagttgacgagtaactgggaaatttggagaatcatactttgttggtctgcatttaaaatgatgcagctgctgtggaagacagtttggtgataccttaaaatgttaaacagaattaccatatgacccagcattttaatttggtatccmaatgaatgtaaaacatgaattcagataaatgcacactagtgtttatagcagcattattcataacagccaaaaggaggaaataacccacgtgtgtctatcaacagatgaatggataaacaaaatggggtgtgtgtgcatactgtggaatataatt

SEQ ID NO: 460962 - DNA, 551 bp, Homo sapiens
agtaattcacatagttatctttatttgtgtgtggaagcatttaacatccgctgtcttaaggttttcatgaatacaatatatcatcattaactgtagtcaccatgctgtacaatagatctcttgaatttattcattctatctaactgtaattttgtattttacctattttccaagaaggcaatgtttacttgctaggtattgctatataatattctactaatatttgaaaacagaatccatttttgtaagatacattgtttcttcctctactcttcttctctattcatctcttttggaatgatatccaatttaaaacgtggccttaaaatacttgtacttctctattacttccctcaactcatcgataagatattgaatttattgtttgctgcctcaaagtcttaggttttgctgagaaaatgtagtatttttaggttagtctagaccagggttttgttttgttttgttttttttcctktaaagagtcaaataacaaataagttttgggggtggattcagtcttcgtcccatactcacacctgacattatag

SEQ ID NO: 460963 - DNA, 521 bp, Homo sapiens
gaaattcatttctgaggcaaaagatacgtgtgggagaaaaataaaagataaaattgctttctcattctttcattttcaagaaaatataattcctggaagaatgcagtgtgatgtgtaaggaacaacacaactctggatggtgtgcttgaaartgttatttcagccgcaattagaaaataagagaacattctgaaaaatgcactgaaaagtaagtgtaggtactaagaatgacaatactaaaacagctgagagtatgatatgtaatgaattactgttcaaagacattcaaccccatgaagttatactgttttgtaaagttccaagcagaagtaccttctctgaataacaaaacagcttatattcattcataactcccagcaggagatgtctttctccaggaccatggacagcacaagggtacagcgatcctggtaaaaaatctgtttctgtatgtctgttttttctgcctgattctactaaaattagttaggtgtgcctacaaaaaaaagtgttttggattg

SEQ ID NO: 460964 - DNA, 521 bp, Homo sapiens
gaaattcatttctgaggcaaaagatacgtgtgggagaaaaataaaagataaaattgctttctcattctttcattttcaagaaaatataattcctggaagaatgcagtgtgatgtgtaaggaacaacacaactctggatggtgtgcttgaaaatgttatttcagccgcaattagaaaataagagaacattctgaaaaatgcactgaaaartaagtgtaggtactaagaatgacaatactaaaacagctgagagtatgatatgtaatgaattactgttcaaagacattcaaccccatgaagttatactgttttgtaaagttccaagcagaagtaccttctctgaataacaaaacagcttatattcattcataactcccagcaggagatgtctttctccaggaccatggacagcacaagggtacagcgatcctggtaaaaaatctgtttctgtatgtctgttttttctgcctgattctactaaaattagttaggtgtgcctacaaaaaaaagtgttttggattg

SEQ ID NO: 460965 - DNA, 574 bp, Homo sapiens
aagcaaatctttcatttataatagaagtggaccctatttaatatgctttcaaccttttttaatcaatcactggwtctttccaaatgcttgcaagttggaaaagggagaaaaatcaattatatggctctgtacttatagcagtagttattttacactagtgttctttagtaaaacacactcacaaggttttctccaaagtactgtgtcaacaagctactgcaccatttctcctcccctttgaccatcaacattcttagtcaccttgatttccatctgcagcaagcacaaaatttctttttttcagtgatgattccacatcttctgacctgtgaaagcttaacaaccagttctcaatacagaattcctttctctgccatcatcaatttattgtatcagcacatagaattttgcaaaaattctaatacagtttctaccataatacaatcctgatttctaatccactcttctaaattatatttctccatgtcctcttccagatctttgcctttatttttcttttattacttttgaattgataatgtaattatatgcaatgataattgtccttaataat

SEQ ID NO: 460966 - DNA, 574 bp, Homo sapiens
aagcaaatctttcatttataatagaagtggaccctatttaatatgctttcaaccttttttaatcaatcactggatctttccaaatgcttgcaagttggaaaagggagaaaaatcaattatatggctctgtacttatagcagtagttattttacactagtgttctttagtaaaacacactcacaaggttttctccaaagtactgtgtcaacaagctactgcaccatttctcctcccctttgaccatcaacattcttagtcaccttgatttccatctgcagcaagcacaaaatttctttttttcagtgatgattccacatcttctgacctgtgaaagcttaacaaccagttytcaatacagaattcctttctctgccatcatcaatttattgtatcagcacatagaattttgcaaaaattctaatacagtttctaccataatacaatcctgatttctaatccactcttctaaattatatttctccatgtcctcttccagatctttgcctttatttttcttttattacttttgaattgataatgtaattatatgcaatgataattgtccttaataat

SEQ ID NO: 460967 - DNA, 523 bp, Homo sapiens
ttaacaaccagttctcaatacagaattcctttctctgccatcatcaatttattgtatcagcacatagaattttgyaaaaattctaatacagtttctaccataatacaatcctgatttctaatccactcttctaaattatatttctccatgtcctcttccagatctttgcctttatttttcttttattacttttgaattgataatgtaattatatgcaatgataattgtccttaataatgtaattatttgcagtgataattttcctagccacatcaagctggcgtaaatattatgggtaacactaaaaaagtcttccaaaagtcttcagctaatctcatgagttctgtctttccatatcctgggagacgtgagtctctgtctctttttggtttccttaggtgtctcactatggatatctgagttattcttccaaatataagaacatgttttcgtactctgatactctaatgaaaaggtatcacatggatttggctcttagtttctaactattactgatttagct

SEQ ID NO: 460968 - DNA, 602 bp, Homo sapiens
gcattactctaatttcctcttttcattaggacctacaatatggaaacctctgcatttacgcatgactaccaaaccttcccactcataactggrtaaaacatgcttgcccctatctcaagggtagatccttttcatgagctgcagtggttttccactcgtgttctcaagtgagagtgtttactggtgttctctctgcaaatcagccacaagtaagtaatttcttggacatctctttccccagatttcagattacttggtttctctgtaatttcaggtctctcatagcttcaaaggaacagttaatttgcagtttcttcagatattttattattatcaggatgtcaacagtattctttctagctcactctttctgtaagctgaaaattttagaaatcttctgaattgttttagaaaaatctagccaagcatgatgcatatctttaatcccagctacttgggaagcagtggtggggtgattgagcccaggagttcagggctagcctggtcagcattgtgcgaccccatttcattaaggtttctttgcatatactatttcatatgtaactatcaccattttaggtagccctttttttctttcccaa

SEQ ID NO: 460969 - DNA, 451 bp, Homo sapiens
tatgaaatagttattgaatttattttgagtacttatgaatcttcgtgaagaccaggagtcaaaataacaatcactaataagagtattaattctactttgcttgcctctctgcattttttctgttagtgtaaacatccactagacaggtaggtaaacatttcataaatctcaagttaaatgagataaaaatgacatggcatctatgaaaagatccaatagtcaataacgtttgtggcattaaaattgtcactacacagacttctagcacaaaataagcaccaaaaaaataaagaaatgtatctaatctactcttattcttctctcragaaattatcgaatttagctggacagagatagtagaaagaaaattttgggataccaggcagttaggggtcaaataaccctgtttgaagcacagggagatttcagtcatcataaggcatcttatggt

SEQ ID NO: 460970 - DNA, 465 bp, Homo sapiens
tgtctacaaaaacaatgggttgaattggagtgaagatgttcctaaaacatttaatggataaccaaaaaagataattatttattaatagaagtattgttgtttcaagatctctcctaagtaccatcttaaattatttctttttaaaattggtgtttcctttagtaagattaaaaaaatacgtatgtagaattcctgcattgttattgatggtatcatagttcatttgagtagtgataagasaatgtcacaggccaggtggtatgtaaggaacaaaaatttattctcacagttgtggaggctgggaagtccagcatcaagggttttgcaaatttcatatctggtgagggtctgcttcctggttcatagaatcttttctcaatatgttcctcatatggaagaagggacaagggagctctctggagtcttctttcatagataatttatcccacatatgagagttctatc

SEQ ID NO: 460971 - DNA, 543 bp, Homo sapiens
tacaaggttacttgctttcagcctgaataacttcctgttacatattgtaaagccaattttccaartaacacatttgctcagttttatttgggtaatgattttaccatttgttttaaaagatacatttgctggaaaacaattcttggttgtcattatttattatttcatagcctcttggcattctggcctctttattttttatttttttatgagttgtcaactgttagtggaatcccctcagaggtaacaagtcatttgttttttcctactcccttaaagatagacctctttgtcttttaataaacttttataatatgtctgtgtgggtatccttggatttatcctgcttagagtttctggagcttcctgagtgtatagatttcttttcatcaaatttcaaatgatttctgtcatttgaaaattttattttcttttgttagtttctctttgaggtactcacactagtacactagtttgcttaatgttgtcctacatttccctgagctctgtttatttttgttaattaatgaatcttaattcgct

SEQ ID NO: 460972 - DNA, 610 bp, Homo sapiens
atgagttgtattttttatttacattcacttcaaaatagttttaattaaaaatattttttgcccatttgttacttataatcgagttgattaatctacaaatatatgtgggtcttccacctatacttctcttattgatttacaatttaataccactgtggtttaataacacattttgaatgatttttattcttttaatttgtaaaataaaatttatggcccagaatgtggtctaatttggtgggtgttttatgtgagtttgagcaaaatgtgtatttatttttttgttggatggaagtttccataaatatcatatacataagatggacttataatgccatttatgtcaatttcatccttcttaacagctattttgaaagctacaactataatagtggatttgtttacttatgtcttaacttctcttaattatttgttgtgtattttaccactgtagctaggtgtatacacatttagaattatatcttcttggagaattgacayttttattattatgttgcacctctgtttatctccaataattcttcttgctctaaagtctgctatttcaaaattaatgtagtgactccagctttcctttgatcagttttag

SEQ ID NO: 460973 - DNA, 605 bp, Homo sapiens
acagaacaaaataaattgacagaaactgtccctgaggaagtccggacattggatttactagaaaagrttttaaatatacagttatatgttactaaccaatggcaatatgtcctaagaaatgcattactggacaattttgtcaatatgcaaacatcagattgtattcaggcaaagctagatggtatagcgtactatatatctagactatatggtgtagccgattgctcctaggctagaaacctgtaccgaatgttactgtactaaatattgtaggcaactgtaacacagtgataagtattatgtatctaaacatgtataaacatagaaaagtacagtaaaaatacaataataaatcctatgggaggacaatcataaaagtggttggtcccccactgactgaaatatcattacgtggtacataactgtcctcacagaaaaacataaaagtaaaaacataaagaactaaaagaaatcatgaaaataatgcacaaacaaaatagaatgaaagaaagaaagaaattccaaaaagaactaaatataaattctggagctaaaattataatagacattttaaaagacagaagatttgagcaagcagaaaatat

SEQ ID NO: 460974 - DNA, 570 bp, Homo sapiens
cccgcaacaaataaaatatttttaaactcacgccattctattgatcactttagtcagaagatctactaaataaaactaagtgcgtaatcattattgagaagtgtgataagatgatatttaaccacactaaggacattggcattcttacagtcataacagtccagttcatttagaaatatttagaaatatgttgcactttccatcttgtacattattgtattactaaacaaactgatatttgtcttcttttctcaggtcctagaatgagaacatcaaaaatattgtagaaatacacttatagcttaaaaatatgcatattcctttccttcaatatttcatttctacaaagtaaagattcacctcttaagtacggcaatttaactgtatttattactaaaaatgtcatgacaaacgatcttaaaaatataaaaacacatatatatgccatgctgatttgaaataaaatatgtgtrttataggtttgcatgtatgtttagttatatataatatatagatatatatgtacatgtacatatatatgtatataaatctatacatatagatgcacaa

SEQ ID NO: 460975 - DNA, 567 bp, Homo sapiens
gttcagcatcattaccatcagggaaatgtaaattaaaaccacaatgagataccactacatacatacctactagaatggttaaaattaaaaagactgacaacaccaagtgttgatgaagacgtgaagcaaacgcaactcttacaaactgttgatgaaagtataaaatggtacaatcactttagaaaactgctagtttccaataaagtaaaccttacagcctatagaatattttcacaaaaagacctgcagaacaatgctcataatagctttatgcatgatagccaaaaattagaaacaacccaaataactgtcaataggaggatagataaataaatagtagtatattcattcaatggaatactactmagcatgaaaaggaacagattagttatactttcaataacatgaaagaatctgaaaaatatgttgaacaaaagaagccagaacaaaattgtatgtttccatttatatgaagtttataagcaaataaaattaatacatagtgatagaaacagaagagtggttgactcagaagatcagagacttactagaaagaagcacaaagga

SEQ ID NO: 460976 - DNA, 514 bp, Homo sapiens
aaatattttagctaaaccttctgattagccaggagcatgtttccaattttttcttggaactactagccccagtcatattcatttttactacctcctttgacacatgttccttatatgacatagtctctgcatccttcctcattctggacatacctacccagtttgacaatgtctcacttcagatgtgatacaaaaaaggaaatatactacccataaagtgattttcagttcttcactcaataaatcaaccaaaaagtaaataaatatayactgaatcacaggaaacattttagaatgatagaatgctctatatcttaatagggcaatttaaaaattgttgttgtaggggtaaacaaggtggtgaaagtcaagcacttaacacagagcctggcacattagtcctttatagatcactgcaaaccaatgccttcatggcactctatctgcatgcagtattatcttcagctcagagcagtgtattttggaagtggcattaacaaactggaggcagaaa

SEQ ID NO: 460977 - DNA, 530 bp, Homo sapiens
actatgtcaataccttagcaatatcaaacagtacctcacaaacttgagtaatgcagaacagttgtgattttaaaagtaagtcacttttatcatacaggctattaaattattacaattatgccaggcatgatggctcacrcctgtaatcccagcaccttgggaggctgaggtgggcggatcacaaggtcaggagatccagaccatcctggctaacatggtgaaaccctgtctctactaaaaatacacaatgttagccgggcttggtggtggtcacctgtagtcccagctactcgggaggctgaggcaggagaatggcatgaacccgggaggtggagcttgcagtgagccgagattgcaccactgcactccatcctgggagaaagaatgggattctgtctcaattaaaaaaaaaaaaattacaatagcaaaagtaagtataaactactttttttcagtagctattttattataatagcttctgaagaaaaataattctaaaaaaatacaaattaagtattactaaaactact

SEQ ID NO: 460978 - DNA, 530 bp, Homo sapiens
actatgtcaataccttagcaatatcaaacagtacctcacaaacttgagtaatgcagaacagttgtgattttaaaagtaagtcacttttatcatacaggctattaaattattacaattatgccaggcatgatggctcacgcctgtaatcccagcaccttgggaggctgaggtgggcggatcacaaggtcaggagatccagaccatcctggctaacatggtgaaaccctgtctctactaaaaatacacaatgttagccgggcttggtggtggtcacctgtagtcccagctactcgggaggctgaggcaggagaatggcrtgaacccgggaggtggagcttgcagtgagccgagattgcaccactgcactccatcctgggagaaagaatgggattctgtctcaattaaaaaaaaaaaaattacaatagcaaaagtaagtataaactactttttttcagtagctattttattataatagcttctgaagaaaaataattctaaaaaaatacaaattaagtattactaaaactact

SEQ ID NO: 460979 - DNA, 528 bp, Homo sapiens
caaatagacctacctggtaaaatatatgcattatttcttatgacaaaatgtcccatgttcatttttttccctacatagtaggtagtagctatatattttttttttttgagacagagtttcactcttgttgcccagactggagtgcaatgttgtgatcttggctcaccgcaaactccgcctcccggattcaggcaattctctcatctcagccttcccagcagctgggattacaggcgcctgccaycaagcccagctaatttttgtatttttggtagagacagagtttcaccatattggccaggctggtctccaactcctgacctcaggtgatccacccacctcagcctcccaaagtgctgagattacaggtgtgagccaccgcacccggttgtgtctacaattcttaaaattcatttctttgaacaatgaatgctagacattgagaatgatgcaaaggatatatttgctgtcaatgttgcaaggggcaggattcaatctagaaaattattagtgtttagtgtgggtcct

SEQ ID NO: 460980 - DNA, 327 bp, Homo sapiens
acactttctttctttgaatatcattgatatgaaatatmacagtgtggttctctggaagcagatgttgagattgagattttctgcaggataattattgaatgataacatcaggggttggaggaatatagtacatacaagattaagcaaaagaaaaagacaaattgccatgaaatcccaacaaagcatgggccaaccccacgggaagatctggaatattccccatgaaactctgatagatttggcttttggttgtctgaaatggttaggcattgtaccacacttgacacatctgcccccatgcaattcaataagggttctttcttgaca

SEQ ID NO: 460981 - DNA, 528 bp, Homo sapiens
caaatagacctacctggtaaaatatatgcattatttcttatgacaaaatgtcccatgttcatttttttccctacatagtaggtagtagctatatattttttttttttgagacagagtttcactcttgttgcccagactggagtgcaatgttgtgatcttggctcaccgcaaactccgcctcccggattcaggcaattctctcatctcagccttcccagcagctgggattacaggcgcctgccatcaagcccagctaatttttgtatttttggtagagacagagtttcaccatattggccaggctggtctccaactcctgacctcaggtgatccacccacctcagcctcccaaagtgctgagattacaggtgtgagccaccgcacccggttgtgtctacaattcttaaaattcatttctttgaacaatgaatgctagacattgagaatgatgcaaaggatatatttgctgtcaatgttgcaaggkgcaggattcaatctagaaaattattagtgtttagtgtgggtcct

SEQ ID NO: 460982 - DNA, 536 bp, Homo sapiens
tgacacattccatgatagacacacaaaaaggaaacttcacaaacaataacaacaaatgagccaccaccaccaactctattaatctgcttctactaaatccaaaaaagagtcactaaggctggttggacccaatgaagtcacaaagactccttttgccgggaaatcacatatctagagtaacagcatactgagtgaccaccttagctccttgtgccgtaatctatgatgttaacaccattctctgccttatatgttttacattctgatatagtagaaaacaaacccaagggaaataaagggggaaagaaagatgtttacctaaggcccagactagagcattaaacctagccatctactgcaagcctattttataggggtcttcatctgacactctaaagagggacttctgtcaatcagaaaaaaaaattgctaaggtgtgttawaaagaaaagaggaaaagaaaaataattactgagatagagaacacaaatagcccatgtagaattagaacaccaattccttttctattaaatttc

SEQ ID NO: 460983 - DNA, 611 bp, Homo sapiens
tttatatctgtctctccctagctctttcccttcctccctccttttctctctcctgtgctggctctctctttctctgccttgcaaatgactctgaggagctatgctggtagatgatttatattaagaaaaaaaagcactcaaaaaaaattttttttgaactgggctccctgagagcactcagggctgcctcgtagtgctcaacgcctacctgctcaactgcagggaaacaagcttctgaaggctttaatgggattttgcctgaggctgttttattaagatgtcggctttttctgctgcctctgcagctgacaccattcactgtcagctgtcccctccccttcccaccgccattgccaccccccccaacaatgcaccaaattattcgcttcatttagtgctcatggctcagtgtgggcaaattgggagaaggagccctactgggccagatgaaccaggcggagaggtgaaaagccactgagatacttaactgggagtttaaaaggaggggggaggccaaaaatggagagctaaatcaatgccactggggyatacttccatcctattaggaagaatcatattcagtatcaacatacccattttggaagtgcatt

SEQ ID NO: 460984 - DNA, 608 bp, Homo sapiens
gtacagggagagtatttaaagccaaataattcattcttaattacctgttatttttacagcaagaataaattaaacacagctcagcagtcatagtggtcaggctttggtgtcaatggtgacatctaattagtagaggaaaatttatgtttwtgtataacagatctattaagtgctcaggatgtatttagagttatttataatgagtgttgacacaggaaaaatgtgtcatgtccccattttatggatcaggtaactaacagcataataagacgcaattgactcaagatgatacagcaattcagcatcagaagctgagaaaaatattgcactctatttcctttgaaaaacctgaccaataaccctgtataatagaaatgctttcacttagaagtcattcattcattccataaatattcactgagtcccctattttgtacttactacatagtgtttcatgtactggctaaaggtaaaaaatcaaaagcaaaaattgccattatgtcggctctcatgaaacttccagtttagtggagaggacagacattgctggctggaagtggtacagtttaataaaagcctttattaggaggatttgaggcagtttggag

SEQ ID NO: 460985 - DNA, 551 bp, Homo sapiens
ccatagcttccatatctctctagtcatctttcactcataaaatgggatttatttaagtaaggagtcattttgctgataattttaytcaatatgctttttttctaacacaaagatttggtgacaacatattcagcctttcttagtttatgtttttaattttattaaatcaattgcttagggatcaagtccgctcataaaaaaatagaaaaaaaaaagcctcaaacactccacaagaatagatgttgagccaaaatctctgtaacttaatccatccaacagtccagaaatgtacacagaaagatgaatgctgttgtatgatctatatttttaaaatgttgatttgaagttacaaattttcctttttctgcaatatgtattcattttccactcagactaaacagaattccacaatttcataaattatcaagccatttaggatgcataattaattggattgtactgtgccatatttatgagggttattcatgcacagtatgagataatcataaattattttgttaacaaaacctcttgagagagtttttaaagag

SEQ ID NO: 460986 - DNA, 579 bp, Homo sapiens
ttccctggtcttttcttacggatatgtgaagtttcaagacaatgccctgcagcctgcttggtgtattatgaatcgtttattattattatttttttccgtcaattccaactcactgatttctgttagaataatattccagtccacattcatccaacagaacaaaatcagcataccttaatatattggccaccctatctttagcacttcagacaatgcagggtggatgataattatgttactttttgcatttgtgcatgtgccacactgtgccaggcacttyacatatttttattgtttcttatccttgtgacaaccttatgagatacatgttgtgattctcattttataggaaaaaacattatttttagaggcttaatacatgtgatggaggaggaagctgaggaagagaaagaacaggagcacaagaggataaggaatggaaggaggcttttctgaagaccattcaggtgggattcaaactcagggttttgcagctttgacactgaagcctgtgctttttccaaagacacatgcataataaaaacaggaagaagcctgcagcctgggactactggacac

SEQ ID NO: 460987 - DNA, 570 bp, Homo sapiens
tccccctagactgagcagatctgtgtagaggagacagaggcagaagcaggataccttactcctctctctatggtgctatcctgggcttttacgttccatcaggatttcaccactcccttggtgctcctcagcatacttgctcagtcattctagccaaaatacaggggtttatgccctcatttccctatagctgttttgttccttttttgggggaagatgattgccagccaactgtacttggctatgttggtgatattactctttaatagcattttaaccacctttccttccttaatttttacctctctactgtccatttcctataaagaarttatggaataatttaaaattcaagtcagatcaagtaattcctccaaaaacttcccatctcattcaggtaaaattcaaagtgctaactatgtcttgcaaggcccttggtgattgggactatagagcatatctcttgtcattcctcctgtctcccactttgctacaggcaccctagcctctctgctgtccttaaaaccactgccatgctctcccttcagggcatttgtgtatgtggtcctt

SEQ ID NO: 460988 - DNA, 431 bp, Homo sapiens
tttgaggaaagctgctccttatatgtgttctcatagaatctataacttaaccaaatgttctttaccatgcatgacaattgcttattagcttgtcagactcttccactggcaacaaatactgtaatatttcctcacccagatcagtttgatttatatggcacaattatctgttaaatacatgaataatcatactttattracattataatacagaaaaaggagtgataaactattgacaatggcgatcagtattaagggtttgggttccaatgagaagcagagaaatgggccataccactgttactgaagctctaatacatccaccaactacaaagtatgaactaagaaaatgccatacagtgtctgctactgagcaaacaaaaacacctcttcaatgaattttttcataattaatatgtgagcctctgaat

SEQ ID NO: 460989 - DNA, 564 bp, Homo sapiens
agcagcataactttttccatgctcttttccattctttttttctttttggctgtcacttagtttacattttattttaaaaaggtaatttttaatattttatgaaataacattctccattattttttattccccctttctttggctgtagttttccttgcagcatttatgggcatgaggagatattatactttggatttagtgatgcactggactattccattccctttatttctagaatgtaagcttgttgaagacatggactgtcttagtctccttgtactgtgataacaaagtaccatcaactgggtgacttagacaatagaaatttattttctcagagttttggaggctagagtctaagataaaagtgccagcatggtcaggttctagtgagggcagtctttctagcttgcagacggacactttctttctgtgtgctcacatggtctttycttggtgtgtgcatgagaacttgaagtctttctcttttcctttttttataaggccttgaatcctgtcagattagtattccacccctgtgatctcattgaaccataattagct

SEQ ID NO: 460990 - DNA, 660 bp, Homo sapiens
gtctatctctctatttttaaccatcctgaatgttgtgtaatagtatcttattttggttttcatttgtttatgcctgattactagtgatgttgagcacagtttcatgttgtcttttcatgttgccatttctatgtwcttttgtgaaatatctattcaaatattgattttttttaaaaaaaatgggttatttgtctttatattatagaattgtagaaattttctatataatttgaaaatcagtgctttggctgatatacatattgacaatatttttcctagtctgcagtttgacttctcattttctgaatgatgtcttttggagggaagaagttcttagttttgatgaagtacattatattattatttacattatagtttgtgtattttatttcctatgtaagatatccttacctacctaattttattaatactttcccttatattttcttctagaagatgtatacttttagtttgtgactgcaggtgtagaatttattttgagttatttctgtatgatgcaaagtgaaggtcaaaatttatttacttattttccaaaaaagattatcctgcttttctagccccattattttaaaagattatctttctcctcaataatacattggcttacttattgaaacaaactgaccttacacgtgtagg

SEQ ID NO: 460991 - DNA, 516 bp, Homo sapiens
aaggaaatactgagtcaaagggtgtctaaatagagattttgaagctcttaaaacatatatatgtgttgccttctggaaaaattgtaccatgaccaccagtagtatatgaaacaccccattkctttagacctttactagcattgctgaatatttaattgatattaaatggtatttaaatgatatttacaattaaatgacatttatttgtctaaagttttatttctattattttatggtttaactttaatcatattgattatttgagttttttaacttttttgtgcttgtaaattatctattcatgtcaaaagttgtttttcagaggcaccaaataatgtcatctgaaatgttgccagcatttattgaaacttctaatgttgacaaaaagcaaggcataagtatactaggagttttcatcaacaattgttgaaagttgtaaaattcttgttctgtatctattgagagaatcatatgatcttacattttaaatctgttaatatggtcagttattttttg

SEQ ID NO: 460992 - DNA, 567 bp, Homo sapiens
attccggcctgggtgacagagcgagaccttgtctcaaaataaataaacaaataaataatacaaattcaggaaaaaaacactaagtaattatataacctaataagttattataacataaaygcacctggtcatcatcaggtcaagtaatagaactttgtaatctaccctagaataccaatccctgtgccctatcttcgtcacaagccgctaccttctgtaggcaaccagtattctgacttatatagtatttatgtgtttgcatttttaaaagaattttattatcaaaatgcacctccccaggtgttatagtcatgcctattaaaaaaaatagtatctttgaaatctcttgatcattagtttccttgctaaacctttgttttactaaattgttgacaaacccatgctgaatttcctgtagagattcccacaatccggattgatcatatactcatcatgcagtttaacatgttcctgtctctgtatttttcccaatttggtagtgagatcttgaaagtgtttcagactcaggtttaatcttttgggcccaactataagtgacagttggca

SEQ ID NO: 460993 - DNA, 554 bp, Homo sapiens
caatccactgcagtttttatcattactgaagttcaaaatttcctgtatttggtcagtaggagccttttttaatttggcccctaagttctccaggagtcatcagtagtgttcctactctctgataggataaaatrttccaggctcaaattgtacattttattttcaaactggaaatcgacctcttctctaataattttttttaaatttaatgtcaatacttccaatccaaattcaggagtatggatttttatctcatagtactacatctgcatcctctttcttccacagtaatgatcttagttttcaagtatagagaaatgataggatcagaatattccataattactcattgttctacctcatattgcatacgcaagtatctcagaataataaatataatactactgccaatatggcagtagtgttattcccattcttccctgtatttttcagttttactacatctgactgtcatagctatagtcattccatactatactcttacctcttagctcttatgtagctgtagctctatgtttacaggtgactatata

SEQ ID NO: 460994 - DNA, 583 bp, Homo sapiens
ctctttcttccacagtaatgatcttagttttcaagtatagagaaatgataggatcagaatattccataattactcattgttctacctcatattgcatacgcaagtatctcagaataataaatataatactactgccaatatggcagtagtgttattcccattcttccctgtatttttcagttttactacatctgactgtcatagctatagtcattccatactatactcttacctcttagctcttatgtagctgtagctctatgtttacaggtgactatatatttaatgttcatggctagttctatgttaacatctctctaattstttggtttcctgaagaattttctctggtatcagggatgatgtgagttccctgagttcttacatcccaatagcagtttgtctgagccacctttacacttaaaaatttattttactgattataaaatcctttttccatacatcattttcttgaatatttaaatgtttatctattttttctgagataaaatgttaaaaattcttgtgataatataattttcttttccttatatattaggtattattttacaaagaaaataaa

SEQ ID NO: 460995 - DNA, 583 bp, Homo sapiens
ctctttcttccacagtaatgatcttagttttcaagtatagagaaatgataggatcagaatattccataattactcattgttctacctcatattgcatacgcaagtatctcagaataataaatataatactactgccaatatggcagtagtgttattcccattcttccctgtatttttcagttttactacatctgactgtcatagctatagtcattccatactatactcttacctcttagctcttatgtagctgtagctctatgtttacaggtgactatatatttaatgttcatggctagttctatgttaacatctctctaattgtttggtttcctgaagaattttctctggtatcagggatgatgtgagttccctgagttcttacatcccaatagcagtttgtctgagccacctttacacttaaaaatttattttactgattataaaatcctktttccatacatcattttcttgaatatttaaatgtttatctattttttctgagataaaatgttaaaaattcttgtgataatataattttcttttccttatatattaggtattattttacaaagaaaataaa

SEQ ID NO: 460996 - DNA, 588 bp, Homo sapiens
ttgtttgtatattagtatgtactctttaaagagaagcataagatctgtgtggcaaccatgtcttcttaattaagtgccttaaaattttgattgtttaggaatatgtatttgcttgcaaattgttttcattaatattaacatagtttaaattaataagtcagacttaactacctaacaattttwaaaaagttttttttgatgttaccaaacttaataaaattttgttgtcaagattttaaaataaataaataaattaggtactttttttatctaaatgcacaaagaaacttttttcttaatgtttgttaattttttaaggtgttgttcgtctaggttaaaatgatcaggtttgcaatttagttccaaataatactatttttcatttgattttggattttatttattttcatcttgtattttctgtaaaatgtaagctgttgtagttattaactcatgtgttctgtatagtttggtcttcctttctaaaatgattttctcttatttgttattagtaactttgttttgtattctcttttctaaattttcctaattctgatttatattattcttttatgtttgttatcgaaa

SEQ ID NO: 460997 - DNA, 564 bp, Homo sapiens
caatttagtaatatttattaaatacaagttaaatatacattcaaatttcattagtagttttataacttcatcttatgaaattaccagagtattcttctgctgttcagattctatttgttagttaaacaaattaatgtgtatttaaaaatatatattaagtattttattaaaaatatgtcctaattgatcaaatacctaatggtacttgaatatgcacagaatatacaactattttctgcacatcagtttcctcagatgacatttattttatccttggttttgtgtgcaatgttgctaagtttctgtggtaactcaatcactttatataaaatggagattatttcattaactaccaaggcagctactattgctgggtgttactgtgtcataggaatgagttgaagcaattttccagtgacrcaaaatgcttggactacacttacatgtagactcgaatctcctcccttttgaaggggttgtcacagttaatagatgttatgaaatctaatatcctgtcttcttctcaagccccacacatatgctcatccagacaggtaccaaatt

SEQ ID NO: 460998 - DNA, 582 bp, Homo sapiens
tgatttttctctatcttttgaaagttattaactttggcattatttttcccagcctgcttttatgatgatatgtattatgttaccagatatctgagtcatctgaggcatgtgtttcctgtactacaaactcctctttcagaaggtttatgagcaagcagaattgactccatttgagaggcatgggagggacccttagtaattatcmctgtgcctcctgccatctcctctctcctgaaccatgtagcggagcaaatgcatatcttgggtcatgcagctaaaagtccttggaaactgtctccctattgagtaagccgtcaaaaaaaaatctggggacttaaaatatcagttcaagctattcctcccaaactcatgatgacaacagaactgctgaccttcaatttggcacctgctcttgctaagcaacttgatctcatatttaggacttttccaaaatattactgccttacgtagacaccctttttacagccaaggtaagaatctagttctcttgttgtaatctagttctcttgttgtagcaagtctatttgtcactcatgggaattccatggaattaggacaaat

SEQ ID NO: 460999 - DNA, 349 bp, Homo sapiens
gagggaatctgctggtgctgcctcagttcctttgggctgcaccaaaagctagaaaccctgttaaggcagttatctggggcaatcatagggctctcaggaatcactgtccttagttgcctgatacctattgccttgaaaactgttgttttctatatctacctgccaatttttttgttgtttgttttcagataagagattaaatcttgtctttgttactttattttggtcagaattggatgtmctttctcatcatttagtcaatgataattgtcctttgattctctgaactattctagtttcctaccgagaagtttcctttttgttgaaactggcttgatttaggtttttc

SEQ ID NO: 461000 - DNA, 539 bp, Homo sapiens
tgcaatcttttatacctagagtgttcaatcatgtaattccctggttagagtttcattctagatagtttgtccctctacaaactatctacaaatggagtccagggctccaaccttaggcctatgccatgtcagcatttcgtatggtactctctctctgtccttgttgatatcttgcatcttttcttggttctgtagtrcatttttaaataagaaatgtgattggcctggcttgtcagaatccaatgtaggaggtcactgcaaagcttatggattggtgactcttgagtcagatgcacatccctttcaatcagctgagcaaagggtagggcctgtgagtgggcagtttccttcagatggggatgtgggctcgcaggcacatgaaaaactgtaaaggaccttatagagaatgaaaagtcttcatattaattggtagaagggggacaataaaccctttagcatgtcagataccacagttacaatttaagatgactcactagagtggaattctggcacaagatacattcattggtcctcatgga

SEQ ID NO: 461001 - DNA, 535 bp, Homo sapiens
  misc_feature (1)...(535): n = A,T,C or G
aaatttatagcagctttattcataattgccgaaacttgtaaacaatcaagatgtccatcagtaggttaatgcataaattgtggtacttccagacaatggaatatatttagcactgcaaagaaatgaactatcaagccatgaaaaaacatggaggaggcccgggcatggtggctcatgcctgtgatcccagcgctttgggaggccaaggggggcaaatcacttgagcccaggagtttgagatcagcctgggcaacatggcaaaactctgattttataaacagtacaaaaaaagtctgaaaaaatgaaaaacagtacaggcatggtgacacaagcctgtagtcccagcaacttgggaagctgaggtgggtggrttgatttagcccagaaagttgaagctacaatgaactatgatcacaccactgcactccagcctgggtgacagagagagaccctatctcaaaaacaaaaacaaaacnnaacaaaacaaaacaaaacaaaacaaaagacatggaggaaatgtaaatgcctactacca

SEQ ID NO: 461002 - DNA, 535 bp, Homo sapiens
  misc_feature (1)...(535): n = A,T,C or G
aaatttatagcagctttattcataattgccgaaacttgtaaacaatcaagatgtccatcagtaggttaatgcataaattgtggtacttccagacaatggaatatatttagcactgcaaagaaatgaactatcaagccatgaaaaaacatggaggaggcccgggcatggtggctcatgcctgtgatcccagcgctttgggaggccaaggggggcaaatcacttgagcccaggagtttgagatcagcctgggcaacatggcaaaactctgattttataaacagtacaaaaaaagtctgaaaaaatgaaaaacagtacaggcatggtgacacaagcctgtagtcccagcaacttgggaagctgaggtgggtggattgatttagcccagaaagttgaagctacaatgaactatgatcacaccactgcactccagcctgggtgacagagagagacsctatctcaaaaacaaaaacaaaacnnaacaaaacaaaacaaaacaaaacaaaagacatggaggaaatgtaaatgcctactacca

SEQ ID NO: 461003 - DNA, 502 bp, Homo sapiens
caaatatatatttatggaatcaaactctgattcctattagtagaacctgtatctaataaaattgaataataaaatatgcaatacctaaaaaaggaaatgaccatagacctgcttaataaataatgatttattttctcgaagatgacacacatcaaatttgagtttgatatgaagttgaaagaaattgcgaacttgttagatgacagaatttggagtaaaaaagctcttaacaggctagaaaattgagcctaattttaacattgcactagatamaacttaagtgacaagatgaaaggtttttttttttttaactgggctttaaagtaggagaagcatgtgtgtgtttgtgtgtctgtatatatgtgtgtgatacacatatatatggagtgataacatgatcattaagtgtcaagtaatatgtgaacaatttatatgaattatcccatttcatacttatgactacctgagactataattactcctattaattctaccaaagcag

SEQ ID NO: 461004 - DNA, 546 bp, Homo sapiens
cctgcttaataaataatgatttattttctcgaagatgacacacatcaaatttgagtttgatatgaagttgaaagaaattgcgaacttgttagatgacagaatttggagtaaaaaagctcttaacaggctagaaaattgagcctaattttaacattgcactagatacaacttaagtgacaagatgaaaggtttttttttttttaactgggctttaaagtaggagaagcatgtgtgtgtttgtgtgtctgtatatatgtgtgtgatacacatatatatggagtgataacatgatcattaagtgtcaagtaatatgtgaacaatttatatgaattatcccatttcatacttatgactacctgagactataattactcctattaattctaccaaagcagacactgaatttcagagtggtaagtgatagagtcaagatattaacctgatcctggtccamctgattataaagaccaagctcttattcatattctatttgcgtttctttagctaaatatgagttacattttacatgactactcaagaaaccca

SEQ ID NO: 461005 - DNA, 600 bp, Homo sapiens
attaggtaagggaatgcctaatggcagagagaagattacaaaacggtttaatcctggagtacaagaaatattaactgcactttttgagaatccagactaaggattacaaaatatatgactggtgtcaactgaactcctctcaatagattattatcctcatattgcagccagggaagagcaagttatttacatacttgagagaaatttagctagtaagtaaatgaacttgcattacaatcaaagtgtctataattccaaaggtcagcctcctttcactattcaaatcctcttctaactgttgtgtcagtttacaggatttctaggcattcaaggtagattcacgctctaaatccttcactcttaggaataaaaaaaaaatgaagaaatgaaaaaagcagattatattatggacattttaggtgtttaagatagtccaacaaataattttaatgtgtgaccttaagaacagccaaataccgaaatacccccttgcattgccatgacacattgtctgatactgccagccrttgatgatttagtactatttgcaatatccctgatatgtttttccgtaactactcataatcatttacttacatt

SEQ ID NO: 461006 - DNA, 451 bp, Homo sapiens
tgagagaaccttgggggcaggaaggtgaaccaggtcccaggttgggtacaatggggcataggagaggggcaggggtagcagcctcccccttgggatcatgtgatcaccaatggtaaagagagggcaatggaagaagaggtacattgctctggggatacacagccttcttcaaaatttctttaggctcacctgtgggcgaaacctatagcgtcaactatgtggtcaaaatttggacgataaaagatttcaaaacactggaggtactaacttcagattaaagggattgaagtaacactagagaggcacaagggagtaaagaagggaaagattgctgagctacagtaaggatctattcattcatctgtgctgtaaacacgagagtgctgcacattcttgacaaagaccccaastgggagctttgatatagttgcaaatatctgggcagatgcaa

SEQ ID NO: 461007 - DNA, 530 bp, Homo sapiens
ttttctccctttgttaaataccttggtgagaaaagtcctttttatactgtcaaaaatagaatctagcgactcagacatatgagcaagtctttaaggctgacaaatctgaatggtgaagaaaaatagaatagcacaattcaaaaagcagcaagtcatatgcatgtatctgaaaacacactcaarcacacacaccatctccaaaacatagacatttatacctaccaagttatactccattctcttctcatggcctaaatttgcttttgaaattatactcttctttctcttaacccataatgattgtactttcctttctcttacctaaaaatactacaaataatgcagactcaacaacacaggaggagtggaaatttaaaaacacaaaaatctttcttcatctgtgatatagtagttcctctctttctctttctttttctttctccctctccagctatatcatacatcatcatcaatatgttgatgtgaccatcttctgggtatttatctatcctccattcatccacacatcc

SEQ ID NO: 461008 - DNA, 590 bp, Homo sapiens
attttaacgagagaccccaaaatacagtggtttaaatgagactgaaatttattttattcctaccttaaaatcttgaagtaggtcaccagggcagctaggactgccccatgtccattgctcctggaggtttcagggggttcaaacttctattttgatgctccacgaaaatgactattaccctatctgctctcgagccagtggaagggggaagggatgaacgtgccctatttgtatcargggaatagaaagaaagctgtagatgtcttttctcttcacacccattgggaagacttcagtcccatggtcacatcttcttgcaaaagaggttgggaaaggtagtcactgcctgggttttccatgcatccagctagaacatcggggatcctttattaaaggaagggggagagaatggttgttggggaaccacagcagtctcacccacagattctgagaggaatgaggtgctgtgtgacattgtgaagcctatcataaaaacaagatctggaaagaaaggcactcataccacctgttttctctccctaccatgtagcccatggtgcggaggctgcctgagcccaggcttctaacca

SEQ ID NO: 461009 - DNA, 630 bp, Homo sapiens
aaggtaccggggaccacagaccagtggccacaatgtggctttccaattttcctaaataacaaatgggagtggtcagttttgtttgcttttttttgcaattttcatattctttctccactggtgtatattgggtgtgttgaggtgtaaacagcttaccatttaacaagtcagtgyctaggccataaagagttctatctggagaggatgaagaggactcacagtgttgagagatgctggacagggagttgtaggcagaaactaagtaaaactccacagcgtctccccgcgggcatggggtgagtatatcatatgtagatggagtatttttaaatgtgcatatgtagtacaagagtatgtgttggcagccaaagaggtggactgcagtggatgggagtcgttgccttcaagagatgcgtcataaaatctccagatgtcggtgtagggcctcctgtgagtctaggtaaaccaacgcaaggatggatgaggttcatgacactaggctaatcagtgacagtccatgaccctggccacagagactagtccagaggaacatgtgatccaagtcagtccactgggggtgactcttagggacaaagcgcttaggggcagggatttacagaaggtccactg

SEQ ID NO: 461010 - DNA, 567 bp, Homo sapiens
ccattcatccagcccagtgggctttattttataaagtggctttgaccacactctcttcttccccagacctgatcacctctaggctctagtccattctacttctgacactcacctctttctattgttagcacgatagccctggagatgaccctgtttttcccctttacctgggctcttgcaattaacttataactgttttccttttcttcagttctttcttctaggagtgcacccatggaacccctgcatagatctgttcaaaaccctgcagtgttgcccatttacttgcagaaaggaatctagacacattgcctttgtcttcaaggtagtgtcaaccaactctgcactcttacttcccactatgttcttagtaagaatcacrgtaaaacaacaactaacacttcttgaaaatttactatgagccactcaatattctaaagtcattcacgccatttaatcctctcatccaccctgtgacatagtcgctgttatttttgctttactgaggaagtaacggaggcagagagaggttctgtagttggccttaagtaactgcccttagaggtg

SEQ ID NO: 461011 - DNA, 567 bp, Homo sapiens
ccattcatccagcccagtgggctttattttataaagtggctttgaccacactctcttcttccccagacctgatcacctctaggctctagtccattctacttctgacactcacctctttctattgttagcacgatagccctggagatgaccctgtttttcccctttacctgggctcttgcaattaacttataactgttttccttttcttcagttctttcttctaggagtgcacccatggaacccctgcatagatctgttcaaaaccctgcagtgttgcccatttacttgcagaaaggaatctagacacattgcctttgtcttcaaggtagtgtcaaccaactctgcactcttacttcccactatgttcttagtaagaatcacggtaaaacaacaactaacacttcttgaaaatttactatgagccactcaatattctaaagtcattcacgccatttaatcctctcatccaccctgtgacatagtygctgttatttttgctttactgaggaagtaacggaggcagagagaggttctgtagttggccttaagtaactgcccttagaggtg

SEQ ID NO: 461012 - DNA, 594 bp, Homo sapiens
tgtaaaatgggaataataactctacctgctagagttttttgagaattaaatacaataatcctcatccaggacagagaggagtggctggcctacagtcctggcactcttactgttaaatgccttatggcaagagaggaaattgagctgggggacagggtggcccagtgaagccctggggcactaagggctgtgatgcttcccagatgcacctgagcacttgccacaacccatagtsttctccacttcaataccacccttaaggtttaggaatttccctggcaggaggtagaaagccagggaagtcagtggcatctgctgtcttcagttcgtcattgagtggctttctttattacttttcattaaatcccaaagaccatttatcccagattcattttagagatggagaaaatgaggcccagagaaaggaaaagttgccccaggtcacactaaagaaccagaatctgctcctctatcttcccttctggtgctctttctacctcactgtcctgaattctagaatatcctagctctgtgtgtctgtcagtgtggccctggacaccttgtccttctctttgccacatgtctactgcactt

SEQ ID NO: 461013 - DNA, 587 bp, Homo sapiens
aactgtacatcacttccactttattctgttggccaatgcaagtcatatggtcaaatccaaagtcaaggggtgtattctctgcccytcacgggaggaacttcaaagtcttatagaaaagaatgtgaatacagggttggatgggcagatttgggaccataccagtgtttgagtcctagtcccactgcttatcaatatagaccagtcattccacctctctgaagctcagttttcttgattttaaagggttgttatgagatttagaatcattcattcactccctcagcacatattgtattgattacctgctgtgtgttggacactgttctaaactgaaaacacagctgtgaacaaaactgataatctatggtgaacactgagttcagtgtctggctcaggtagtgagtcccctaactctttccctgacccctgcagaaggggtggttctcctatggttagcacccctggggtttgccctggtcatgctcagatctgccctctctctccccactgctcagttcagcccccactgaacgtgctgagctctctgctgcccccagactctccacttccatttcctctgcctggaa

SEQ ID NO: 461014 - DNA, 587 bp, Homo sapiens
aactgtacatcacttccactttattctgttggccaatgcaagtcatatggtcaaatccaaagtcaaggggtgtattctctgcccctcacgggaggaacttcaaagtcttatagaaaagaatgtgaatacaggrttggatgggcagatttgggaccataccagtgtttgagtcctagtcccactgcttatcaatatagaccagtcattccacctctctgaagctcagttttcttgattttaaagggttgttatgagatttagaatcattcattcactccctcagcacatattgtattgattacctgctgtgtgttggacactgttctaaactgaaaacacagctgtgaacaaaactgataatctatggtgaacactgagttcagtgtctggctcaggtagtgagtcccctaactctttccctgacccctgcagaaggggtggttctcctatggttagcacccctggggtttgccctggtcatgctcagatctgccctctctctccccactgctcagttcagcccccactgaacgtgctgagctctctgctgcccccagactctccacttccatttcctctgcctggaa

SEQ ID NO: 461015 - DNA, 587 bp, Homo sapiens
aactgtacatcacttccactttattctgttggccaatgcaagtcatatggtcaaatccaaagtcaaggggtgtattctctgcccctcacgggaggaacttcaaagtcttatagaaaagaatgtgaatacagggttggatgggcagatttgggaccataccagtgtttgagtccyagtcccactgcttatcaatatagaccagtcattccacctctctgaagctcagttttcttgattttaaagggttgttatgagatttagaatcattcattcactccctcagcacatattgtattgattacctgctgtgtgttggacactgttctaaactgaaaacacagctgtgaacaaaactgataatctatggtgaacactgagttcagtgtctggctcaggtagtgagtcccctaactctttccctgacccctgcagaaggggtggttctcctatggttagcacccctggggtttgccctggtcatgctcagatctgccctctctctccccactgctcagttcagcccccactgaacgtgctgagctctctgctgcccccagactctccacttccatttcctctgcctggaa

SEQ ID NO: 461016 - DNA, 587 bp, Homo sapiens
aactgtacatcacttccactttattctgttggccaatgcaagtcatatggtcaaatccaaagtcaaggggtgtattctctgcccctcacgggaggaacttcaaagtcttatagaaaagaatgtgaatacagggttggatgggcagatttgggaccataccagtgtttgagtcctagtcccactgcttatcaatatagaccagtcattccacctctctgaagctcagttttcttgattttaaagggttgttatgagatttagaatcattcattcactccctcagcacatattgtattgattacctgctgtgtgttggacactgttctaaactgaaaacacagctgtgaacaaaactgataatctatggtgaacactgagttcagtgtctggctcaggtagtgagtcccctaactctttccctgacccctgcagaaggggtggttctcctatggttagcacccctggggtttgccctggtcatgctcagatctgccctctctctccccactgctcagttcagyccccactgaacgtgctgagctctctgctgcccccagactctccacttccatttcctctgcctggaa

SEQ ID NO: 461017 - DNA, 424 bp, Homo sapiens
ttgcagtaagctgagattgcaccatggcactccaacctggccaaaaagagcgaaactccatctcaaaaaaaaaaaaaaaaaaaaaaaaaaaaaagacagctggccaaacagcaataggctgatcatgtgtatttagcgcacatgggcacagcccatggcaccaagggggacatcgaggtcacagatgaaaagacttgctctcrtagtgcttacagtttatgagccaacagccacgttaagcaacagccttcactggatatataattaggggtggggtagacactttctacaccaaagacaactctttaggctccagatgggattccggctgctcctgactggtctctcttagtccttcatacatcacacaccgtggactctgagttacacgccactggtctctcttcccagctcagccactcac

SEQ ID NO: 461018 - DNA, 421 bp, Homo sapiens
gatagcacttagttgagaagagggctgagaggagcctgggtggagttttgttaaggagagaatttttgtaagtagtatttatcgttggtttgagtaggtattaatgagcaaagtattttcaaagtaactgacaggaatttatgttgtccttttgagtgtaataaagaggactmattattaatgggaatccctaatctgactttatgatttgaaaaccttaagaagggagcgatatcctgttaaattcatgttcagtgctgaagaattttttccagaagctcatacattatccagcaggcacaaggacagctgaagtatgtttaaggatatggcacttctttttaaaaatgaacacaaagggatctgactagcctgccttggccaggaggaggagcccccttctggcaggcctagcaaagga

SEQ ID NO: 461019 - DNA, 596 bp, Homo sapiens
gattgtgcctcattttttgattagcgagaactgtgatcacggtaggtgggtaacattttacatagtgtgaacttatggcgcctatatacattgttataattaatctttagtgtcacatagataacgcagtggctaaatcatcctctcaaatgattccaaatgagattgaatgtagcctttctggccctaaaatcctgaccagtcaattctggaaagttgtattttagtgatcagcctgtggaaaaagacraatacataaatgtgtatgtattgactcaaatttttttctttaaaactattcaggttaattatagaaaatgccaagtaggaaatttgccgatggtgaagtggtaagaggtcgatggcctgggagttcactttattatgaagtagaaattctgagccacgacagcacctcccagctttacactgtgaagtataaagatggaacagagcttgaattgaaagagaatgatattaaggtaagagctcctttggtttatcagagtgtgtttacagtaagtgggaaataactctaagtatggtttctaagctcaggatagtcagttcagctcggtttgaaggcagaggattga

SEQ ID NO: 461020 - DNA, 596 bp, Homo sapiens
gattgtgcctcattttttgattagcgagaactgtgatcacggtaggtgggtaacattttacatagtgtgaacttatggcgcctatatacattgttataattaatctttagtgtcacatagataacgcagtggctaaatcatcctctcaaatgattccaaatgagattgaatgtagcctttctggccctaaaatcctgaccagtcaattctggaaagttgtattttagtgatcagcctgtggaaaaagacgaatacataaatgtgtatgtattgactcaaatttttttctttaaaactattcaggttaattatagaaaatgccaagtaggaaatttgccgatggtgaagtggtaagaggtcgatggcctgggagttcactttattatgaagtagaaattctgagccacgacagcacctcccagctttacactgtraagtataaagatggaacagagcttgaattgaaagagaatgatattaaggtaagagctcctttggtttatcagagtgtgtttacagtaagtgggaaataactctaagtatggtttctaagctcaggatagtcagttcagctcggtttgaaggcagaggattga

SEQ ID NO: 461021 - DNA, 454 bp, Homo sapiens
gtataaaaaatttcccataaaaacacacttacactttatagccattttatagggtgttagaagaattagaatggcagaataaaaatttccaagagctttctttaagtctccaagcaataaaagcaatacagagagaaataaaaagaaaatgttaaagtagtaattgctgcatatttattcataatttcaaattgtatggcttaatcccaaacatctcaaatgtgaaatattttaacacatgactgcacaagagacatcatccaagctcagatacaagaacacagaagagtttgtaaacttcttaccagcacttgatattctgcgctctctctcccattccagctgttcyctttctaactgctcttgtcgctccctttcttgcctctcccgttccagtctctccagcctctctcgttcttgtctttcttgcctctcccgatccaggcgttcctgc

SEQ ID NO: 461022 - DNA, 614 bp, Homo sapiens
cacacccagttaattgttctccttctgatggttcagttagtgctgaagctgctgttgattcagtttgtgctgtttcccatgatktgggaccctctgtatctgctacctcgcagaggccatgcagcctgggtcctgttacagcctcataactgccattgacactaagtttaggctctcataactcttcattgtcaaagttcctaaaatcccaagccctatgctctgagcaaataagagtgcttttaatcacaacattatacttcccatttcaaaatatgaatcggaacaatagaaaatctgggacaatccttttagagacgtttttacatggcaaaagaataacatgagattttggatttgccagtgaatcttgaaaatagttacattcttgcccagttcttttaccagtgttgtagaaagacaagtgccctgaagaccagtgcctgcatctgtcctcacatgccattttactcacatctgttttcaagattgccgtggaatctccccagggattgaaaagtaacttacttcagacatttggatgtactgggagtggagaggtaacagaagagatatttgaaaatcctgactgtggacaatggtggaaaaaactt

SEQ ID NO: 461023 - DNA, 525 bp, Homo sapiens
ccacagacaccaacagaggcccggggtggggtgggcggtaccagaggcagctgcygaggactcttggagatgctccctctgctcctccttttgccaccaggggcctgaaaaaggatttccttccgtgggaaaatccagatcggcctccctgtcacctcttcttcaccctcattcgttcctccccctgggataatctgactgtgcctgttcagctctgtggctaaacagagtggatcctgtcagtcctcaccctacggatcgctgaggtcctgcacctttcgcttggccatgctcagctccggggctcccacccgccttgcctttaccccgggactgctctccgcctccgtggctgggtcctgtcctcgggctcccttcttcagtagcaaggaccttaggtcctcatccttgagcctcttctctcccaaacagacccttgtacctgagcttgtccactcccgaggagaacagacatgtgcccaggcctcggaaatctgttgtttctaggcttcctctctgtaaagt

SEQ ID NO: 461024 - DNA, 525 bp, Homo sapiens
ccacagacaccaacagaggcccggggtggggtgggcggtaccagaggcagctgccgaggactcttggagatgctccctctgctcctccttttkccaccaggggcctgaaaaaggatttccttccgtgggaaaatccagatcggcctccctgtcacctcttcttcaccctcattcgttcctccccctgggataatctgactgtgcctgttcagctctgtggctaaacagagtggatcctgtcagtcctcaccctacggatcgctgaggtcctgcacctttcgcttggccatgctcagctccggggctcccacccgccttgcctttaccccgggactgctctccgcctccgtggctgggtcctgtcctcgggctcccttcttcagtagcaaggaccttaggtcctcatccttgagcctcttctctcccaaacagacccttgtacctgagcttgtccactcccgaggagaacagacatgtgcccaggcctcggaaatctgttgtttctaggcttcctctctgtaaagt

SEQ ID NO: 461025 - DNA, 525 bp, Homo sapiens
ccacagacaccaacagaggcccggggtggggtgggcggtaccagaggcagctgccgaggactcttggagatgctccctctgctcctccttttgccaccaggggcctgaaaaaggatttccttccgtgggaaaatccagatcggcctcccygtcacctcttcttcaccctcattcgttcctccccctgggataatctgactgtgcctgttcagctctgtggctaaacagagtggatcctgtcagtcctcaccctacggatcgctgaggtcctgcacctttcgcttggccatgctcagctccggggctcccacccgccttgcctttaccccgggactgctctccgcctccgtggctgggtcctgtcctcgggctcccttcttcagtagcaaggaccttaggtcctcatccttgagcctcttctctcccaaacagacccttgtacctgagcttgtccactcccgaggagaacagacatgtgcccaggcctcggaaatctgttgtttctaggcttcctctctgtaaagt

SEQ ID NO: 461026 - DNA, 551 bp, Homo sapiens
attctgatgccctaatccatggaaactgtgactatgtcagattacaagaccaaggggaatgaagactgcggatggaattaagattactggtcatctgactttgagaaggcaaagattatcctggattatccatgtgagcccacagtaatcacaaaggtcctttaaatgtggaagagtatggccagagtcagagaaagatgtgcagatgcagcaacgctgccagatctgaagatggaagaagaggccatgagccaagcaatgcaggtggcctccacaagctggaaacggcaaagacatggatatttccctagaacccccaaaaggaggcagccctgacaacaccttgactgtagcccagtgggacgcatcccgtgcttctgacctccagaactgcaggataatgaatctgtgctgtgttgggccactgcatttggtaatttgctacagtaataacagcagattcatgcagatgcaaaagcagctcccacttctctcctgctcaaagcgcagcaggycgcagggctctgcagaagaatctaaaggcaaaaccc

SEQ ID NO: 461027 - DNA, 527 bp, Homo sapiens
gctactgtgccagttcccggtcatcccsatgttgtgcccaagccctgtcatgagggcacttcatgcatggtagctattagtcataatttaggacctctctgtccctcctatgagaccacgtatgctttggagctaaggaccccacctctttgaagtgcctggagcttacttcatgccatatcggcgcttcccaggctgtgttctgcagacaagaatgttcccaaaaggagtgttctgtaaccaccgtgcattggaggcattgcgctcagtagccttctcaggatctttaatatggcagaaagcattgtgactctgcaggcggacagggccaggtatccagcatttctcaagcttgaccaataatcagaccttcctgtcctgccttcagaatgcagtgtagtgtgcagtcgagagaatattctggaagcccacaggcctgggtgtggctctggcagcttcctgtacttgctgcctgtttcctctctgaaccctgaatctcatttcttcctctgaggagtggggagatg

SEQ ID NO: 461028 - DNA, 527 bp, Homo sapiens
gctactgtgccagttcccggtcatccccatgttgtgcccaagccctgtcatgagggcacttcatgcatggtagctattagtcataatttaggacctctctgtccctcctatgagaccacgtatgctttggagctaaggaccccacctctttgaagtgcctggagcttacttcatgccatatcggcgcttcccaggctgtgttctgcagacaagaatgttcccaaaaggagtgttctgtaaccaccgtgcattggaggcattgcgctcagtagccttctcaggatctttaatatggcagaaagcattgtgactctgcaggcggacagggccaggtatccagcatttctcaagcttgaccaataatcagaccttcctgtcctgccttcagaatgcagtgtagtgtgcagtcgagagaatattctggaagccyacaggcctgggtgtggctctggcagcttcctgtacttgctgcctgtttcctctctgaaccctgaatctcatttcttcctctgaggagtggggagatg

SEQ ID NO: 461029 - DNA, 527 bp, Homo sapiens
gctactgtgccagttcccggtcatccccatgttgtgcccaagccctgtcatgagggcacttcatgcatggtagctattagtcataatttaggacctctctgtccctcctatgagaccacgtatgctttggagctaaggaccccacctctttgaagtgcctggagcttacttcatgccatatcggcgcttcccaggctgtgttctgcagacaagaatgttcccaaaaggagtgttctgtaaccaccgtgcattggaggcattgcgctcagtagccttctcaggatctttaatatggcagaaagcattgtgactctgcaggcggacagggccaggtatccagcatttctcaagcttgaccaataatcagaccttcctgtcctgccttcagaatgcagtgtagtgtgcagtcgagagaatattctggaagcccrcaggcctgggtgtggctctggcagcttcctgtacttgctgcctgtttcctctctgaaccctgaatctcatttcttcctctgaggagtggggagatg

SEQ ID NO: 461030 - DNA, 555 bp, Homo sapiens
attctacatgatggtgatttgtataattatttcattgtatattgcaatatagtaatagaaataaagtgtacaagaaatgtaatgcacttttgaatcattccgtaaaccaacccctactccaggtctgtggaaaaattatcttccacaaaaccagtcactggtgccaaaaaggttggggatcgctgatacagtgtctagatttaactgcagtttgttctgattttattcaactttttcttccactggattattcccatcagcataaaaccttaatacattatttcttctcttgaacaaaacaaccaaaacctcctggggccccaattctctgcacaatctactgttgtctttctttgcttcctttcagagcagagctcttcaaagttgtcttgctgtctcccatatctctccccrcatcctttcttttcctaaaagcttttcatttagagaaggtccaagaatagttcaatacgttctccaatatccatcatatatattcactagttactatcttttgaccccatttgctttgacaccttttctatcgacacatgc

SEQ ID NO: 461031 - DNA, 601 bp, Homo sapiens
taatggtactttgatgtctgaggatcgattctagacgtgggactgcggtcaagggttataaacattttatgttttcatagattccagaggcggatttgaatcccaatatgtctgactccaaagctcaagraagacccagggtaggctaggcgcagtggctcacacctgtaatcccagtgctttgggaggccaaggctggcagatcacctgaggtcaggagttcgagaccagtctggccaacatggtaaaacctcatctctactaaaaatataaacattagctgggtgtggtggcagactcctgtaatcccagctactcaggaggctaaggcaggagaatcgcttgaaccttggaggtggaggttgcagtgagtcaagatcgcaccattgcattccagcctgggagataagaatgagactccatctcaaaaaacccaaaaaaccaacaagaaaaacaaaacccagggtaaaagatgagggcacgacccatggacaccatcctggcatccagacctcctgccccagctggtctggagcctctgacctaggcggcaggaattcaggcatcctagcctggcatgagctgctaggctgtaggctgc

SEQ ID NO: 461032 - DNA, 601 bp, Homo sapiens
taatggtactttgatgtctgaggatcgattctagacgtgggactgcggtcaagggttataaacattttatgttttcatagattccagaggcggatttgaatcccaatatgtctgactccaaagctcaagaaagacccagggtaggctaggcgcagtggctcacacctgtaatcccagtgctttgggaggccaaggctggcagatcacctgaggtcaggagttcgagaccagtctggccaacatggtaaaacctcatctctactaaaaatataaacattagctgggtgtggtggcagactcctgtaatcccagctactcaggaggctaaggcaggagaatcgcttgaaccttggaggtggaggttgcagtgagtcaagatcgcaccattgcattccagcctgggagataagaatgagactccatctcaaaaaacccaaaaaaccaacaagaaaaacaaaacccagggtaaaagatgagggcacgacccatggacaccatcctggcmtccagacctcctgccccagctggtctggagcctctgacctaggcggcaggaattcaggcatcctagcctggcatgagctgctaggctgtaggctgc

SEQ ID NO: 461033 - DNA, 465 bp, Homo sapiens
aagtgagaatgaaataattgcaaaacagctrtcatcactcaggtgtttgctgagcctagaaattaaaacagagaggacacaggaggcagaagaaggctggagtaaaaaccttaaaatagacactaggactgacctggaataatttgtccccaatccctgtatgatggaaagtaaatttgctaggacaaagtgaaccaagagccaatgtccgccatgtggactaaaaattatcctcaagcatcagtgcaggaaggtccttagagataatcaacccacgtacccactttccaaatgagaaatgaggttcagagaaggaaagcccttgcaggcaatcacacagccgataagagtgtgaaatctgggatttcagtaggctctggctgacatttaagctcttgccctttttgttgtctgatttcatattgattcattctccaggaagccagctcttgcccaactcctgag

SEQ ID NO: 461034 - DNA, 582 bp, Homo sapiens
aggccaagttcaaatgccctttctctaataaagtagtgtttctgctcttttaaatctttaacaggaaaaccaaatggagaggacccataggaaacccaagtgtctggcttatcccacttctatggtttgaatgtgcaccctccaaaactcaggagttgccagtgcgatagtattaacaggcagggctttaagaggtgattaggcatgagggcccttccctcatgaatgaaattaggtgcccttataaagggaactgatagagtttttctggccgkgtgcagtggctcacgcctgtaatcccaacactttaggaggccaaggcaggcagatcacgaggtcaggagatcaagaccatcctggctaacatggtgaaaccccgtctctactaaaaaatacaaaaaattagccaggcatggtggcgggcgggcacctgtagtcccagctactcaggaggctgaggcaggagaatggcatgaacccaggaggcggagcttgcagtgagccaagatcgagccactgcactccagcctgggtgacagagcgagactctatctcaaaaaaaagaaaaaaaaagggtttttc

SEQ ID NO: 461035 - DNA, 582 bp, Homo sapiens
aggccaagttcaaatgccctttctctaataaagtagtgtttctgctcttttaaatctttaacaggaaaaccaaatggagaggacccataggaaacccaagtgtctggcttatcccacttctatggtttgaatgtgcaccctccaaaactcaggagttgccagtgcgatagtattaacaggcagggctttaagaggtgattaggcatgagggcccttccctcatgaatgaaattaggtgcccttataaagggaactgatagagtttttctggccgggtgcagtggctcacgcctgtaatcccaacactttaggaggccaaggcaggcagatcacgaggtcaggagatcaagaccatcctggctaacayggtgaaaccccgtctctactaaaaaatacaaaaaattagccaggcatggtggcgggcgggcacctgtagtcccagctactcaggaggctgaggcaggagaatggcatgaacccaggaggcggagcttgcagtgagccaagatcgagccactgcactccagcctgggtgacagagcgagactctatctcaaaaaaaagaaaaaaaaagggtttttc

SEQ ID NO: 461036 - DNA, 655 bp, Homo sapiens
cgttttctttttaaacctaggcatcaacatttatgtctagtgaaaatcacaaaatcagtttgtgttcatagaatacaatggtgtctgtgagcaagttgggtttctctttttcaggcacattcagctcagtgaaccctaagctgtttcttgtataaaatgcaggactcgagagccagagtgacaaggccttggggatggtcgctcccttagtgctctgattaagtgctgcaggattcaggggcacagggctgatcttctggaaataaatgtcctcagactgcaaatgcaattacttgttcacctatcaggagaaagccatcagagtggattctggttccatggctacctcaaggatacgccgaagcaagcggcataaaataatgtgacatcagtaccactggccaggacctggggattgctgtcagaccacactgacatacaggacaagaaacataaagcttcctgtgagcaaaaccaagactgacctccacagaggaaatcacagagggcaggccctatagactgtgatggggatcacttaaaaaawttttttataattaataagtctttaggttcagtctgactgaagcgacaaatgtaaaatgattctttcaaaattacttttaacaaaaactttaataaacaatatgattat

SEQ ID NO: 461037 - DNA, 543 bp, Homo sapiens
ctcatgacatgttgggtttgaagacttattcaaaattatcactttaaccacgccccccaacactccatttttagatcatgaatccaaagatcaaagaggttgagtaactttctaagctaacatgatgcagagcagtaagacagtgggaagatgtcaagatctggaacctagaatttgagttgtgtctccacatcctgtcatttctatcatctttcttgtgtcattttttatctttttgaaatggagtctctcactgtcacccaggctggagtgcagtggcactatctcagctcatggcaacctctgcctcccaggttcaagcaattctcctgcctcagcctcccgagtagctgggattacaggcgcccgccaccaggccaggcaaatttttgtatttttagtagagacagggtttcatcatgttggccaggctggtcttgaacacctgacctcragtgatccacccaccttggcctcccaaagtgctaggattacaggcatgagccactgcgccccagctgcagtatttctgtcttacaagtt

SEQ ID NO: 461038 - DNA, 583 bp, Homo sapiens
ttatagccaatgtgtgatgcacacctttgaaaaggaaacaaaatttggggctttagagaacaataaggagaatttgcagacctgatctaacacttttgaagaatttctcttacccatagggaggtgctttcatgtagacaaggatatggcaaaatcagagctgtacagtgtttcttgaactcagactgaaaaatcaaacagtcttctgtctttgccaagactttataaacatagattacctcctagtgctgtcatggtatttggtacaacattgcttctgatcaaacaacagttgtttggagtagaggatgaggatgagtgacagtcaatgcaataataggtgaataggaggtctggttggctgctgctgatgccttgacaatgtctgggagttggggaggggaagaagctgagcagtggacaggggctggatcacatggagccttatgtgtcacactaagatgtttggacttatcctctgggtcatgaggagccattggaggataaaattgtcaggaamgagactgagaagaaacagagagagagatagagagagagcagaatgaggctgtggtcaactata

SEQ ID NO: 461039 - DNA, 519 bp, Homo sapiens
agctcactgcagcctccacctgtccaggttcaagcaattctcttatctcagcctctcgagtagctgggattaaaggcacctggcaccacgcccagctaatttttgtatttagtagagacggggtttcaccatgttggccaggctggtctcaaactcctgacctcaagtgatctgcccacctcagcctccaaaagtgctgggattacaggtgtgagccgccatgcccggccatacmtacaatgtttaaggagtttttgctgtaagtggaagtagagaaagaggacaggggctggaagtattgggttatttttttaagatgaaataagtgaaataaataccatgtattttgttactaaagatatttaactcattcgtagaattttaaaatatattttaggaacaactcattcccaattttgtctcaataatcacctcttgtcagaatgaagtgtggaaaacctaggtttcatgagttctctgcataaactagcaataaaatctaatgaggaatgttcagtg

SEQ ID NO: 461040 - DNA, 644 bp, Homo sapiens
actttgactacatactattgcttgaaaaaataaaatatctgcaaaaaattattaaatcttcatgataggattttttctttttatattagtataaatataacaattctgaaacaaatgtatgtgcattgtaagattaagccaatgagtaaatattaatatatttgtattgctagaaccccagattctcactgtgaaaggacagagatacagatatggaataagacaaggaaagaagcagcccactgagttacattagaatcagtattatcaacataaatatrcaatgtgctctctcacatgctctttccttctcttaaaaaatatataatatgtacatattatatattatatgcatagacacacgtgtgtctatacatatcctacatgtacatattgaggattaacaggtgctagtagaaaatattaactttctttgtattaacaggtgttagtagaaagtagtagtaggtgctaagataaaagccataattaaacctcctggtgaatgaacacaccatcacctacaatcttaccaaaaatagaaccaagcacgtgtcctagtcaaacctctggattcaactgtcatttggataaaacgcaaaggatagtgaaaatgtcgatcttcactgagagtctaaccagca

SEQ ID NO: 461041 - DNA, 224 bp, Homo sapiens
caagtgacaaaaatcccaaatttttcaacaaatatattgtatgggaaagaaaactttgaaaagaaacctgtatgttagaagggattttaaaaacacgacaaatgaaaacaaatgggcaagactaaatcatagtgtcttggaatgcatgcakgaaggacacagccgtgaaaatgcaaggacgcctctactggaacagtcacgtttatcgtcacttttcaggagaa

SEQ ID NO: 461042 - DNA, 585 bp, Homo sapiens
caagtgacaaaaatcccaaatttttcaacaaatatattgtatgggaaagaaaactttgaaaagaaacctgtatgttagaagggattttaaaaacacgacaaatgaaaacaaatgggcaagactaaatcatagtgtcttggaatgcatgcaggaaggacacagccgtgaaaatgcaaggacrcctctactggaacagtcacgtttatcgtcacttttcaggagaaaggtggctgcaactgaggagagtcacatgcttcagggctggcaaagtcctatatcttgacttatgtgatgattacagggatgtttacaaaaatcaaactataagtttgttttgtgccatgttttgtattgtgtgtgtgtgtgttttgtttttcaacttaaaaataaataaaatcaaaaccaaggcttcattatcaagtagcacaaagtctccaatctataacctcctttgtctggatatctgcatttaactaccattgccagagctaatcctgacaatgcattcatatttttaacactgaaacacagtaaacagggaaaattttgctcctctaaaacagggcatcttcaggcaatcagaac

SEQ ID NO: 461043 - DNA, 585 bp, Homo sapiens
caagtgacaaaaatcccaaatttttcaacaaatatattgtatgggaaagaaaactttgaaaagaaacctgtatgttagaagggattttaaaaacacgacaaatgaaaacaaatgggcaagactaaatcatagtgtcttggaatgcatgcaggaaggacacagccgtgaaaatgcaaggacgcctctactggaacagtcaygtttatcgtcacttttcaggagaaaggtggctgcaactgaggagagtcacatgcttcagggctggcaaagtcctatatcttgacttatgtgatgattacagggatgtttacaaaaatcaaactataagtttgttttgtgccatgttttgtattgtgtgtgtgtgtgttttgtttttcaacttaaaaataaataaaatcaaaaccaaggcttcattatcaagtagcacaaagtctccaatctataacctcctttgtctggatatctgcatttaactaccattgccagagctaatcctgacaatgcattcatatttttaacactgaaacacagtaaacagggaaaattttgctcctctaaaacagggcatcttcaggcaatcagaac

SEQ ID NO: 461044 - DNA, 585 bp, Homo sapiens
caagtgacaaaaatcccaaatttttcaacaaatatattgtatgggaaagaaaactttgaaaagaaacctgtatgttagaagggattttaaaaacacgacaaatgaaaacaaatgggcaagactaaatcatagtgtcttggaatgcatgcaggaaggacacagccgtgaaaatgcaaggacgcctctactggaacagtcacgtttatcgtyacttttcaggagaaaggtggctgcaactgaggagagtcacatgcttcagggctggcaaagtcctatatcttgacttatgtgatgattacagggatgtttacaaaaatcaaactataagtttgttttgtgccatgttttgtattgtgtgtgtgtgtgttttgtttttcaacttaaaaataaataaaatcaaaaccaaggcttcattatcaagtagcacaaagtctccaatctataacctcctttgtctggatatctgcatttaactaccattgccagagctaatcctgacaatgcattcatatttttaacactgaaacacagtaaacagggaaaattttgctcctctaaaacagggcatcttcaggcaatcagaac

SEQ ID NO: 461045 - DNA, 572 bp, Homo sapiens
cctggcattgccagccagaaatcacttgtcatgggaattgtctcctggaatcactttggttgtcccagggtaacgcagggaaagtggttaatgggtcacttgggggtggcatcttcatcagtaaatcacatttactttctcctactaagaattttatttttggccatgaagccaaaagtcagctcttaaataacaagggaagcaaataatcattgaataaaaatagcagraagaaaaagctgtgcaaagaaatttatgtttttaatttgttatatatgtatatttttatcatactttaagttctagggtacatgtgcacaatgtgcaggaataaaatttatgtttttaaaatttattctacattatgaattctacattagaaaaataaaccatagcctcatcacaggcacttaaatacactgaagctgccaaaacaatctatcgttttgcctacgtacttatcaacttcctcatagcaaactgggagaaaaaagcaatggaatgaataaaatgatagccacaaaaatcaaggtgggagaaatacttattatatgtccataaaaaattttaat

SEQ ID NO: 461046 - DNA, 619 bp, Homo sapiens
agttctagggtacatgtgcacaatgtgcaggaataaaatttatgtttttaaaatttattctacattatgaattctacattagaaaaataaaccatagcctcatcacaggcacttaaatacactgaagctgccaaaacaatctatcgttttgcctacgtacttatcaacttcctcatagcaaactgggagaaaaaagcaatggaatgaataaaatgatagccacaaaaatcaaggtgggagaaatacttattatatgtccataaaaaattttaattaatgcaaagtattaacaccaatgattgcagtaatacagatcttacaaatgatagttttagtctgaacaggactatccaaaagttaattttctatagtaacagtttttaaataaaatatcaattcctgaaacacataaaatggtccatgagtatacaacgagtgaaaaaaaacaaattcagagcaaagataaattaagaagtatctaatattcaaacatagtcaaagagagggagatttctggataatcacttaarcccatggttaaacataaatgcacatatgttaatgtttactgaataacttatctgtgccaagtggtgtattaatgattcatttttatttt

SEQ ID NO: 461047 - DNA, 619 bp, Homo sapiens
agttctagggtacatgtgcacaatgtgcaggaataaaatttatgtttttaaaatttattctacattatgaattctacattagaaaaataaaccatagcctcatcacaggcacttaaatacactgaagctgccaaaacaatctatcgttttgcctacgtacttatcaacttcctcatagcaaactgggagaaaaaagcaatggaatgaataaaatgatagccacaaaaatcaaggtgggagaaatacttattatatgtccataaaaaattttaattaatgcaaagtattaacaccaatgattgcagtaatacagatcttacaaatgatagttttagtctgaacaggactatccaaaagttaattttctatagtaacagtttttaaataaaatatcaattcctgaaacacataaaatggtccatgagtatacaacgagtgaaaaaaaacaaattcagagcaaagataaattaagaagtatctaatattcaaacatagtcaaagagagggagatttctggataatcacttaaacccatggttaaacataaatgcamatatgttaatgtttactgaataacttatctgtgccaagtggtgtattaatgattcatttttatttt

SEQ ID NO: 461048 - DNA, 553 bp, Homo sapiens
gccttagacgcccattgggtgctccttgccaattgtgttctcctttatttcctgctggatatgaccactgtccttccattgcattgtatgtgttttttaatagactttaatggttctcaagtgatgcattatttagtttggttctttgaaacttatataaatgaaattattttgtagaagttctttcacctttatcagaaggtactttcaccttgattcaataataagtttgcatattacaaccttgttgaatgttggtgtaattcatccattcgtattgctatatgatattccactacatgaatatgtcggacttcattcctcagatctattgttgatgaacacttgaaatttttccagtttttaacyattacaaacaatgctgctatgaacattcttttgtaaatcacctggttcatatgtgcaagatatcctctggggtatatatttaaaagtaaaattattgagttattcaacattaccatgaaatgctacactattttttttaacaatcctaccaatttacacttctaccacgaacagataagcatta

SEQ ID NO: 461049 - DNA, 598 bp, Homo sapiens
gctagaattttgttgagtatttttacatctgtgttgatcagggataaggatttgtagttttcttttgtgttctttttaaaattttccttgttaattttactgcacagtattattttaatgatgaataaagtgttgagctggacatgtgtaccttgttcctcatgttasaatgaaactgtttaatatgtcatgattatttataatgttgagagtagtttttgtgtatatattaagatatttacatcagttctcttctattcctagtttgttattattacaaatagtttcaaatgtgaacaagtgcttttcccacagctattgaaataaccatattttgttcttttattcagttaatgtggttaatttcattgtttggttttctaattttaaaccatacattcttgaaattactgcacttagtcacgatgtatttttctttggagtatattgttggattatatttgcaaacatttttgtttagaattattatgtagtatattagtctgtaatttcatttcttttaatatccctgtatggttttactatcatggaggtaccaccatataaaacaagttggaaagtgttatgtcttcccaat

SEQ ID NO: 461050 - DNA, 598 bp, Homo sapiens
gctagaattttgttgagtatttttacatctgtgttgatcagggataaggatttgtagttttcttttgtgttctttttaaaattttccttgttaattttactgcacagtattattttaatgatgaataaagtgttgagctggacatgtgtaccttgttcctcatgttacaatgaaactgtttaatatgtcatgattatttataatgttgagagtagtttttgtgtatatattaagatatttacatcagttctcttctattcctagtttgttattattacaaatagtttcaaatgtgaacaagtgcttttcccacagctattgaaataaccatattttkttcttttattcagttaatgtggttaatttcattgtttggttttctaattttaaaccatacattcttgaaattactgcacttagtcacgatgtatttttctttggagtatattgttggattatatttgcaaacatttttgtttagaattattatgtagtatattagtctgtaatttcatttcttttaatatccctgtatggttttactatcatggaggtaccaccatataaaacaagttggaaagtgttatgtcttcccaat

SEQ ID NO: 461051 - DNA, 525 bp, Homo sapiens
acgatgtatttttctttggagtatattgttggattatatttgcaaacatttttgtttagaattattatgtagtatattagtctgtaatttcatttcttttaatatccytgtatggttttactatcatggaggtaccaccatataaaacaagttggaaagtgttatgtcttcccaattctctaaaaatattcatgtaacattggcattatttctttattaaatatttggtaatatttctttattaaatattgcatccacctagccctggagttctttctacaggaaaaaaaaattttctaaataaaatttctacaatgaaaaaaaaactactcagtttttctagtttttttctgatcatttcataaaagtaggtatttttcataggaacttgaccattccttatgattgtcaaatttattaatataaagtttcatattttatatttattttatcagataaataaaattatatgttttgaaatatatattcattgtaaaatagccatgttaagctaacatatgcatt

SEQ ID NO: 461052 - DNA, 506 bp, Homo sapiens
aagaaatcagtatatcgaagagatatctgcactcccgtatttgttgcagcactatttwcaatagcgaagttatggagtcaacctaagtgtccatcaacagatgaatgaataaagaaaatgtggtacttatatacaatgaagtattattcagccataaaaaggaatgagaccctgtcatttgcaacaacatagatgaaactggaggtcattatgttaagtgaaataagccaggcacaaaaagacaaatactatgtgttatcacttatatgtggaatccaaaaagcaaacaactgaactcatggagatagagagtagaaggaagtataccagaggctgtgaagggtagtgggggttgggagaggtgggggatggttaatgggtacaaaaaaagaaagatttaataagacctagtatttgatagcacaacagggggattgcagtctaaaattcaattatacatttaaaaataactgaaagagtataattggattgtttataacacaaat

SEQ ID NO: 461053 - DNA, 529 bp, Homo sapiens
ttggccatttgtatgtcttcttttgagaaatgtctatttagatcctttgtcaatttttcattagggttccttgttttcttattattgtgttgtttgagttcctaagatattttggacattagcctcttatcaaatgtatagtttgcagataatttctcccattttgtaggttatcacttcactctgttgactttcttttgctgtgcagaagctttttaggttgatgctattccatttgtgttttgttgcttttcttgcctgtgctttagagtcatatcataaaatattattgcccagaccaatgtcttggagttattcccctgttttcttctaggagttctatagtgctaggtcttacatttaagtctaacttattttgartttatatttttatatggtatgaaataagggcctaatatcaatcttgtggacattcagttttctcaacaccattttttgaagagactgttctttccccatgtgtgttcctggcacctttgttgaaagtcaattgactataatatgtaga

SEQ ID NO: 461054 - DNA, 492 bp, Homo sapiens
tagcaacaactgtgggagttcagtcaggctggtgggaaaaattttaaagatagttttaagaaatcgacacaaaccttcatggaaggctgggggtgttgtatagcttcagtaatagatctgaatgaaggcggcctaatccttccttgagtaaacagcttaaagtaggtgcaaaggaatgtaagggagtttatctaaataacttgtttactcatgtggtcctgaagccaacctttgatcattcacaggcaggatggctctctctcgggggagggtgaccaggttaattaccctctatttgtgttgactaaaagcccctgtcatttaatgttttttcaataaatgctggcagggctagctagtcagggctcgtggctgccagaactctttctgtgcayggcccagccccctagcggctctttcactgaataattggtgtctgagtacattattcatccctcgtgcagctggggtctgcaggacagacccccacaa

SEQ ID NO: 461055 - DNA, 518 bp, Homo sapiens
gctctttcactgaataattggtgtctgagtacattattcatccctcgtgcagctggggtctgcaggacagacccccacaaacaacaatttgcaaaagcaaacttccctgttttgttttttttcccgagatgataaattagaggcttttagtgtgcctcrgccacttagaaatagcaagagagtgcacaaaggtcaactctgtgagctctacgtcaagaaggaaaatgggaatccaccagaatcatgaaggacatcatagatcccaagaaggagaatgtgagcaaacagtcaacatgacagcaaccagcttataaaagtgagcgaagtcctagtatgtgagagaggcagagagcttccctctgtaactgacattttcactgtgaatctgagcaaccccagccaagttgttgcattttgtttctcccaaggcctggagtcaacatggggagaggcttggagatgctgtgaagcaaagacactgggaacagctgcagacattttcccagaccaggaagtaa

SEQ ID NO: 461056 - DNA, 518 bp, Homo sapiens
gctctttcactgaataattggtgtctgagtacattattcatccctcgtgcagctggggtctgcaggacagacccccacaaacaacaatttgcaaaagcaaacttccctgttttgttttttttcccgagatgataaattagaggcttttagtgtgcctcagccacttagaaatagcaagagagtgcacaaaggtcaactctgtgagctctamgtcaagaaggaaaatgggaatccaccagaatcatgaaggacatcatagatcccaagaaggagaatgtgagcaaacagtcaacatgacagcaaccagcttataaaagtgagcgaagtcctagtatgtgagagaggcagagagcttccctctgtaactgacattttcactgtgaatctgagcaaccccagccaagttgttgcattttgtttctcccaaggcctggagtcaacatggggagaggcttggagatgctgtgaagcaaagacactgggaacagctgcagacattttcccagaccaggaagtaa

SEQ ID NO: 461057 - DNA, 518 bp, Homo sapiens
gctctttcactgaataattggtgtctgagtacattattcatccctcgtgcagctggggtctgcaggacagacccccacaaacaacaatttgcaaaagcaaacttccctgttttgttttttttcccgagatgataaattagaggcttttagtgtgcctcagccacttagaaatagcaagagagtgcacaaaggtcaactctgtgagctctacgtcaagaaggaaaatgggaatccaccagaatcatgaaggacatcatagatcccaagaaggagaatgtgagcaaacagtcaacatgacagcaaccagcttataaaagtgagcgaagtcctagtatgtgagagaggcagagagcytccctctgtaactgacattttcactgtgaatctgagcaaccccagccaagttgttgcattttgtttctcccaaggcctggagtcaacatggggagaggcttggagatgctgtgaagcaaagacactgggaacagctgcagacattttcccagaccaggaagtaa

SEQ ID NO: 461058 - DNA, 621 bp, Homo sapiens
ttccttattcctgtgttcattttggatagccccttctgacctatattacagtttactagttcactcttcaactgcttctaacatactaatattctgttaaaaccattcatttgggtttaaatttcaattatgttattctctatggacattctatttgttttcttttaatcttcttggccattctctagagtttcctgttccattatgatatttttaattttttgttttactttaaacatactaaatatagttattttattttctgtatctgatactttcaataactgcagtcttygctagtcttttttctgtgctcttgctcatagtttttttcgtttgttttcatgattagaaaaacagagagagaagaaggagagtaaagggaggaggaggaggaggagaaaagaagaaagcagagaagaagggacagagaaaaaaaggaagttggttctaacgtttctctaacaactgtcttcagtgaaacgctcccaccttgtggatttttaggttattgaaattaaccagtcttctgggtgcagcacaccaacatggcacatgtatacatatgtaacaaacctgcactttgtgcacatgtaccctaaaacttaaagtataataaaa

SEQ ID NO: 461059 - DNA, 621 bp, Homo sapiens
ttccttattcctgtgttcattttggatagccccttctgacctatattacagtttactagttcactcttcaactgcttctaacatactaatattctgttaaaaccattcatttgggtttaaatttcaattatgttattctctatggacattctatttgttttcttttaatcttcttggccattctctagagtttcctgttccattatgatatttttaattttttgttttactttaaacatactaaatatagttattttattttctgtatctgatactttcaataactgcagtcttcgctagtcttttttctgtgctcttgctcatagtttttttcgtttgttttcatgattagaaaaacagagagagaagaaggagagtaaagggaggaggaggaggaggagaaaagaagaaagcagagaagaagggacagagaaaaaaaggaagttggttctaacgtttctctaacaactgkcttcagtgaaacgctcccaccttgtggatttttaggttattgaaattaaccagtcttctgggtgcagcacaccaacatggcacatgtatacatatgtaacaaacctgcactttgtgcacatgtaccctaaaacttaaagtataataaaa

SEQ ID NO: 461060 - DNA, 621 bp, Homo sapiens
ttccttattcctgtgttcattttggatagccccttctgacctatattacagtttactagttcactcttcaactgcttctaacatactaatattctgttaaaaccattcatttgggtttaaatttcaattatgttattctctatggacattctatttgttttcttttaatcttcttggccattctctagagtttcctgttccattatgatatttttaattttttgttttactttaaacatactaaatatagttattttattttctgtatctgatactttcaataactgcagtcttcgctagtcttttttctgtgctcttgctcatagtttttttcgtttgttttcatgattagaaaaacagagagagaagaaggagagtaaagggaggaggaggaggaggagaaaagaagaaagcagagaagaagggacagagaaaaaaaggaagttggttctaacgtttctctaacaactgtcttcagtgaaacrctcccaccttgtggatttttaggttattgaaattaaccagtcttctgggtgcagcacaccaacatggcacatgtatacatatgtaacaaacctgcactttgtgcacatgtaccctaaaacttaaagtataataaaa

SEQ ID NO: 461061 - DNA, 383 bp, Homo sapiens
aaaccagcattaccctgataccaaaaccagagaaggacactataataaaaataaattgcagaccaatactcctgatgaacttagatggaaaaaccytcagccaaatattagcaaatattatttttaagaaaacacagcaaaaaaattcaccatgcttaagtgggattcatccctgggaagcttattagtcttatttgattcgtgtaatcagaaaatttctatgtctagtgaagagaaatgagagcaatagagactcatagcacctcaacaaatttccaggcttgagccagttaacaaatacaagtccttcaaatacaaaaagactgtgaaagaaaatagaacagatcaatgaaactaagaatttgttctttgaaaagataaac

SEQ ID NO: 461062 - DNA, 383 bp, Homo sapiens
aaaccagcattaccctgataccaaaaccagagaaggacactataataaaaataaattgcagaccaatactcctgatgaacttagatggaaaaaccctcagccaaatattagcaaatattatttttaaraaaacacagcaaaaaaattcaccatgcttaagtgggattcatccctgggaagcttattagtcttatttgattcgtgtaatcagaaaatttctatgtctagtgaagagaaatgagagcaatagagactcatagcacctcaacaaatttccaggcttgagccagttaacaaatacaagtccttcaaatacaaaaagactgtgaaagaaaatagaacagatcaatgaaactaagaatttgttctttgaaaagataaac

SEQ ID NO: 461063 - DNA, 576 bp, Homo sapiens
atttttaagaaaacacagcaaaaaaattcaccatgcttaagtgggattcatccctgggaagcttattagtcttatttgattcgtgtaatcagaaaatttctatgtctagtgaagagaaatgagagcaatagagactcatagcacctcaacaaatktccaggcttgagccagttaacaaatacaagtccttcaaatacaaaaagactgtgaaagaaaatagaacagatcaatgaaactaagaatttgttctttgaaaagataaacaaaactgacaaaccattagctagactagaaaaacgagagaatactcaaagcaataaaatcagaaatgaaagaggaaatattgcaactaataccacagaaatatagaggatcataagaggccactataaacaattacaagccaacaaattggataacctagaaaaagcagataaatttctagaaaaatgcaacttacctagagaaagtcaagaagaaagataaaatctgaacagaacaatactgagtatggagagtatatcaataataaaacatctcccatcaaagaacatcccaggaccagaaaacttcatt

SEQ ID NO: 461064 - DNA, 576 bp, Homo sapiens
atttttaagaaaacacagcaaaaaaattcaccatgcttaagtgggattcatccctgggaagcttattagtcttatttgattcgtgtaatcagaaaatttctatgtctagtgaagagaaatgagagcaatagagactcatagcacctcaacaaatttccaggcttgagccagttaacaaatacaagtccttcaaatacaaaaagactgtgaaagaaaatagaacagatcaatgaaactaagaatttgttctttgaaaagataaacaaaactgacaaaccattagctagactagaaaaaygagagaatactcaaagcaataaaatcagaaatgaaagaggaaatattgcaactaataccacagaaatatagaggatcataagaggccactataaacaattacaagccaacaaattggataacctagaaaaagcagataaatttctagaaaaatgcaacttacctagagaaagtcaagaagaaagataaaatctgaacagaacaatactgagtatggagagtatatcaataataaaacatctcccatcaaagaacatcccaggaccagaaaacttcatt

SEQ ID NO: 461065 - DNA, 665 bp, Homo sapiens
aacatttaccatgataaagtggatttatcctccagatgtttcagcaaacacaaatcaaatgtgataaaccacattaacagaatgaaggataaaaaaatagctatctctatatatgcagaaaaagcatttgactaaattcaaaatcctctcatgacaaaacctctcaacaaattgggcrtagaaggcatgtaccttaacacaaaacaggacatatataacaagctcacagctcacatcatacccaacaatgaaaaagtgaaatcttttctgctaagatcaagaacaagacaaggatatttattctcactacttctattcaacttatttctggaagtcctagccagagcaattaagccaaataaagaaataaaagatattcaaattgaaaaggaagaagtaaaattgtctctgtttgatgacatattatatataggaaaccctaaaaactccaccaaaaagctattagaaatgataaatgaattcaataaaattgcagaattcaaaatcaatgtacaaaactcagtagtttctttacactcacaacaaactatatgacaaaaataaagaaatcaatctcattcacagtagcatcaaaaaaactgtattttttttgtttaggagcacatttaggattgtacttaggagtacatttaaccaaggaggtg

SEQ ID NO: 461066 - DNA, 665 bp, Homo sapiens
aacatttaccatgataaagtggatttatcctccagatgtttcagcaaacacaaatcaaatgtgataaaccacattaacagaatgaaggataaaaaaatagctatctctatatatgcagaaaaagcatttgactaaattcaaaatcctctcatgacaaaacctctcaacaaattgggcgtagaaggcatgtaccttaacacaaaacaggacatatataacaagctcacagctcacatcatacccaacaatgaaaaagtgaaatcttttctgctaagatcaaraacaagacaaggatatttattctcactacttctattcaacttatttctggaagtcctagccagagcaattaagccaaataaagaaataaaagatattcaaattgaaaaggaagaagtaaaattgtctctgtttgatgacatattatatataggaaaccctaaaaactccaccaaaaagctattagaaatgataaatgaattcaataaaattgcagaattcaaaatcaatgtacaaaactcagtagtttctttacactcacaacaaactatatgacaaaaataaagaaatcaatctcattcacagtagcatcaaaaaaactgtattttttttgtttaggagcacatttaggattgtacttaggagtacatttaaccaaggaggtg

SEQ ID NO: 461067 - DNA, 640 bp, Homo sapiens
gtttcagcaaacacaaatcaaatgtgataaaccacattaacagaatgaaggataaaaaaatagctatctctatatatgcagaaaaagcatttgactaaattcaaaatcctctcatgacaaaacctctcaacaaattgggcgtagaaggcatgtaccttaacacaaaacaggacatatataacaagctcacagctcacatcatacccaacaatgaaaaagtgaaatcttttctgctaagatcaagaacaagacaaggatatttattctcactacttctattcaacttatttctggaagtcctagccagagcaattaagccaaataaagaaataaaagatattcaaattgaaaaggaagaagtaaaattgtctctgtttgatgacatattatatataggaaaccctaaaawctccaccaaaaagctattagaaatgataaatgaattcaataaaattgcagaattcaaaatcaatgtacaaaactcagtagtttctttacactcacaacaaactatatgacaaaaataaagaaatcaatctcattcacagtagcatcaaaaaaactgtattttttttgtttaggagcacatttaggattgtacttaggagtacatttaaccaaggaggtgaaagatctgtat

SEQ ID NO: 461068 - DNA, 640 bp, Homo sapiens
gtttcagcaaacacaaatcaaatgtgataaaccacattaacagaatgaaggataaaaaaatagctatctctatatatgcagaaaaagcatttgactaaattcaaaatcctctcatgacaaaacctctcaacaaattgggcgtagaaggcatgtaccttaacacaaaacaggacatatataacaagctcacagctcacatcatacccaacaatgaaaaagtgaaatcttttctgctaagatcaagaacaagacaaggatatttattctcactacttctattcaacttatttctggaagtcctagccagagcaattaagccaaataaagaaataaaagatattcaaattgaaaaggaagaagtaaaattgtctctgtttgatgacatattatatataggaaaccctaaaaactccaccaaaaagctattagaaatgataaatgaattcaataaaattgcagaattcaaaatcaatgtayaaaactcagtagtttctttacactcacaacaaactatatgacaaaaataaagaaatcaatctcattcacagtagcatcaaaaaaactgtattttttttgtttaggagcacatttaggattgtacttaggagtacatttaaccaaggaggtgaaagatctgtat

SEQ ID NO: 461069 - DNA, 640 bp, Homo sapiens
gtttcagcaaacacaaatcaaatgtgataaaccacattaacagaatgaaggataaaaaaatagctatctctatatatgcagaaaaagcatttgactaaattcaaaatcctctcatgacaaaacctctcaacaaattgggcgtagaaggcatgtaccttaacacaaaacaggacatatataacaagctcacagctcacatcatacccaacaatgaaaaagtgaaatcttttctgctaagatcaagaacaagacaaggatatttattctcactacttctattcaacttatttctggaagtcctagccagagcaattaagccaaataaagaaataaaagatattcaaattgaaaaggaagaagtaaaattgtctctgtttgatgacatattatatataggaaaccctaaaaactccaccaaaaagctattagaaatgataaatgaattcaataaaattgcagaattcaaaatcaatgtacaaaactcagtagtttctttacactsacaacaaactatatgacaaaaataaagaaatcaatctcattcacagtagcatcaaaaaaactgtattttttttgtttaggagcacatttaggattgtacttaggagtacatttaaccaaggaggtgaaagatctgtat

SEQ ID NO: 461070 - DNA, 665 bp, Homo sapiens
aacatttaccatgataaagtggatttatcctccagatgtttcagcaaacacaaatcaaatgtgataaaccacattaacagaatgaaggataaaaaaatagctatctctatatatgcagaaaaagcatttgactaaattcaaaatcctctcatgacaaaacctctcaacaaattgggcgtagaaggcatgtaccttaacacaaaacaggacatatataacaagctcacagctcacatcatacccaacaatgaaaaagtgaaatcttttctgctaagatcaagaacaagacaaggatatttattctcactacttctattcaacttatttctggaagtcctagccagagcaattaagccaaataaagaaataaaagatattcaaattgaaaaggaagaagtaaaattgtctctgtttgatgacatattatatataggaaaccctaaaaactccaccaaaaagctattagaaatgataaatgaattcaataaaattgcagaattcaaaatcaatgtacaaaactcagtagtttctttacactcacaacaaactatatgacaaaaataaagaaatcaatctcattcacagtagcatcaaaaaaamtgtattttttttgtttaggagcacatttaggattgtacttaggagtacatttaaccaaggaggtg

SEQ ID NO: 461071 - DNA, 665 bp, Homo sapiens
aacatttaccatgataaagtggatttatcctccagatgtttcagcaaacacaaatcaaatgtgataaaccacattaacagaatgaaggataaaaaaatagctatctctatatatgcagaaaaagcatttgactaaattcaaaatcctctcatgacaaaacctctcaacaaattgggcgtagaaggcatgtaccttaacacaaaacaggacatatataacaagctcacagctcacatcatacccaacaatgaaaaagtgaaatcttttctgctaagatcaagaacaagacaaggatatttattctcactacttctattcaacttatttctggaagtcctagccagagcaattaagccaaataaagaaataaaagatattcaaattgaaaaggaagaagtaaaattgtctctgtttgatgacatattatatataggaaaccctaaaaactccaccaaaaagctattagaaatgataaatgaattcaataaaattgcagaattcaaaatcaatgtacaaaactcagtagtttctttacactcacaacaaactatatgacaaaaataaagaaatcaatctcattcacagtagcatcaaaaaaacygtattttttttgtttaggagcacatttaggattgtacttaggagtacatttaaccaaggaggtg

SEQ ID NO: 461072 - DNA, 554 bp, Homo sapiens
tccactggcttgaaattcttgcacagcagtctgaggttgacctaggacactcgagcttggtggcgggaggggcttccacattgccaaggcttgagtaggcagttttacccccacagtgtaaacaaagccaccagaaagtttgaactgggtggagcccaccacaactcagcaaggccacagcagccagactgcctctctagatttctcctctytgggcaaggcatctctgaaaaaagggcagcagccccagtcagagacctatagataaaacccccatctccctggaacagagcacctaggggaaagggcgcctgtgggcacagcttcagcagacttaaagcatctttgaaaagcctgatggctctgaagagagcagcagatctcccagcacagtattcgagctctgataagggtcagactgcctcctcaagtgggtccctgacccccgtgtatcctgactgggagacacctcccagtaggtgccaacaggcacctcatacaggagagctctggctggcatctggtgggtgcccctcttggacaaaacttccaga

SEQ ID NO: 461073 - DNA, 554 bp, Homo sapiens
tccactggcttgaaattcttgcacagcagtctgaggttgacctaggacactcgagcttggtggcgggaggggcttccacattgccaaggcttgagtaggcagttttacccccacagtgtaaacaaagccaccagaaagtttgaactgggtggagcccaccacaactcagcaaggccacagcagccagactgcctctctagatttctcctctctgggcaaggcatctctgaaaaaagggcagcagccccagtcagagacctatagataaaacccccatctccctggarcagagcacctaggggaaagggcgcctgtgggcacagcttcagcagacttaaagcatctttgaaaagcctgatggctctgaagagagcagcagatctcccagcacagtattcgagctctgataagggtcagactgcctcctcaagtgggtccctgacccccgtgtatcctgactgggagacacctcccagtaggtgccaacaggcacctcatacaggagagctctggctggcatctggtgggtgcccctcttggacaaaacttccaga

SEQ ID NO: 461074 - DNA, 430 bp, Homo sapiens
agctaaaggagcatgtcctaacccaatgtaaggaagctaaggacctggaaaaaaggctagaccaattgctaactagaataaccagtttagagaagaacataaatgacctgatggagctgaaaaacatgccatgagaacttcatgcagcatgcacaaggatcaagcactgattygatcaagcggaagaaagatatcagagactgaatatcaacttaatgaaataaatcaagaagacaagattagagaaaaaagaatgaaaagaaatgaacaaagcctccaagaaatatgggactatgtgaaacgaccaaatctacatttgattgctgtacctgaaagtgatggggagaatggaaccaagttagaaaacactcttcaggatattatccaggagaacttccctaacctagcaaggcaggccaatattcaaatt

SEQ ID NO: 461075 - DNA, 430 bp, Homo sapiens
agctaaaggagcatgtcctaacccaatgtaaggaagctaaggacctggaaaaaaggctagaccaattgctaactagaataaccagtttagagaagaacataaatgacctgatggagctgaaaaacatgccatgagaacttcatgcagcatgcacaaggatcaagcactgatttgatcaagcggaagaaagatatcagagactgaatatcaacttaatgaaataaatcaagaagacaagattagagaaaaaagaatgaaaagaaatgaacaaagcctccaagaaatatgggactatgtgaaacgaccaaatctacrtttgattgctgtacctgaaagtgatggggagaatggaaccaagttagaaaacactcttcaggatattatccaggagaacttccctaacctagcaaggcaggccaatattcaaatt

SEQ ID NO: 461076 - DNA, 560 bp, Homo sapiens
taaatacctaatgtagatgatgggttgatgggtgcagcaaaccaccatggcacgtgtatacctatgtaacaatcctgcatgttctgcatatgtaccccagaacttaaaatataatttaaaaaaaaatctcaaacaactcactgaagtgtctcaaagctgaacaagttttaccaaaatgaatccttctcagttaactgatcaaatggatgaatcctgaccctctgaagtctctttcctgagttagagcagggaactgctctgagtgttaactgttggattcactgcagtgtyctacaatattttacaagaagatgaacaggcaacctgcagacctaagcttgattcccaagtcacagtctgacccctgctacaggaggttaccctcctcaggaagagatagaaatagggaatttgaaggaatagtgaggggaccagggagatttgattgagtctggtttccaggtgaattaaaaggaagggtgtcatccagggtttgttactacagtcaaaagaataaataaatcaatgaagaaataccttcattgtctgtggttttcatg

SEQ ID NO: 461077 - DNA, 553 bp, Homo sapiens
tgaattccattaaaccaaaatctatgttgaacgaagtgaagtctgtacacagcattgcaaatgtgaacacattcctgtgtgaggcacatcaccatttgtcagttattgtgaatatgtgtatttttaagcaataagatgcagctggtcagttttctgggcaatcttggtgaggcatttcctgtgctgtggttgttctctaaccactgtgagaaacccaaataaaaatcgatcccccccaaaacaagtacrtatcacaaaaccatagtaatcaaaacaatatgacacttgcacaaaaacagacacattgaccaggggaacagaataaggagcccagaaataaactcatgcatttatgaccaataaatttttgacaaaggtgcccagaaaacgtaatgaagaatagacatttgtttcaataaatggtgttaagaaaactagatatccacatgcagaagaacacgaatgtgtatggtgtgtatccttatctcacaccatacacaaaaatcaattcaaaatggattaaaggtttaaacataaaactgtaaaactacta

SEQ ID NO: 461078 - DNA, 534 bp, Homo sapiens
tggaactacaggcatgcatcaccatgtccagctgattttaattttaattttgtaaaggcagggtcttcctattttccccaggctgatctctaactcttggcctcaagcaatccttcctctttggcctcccaaaatgttgggattacagatgggagcccccatacccaccaatcacaaggatctttataagagaaggaggtaggagagtcagaattagagaaagtgatgtggtaatggaagaagaggtcagagagggagatttgaagatgctgcacttctggccttgaatatggagtcacgaggtaagtcaaggaatgggggtggcttctagaagctggaaaaggcaaaggagcacattctgtctagagcctcccccagaaggaatgcagccyctctgacaccttgactttagccttaatagacctagttgggcttctggcccccagaactgtaagatggtagatttgtggtgtttgatgccactaaatgtagggtactttgttgtagcaacaacagaaaatgaacatgaagctg

SEQ ID NO: 461079 - DNA, 598 bp, Homo sapiens
gtaaggctttttccatgcctaataaatatgttttggagggatttcaccagtgtttctgctaagatacatgcataaaatggccacagaggttgtgagaaatctctgcagtttctctttgtctayacacatgaaagtattgaagaccagcacttggattagttaagataatgttttaattcatcactgtctcctcctccccttggtaccagcttttatgttcattgcattccccacccttttaagtactcagtacctcctgcatggtaacctattctgatatttgatattatcatgcttaatttgactgaatccattcggatattttatctttaagaaatttgtagttttatacttttaatttatgataaaattagattaatatcaaacattaacaagtgacttttaggaaggtatatgagctttcttattgacttcaaactataaagtacaaactgtgacactagaaatttagtcctttaacacatattgtatttatatgtgaagtggagggtgagcagaaaacagtgttatatttctctgtgtccagatggatactcacctcaatcattttcctatagtagaaagtagttcctgaaaa

SEQ ID NO: 461080 - DNA, 548 bp, Homo sapiens
ttcacctcttttatcttcaaatcctaaaactatgaaaattcacaaacttagctccatacattatggtagaaaggttaataatttggactttgaggttgaccaggcctgatttttgaataaattcacaaacttacctccatacattatggtagaaaggtcaataatctggactttgaggtckaccaggcctgatttttggatccaggctgcaacactcacttgctgtgttaacgtaacaaagttcctagaccatgctgagcttcagtttacttgttattgaattagggatatagcgttcgaaggaagaagttctagtatttgattgcacagcagagaaattatagttattgaactggggatatgtagatagacataataaattttagtattcaattatacaatggagaaatcgtagggaacaataatttattatatattctaaaatagctagcagagaaaaattataatgttcccaacacaaagaaaagataaatattcaaggtgatgaatatccaaattactctgatttgatcattacacattgtata

SEQ ID NO: 461081 - DNA, 548 bp, Homo sapiens
ttcacctcttttatcttcaaatcctaaaactatgaaaattcacaaacttagctccatacattatggtagaaaggttaataatttggactttgaggttgaccaggcctgatttttgaataaattcacaaacttacctccatacattatggtagaaaggtcaataatctggactttgaggtcgaccaggcctgatttttggatccaggctgcaacactcacttgctgtgttaacgtaacaaagttcctagaccatgctgagcttcagtttacttgttattgaattagggatatagcgttcgaaggaagaagttctagtatttgattgcacagcagagaaattatagttattgaactggggatatgtagatagacataataaattttagtattcaattrtacaatggagaaatcgtagggaacaataatttattatatattctaaaatagctagcagagaaaaattataatgttcccaacacaaagaaaagataaatattcaaggtgatgaatatccaaattactctgatttgatcattacacattgtata

SEQ ID NO: 461082 - DNA, 548 bp, Homo sapiens
ttcacctcttttatcttcaaatcctaaaactatgaaaattcacaaacttagctccatacattatggtagaaaggttaataatttggactttgaggttgaccaggcctgatttttgaataaattcacaaacttacctccatacattatggtagaaaggtcaataatctggactttgaggtcgaccaggcctgatttttggatccaggctgcaacactcacttgctgtgttaacgtaacaaagttcctagaccatgctgagcttcagtttacttgttattgaattagggatatagcgttcgaaggaagaagttctagtatttgattgcacagcagagaaattatagttattgaactggggatatgtagatagacataataaattttagtattcaattatacaatggagaaatcrtagggaacaataatttattatatattctaaaatagctagcagagaaaaattataatgttcccaacacaaagaaaagataaatattcaaggtgatgaatatccaaattactctgatttgatcattacacattgtata

SEQ ID NO: 461083 - DNA, 618 bp, Homo sapiens
tttgggaggccaaagcaagcaaatcgcttgagatcagcagttyaagaagtgtaacaaatcctctacaatataagtagagtgaaaagagatagctacagtgatgagggaaggcactatagtgatgtggcatttgagtatagccataaaagaggataaatattacaatacatgaatatagggtctaaagaagtcttttcaagtagattgtaaaatatttcaaaaatggtaagtttggtgtatgttgaagcatacagattgtctacatcctaaaaatcattttggtgaataaaggaaaataagaaaggtagtcaatattcatttgttgcctatcattagaaacttctcaaaggtatatgagaattattaaataaatttaggaagccagtgaaggtatgggtcccgggaattgaggatgaagccagtaattagggaagatgccccatctataagtgtgatgtatcaaatggaggaaaagaaaaacggagggaaggagttcccttaagagaagattgaaatagagcagacttggggggctacacagaggaactgggactacacagttccagctttaaggctatagaaacagaaatagaaatactggtaagtaaaaacccaaag

SEQ ID NO: 461084 - DNA, 618 bp, Homo sapiens
tttgggaggccaaagcaagcaaatcgcttgagatcagcagttcaagaagtgtaacaaatcctctacaatataagtagagtgaaaagagatagctacagtgatgagggaaggcactatagtgatgtggcatttgagtatagccataaaagaggataaatattacaatacatgaatatagggtctaaagaagtcttttcaagtagattgyaaaatatttcaaaaatggtaagtttggtgtatgttgaagcatacagattgtctacatcctaaaaatcattttggtgaataaaggaaaataagaaaggtagtcaatattcatttgttgcctatcattagaaacttctcaaaggtatatgagaattattaaataaatttaggaagccagtgaaggtatgggtcccgggaattgaggatgaagccagtaattagggaagatgccccatctataagtgtgatgtatcaaatggaggaaaagaaaaacggagggaaggagttcccttaagagaagattgaaatagagcagacttggggggctacacagaggaactgggactacacagttccagctttaaggctatagaaacagaaatagaaatactggtaagtaaaaacccaaag

SEQ ID NO: 461085 - DNA, 618 bp, Homo sapiens
tttgggaggccaaagcaagcaaatcgcttgagatcagcagttcaagaagtgtaacaaatcctctacaatataagtagagtgaaaagagatagctacagtgatgagggaaggcactatagtgatgtggcatttgagtatagccataaaagaggataaatattacaatacatgaatatagggtctaaagaagtcttttcaagtagattgtaaaatatttcaaaaatggtaagtttggtgtatgttgaagcatacagattgtctacatcctaaaaatcattttggtgaakaaaggaaaataagaaaggtagtcaatattcatttgttgcctatcattagaaacttctcaaaggtatatgagaattattaaataaatttaggaagccagtgaaggtatgggtcccgggaattgaggatgaagccagtaattagggaagatgccccatctataagtgtgatgtatcaaatggaggaaaagaaaaacggagggaaggagttcccttaagagaagattgaaatagagcagacttggggggctacacagaggaactgggactacacagttccagctttaaggctatagaaacagaaatagaaatactggtaagtaaaaacccaaag

SEQ ID NO: 461086 - DNA, 618 bp, Homo sapiens
tttgggaggccaaagcaagcaaatcgcttgagatcagcagttcaagaagtgtaacaaatcctctacaatataagtagagtgaaaagagatagctacagtgatgagggaaggcactatagtgatgtggcatttgagtatagccataaaagaggataaatattacaatacatgaatatagggtctaaagaagtcttttcaagtagattgtaaaatatttcaaaaatggtaagtttggtgtatgttgaagcatacagattgtctacatcctaaaaatcattttggtgaataaaggaaaataagaaaggtagtcaatattcatttgttgcctatcattagaaacttctcaaaggtatatgagaattattaaataaatttaggragccagtgaaggtatgggtcccgggaattgaggatgaagccagtaattagggaagatgccccatctataagtgtgatgtatcaaatggaggaaaagaaaaacggagggaaggagttcccttaagagaagattgaaatagagcagacttggggggctacacagaggaactgggactacacagttccagctttaaggctatagaaacagaaatagaaatactggtaagtaaaaacccaaag

SEQ ID NO: 461087 - DNA, 587 bp, Homo sapiens
aaaaaaaccaccaccatcattttgcaagtgttaccactattgtgtgttaatattgtagaagtattcctaattatgatttctttgtattcctaattgtaatagctttgtatttgaaaaattattgattcatactctatatgttattattttgtatgcgatgacaacagaatatattatcatgctccttttgtgaatctcattcataatataaagtataaatttgtgattttgctttaatttgaaatattaatttcaaatatgttatcacaatttgatacaaactattgacagtaaatctgtggattaagtaatgtcttagtaggtattgggaaaatttgaaactagtaacatggaggactattgtcattgtttatttcaaagccagttaaaattctgcaaagcagygtacataaaaataatttcaagaaatttataaaataccgagattatggtgtataaacaactttagattctttgtttaagaaattctgccagtttgtaatatatgcttcattcaatgcagctaagggctgtacctggctaatagtaggcacctaatatttgttgaaaaggaatactgagtagct

SEQ ID NO: 461088 - DNA, 583 bp, Homo sapiens
gattcatactctatatgttattattttgtatgcgatgacaacagaatatattatcatgctccttttgtgaatctcattcataatataaagtataaatttgtgattttgctttaatttgaaatattaatttcaaatatgttatcacaatttgatacaaactattgacagtaaatctgtggattaagtaatgtcttagtaggtattgggaaaatttgaaactagtaacatggaggactattgtcattgtttatttcaaagccagttaaaattctgcaaagcagcgtacataaaaataatttcaagaaatttataaaataccgagattatggtgtataaacaactttagattctttgtttaagaaattctgccagtttgtaatatatgcttcattcaawgcagctaagggctgtacctggctaatagtaggcacctaatatttgttgaaaaggaatactgagtagctgggacctcctgagtagctgggaccacacacatttaacctgtatttataaaattactgtttagagaataacatttgatggaatcatgcttttactttctgcttatgactcaattgtttgt

SEQ ID NO: 461089 - DNA, 583 bp, Homo sapiens
gattcatactctatatgttattattttgtatgcgatgacaacagaatatattatcatgctccttttgtgaatctcattcataatataaagtataaatttgtgattttgctttaatttgaaatattaatttcaaatatgttatcacaatttgatacaaactattgacagtaaatctgtggattaagtaatgtcttagtaggtattgggaaaatttgaaactagtaacatggaggactattgtcattgtttatttcaaagccagttaaaattctgcaaagcagcgtacataaaaataatttcaagaaatttataaaataccgagattatggtgtataaacaactttagattctttgtttaagaaattctgccagtttgtaatatatgcttcattcaatgyagctaagggctgtacctggctaatagtaggcacctaatatttgttgaaaaggaatactgagtagctgggacctcctgagtagctgggaccacacacatttaacctgtatttataaaattactgtttagagaataacatttgatggaatcatgcttttactttctgcttatgactcaattgtttgt

SEQ ID NO: 461090 - DNA, 604 bp, Homo sapiens
tgggggtagcagcaacatgggtagcgtattcaaacttgaaaagactttaaatatttgtattattagatgtagattatgaaacacatattttaatgtggttaatttttttaaggaatcaaaactatgagtaaagaccaagaaaattgtgctggatggccacttccaccatggctcccctcctatttaagtctgggtactgtgtcacccgaagtcttcaggcacattgttccaggtttgggtttgcctatgaaagaaactcatgagagctggaartgaggagtgaagaggaggtcttcacataaagcaggcttaaggattagacatagcaggtttgacagatgtgatggcttgcagaatcctttatgagctcccactgtccatctggataagatttacagacctttcagaaattcctataagcttgggttctgtgcccacactctagactgtcaggctaagatctctgatataaaacagacctcttctgatttttgtctagctgcttttctaatatctattcaccaagctcttccaataatagcataaggccctaattaatattaaacttttatcattataatacataggatgtcttctgttttcc

SEQ ID NO: 461091 - DNA, 501 bp, Homo sapiens
catttcttttttttcttttttttttttaagataagagtctttctcttgtcacccaggctggagtgcaatggtgcgattttggctcactgcaaccttcaccttctgggtycaagcaattctcctgcctcagcctcccgagtagctgggattacaggtgcccgccaccatacccagctaatttttgtatttttagtagagatggggtttcaccatgttggccaggctcctctggagctcctgacctcaggcaatctgcctgcctcagcctcccaaaattcaaggagtacagatgtgaacaaccacgcccggcctccatttcttttttgtagtctttaataaacagctgctatcattgcagacttgctgtttaggcacttaggaatttttcactagaaggcatgtaaataaagaccatgggcaattgtaatgaatttcgccttcattctttgactacatgactgtccccagagctgtaactttattgaattttttagaagccat

SEQ ID NO: 461092 - DNA, 501 bp, Homo sapiens
catttcttttttttcttttttttttttaagataagagtctttctcttgtcacccaggctggagtgcaatggtgcgattttggctcactgcaaccttcaccttctgggttcaagcaattctcctgcctcagcctcccgagtagctgggattacaggtgcccgccaccatacccagctaatttttgtatttttagtagagatgggrtttcaccatgttggccaggctcctctggagctcctgacctcaggcaatctgcctgcctcagcctcccaaaattcaaggagtacagatgtgaacaaccacgcccggcctccatttcttttttgtagtctttaataaacagctgctatcattgcagacttgctgtttaggcacttaggaatttttcactagaaggcatgtaaataaagaccatgggcaattgtaatgaatttcgccttcattctttgactacatgactgtccccagagctgtaactttattgaattttttagaagccat

SEQ ID NO: 461093 - DNA, 501 bp, Homo sapiens
catttcttttttttcttttttttttttaagataagagtctttctcttgtcacccaggctggagtgcaatggtgcgattttggctcactgcaaccttcaccttctgggttcaagcaattctcctgcctcagcctcccgagtagctgggattacaggtgcccgccaccatacccagctaatttttgtatttttagtagagatggggtttcaccatrttggccaggctcctctggagctcctgacctcaggcaatctgcctgcctcagcctcccaaaattcaaggagtacagatgtgaacaaccacgcccggcctccatttcttttttgtagtctttaataaacagctgctatcattgcagacttgctgtttaggcacttaggaatttttcactagaaggcatgtaaataaagaccatgggcaattgtaatgaatttcgccttcattctttgactacatgactgtccccagagctgtaactttattgaattttttagaagccat

SEQ ID NO: 461094 - DNA, 607 bp, Homo sapiens
ccaaatactggaatgttaagttctgtaatgtcagatatttctgtttggttcactggtgtattcttaaagcatgttacatactaggtatactcaatgaatatttgttgaataaatatcacattgggcttattccagaaattcaagcttgtttcaatagttagagcaatctacaaatgtaattcattacattaactaattaaaggagctaaatcacatcaccaccacaataatgcagaaaaccacatttgatacaactcaatattcatgtctgcctaacaaacatctcatgatactaggaaaagaggaagggatatattattttcatgtataaagcactaaccattgtagcatgccaatatactcaaaattcaatgaaattcctatcaaaatcttagcattcctcttagtcctcaacaaagcatttytaaaatgtgtatagaagaccaaagggccaaaagagtcaacttctgaagaagcgcaaaaagaaagttgaggaaatcttaaaacatgttattgagcttaaagttgcaaaaataaactcatgtaccataattcatgagtagaaaaatagactagtggaataacataaaaataaaaacaatgctta

SEQ ID NO: 461095 - DNA, 607 bp, Homo sapiens
ccaaatactggaatgttaagttctgtaatgtcagatatttctgtttggttcactggtgtattcttaaagcatgttacatactaggtatactcaatgaatatttgttgaataaatatcacattgggcttattccagaaattcaagcttgtttcaatagttagagcaatctacaaatgtaattcattacattaactaattaaaggagctaaatcacatcaccaccacaataatgcagaaaaccacatttgatacaactcaatattcatgtctgcctaacaaacatctcatgatactaggaaaagaggaagggatatattattttcatgtataaagcactaaccattgtagcatgccaatatactcaaaattcaatgaaattcctatcaaaatcttagcattcctcttagtcctcaacaaagcatttctaaaatgtgtatagaagaccaaagggccaaaagagtcaacttctgaagaagcgcaaaaagaaagttgaggaaatcttaaaacatgttattgagcttaaagttgcaaaaataaactcatgtaccataaytcatgagtagaaaaatagactagtggaataacataaaaataaaaacaatgctta

SEQ ID NO: 461096 - DNA, 607 bp, Homo sapiens
ccaaatactggaatgttaagttctgtaatgtcagatatttctgtttggttcactggtgtattcttaaagcatgttacatactaggtatactcaatgaatatttgttgaataaatatcacattgggcttattccagaaattcaagcttgtttcaatagttagagcaatctacaaatgtaattcattacattaactaattaaaggagctaaatcacatcaccaccacaataatgcagaaaaccacatttgatacaactcaatattcatgtctgcctaacaaacatctcatgatactaggaaaagaggaagggatatattattttcatgtataaagcactaaccattgtagcatgccaatatactcaaaattcaatgaaattcctatcaaaatcttagcattcctcttagtcctcaacaaagcatttctaaaatgtgtatagaagaccaaagggccaaaagagtcaacttctgaagaagcgcaaaaagaaagttgaggaaatcttaaaacatgttattgagcttaaagttgcaaaaataaactcatgtaccataattsatgagtagaaaaatagactagtggaataacataaaaataaaaacaatgctta

SEQ ID NO: 461097 - DNA, 551 bp, Homo sapiens
acattgccagctttaaaaagagagaggagaggcaatgagaaaaggaatgctgatgttctctagaagatagaaaaggccaggatatggattctaccctagccaccataaagaaacatgcctgtcgacaacttgattttagttcactaaaattcatgcctgatttctgacttgtgtacactgtaagatgacaagtttgtgttattttaggtcacttagtttgtagaaatttrttacagcagtaatagaacaagtggttatccatatgaggcaaattagattggatacctatctccaatagaaatcaattcaaggtgaattccaggaaaatacttaaaacatttagattaaaaataaatgagaatttttgttacttttggtaggtcatagaaccaagaaaaacaaacattaaggaggaaaaatgaacatatgactacatcaaaatataaagcttctctatttggaagatatcataaggtgacaaatcataaactgtaatatttacaacatatatataagtgaataaatatacatttagaatatatatgaactcc

SEQ ID NO: 461098 - DNA, 551 bp, Homo sapiens
acattgccagctttaaaaagagagaggagaggcaatgagaaaaggaatgctgatgttctctagaagatagaaaaggccaggatatggattctaccctagccaccataaagaaacatgcctgtcgacaacttgattttagttcactaaaattcatgcctgatttctgacttgtgtacactgtaagatgacaagtttgtgttattttaggtcacttagtttgtagaaatttgttacagcagtaatagaacaagtggttatccatatgaggcaaattagattggatacctatctccaatagaaatcaattcaaggtgaattccaggaaaatacttaaaacatttagattaaaaataaatgagaatttttgttacttttggtaggtcatagraccaagaaaaacaaacattaaggaggaaaaatgaacatatgactacatcaaaatataaagcttctctatttggaagatatcataaggtgacaaatcataaactgtaatatttacaacatatatataagtgaataaatatacatttagaatatatatgaactcc

SEQ ID NO: 461099 - DNA, 599 bp, Homo sapiens
tgattttagttcactaaaattcatgcctgatttctgacttgtgtacactgtaagatgacaagtttgtgttattttaggtcacttagtttgtagaaatttgttacagcagtaatagaacaagtggttatccatatgaggcaaattagattggatacctatctccaatagaaatcaattcaaggtgaattccaggaaaatacttaaaacatttagattaaaaataaatgagaatttttgttacttttggtaggtcatagaaccaagaaaaacaaacattaaggaggaaaaatgaacatatgactacatcaaaatataaagcttctctatttggawgatatcataaggtgacaaatcataaactgtaatatttacaacatatatataagtgaataaatatacatttagaatatatatgaactcccaaaaatcaacaggaaaaataagacatagaacaagcaaaatgcataaacaaaagaaggcaaaacaaaaataatgactcataattatatgaaaagaagctcatcttcatagatgagcagataaatgcaaattaaaaccaccctgagatgctttttacatccatgagcctgataaaagtt

SEQ ID NO: 461100 - DNA, 586 bp, Homo sapiens
tatctccaatagaaatcaattcaaggtgaattccaggaaaatacttaaaacatttagattaaaaataaatgagaatttttgttacttttggtaggtcatagaaccaagaaaaacaaacattaaggaggaaaaatgaacatatgactacatcaaaatataaagcttctctatttggaagatatcataaggtgacaaatcataaactgtaatatttacaacatatatatragtgaataaatatacatttagaatatatatgaactcccaaaaatcaacaggaaaaataagacatagaacaagcaaaatgcataaacaaaagaaggcaaaacaaaaataatgactcataattatatgaaaagaagctcatcttcatagatgagcagataaatgcaaattaaaaccaccctgagatgctttttacatccatgagcctgataaaagttagagtctaaaagtaataattaacaaagatgggaagtaacagaaaatcttgtccattactggttaaagtataaactgatacagctactttatagaatattacattatagaataaagttgtgagtatgtatatgcagtgactcag

SEQ ID NO: 461101 - DNA, 608 bp, Homo sapiens
gaactcactatcacaagaacagcacaggggaaactgcccccatgattcaattacctccacctggtctctcccttgacctgtggggattatgggggctatggggattacaattcaagatgagattcaggtggggatacaaagcctaaccatatcagtaggcatgtattgaattttaaactcagagaaaaatactagtgtttttataggattcttactaaagaaaaaccagaaagtartaaaccatctacgctaagacataaaattcagttgtttagttacaagatagaatgtggccttgtaagaaagcaaattaacttctaacatacaaagccttagagaagattcaagtgactgacggatcttaaacagagctattattacaactcgaactgcagtaaaatatcctcagcaacatagatgtgtgtgtttcactagtcagagcaatacaaatttaatgaaactccattggtggtgtttttaatcagacaatttctgaagatgtcctggcttattcacagatgcaagccaaatctctagaagagtaccataataagaaaaaaaagaatacaggcaattgagagctgttccaaagtttagggagtttttgt

SEQ ID NO: 461102 - DNA, 614 bp, Homo sapiens
aatcattttctaccaaaagaaagaaatgtcttgtctattcaggttctgctctacttaaaagttttccttgttggcgagcaagtggttagaaaatcatattttatacrtacattcagcttaactatcattcagctcaggaagatgactcagggccttatccataccttcaagtttgctcttagcaagtaattgtttcagtatctatatcaaaaatggcttaagcctgcaacatgtttctgaatgattaacaaggtgatagtcagttcttcattgaatcctggatgctttatttttcttaataagaggaattcatatggatcagctagaaaaaaattaagaggaaaatcacatggaaagttatatattatatatctattatatataatattatatatctattatatattatatattgtacatctattacatatatattatatatgtattatatatattatatatctattatatatataatattatatattatatatcatttccaaattccccagcgttcatatttgtcagtgcaagtaaagagccttactgctgatgaggtttgaggtatgaccatttggccagaatttatgaactctacatgtcgcttgatgtgt

SEQ ID NO: 461103 - DNA, 614 bp, Homo sapiens
aatcattttctaccaaaagaaagaaatgtcttgtctattcaggttctgctctacttaaaagttttccttgttggcgagcaagtggttagaaaatcatattttatacatacattcagcttaactatcattcagctcaggaagatgactcagggccttatccataccttcaagtttgctcttagcaagtaattgtttcagtatctatatcaaaaatggcttaagcctgcaacatgtttctgaatgattaacaaggtgatagtcagttcttcattgaatcctggatgctttatttttcttaataagaggaattcatatggatcagctagaaaaaaattaagaggaaaatcacatggaaagttatatattatatatctattatatataatattatatatctattatatattatatattgtayatctattacatatatattatatatgtattatatatattatatatctattatatatataatattatatattatatatcatttccaaattccccagcgttcatatttgtcagtgcaagtaaagagccttactgctgatgaggtttgaggtatgaccatttggccagaatttatgaactctacatgtcgcttgatgtgt

SEQ ID NO: 461104 - DNA, 614 bp, Homo sapiens
aatcattttctaccaaaagaaagaaatgtcttgtctattcaggttctgctctacttaaaagttttccttgttggcgagcaagtggttagaaaatcatattttatacatacattcagcttaactatcattcagctcaggaagatgactcagggccttatccataccttcaagtttgctcttagcaagtaattgtttcagtatctatatcaaaaatggcttaagcctgcaacatgtttctgaatgattaacaaggtgatagtcagttcttcattgaatcctggatgctttatttttcttaataagaggaattcatatggatcagctagaaaaaaattaagaggaaaatcacatggaaagttatatattatatatctattatatataatattatatatctattatatattatatattgtacatctattacatatatawtatatatgtattatatatattatatatctattatatatataatattatatattatatatcatttccaaattccccagcgttcatatttgtcagtgcaagtaaagagccttactgctgatgaggtttgaggtatgaccatttggccagaatttatgaactctacatgtcgcttgatgtgt

SEQ ID NO: 461105 - DNA, 570 bp, Homo sapiens
tattcctttcctttccttttcttcctcctttcccttctcttcccttttcttcccttcccctccctccctctctctctccctccctccctccttccctcccttcctccttccctctttctctctttcccttccttcctttccttctttcccttccttcctttccttccctccttccctttttccctccttccctcctyccttccttttttctttccttccttttttcctttttataaattatgcagtctgtggtattcttttatagaagcatgaaatggacaaagactccattttcaagagcaagcacttttgtagtttctgagcgaactatgactgcaaaggaagttctataggtagcctcagatccactacctaggaagcatgccaccaagcagacctaggatctaggatttgatcaagtgctgggcaacatgatacctctgcaatttagcacttccctatatacctccagttggctcagcccattagggctaaaactacccctcatatcctggtgtctcttgtaggcagaagccttgcctaaaccctaagctgcttggctcacattct

SEQ ID NO: 461106 - DNA, 318 bp, Homo sapiens
aattatgcagtctgtggtattcttttatagaagcatgaaatggacaaagactccattttcaagagcaagcacttttgtagtttctgagcgaactatgactgcaaaggaagttctataggtagcctcagatccactacctaggaagcatgcyaccaagcagacctaggatctaggatttgatcaagtgctgggcaacatgatacctctgcaatttagcacttccctatatacctccagttggctcagcccattagggctaaaactacccctcatatcctggtgtctcttgtaggcagaagccttgcctaaaccctaagc

SEQ ID NO: 461107 - DNA, 570 bp, Homo sapiens
tattcctttcctttccttttcttcctcctttcccttctcttcccttttcttcccttcccctccctccctctctctctccctccctccctccttccctcccttcctccttccctctttctctctttcccttccttcctttccttctttcccttccttcctttccttccctccttccctttttccctccttccctccttccttccttttttctttccttccttttttcctttttataaattatgcagtctgtggtattcttttatagaagcatgaaatggacaaagactccattttcaagagcaagcacttttgtagtttctgagcgaactatgactgcaaaggaagttctataggtagcctcagatccactacctaggaagcatgccaccaagcagacctaggatctaggatttgatcaagtgctgggcaacatgatacctctgcaatttagcacttccctatatacctccagttggctcagcccattagggctaaaactacycctcatatcctggtgtctcttgtaggcagaagccttgcctaaaccctaagctgcttggctcacattct

SEQ ID NO: 461108 - DNA, 461 bp, Homo sapiens
gcctcccgggttcctgtgtttaagcgattcccctgcctcagcctcccgagtagctgggatttataggtgcgcaccaccacgcccagctaattttttgtattttagtagagacgggatttcaccatgttggccaggatggtctcgatctcctgaccttgtgatccgcccgcctccacctcccaaagtgctgggattacaggtgtgagacaccgcgcccggccaacttttatttatttatttattttttaaggwggagtcttgctctgtcacccaggctggagtgcaatggtgcgctctccgctcaccgcaatctccacctcctgtgttccagtgattctcctgcctcagtctcccaagtagctgggattacagggtcgcaccaccacgcctggctaattttttatatttttagtagagatggggtttcatcatgttggccaggctggtctcaaactcctgac

SEQ ID NO: 461109 - DNA, 551 bp, Homo sapiens
tttattgctatagccattatgattattaatgatgagtattgattggtrgtattggttatggttcattgtccggagagtatattgttgaagaggatagctattagaaggattatggatgcggttgcttgcgtgaggaaatacttgatggcagcttctgtggaacgagggtttatttttttggttagaactggaataaaagctagcatgtttatttctaggcctactcaggtaaaaaatcagtgcgagcttagcgctgtgatgagtgtgcctgcaaagatggtagagtagatgacgggttgggccaggggattaattagtacgggaaggatataaccaacattttcggggtatgggcccgatagcttatttagctgaccttactttaggatggggtgtgataggtggcacggagaattttggattctcagggatgggttcgattctcatagtcctagaaataaggggatttaaactcctattatttactctatcaaagtaactcttttatcagacatatttcttaggtttgagggggaatgctggagattgta

SEQ ID NO: 461110 - DNA, 551 bp, Homo sapiens
tttattgctatagccattatgattattaatgatgagtattgattggtggtattggttatggttcattgtccggagagtatattgttgaagaggatagctattagaaggattatggatgcggttgcttgcgtgaggaaatacttgatggcagcttctgtggaacgagggtttatttttttggttagaactggaataaaagctagcatgtttatttctaggcctactcaggtaaaaaatcagtgcgagcttagcgctgtgatgagtgtgcctgcaaagatggtagagtagatgacgggttgggccaggggattaattagtacgggaaggrtataaccaacattttcggggtatgggcccgatagcttatttagctgaccttactttaggatggggtgtgataggtggcacggagaattttggattctcagggatgggttcgattctcatagtcctagaaataaggggatttaaactcctattatttactctatcaaagtaactcttttatcagacatatttcttaggtttgagggggaatgctggagattgta

SEQ ID NO: 461111 - DNA, 556 bp, Homo sapiens
tggtgagtaagttgtgaagggaatgtgatgaaaaagtacacttctattgcaaagaaatcatgagctaggtttatacgctatgctgtgaatggccaatagattataaattcaacagtctccctgtcacagctatggtaatgacractgtttaggccttaggggagctttagggagaggcaatttcatacttaagtcacactgacttaaaaagtgaaatatttgaaatcattgttgaaatcacgtggaggtcgtcagcaagcggatgaggttggaatgcctatcattttcctcaagctcatgtcctctcattttcttatttgaaaatctatttggctcagaaaggacacctagggttagtcaaaaatcacctcctgatgttccttttaaaggaagcttccaagttatttgaatagcttccaagttattcatcgagaaacaaagcaaattcaaagattatgtccgtaggcacaaactggattttaagaaatcctggctgcataaacaattgtcttatagaaaagaatttctgttcctcttttccctccccttgtcaatc

SEQ ID NO: 461112 - DNA, 612 bp, Homo sapiens
tgcctaacaaaccaccaaagctttttttaactctctaagggaaggtacttttgtttgacttactatttactattgattagggcccagactctgccaagttacatgttaatttttgtctggtagagatacaaatgatttttgtcctgtaaaaagattttattgctccacaggacattaatgagtgaggtttccaaattagcaaacttatgtcagcatgctgtttctgatggtctatccaaatctttctccttccaattctcttttcaaacagctttaccatcctctggttctttcttttgtgaagtaaacagatctttatacacactccctatagacttatataagaatcatgttttcactttttgaaaatgatgctttgacaattccactgaacrggctggggaaaattttatgagaattgttggatcctgctcagaagcaaaaagataaaaccaggctatcctctatcatggctgatctggggttcattcccagaaatgagggtcttggatcagggtcaaatatgtgggtggggtgggctcaattgctgagatacccatctcatgaggaaggatgggacccatattatgggaaacaaaacaggaagaatga

SEQ ID NO: 461113 - DNA, 525 bp, Homo sapiens
aatgagagtgaaaagattaatcctttcactaaattgggaaaacaggagaaagtgttgttggataaagaaggaactttagcacaatgagcagagacaagacggtaaatgttccttatccagtaatctctgatgaaaggccagtgctcacatcattagtaatgtccagaaatgataatatcagtagtagcaatactcacaatgtaaataagtagctctcatgttttgattgccaatagtgctagcaaccttacatgtatcactctytaccccagccctgttaattggtactatgatgaagaaagagactcaaagaaaataaatgactcactcgcgtatttttacacagctagaattgctacagaaaggattaaagccaagtctatccaaatccactgtctatgtccctccctccctccctccctcccttccttccttccttccttccttgctccttccttccctccctttctgcctccctccctttctgcctccctccctccctatctcaaacatctattgagtgtc

SEQ ID NO: 461114 - DNA, 525 bp, Homo sapiens
aatgagagtgaaaagattaatcctttcactaaattgggaaaacaggagaaagtgttgttggataaagaaggaactttagcacaatgagcagagacaagacggtaaatgttccttatccagtaatctctgatgaaaggccagtgctcacatcattagtaatgtccagaaatgataatatcagtagtagcaatactcacaatgtaaataagtagctctcatgttttgattgccaatagtgctagcaaccttacatgtatcactctttaccccagccctgttaattggtactatgatgaagaaagagactcaaagaaaataaatgactcactcgcgtatttttacacagctagaattgctacagaaaggattaaagccaagtctatccaamtccactgtctatgtccctccctccctccctccctcccttccttccttccttccttccttgctccttccttccctccctttctgcctccctccctttctgcctccctccctccctatctcaaacatctattgagtgtc

SEQ ID NO: 461115 - DNA, 525 bp, Homo sapiens
aatgagagtgaaaagattaatcctttcactaaattgggaaaacaggagaaagtgttgttggataaagaaggaactttagcacaatgagcagagacaagacggtaaatgttccttatccagtaatctctgatgaaaggccagtgctcacatcattagtaatgtccagaaatgataatatcagtagtagcaatactcacaatgtaaataagtagctctcatgttttgattgccaatagtgctagcaaccttacatgtatcactctttaccccagccctgttaattggtactatgatgaagaaagagactcaaagaaaataaatgactcactcgcgtatttttacacagctagaattgctacagaaaggattaaagccaagtctatccaaatccacwgtctatgtccctccctccctccctccctcccttccttccttccttccttccttgctccttccttccctccctttctgcctccctccctttctgcctccctccctccctatctcaaacatctattgagtgtc

SEQ ID NO: 461116 - DNA, 536 bp, Homo sapiens
agttgcaaacttggctgcacattggaattcctagggagagttttaaacatcccaacraccaggctgcaatgaaataagaccgatgaaatcaggatctcaggggtggaatgggactggtaatttacagaatctctccagctgattccatattcagacaagttagagcaccaatgccctcagtcctgagagtgagggctggtctcatgaatccattcacacagatggaagtccatcctcacagcggtcaggcctcacacaacatcgggcatgttggtaggcatatgcctaagtttctgtgcaatgaatgcatgccttactggtgatgcatcaatagcaaggcattcaggggagagagtaccctgcctcagtgcctagcatgagacatacatccaggaccatgtttttattcccatcttatggatgagaaaactgaggttcagaaagggtaggcaaaatcccctagctcacctggctggaagggggcagaacttccctgtacgtgctgagaacaccactgttcgagcagaggggaaacc

SEQ ID NO: 461117 - DNA, 558 bp, Homo sapiens
ccaggcctgtctcctgtgcccccagagctgcccaggcccctgcttcctacagagaccagctcacagtcttcttgtcagtggtcatctaacagtggtcttgtaaaagcagagcaagttccaatcttatttatagcattcagcagttttttttttttttagagctggtgtcttgctctgttgcccaagtttgagtgcaatggctcaatcacagcttyactgcagccttgaactcctgggccctagtgatcctcctctttcagcctcctgagtagctgggaccacaggtatgcaccaccatgcccacctaaacacagtctacctttatgtgtgtgtgtccatccatcaccagatgctcacggaaggtagggcagaaacattttgaaaaataatttttacctttgaagagtaatcttaatgataacctagcaggtgctcagatacatcgggtcgattcacttcctatggctgtgtaacaaattaccacaaacttggtgatttagagcaatgcccatttattatctcagggtttctataggtcagaagtttgggtgttgcatg

SEQ ID NO: 461118 - DNA, 558 bp, Homo sapiens
ccaggcctgtctcctgtgcccccagagctgcccaggcccctgcttcctacagagaccagctcacagtcttcttgtcagtggtcatctaacagtggtcttgtaaaagcagagcaagttccaatcttatttatagcattcagcagttttttttttttttagagctggtgtcttgctctgttgcccaagtttgagtgcaatggctcaatcacagctttactgcagccttgaactcctgggccctagtgatcctcctctttcagcctcctgagtagctgggaccacaggyatgcaccaccatgcccacctaaacacagtctacctttatgtgtgtgtgtccatccatcaccagatgctcacggaaggtagggcagaaacattttgaaaaataatttttacctttgaagagtaatcttaatgataacctagcaggtgctcagatacatcgggtcgattcacttcctatggctgtgtaacaaattaccacaaacttggtgatttagagcaatgcccatttattatctcagggtttctataggtcagaagtttgggtgttgcatg

SEQ ID NO: 461119 - DNA, 558 bp, Homo sapiens
ccaggcctgtctcctgtgcccccagagctgcccaggcccctgcttcctacagagaccagctcacagtcttcttgtcagtggtcatctaacagtggtcttgtaaaagcagagcaagttccaatcttatttatagcattcagcagttttttttttttttagagctggtgtcttgctctgttgcccaagtttgagtgcaatggctcaatcacagctttactgcagccttgaactcctgggccctagtgatcctcctctttcagcctcctgagtagctgggaccacaggtatgcaccaccatgcccacctaaacacagtctacctttaygtgtgtgtgtccatccatcaccagatgctcacggaaggtagggcagaaacattttgaaaaataatttttacctttgaagagtaatcttaatgataacctagcaggtgctcagatacatcgggtcgattcacttcctatggctgtgtaacaaattaccacaaacttggtgatttagagcaatgcccatttattatctcagggtttctataggtcagaagtttgggtgttgcatg

SEQ ID NO: 461120 - DNA, 607 bp, Homo sapiens
caacttctcagggcctcatttgcaaacacggatgataatagtaagctccatctctcacggttgttaggaggattaaaagtgtataaagatgctctgcaagctctgaagtattagccaaccgtctagtcagtgtgaagagacactgaaaagtgaggtgggacacagcattttaagtgaaaaagaagggagaagcttatctttatcaaagttaaatattagatactgagtactttgtaaagtctgttgctgctggggatcaggcaaattgttataaccttcctggaaggcaatttcccataattatcagcagtttacagaatatccaagccatttgaccctaagataatgtttctagggatttctcttaaggatttaatcaaggacacatacacagattatagcagttcaaaattggaacccatctatttaacaataagggattgtttaattacacatgaaatattatttaaacktgaacattatattgcctttaaatatttgacatggaaagaagcttaaaactcagtcctatttccttatcaatgttctatcaacaaggggcaggaggtgtcacctccttgggaatcagagttggcccctcaggtag

SEQ ID NO: 461121 - DNA, 448 bp, Homo sapiens
acccagcccttcccccggtggaagggagaattatttgaaaagtgtgggktttggtgtcagacagactgggacccaggtctaggctactgaaccagtgagctgtgtggctttgtgcatgctatttagacactctgagttttaatttcctaatttctaattgccagacaggttggttgggaggaacagcttagattgacctatgaaagcatttgtagactcggaagtgttctcatggcactttggatgaaatcgttcctgctgcttcaaactactgtgtgatgagtttccaaaaatcattgcctgtgatctgcaggctcgttgtatgtcacagatcaccagatgtgcttccattccatgcttgcttctgcagtcctgttctaagctctggcctaatattcttcccgcccacggagctcttgccactgcctcaccgcagagactggaaccc

SEQ ID NO: 461122 - DNA, 573 bp, Homo sapiens
agaattatttgaaaagtgtgggttttggtgtcagacagactgggacccaggtctaggctactgaaccagtgagctgtktggctttgtgcatgctatttagacactctgagttttaatttcctaatttctaattgccagacaggttggttgggaggaacagcttagattgacctatgaaagcatttgtagactcggaagtgttctcatggcactttggatgaaatcgttcctgctgcttcaaactactgtgtgatgagtttccaaaaatcattgcctgtgatctgcaggctcgttgtatgtcacagatcaccagatgtgcttccattccatgcttgcttctgcagtcctgttctaagctctggcctaatattcttcccgcccacggagctcttgccactgcctcaccgcagagactggaaccctgtcctttaactcccagctcagagtgtagggaagtgtttctcaaagtattctctgtgttatctgcttccaaattgcctggatattggttaaaaaccaaacctctggttccccttccagactgaaggatgagaattggctgtgggaatgagt

SEQ ID NO: 461123 - DNA, 310 bp, Homo sapiens
aacagtccaatgcttcactcagccattttacctcacccccattgatgttctccgaccgttgactattctctacaaaccacaaagacattggaacactatacctattattcggcgcatgagctggagtcctaggcacagctctaagcctccttattcgagccgarctgggccagccaggcaaccttctaggtaacgaccacatctacaacgttatcgtcacagcccatgcatttgtaataatcttcttcatagtaatacccatcataatcggaggctttggcaactgactagttcccctaataatcggtgc

SEQ ID NO: 461124 - DNA, 581 bp, Homo sapiens
aagaacccgtatacataaaatctagacaaaaaaggaaggaatcgaaccccccaaagctggtttcaagccaaccccatggcctccatgactttttcaaaaagatattagaaaaaccatttcataactttgtcaaagttaaattataggctaaatcctatatatcttaatggcacatgcagcgcaagtaggtctacaagacgctacttcccctatcatagaagagcttatcayctttcatgatcacgccctcataatcattttccttatctgcttcctagtcctgtacgcccttttcctaacactcacaacaaaactaactaatactaacatctcagacgctcaggaaatagaaaccgtctgaactatcctgcccgccatcatcctagtccttatcgccctcccatccctacgcatcctttacataacagacgaggtcaacgatccctcctttaccatcaaatcaattggccatcaatggtactgaacctacgaatacaccgactacggcggactaatcttcaactcctacatacttcccccattattcctagaaccaggcgacctgcgactccttgacgttg

SEQ ID NO: 461125 - DNA, 581 bp, Homo sapiens
aagaacccgtatacataaaatctagacaaaaaaggaaggaatcgaaccccccaaagctggtttcaagccaaccccatggcctccatgactttttcaaaaagatattagaaaaaccatttcataactttgtcaaagttaaattataggctaaatcctatatatcttaatggcacatgcagcgcaagtaggtctacaagacgctacttcccctatcatagaagagcttatcatctttcatgatcacgccctcataatcattttccttatctgcttcctagtcctgtaygcccttttcctaacactcacaacaaaactaactaatactaacatctcagacgctcaggaaatagaaaccgtctgaactatcctgcccgccatcatcctagtccttatcgccctcccatccctacgcatcctttacataacagacgaggtcaacgatccctcctttaccatcaaatcaattggccatcaatggtactgaacctacgaatacaccgactacggcggactaatcttcaactcctacatacttcccccattattcctagaaccaggcgacctgcgactccttgacgttg

SEQ ID NO: 461126 - DNA, 581 bp, Homo sapiens
aagaacccgtatacataaaatctagacaaaaaaggaaggaatcgaaccccccaaagctggtttcaagccaaccccatggcctccatgactttttcaaaaagatattagaaaaaccatttcataactttgtcaaagttaaattataggctaaatcctatatatcttaatggcacatgcagcgcaagtaggtctacaagacgctacttcccctatcatagaagagcttatcatctttcatgatcacgccctcataatcattttccttatctgcttcctagtcctgtacgcccttttcctaacactcacaacaaaactaactaatactaacatctcagacgctcaggaaatagaaaccgtctgaactatcctgcccgccatcatcctagtcctyatcgccctcccatccctacgcatcctttacataacagacgaggtcaacgatccctcctttaccatcaaatcaattggccatcaatggtactgaacctacgaatacaccgactacggcggactaatcttcaactcctacatacttcccccattattcctagaaccaggcgacctgcgactccttgacgttg

SEQ ID NO: 461127 - DNA, 581 bp, Homo sapiens
aagaacccgtatacataaaatctagacaaaaaaggaaggaatcgaaccccccaaagctggtttcaagccaaccccatggcctccatgactttttcaaaaagatattagaaaaaccatttcataactttgtcaaagttaaattataggctaaatcctatatatcttaatggcacatgcagcgcaagtaggtctacaagacgctacttcccctatcatagaagagcttatcatctttcatgatcacgccctcataatcattttccttatctgcttcctagtcctgtacgcccttttcctaacactcacaacaaaactaactaatactaacatctcagacgctcaggaaatagaaaccgtctgaactatcctgcccgccatcatcctagtccttatcgccctcccatccctacgcatcctttacataacagacgaggtcaacgatccctccyttaccatcaaatcaattggccatcaatggtactgaacctacgaatacaccgactacggcggactaatcttcaactcctacatacttcccccattattcctagaaccaggcgacctgcgactccttgacgttg

SEQ ID NO: 461128 - DNA, 454 bp, Homo sapiens
ggttccttccttgggctgtgttcagcaaaagggtttactgagctggcaggtccaagatggcctcactcacaggactggctgttgatgggagccttgatgctcttgggctcaccccttatcctccagtaggttagagcttcttacagtggtttcaggcagcatctgaagacagtaaawgcagaagctccaaggcttcttacattctagcctggaaaatcacatcacattgcttccttcatatttttttggcaaatcaggttgcaaggcttgcccagattagggtaaagaggcaaagaggctccttttcttttctttttcttttttttttttttgagtcagaatcttgctctgttgcccaggctggagtgcagtggcgcgatctaggctcactgcaagctctgcctcctgggttcacgccattcccctgcctcaggctcccaagtagctgagacta

SEQ ID NO: 461129 - DNA, 454 bp, Homo sapiens
ggttccttccttgggctgtgttcagcaaaagggtttactgagctggcaggtccaagatggcctcactcacaggactggctgttgatgggagccttgatgctcttgggctcaccccttatcctccagtaggttagagcttcttacagtggtttcaggcagcatctgaagacagtaaatgcagaagctccaaggcttcttacattctagcctggaaaatyacatcacattgcttccttcatatttttttggcaaatcaggttgcaaggcttgcccagattagggtaaagaggcaaagaggctccttttcttttctttttcttttttttttttttgagtcagaatcttgctctgttgcccaggctggagtgcagtggcgcgatctaggctcactgcaagctctgcctcctgggttcacgccattcccctgcctcaggctcccaagtagctgagacta

SEQ ID NO: 461130 - DNA, 554 bp, Homo sapiens
agatgtaagaatgcttatcaaggtaaatgctgttcacactgcttggagtgtcaggcctagatctctatccatcagaaacaacaatatcaataacaacaacagcaacatgatgatggggcaatttctkaaaagcaccatgtattttatcgatacatgtccgttgcagaaaatccaggtgaatccaaagaagaaataaatgtcttccacaatcccatagcccagagctaactaaccactataaagaacccagcgtggttttaactaatggatcaaaagatgctcatcaaaggctctgagctttcctgagtgctaacaggaaacatccagcatcactggtctctccaaggctgcaggtgtctttgcccatagtgcctgttttgtgtcagggaaagaatcaacctgggagccaagcccaggaatcaggatgaccaagacatactggacaaggagggaacaaacccatccaaggacactcaaggacaaatcaagcaaatgaatttaagggagacctgctcatggtctgctttgctgctcagcatggctgggaggcacag

SEQ ID NO: 461131 - DNA, 554 bp, Homo sapiens
agatgtaagaatgcttatcaaggtaaatgctgttcacactgcttggagtgtcaggcctagatctctatccatcagaaacaacaatatcaataacaacaacagcaacatgatgatggggcaatttctgaaaagcaccrtgtattttatcgatacatgtccgttgcagaaaatccaggtgaatccaaagaagaaataaatgtcttccacaatcccatagcccagagctaactaaccactataaagaacccagcgtggttttaactaatggatcaaaagatgctcatcaaaggctctgagctttcctgagtgctaacaggaaacatccagcatcactggtctctccaaggctgcaggtgtctttgcccatagtgcctgttttgtgtcagggaaagaatcaacctgggagccaagcccaggaatcaggatgaccaagacatactggacaaggagggaacaaacccatccaaggacactcaaggacaaatcaagcaaatgaatttaagggagacctgctcatggtctgctttgctgctcagcatggctgggaggcacag

SEQ ID NO: 461132 - DNA, 584 bp, Homo sapiens
aaccactataaagaacccagcgtggttttaactaatggatcaaaagatgctcatcaaargctctgagctttcctgagtgctaacaggaaacatccagcatcactggtctctccaaggctgcaggtgtctttgcccatagtgcctgttttgtgtcagggaaagaatcaacctgggagccaagcccaggaatcaggatgaccaagacatactggacaaggagggaacaaacccatccaaggacactcaaggacaaatcaagcaaatgaatttaagggagacctgctcatggtctgctttgctgctcagcatggctgggaggcacagtggaagatcatgcatccttcccctgggactcctctgccagagcctgagagctttctcctgcacacaggctaggggtagggcagttggaattgatccatgccttctagctagactgtgggtcccctcagtcttgggcatggtgacagcccagcatcagacagaggtcagtatcaaactagaaaatttaataaatgctgtcagatttgtagacccaagaaaatataaactgccaatcacggaggaaaaaaatctctcaatga

SEQ ID NO: 461133 - DNA, 584 bp, Homo sapiens
aaccactataaagaacccagcgtggttttaactaatggatcaaaagatgctcatcaaaggctctgagctttcctgagtgctaacaggaaacatcyagcatcactggtctctccaaggctgcaggtgtctttgcccatagtgcctgttttgtgtcagggaaagaatcaacctgggagccaagcccaggaatcaggatgaccaagacatactggacaaggagggaacaaacccatccaaggacactcaaggacaaatcaagcaaatgaatttaagggagacctgctcatggtctgctttgctgctcagcatggctgggaggcacagtggaagatcatgcatccttcccctgggactcctctgccagagcctgagagctttctcctgcacacaggctaggggtagggcagttggaattgatccatgccttctagctagactgtgggtcccctcagtcttgggcatggtgacagcccagcatcagacagaggtcagtatcaaactagaaaatttaataaatgctgtcagatttgtagacccaagaaaatataaactgccaatcacggaggaaaaaaatctctcaatga

SEQ ID NO: 461134 - DNA, 631 bp, Homo sapiens
aacaacaacagcaacatgatgatggggcaatttctgaaaagcaccatgtattttatcgatacatgtccgttgcagaaaatccaggtgaatccaaagaagaaataaatgtcttccacaatcccatagcccagagctaactaaccactataaagaacccagcgtggttttaactaatggatcaaaagatgctcatcaaaggctctgagctttcctgagtgctaacaggaaacatccagcatcactggtctctccaaggctgcaggtgtctttgcccatagtgcctgttttgtgtcagggaaagaatcaacctgggagccaagcccaggaatcaggatgaccaagacatactgsacaaggagggaacaaacccatccaaggacactcaaggacaaatcaagcaaatgaatttaagggagacctgctcatggtctgctttgctgctcagcatggctgggaggcacagtggaagatcatgcatccttcccctgggactcctctgccagagcctgagagctttctcctgcacacaggctaggggtagggcagttggaattgatccatgccttctagctagactgtgggtcccctcagtcttgggcatggtgacagcccagcatcagacagaggtcag

SEQ ID NO: 461135 - DNA, 584 bp, Homo sapiens
aaccactataaagaacccagcgtggttttaactaatggatcaaaagatgctcatcaaaggctctgagctttcctgagtgctaacaggaaacatccagcatcactggtctctccaaggctgcaggtgtctttgcccatagtgcctgttttgtgtcagggaaagaatcaacctgggagccaagcccaggaatcaggatgaccaagacatactggacaaggaggsaacaaacccatccaaggacactcaaggacaaatcaagcaaatgaatttaagggagacctgctcatggtctgctttgctgctcagcatggctgggaggcacagtggaagatcatgcatccttcccctgggactcctctgccagagcctgagagctttctcctgcacacaggctaggggtagggcagttggaattgatccatgccttctagctagactgtgggtcccctcagtcttgggcatggtgacagcccagcatcagacagaggtcagtatcaaactagaaaatttaataaatgctgtcagatttgtagacccaagaaaatataaactgccaatcacggaggaaaaaaatctctcaatga

SEQ ID NO: 461136 - DNA, 631 bp, Homo sapiens
aacaacaacagcaacatgatgatggggcaatttctgaaaagcaccatgtattttatcgatacatgtccgttgcagaaaatccaggtgaatccaaagaagaaataaatgtcttccacaatcccatagcccagagctaactaaccactataaagaacccagcgtggttttaactaatggatcaaaagatgctcatcaaaggctctgagctttcctgagtgctaacaggaaacatccagcatcactggtctctccaaggctgcaggtgtctttgcccatagtgcctgttttgtgtcagggaaagaatcaacctgggagccaagcccaggaatcaggatgaccaagacatactggacaaggagggaacaaacccatccaaggacactcaaggacaaatcaagcaaatgaatttaagggagacstgctcatggtctgctttgctgctcagcatggctgggaggcacagtggaagatcatgcatccttcccctgggactcctctgccagagcctgagagctttctcctgcacacaggctaggggtagggcagttggaattgatccatgccttctagctagactgtgggtcccctcagtcttgggcatggtgacagcccagcatcagacagaggtcag

SEQ ID NO: 461137 - DNA, 631 bp, Homo sapiens
aacaacaacagcaacatgatgatggggcaatttctgaaaagcaccatgtattttatcgatacatgtccgttgcagaaaatccaggtgaatccaaagaagaaataaatgtcttccacaatcccatagcccagagctaactaaccactataaagaacccagcgtggttttaactaatggatcaaaagatgctcatcaaaggctctgagctttcctgagtgctaacaggaaacatccagcatcactggtctctccaaggctgcaggtgtctttgcccatagtgcctgttttgtgtcagggaaagaatcaacctgggagccaagcccaggaatcaggatgaccaagacatactggacaaggagggaacaaacccatccaaggacactcaaggacaaatcaagcaaatgaatttaagggagacctgctcatggtctgctttgctgctcagcatggctgggaggcacagtggaagatcatgcatccttcccctgggactcctctgccagagcctgagagctttctcctgcmcacaggctaggggtagggcagttggaattgatccatgccttctagctagactgtgggtcccctcagtcttgggcatggtgacagcccagcatcagacagaggtcag

SEQ ID NO: 461138 - DNA, 560 bp, Homo sapiens
ggttttaactaatggatcaaaagatgctcatcaaaggctctgagctttcctgagtgctaacaggaaacatccagcatcactggtctctccaaggctgcaggtgtctttgcccatagtgcctgttttgtgtcagggaaagaatcaacctgggagccaagcccaggaatcaggatgaccaagacatactggacaaggagggaacaaacccatccaaggacactcaaggacaaatcaagcaaatgaatttaagggagacctgctcatggtctgctttgctgctcagcatggctgggaggcacagtggaagatcatgcatccttcccctgggactcctctgccagagcctgagagctttctcctgcacacaggctaggggtagggcagttggaattgatccatgccttctagctagactgtgggtcccctcagtcttgggcatggtgacagcccagcatcagacagasgtcagtatcaaactagaaaatttaataaatgctgtcagatttgtagacccaagaaaatataaactgccaatcacggaggaaaaaaatctctcaatg

SEQ ID NO: 461139 - DNA, 508 bp, Homo sapiens
cttgggcatggtgacagcccagcatcagacagaggtcagtatcaaactagaaaatttaataaatrctgtcagatttgtagacccaagaaaatataaactgccaatcacggaggaaaaaaatctctcaatgatcttatctttatatgattcccttgctgcctggagattgacatttccttggggataatctggtcataggattggtgaaggtggaagggaggcaacctccgaaggtggggccctctgctcacctgggacagggagggcctgaggtaggtgtctgtgtgggctggggaggaggatgggagcagtgcttctagatgtttccactttctcctcattagataataatgaatgggtgatttccctagtcactgcagtgtgaggaaatctacaaaattaatttcacaatacactttacaggataggtggagaaacacatgaagcacaactgcagtgggttataaaaaatggcctttcgagttgagcagtaaattcgttcaagcag

SEQ ID NO: 461140 - DNA, 508 bp, Homo sapiens
cttgggcatggtgacagcccagcatcagacagaggtcagtatcaaactagaaaatttaataaatgctgtcagatttgtagacccaagaaaatataaactgccaatcacggaggaaaaaaatctctcaatgatcttatctttatatgattcccttgctgcctggagattgacatttccttggggataatctggtcataggattggtgaaggtggaagggaggcaacctccraaggtggggccctctgctcacctgggacagggagggcctgaggtaggtgtctgtgtgggctggggaggaggatgggagcagtgcttctagatgtttccactttctcctcattagataataatgaatgggtgatttccctagtcactgcagtgtgaggaaatctacaaaattaatttcacaatacactttacaggataggtggagaaacacatgaagcacaactgcagtgggttataaaaaatggcctttcgagttgagcagtaaattcgttcaagcag

SEQ ID NO: 461141 - DNA, 508 bp, Homo sapiens
cttgggcatggtgacagcccagcatcagacagaggtcagtatcaaactagaaaatttaataaatgctgtcagatttgtagacccaagaaaatataaactgccaatcacggaggaaaaaaatctctcaatgatcttatctttatatgattcccttgctgcctggagattgacatttccttggggataatctggtcataggattggtgaaggtggaagggaggcaacctccgaaggtggggccctctgctcacctgggacagggagggcctgaggtaggtgtctgtgtgggctggggaggaggatgggagcagtgcttctagatgtttccactttctcctcattagataataaygaatgggtgatttccctagtcactgcagtgtgaggaaatctacaaaattaatttcacaatacactttacaggataggtggagaaacacatgaagcacaactgcagtgggttataaaaaatggcctttcgagttgagcagtaaattcgttcaagcag

SEQ ID NO: 461142 - DNA, 508 bp, Homo sapiens
cttgggcatggtgacagcccagcatcagacagaggtcagtatcaaactagaaaatttaataaatgctgtcagatttgtagacccaagaaaatataaactgccaatcacggaggaaaaaaatctctcaatgatcttatctttatatgattcccttgctgcctggagattgacatttccttggggataatctggtcataggattggtgaaggtggaagggaggcaacctccgaaggtggggccctctgctcacctgggacagggagggcctgaggtaggtgtctgtgtgggctggggaggaggatgggagcagtgcttctagatgtttccactttctcctcattagataataatgaatgggtgatttccctagtcactgcagtgtgaggaaatctacaaaattaatttcacaatacrctttacaggataggtggagaaacacatgaagcacaactgcagtgggttataaaaaatggcctttcgagttgagcagtaaattcgttcaagcag

SEQ ID NO: 461143 - DNA, 556 bp, Homo sapiens
ctgggtcccaagtgaccatgacaggcagagctccctgttgagccacagagatttagagaatggctgttaacacagcataatccagcccatcctgactaatctgatattaacatgtataataaagaattctatcaatgctgagggaagatgaytagttaaggtcctaggttgcaagtctcaaaacctcttctaaggattgtagacaggaaattaaatgacttctagtccctagagttcccaatctcctaccatcccatcctaatatgacagaagtaattcttgagttgcttctgaaaccagagcttccctcagaacccttagcctgccagatggcttcttggagagccctcactcacttttctccttctgctattgctgctcattcattccagcttttaaaaattcatctttatccaggaacctcgcttctagaaaagtcatacaggtgcttccaggaggctacatgggcacccatatttttctagccactttcattagaccaatgcagcagagaagaaaagcctcaataattattatgacatggcatgttaggata

SEQ ID NO: 461144 - DNA, 556 bp, Homo sapiens
ctgggtcccaagtgaccatgacaggcagagctccctgttgagccacagagatttagagaatggctgttaacacagcataatccagcccatcctgactaatctgatattaacatgtataataaagaattctatcaatgctgagggaagatgattagttaaggtcctaggttgcaagtctcaaaacctcttctaaggattgtagacaggaaattaaatgacttctagtccctagagttcccaatctcctaccatcccatcctaatatgacagaagtaattcttgagttgcttctgaaaccagagcttccctcagaacccttagcctgccagatggcttcttggagagccctcactcacttttctccttctgctattgctgctcattcattccagyttttaaaaattcatctttatccaggaacctcgcttctagaaaagtcatacaggtgcttccaggaggctacatgggcacccatatttttctagccactttcattagaccaatgcagcagagaagaaaagcctcaataattattatgacatggcatgttaggata

SEQ ID NO: 461145 - DNA, 611 bp, Homo sapiens
cttctagtccctagagttcccaatctcctaccatcccatcctaatatgacagaagtaattcttgagttgcttctgaaaccagagcttccctcagaacccttagcctgccagatggcttcttggagagccctcactcacttttctccttctgctattgctgctcattcattccagcttttaaaaattcatctttatccaggaacctcgcttctagaaaagtcatacaggtgcttccaggaggctacatgggcacccatatttttctagccactttcattagaccaatgcagcagagaagaaaagcctcaataattattatgacatggcatgttaggataccaagtaaattgcatttgtaaaatgtgattttctgttggtgttcacttcggctctactgacatttggtaagtattattgactgactgactaactaatgtggtcattagtcttcataaagaaaggctctctacaaaaacggarggatgccctttttctggcatttaatacgtaagaaattgcctccgatagaaaccagagttgcctgattactatcagcacaggagaaatgtattaatgtgcctttctagtaacaggtttttagaaagtcaaat

SEQ ID NO: 461146 - DNA, 611 bp, Homo sapiens
cttctagtccctagagttcccaatctcctaccatcccatcctaatatgacagaagtaattcttgagttgcttctgaaaccagagcttccctcagaacccttagcctgccagatggcttcttggagagccctcactcacttttctccttctgctattgctgctcattcattccagcttttaaaaattcatctttatccaggaacctcgcttctagaaaagtcatacaggtgcttccaggaggctacatgggcacccatatttttctagccactttcattagaccaatgcagcagagaagaaaagcctcaataattattatgacatggcatgttaggataccaagtaaattgcatttgtaaaatgtgattttctgttggtgttcacttcggctctactgacatttggtaagtattattgactgactgactaactaatgtggtcattagtcttcataaagaaaggctctctacaaaaacggagggatgccctttttctggcatttaatacgtaagaaattgcctccratagaaaccagagttgcctgattactatcagcacaggagaaatgtattaatgtgcctttctagtaacaggtttttagaaagtcaaat

SEQ ID NO: 461147 - DNA, 308 bp, Homo sapiens
aaaatgatggtaaatgagacattaatttacccttctaatctctatcacagcaaaaaggtaattaaaaaatctatatgaggaccamaaaatacacaaagattatgtagcaaagcctatagcctaaaaaagtaaacattgaaatttgtatgtccataaaatgtttacaaaattcagtacatattacacaccccaccctaaaaacatctaagcaaagtagagaatgtagaaatgctacagattatattctctgattatgacacaacaaaactagaaattacagcatggaaatttaaaagctttctcttaaa

SEQ ID NO: 461148 - DNA, 308 bp, Homo sapiens
aaaatgatggtaaatgagacattaatttacccttctaatctctatcacagcaaaaaggtaattaaaaaatctatatgaggaccaaaaaatacacaaarattatgtagcaaagcctatagcctaaaaaagtaaacattgaaatttgtatgtccataaaatgtttacaaaattcagtacatattacacaccccaccctaaaaacatctaagcaaagtagagaatgtagaaatgctacagattatattctctgattatgacacaacaaaactagaaattacagcatggaaatttaaaagctttctcttaaa

SEQ ID NO: 461149 - DNA, 308 bp, Homo sapiens
aaaatgatggtaaatgagacattaatttacccttctaatctctatcacagcaaaaaggtaattaaaaaatctatatgaggaccaaaaaatacacaaagattatgtagcaaagcctatagcctraaaaagtaaacattgaaatttgtatgtccataaaatgtttacaaaattcagtacatattacacaccccaccctaaaaacatctaagcaaagtagagaatgtagaaatgctacagattatattctctgattatgacacaacaaaactagaaattacagcatggaaatttaaaagctttctcttaaa

SEQ ID NO: 461150 - DNA, 460 bp, Homo sapiens
tttccagaatatgtggaaaatagtgacaataaaaatattacacatgtgtaatcccagcattttgagatgccaaggtggcaggatcacttgagaccaggagttcgcaaccagcctggacaacatagggagactccatctccacacamgccaaaaaaaaattttaaatagccaggtatagtggtacttcttgtaatcccatctacttgggaggctaaggtgggagaatcacccaacctcaggagttcagggcttcagcaagccatgatcatatcactgcactccagcctcagcaacagagcaagatcctatctcaaaaaaaaaaaaaaaaaaatcacatgtgggaaatagctatagcacaataaaaataaatgtattaagtatgaacaacaaaaaagctagtaaaggttgaacaacaactatccttaggaaagtggaaataatgtgttaataaatatgaaag

SEQ ID NO: 461151 - DNA, 439 bp, Homo sapiens
gagtttaagtaatgttcccaaagcctcgtggctagtaattcaaacctaatttctgcctactccaaagtctatttttcctcatgatactatactgcctctccatggataaagacagagatcacatattaataaaatttgcacaaagtcggcaaattgttgaaagggaaggctaagatgattaataaaatcaagagccagatgatctcaacaacctgaaataactggctgacaaccaatttgaataactccctgcgggtgaakttcaaagtactatttggggtttttttttaagtttggctgggtgcagcggctcacgcctgtaatccaagcacttagggaagccaaggtgggtggatcatgaagtcaggagttgaagaccagcccggtcaacatggtgaaaccccatctctactaaaaataaaaaattagccgggcctgc

SEQ ID NO: 461152 - DNA, 490 bp, Homo sapiens
gttgcattcagcagaagtcagcttcctagggaatattgcaggaagggtgaaggtagagaatctggtggggaagcaagcaaatgcccatcacatgcactttcctccaacagagcgactcagatgctataaaacttgctaacgcagtctcagggtctgatcacagtaacatacaatccaggttttartcatcagaaatcgcagtcctattgtcttctgcacagacccaaacacacttggaggtcatgttcaatatgaatacctcacagagaaggaaatttacacacgagaagtacatctgcagaaagccagctggcatgtcaaccattcgaaaactcagggtgttcgggataaagaagactcaggaagacaagtatgaagcataatctgtgacattattgatatcttcctgatatcaatattattgatatcttcctgaagaacataattcctgcctaccatcaacaagcatcaatactttctaccagctatt

SEQ ID NO: 461153 - DNA, 478 bp, Homo sapiens
ttgaccaatgaagtctaatctaaatgttctgagcatgttcaaagtaagctaggctaacctataatttttggtgtgctaaatgcatttttaacttatgatattttcagtttacgggggtttgttgrgacataacttcatcatacatcaaggagcatctgtatatgggatatagttaaagcagtgatcagaggaaaatctatagccttaacacatttattaataaaagtgtaggaattaaattatcagctgaaaaatgtaaaaagtatctaaaagagtaagcagaaagtacaagaaagaacccatagtagaaaaaagtgaaaattaataaaataagaagccaaaaaacagatcaaatcagtaaaccaaaaatcttgttctttaaacaaatcaacaaagttgacaaaaaattagatcttttaatcatgaataaaaaaagagaaagcacaaaaatgaataaggaatggtgagagaaataact

SEQ ID NO: 461154 - DNA, 553 bp, Homo sapiens
ggaatttttatagttaatatgtaggcagttaatatgtaggctgaaaaaaaatctttttagaaattccattcttgtcgattccactaagacgaaggaagaaactgttttctatcacttctttttgaaaaaaaatgaaaagaacagtttgattattttcttctgtaatctctagagaaggcttgcatagaacaggcattaattaaaccatgataatgtggctcaaaacaaaatgcttgctatttaatagtaagagctgttttcataattacatatgtggactagtttatctatatcctcattacctcacagttagttaattttagcttaattggagtgccaggtaaggtggttcatagttctgaatactaaagaagtaccagaacacattattttccaatcatcccagtgagcatcagacatyacaattttaatactacttttgagtaaccaaaaagactgagatttgtgaataaataattcctaattgatctctctagtctgggtctgtggtttactgtaacagaaagaatattgatctaaatgtcaggtcggg

SEQ ID NO: 461155 - DNA, 322 bp, Homo sapiens
taatgtaaagtcctgtccaggaccatcttatgacccacaatcagtagcacctccggaaaaaggaattcagtatttattacytagctgaatattctaagtactttatttgccttatgtcctgtatttctcaaaaaaaaaaacctataaaacatgaattattattattatcctcattggaggaaactaagatttagaaagattaagtaacttccccaaggtgacatagctaatgagagatgagatggagctggctttcaaatccaacccctcatgccaaagtcagtgcttcagaacagcacatcctgcaaatacctgtatattg

SEQ ID NO: 461156 - DNA, 578 bp, Homo sapiens
aatgaatgttctagggatgaataaacactctatagcacctcataccaatttagggcaggttttgctgccaaatcagttattgaaaaaaaaaattctggttttcagagcattgagatttcataattgcagataggcaactgtgaatacaacaaaggaagaaacagtggctataatgggcatcttttttgaaaagagaaaaacagatgatactggagactgtttacatgtagaggaaggaaatgctaaaagagaatgaaattgtatggacaaaggagaagggaagactgaggcagcatttcccaaaagggtggaaacacacagacccccagagcccacacattctggacaaatgaaagaggagtcctagctttgtgttaaaatgacaaattataggtgtatatakgtatgaggtacatatgttatgattttttattacaatcttcaatggttaaatcaagctaatgaacatattccccacctcaaatattttacatttttataccaacattgaaattattcttttagtgaaatttaaatgtacagtgctcaattgttaattatattcaccatgctgtgta

SEQ ID NO: 461157 - DNA, 408 bp, Homo sapiens
cgccccaaaccaaactcatggcattatcacaatcccactcctcttcctgacttctaatgtttataaactgtatcacyatttttccacgaacaaacataaaaattaccacattttcaaacaaactcagattctaaatacctcttcatttccatttatgttctccgaatgctctacccagactattttaatagtttctgcacgattgccttttctccaattcatctatcacatcaataacaatcttaaccagttaggaattgcattcagctgtaagtaataaacctctgaaaaatagtggctgaaataagattggtgtttatttttctttctctttggctcaggttccttctaactttgttctccaccatatttagacaggggctcgtctccttaaactttaaagatgtc

SEQ ID NO: 461158 - DNA, 532 bp, Homo sapiens
aaaggccacgtttttaaaaacacactaggagagtggtactgtatcttcaggattctgaaaataatgtaaagacctggtaaatgagtggctgaaagtgaaatatgaactagagatacacagttgttaaggcaaaacaaagaaaaagtagagatttttttaaaacacagagttaacagtggtatctgcatcatatctcctctttgaataattacaagtgattgcagcttgctgggcccagttaaatcaattcataattatgtcacttcattttaatgaaactaaaggaaaccgactcacacaaaataggtgtctttaaaatattctattaaaggaactaccaatagcaactaaacctaatcactcatggtcaagtaaatattaaaatcacagagctgacatctaccactccttatctgagatctccattggactacattgccatcttagaaggaatgaccatcagataagtygaaataatcaagaagactatttggaatatgtgtgtgtatacttacacttgataagttaatct

SEQ ID NO: 461159 - DNA, 378 bp, Homo sapiens
gggcacatgatatcaacatgacttatcactagtaatataaaccttggtcacttggttaagatggtatcttccaggaatcttcattataagatttacattttatcaattctatcctctattcttcggaatccaatcactaagttcagcctacactcaaagggagagaaatgaagatctacctcctggaaatggaagtagtttttctatacaggagacttttttctttcctcccattgagttatttattcaatcacttatttatataagtatggtctcagggatactttattctttagattataatcaaattctgttgttttgttgctcaaagttaacattcttgttttgttttgtraacagaatctcactccgttgttc

SEQ ID NO: 461160 - DNA, 470 bp, Homo sapiens
gaactgtaagtccattaaacctctttcttttgtaaattgcccagtctttggtatctttttatcagcagcaagaaaacagattaatacrggaggtttaagcacaggagtcatccaaataatttactttgtttcatcaattctacaatgaacacttctttctaaattttaatatttctaaaattggaatgtatcttacaattattggtatcatgtgagggtcaagcagtcatcattgcctctgtatgtgcaaatattaacagtgcatggattaaaacttatagaataggtttcagcagtatagaagcaaaacctggacacaataagagcaccactcattttatacccaagaaccaaatggatgtgggaaggagttagaaggtggtgcatcagacaagtttagcagcattccaaaattcctaaatgaagagtccaaagtagattaactacatatagtaattccaaagccaggt

SEQ ID NO: 461161 - DNA, 503 bp, Homo sapiens
actctactcttttcttgcttaaatggtttctgaagggaagtctgataaaatttttatccttgttcctttctaggtaagatgttttctcttcttttatcagattttcttcagtttgaatatgatatgcctaatatcctagattttcctcagtttgaatattatatacctaaatatagtytatttgtatttatgctgcttgatgttcatgatttgagcttcatgagcttgaatttcatggatctttggtttactgtctgtcattaagtttggaaaattctcagtcattactatttcaaatatttcttcttctttccctttcttccttctcctctggtaatgccattacttatatgttacacctcttgtagttgtctcacacttcttgaatattctcttccatcattttccttatttttttctcattgcatttcagttctgaaaatttctaagagcatattttcaagctcactgattctttttccatagaaatatccagtctactc

SEQ ID NO: 461162 - DNA, 514 bp, Homo sapiens
tgctactgtgctcaccattcctggttctcaggaatggtagaaccttaagactagaactgtaatctacaccaacagttctctcaggccttcaaattacactactggctttcctgggtctccagcttgcaaatggcagatcatgggacttctcagcctccataatcacttgagccaattccttattttatatatatatacacacacacatataaatacacatacatatatttcctatggtgttctgtttctctggagagcactaatagaaaactctatatatatttgacaaaatttgcctgccttgctttattttatttaaatattttttctaaggaaacctttaagattctctttgacactgttacacattggttattggtaaatttcctccataccaaatactcctgytttattttactatctgttaagggtatccccattatctcctttatttaaatttagaacttcagtatcatctttgagaaaatggttttttgttttgtttagtttttta

SEQ ID NO: 461163 - DNA, 540 bp, Homo sapiens
gaacccacaatagaaactacaaagcaaccaagtaacctcacaataggatcracacatcacatatcaatattgaccttgaatgtaaactgcctcagtgcccccctgtaaaaggcacaaagtggcaagttggataaaaagataagacccatctgtctgctgtctttaagagacccaggtcacatgtaatgactcagagactattataaacaactccatgcaatcaaactggaaaatctagaggaaatgtataaatttctggaaaaaatctcccaagattgaatcaggaagaaattcaaatcctgaacagaccaatattgaattccaaaattgaatcagtaatcaaaaacctaccaaccataaaaagccccagacgtgacggaatcacagccaaattctacaagatgtatgaataagagcttgtattagttctgaaactattccaaaaaaatcgagaaggagggattcctccctaattcattctacaaagccagcattgccctcacaccaaaacctggcaaagacacaatgaaaaaagaaaat

SEQ ID NO: 461164 - DNA, 540 bp, Homo sapiens
gaacccacaatagaaactacaaagcaaccaagtaacctcacaataggatcgacacatcacatatcaatattgaccttgaatgtaaactgcctcagtgcccccctgtaaaaggcacaaagtggcaagttggataaaaagataagacccatctgtctgctgtctttaagagacccaggtcacatgtaatgactcagagactattataaacaactccatgcaatcaaactggaaaayctagaggaaatgtataaatttctggaaaaaatctcccaagattgaatcaggaagaaattcaaatcctgaacagaccaatattgaattccaaaattgaatcagtaatcaaaaacctaccaaccataaaaagccccagacgtgacggaatcacagccaaattctacaagatgtatgaataagagcttgtattagttctgaaactattccaaaaaaatcgagaaggagggattcctccctaattcattctacaaagccagcattgccctcacaccaaaacctggcaaagacacaatgaaaaaagaaaat

SEQ ID NO: 461165 - DNA, 604 bp, Homo sapiens
agccaaggctgcctagagcatagggtgtaaccaggaagaagtaaccaatatggctacactttgcaggataaccctaattattacacagaggagtttgtactttatttgggtatcaactagaagtaatttaagtttggcagtgacgtgatggaagaagtgttcagagatgagtctggtaatgcaaggcctatgcattgtgttggaaaaaggagaaagaccacaggaatcaagagcaactgagagaagaagagactagattagaggatcgagggggaagaattgaagtgtgtgatgattcattttatgtgttaacttgactgggtgaaggaatgctcagatagctggtaaaacattatttctgggtgtatctgtgagggtgtcttcaggagatatcagaatttgagtctttacacttactgaagaagataatcctcatcaatgaaaacgggcatcacccaatcctttgagatcctgaataatacaaaaagacagagtgtattagtgtgttctcacattgctataaagaaatgcctgagactgggtaatttataaagaaaagaggtttaaattggctcayagttccacaggctttacaggaagcatg

SEQ ID NO: 461166 - DNA, 573 bp, Homo sapiens
caaattacttacctctctcagccttaattttgacatctgaaaaggtaattcctaacagcagacatattgtgattggagataagtgtaaaaccgtggttctcagttcctaagaatccccagcagggcttgttaaagaccatttgctggaccccatcrttcgactttctgaatcagtagttctggagtagaggccaggaatttgcatttccagcaagttctcagatgacactgatgtctagggaccacactttgagaatctgtgatctaatgcaactatcatagaatgggcattcaataagtactggttattattatttctaaagcagagaaggcaagaaatgccagatgatggggatggcattgaataaccacaggagacataaccaagagcacaagtcctgaaaactcaacacggatggtcatctcagccaaagcaaatttgcaagccttaagaaggaagtgctgctccttagtatttatgctttaaaaaaaaacccttcattttacaaatgacttttataaaatttttaatggctcgtacaatggactgtacggaaatgatttacttgcctg

SEQ ID NO: 461167 - DNA, 605 bp, Homo sapiens
cttaattttgacatctgaaaaggtaattcctaacagcagacatattgtgattggagataagtgtaaaaccgtggttctcagttcctaagaatccccagcagggcttgttaaagaccatttgctggaccccatcattcgactttctgaatcagtagttctggagtagaggccaggaatttgcatttccagcaagttctcagatgacactgatgtctagggaccacactttgagaatctgtgatctaatgcaactatcatagaatgggcattcaataagtactggttattattatttctaaagcagagaaggcaagaaatgccagatgatggggatggcattgaataaccacaggagacataaccaagagcacaagtcctgaaaactcaacacggatggtcatctcagccaaagcaaatttgcaagccttaagaaggaagtgctgctccttagtatttatgctttaaaaaaaaacccttcattttacaaatgacttttataaaatttttaatggytcgtacaatggactgtacggaaatgatttacttgcctgtctacttcctcttcatatgtaacctcttctctgaatgtggtgaaactttaacgg

SEQ ID NO: 461168 - DNA, 583 bp, Homo sapiens
gtaaaaatatctaacataaggagagaaaaatgtgatataagcaatgtttaaagagataatggcytgaagaaagatagatccagcagaaaaaaaaggacacagttatttcataagagcatccataaagcctaaagctaactttttcttacaaatgagggaagccatgagacaatagaaagaaacatataaaggaaagatagcacaaatgttcttatctatccaccctacatatctgagactgactgattctgttctcaactttcatctcaactgttccctcattttcatttccattttgtcagttcagagcctcatttcttttcagttggattatttcaataaccacttaattcctcattgccccattccaagattggaatatcgatgaaaggcaataactaccaacccagaattctatgtcactaaaaatattcttaaataaagaagactaaagatagatattattaagtaagcaaacaaaaaaaaaatcagtgccaacagatgtgctttaaaatatatcctaaatgaagttcttcagacaaaagaaagtgataatagaaacatggtaaataaaaacaaagaa

SEQ ID NO: 461169 - DNA, 583 bp, Homo sapiens
gtaaaaatatctaacataaggagagaaaaatgtgatataagcaatgtttaaagagataatggcctgaagaaagatagatccagcagaaaaaaaaggacacagttatttcataagagcatccataaagcytaaagctaactttttcttacaaatgagggaagccatgagacaatagaaagaaacatataaaggaaagatagcacaaatgttcttatctatccaccctacatatctgagactgactgattctgttctcaactttcatctcaactgttccctcattttcatttccattttgtcagttcagagcctcatttcttttcagttggattatttcaataaccacttaattcctcattgccccattccaagattggaatatcgatgaaaggcaataactaccaacccagaattctatgtcactaaaaatattcttaaataaagaagactaaagatagatattattaagtaagcaaacaaaaaaaaaatcagtgccaacagatgtgctttaaaatatatcctaaatgaagttcttcagacaaaagaaagtgataatagaaacatggtaaataaaaacaaagaa

SEQ ID NO: 461170 - DNA, 583 bp, Homo sapiens
gtaaaaatatctaacataaggagagaaaaatgtgatataagcaatgtttaaagagataatggcctgaagaaagatagatccagcagaaaaaaaaggacacagttatttcataagagcatccataaagcctaaagctaactttttcttacaaatgagggaagccatgagacaatagaaagaaacatataaaggaaagatagcacaaatgttcttatctatccaccctacatatctgagactgactgattctgttctcaactttcatctcaactgttccctcattttcatttccattttgtcagttcagagcctcatttcttttcagttggattatttcaataaccacttaattcctcattgccccattccaagattggaatatcgatgaaaggcaataactaccaacccagaattctatgtcactaaaaatattcttaaataaagaagactaaagatagatattattaagtaagcaaacaaaaaaaaaatyagtgccaacagatgtgctttaaaatatatcctaaatgaagttcttcagacaaaagaaagtgataatagaaacatggtaaataaaaacaaagaa

SEQ ID NO: 461171 - DNA, 458 bp, Homo sapiens
aaattttggcatattcacatatctatttcttttgcagtataaaaacaaagttttaattaatttagcattttaattatttctgtaagtctctcattattttccttgaggcaattttatggccactgttatatttaatttttccaagtaagatttatataattttctcatgtttggtgttttgttttgttttgaaatggagtctctgtcgcccaggcggagtacagtggcacgagctactgcaacctctgcttcccrggttcaagctattctcctgcctcagcctctgagtagctgggattacaggcatgcgccaccaaacccggctaatttttgtatttttagtagagacagggtttcaccatgttggccaggctggtcttgaacttctgatctcaggtgatccacctacctcggcctcccaaagtgctgggattacaggtatgagacatcatgcccag

SEQ ID NO: 461172 - DNA, 576 bp, Homo sapiens
tgtgtgtgtgtgtgtgtgtgtgtgtgtgtgttttcaggttgacatgggcctgtccagtttgccataggaatctgaagttctcaccctttggagtttccactaggggttaaagccttggtctaggagactataagtaaaatgaatgacagtgacacttctataatcctgtgtgactttgagaatatgttaagagtggtataacagaaagacaaaagagggctggcgagttgatgacaatgtgcagctatctggactgaccatctccaagttgttgttgaagagagttcacgtttrtataaatactacctatctacaaattgcatcaagcctaagaaggcgtgaattgtggtttcctgcaagtagaactaggctggggtgcagtagccccagctgtgagttacttctgggctgtgagttacttctgtgaactctgactttggtcatgctactcccattttctgggccttaccttccttgtctcccaaatgcagcactttgtctaaattaacattaagtatccttgtgtctctaaagtctcatgtaaacactttattggactagctaatctcctcttgg

SEQ ID NO: 461173 - DNA, 583 bp, Homo sapiens
atacaacagcatgaagatatgacagattatgaagctatcaaggaactacaaataattaattattgccagaaggtaaaatgttggcagtaggtagtgatggaaggtcatggctgaagaatgacacatagaacaaattaagactaaccttaaatatcatagtcaggaatttggagtttttgagaggaaggtaaaggtttgacgagttttaaaaagaaaaacagtaagatcaagtttcatactgagaagtagtaaaataattgcaaccaagtgaaggcctgattgaagtcaagaaagctagtgaggagtcacgttataactactggactagtatacccaaagtttctctaatcctacccrtgtgttaatttcatctttataactcagtttcatcgttcaagatacaaaaatgacaaactataaaagaatatacagaagttttatagatgctcttattcagaagccacccaggcctgcaggcaaccaatatgattactttttgtctgttcttccagatatatttgtgcccattcaaacacatatactcctgcactccattttttatacaaatagtcacatattcaac

SEQ ID NO: 461174 - DNA, 584 bp, Homo sapiens
ttatatatcttgaagatatttctatattaatgaaacacaagcatcctcaatctttttaaactgctgcgtatattttccagtgcatatatgtaccacaatttatttaactggtcttttattcaagggtattgagattgtttcagtgctacaataaatatcctttcatatattttattttacacctggacaattatatctttagaattctgtttccatcatctattgctgtataacaaactaccccaaaacttagtactaattttaaactaacaatcatggcagtatctcataatttggctcatatctcataatggctgcatggcccaccawggctcaatcacacagctagcaccctcacaggtaaagtaggaagactatactcaacaggaacaagtacccagagatatctcacccggcctctccagcatggtcatctcagggttcttgaacttcttacatggagtctcagagcttctaaaaaggaattaactcacctcagctctggtttagacaaacaggaccttacagtctagatagtgtcatctgtatcacgtgcaaatacagacgatactcttcagtgaaga

SEQ ID NO: 461175 - DNA, 550 bp, Homo sapiens
tgtgacaactggatacacacaggcaaattaatgaatttggacccctatcttacctaaagattcaaagacagatttaagagctagaactataaatgtcataaaagatataggcataaattttttgacattgaattaagcaatgatttcctagaagtaatatcaaaaacatgaaacaaccaaagaaaaaataggtaacttacacttcttcaaagcttaaaatttgtatatgccaaaagctactgtaaagaaagtatttttaaaaagagcccacaatatgagaaaatatttgcaaattatgtatctgataagaaactagcgttcaccatatataatgagcacttataatccagcattacaaagataaataacccaattttaaaatgggcaaaakatttgaatagatatttctccaaagatagccagtaagcacatgaacagatgttcaacattagaaaagtacaaatcaaagccacgataagacaccacttcacattttctaaattggcaatatttttgaatagaaaacaagtgttggcaaggatattgagaa

SEQ ID NO: 461176 - DNA, 610 bp, Homo sapiens
caaactgacatgttctcactcaatggtggaagctaaaccttcaaacaattgtactyatggagataaagagtagaatgatggttaccaggggtttggaagggtagtgaagaaaggttaacatgtataaaaatatatttagatataatgaataagatctagtatttgatagcacaacagggtgactgcagccagaagtagtttgctgtacattttagaataaccgagaaagtacaattggaatgtttgtaacacaaagaaattatgaacacttgaggtgacagatatcccatttaccctgatgtgattagtacatattgtatgcctgtatcaaaatatctcatgtagcccataaatatttacatctaccatgtacccataaaaattaaaaattttcttaaagagacaagtgtgatatcaaccacatgtaatgtctctgtgttgtttgaatactgatttgaacaggtttatcataagaaagattaagacaatcagtcataggaatgctgatggaatattttaatgaagaattatttttaattcttttttgtgtgagaatatggtggtgtgcttatatttaagaaaataaatagtccctatgctttagagatac

SEQ ID NO: 461177 - DNA, 610 bp, Homo sapiens
caaactgacatgttctcactcaatggtggaagctaaaccttcaaacaattgtacttatggagataaagagtagaatgatggttaccaggggtttggaagggtagtgaagaaaggttaacatgtataaaaatatatttagatataatgaataagatctagtatttgatagcacaacagggtgactrcagccagaagtagtttgctgtacattttagaataaccgagaaagtacaattggaatgtttgtaacacaaagaaattatgaacacttgaggtgacagatatcccatttaccctgatgtgattagtacatattgtatgcctgtatcaaaatatctcatgtagcccataaatatttacatctaccatgtacccataaaaattaaaaattttcttaaagagacaagtgtgatatcaaccacatgtaatgtctctgtgttgtttgaatactgatttgaacaggtttatcataagaaagattaagacaatcagtcataggaatgctgatggaatattttaatgaagaattatttttaattcttttttgtgtgagaatatggtggtgtgcttatatttaagaaaataaatagtccctatgctttagagatac

SEQ ID NO: 461178 - DNA, 649 bp, Homo sapiens
aattgtcactggataaaagatgacacaattatatgctgtctttgagagatcatcttaaacataaggatatggattgaaattaaaagaacrtataaaagccttatcatacaaacagtaatttttaaaaagtgagagtggctatattaatccagacaaaatagattacagcatgaagaatatttccagtgactaatgggataaagatgacttaattatcttaaatgtgcttgtacataacaagacagttacaaaatatgtaatacaaaaaagatagaaaggaaaggagaaagaaacaagtctaacattatagttggagattaacatttgtctctcattaattgatagaaaaggcaggcagaaaatcagtagagttgtagacaacataaatagcacaatcaaccaaattattgtaatagacatttaaaagaacactcaaccctaaaacagcaaaatatacattattttcaagtacacataaaacattcaccaatatagacaatattgtgggtcttgaactattttttaccaattttgagagaactgaattcattaaaagaaaatgtcatttgaccagaatattaaagtagaaagcaatagaatatagaaaacctgcaaagatttagaaattaaatcatattattctaaaaaa

SEQ ID NO: 461179 - DNA, 649 bp, Homo sapiens
aattgtcactggataaaagatgacacaattatatgctgtctttgagagatcatcttaaacataaggatatggattgaaattaaaagaacgtataaaagccttatcatacaaacagtaatttttaaaaagtsagagtggctatattaatccagacaaaatagattacagcatgaagaatatttccagtgactaatgggataaagatgacttaattatcttaaatgtgcttgtacataacaagacagttacaaaatatgtaatacaaaaaagatagaaaggaaaggagaaagaaacaagtctaacattatagttggagattaacatttgtctctcattaattgatagaaaaggcaggcagaaaatcagtagagttgtagacaacataaatagcacaatcaaccaaattattgtaatagacatttaaaagaacactcaaccctaaaacagcaaaatatacattattttcaagtacacataaaacattcaccaatatagacaatattgtgggtcttgaactattttttaccaattttgagagaactgaattcattaaaagaaaatgtcatttgaccagaatattaaagtagaaagcaatagaatatagaaaacctgcaaagatttagaaattaaatcatattattctaaaaaa

SEQ ID NO: 461180 - DNA, 649 bp, Homo sapiens
aattgtcactggataaaagatgacacaattatatgctgtctttgagagatcatcttaaacataaggatatggattgaaattaaaagaacgtataaaagccttatcatacaaacagtaatttttaaaaagtgagagtggctatattaatccagacaaaatagattacagcatgaagaatrtttccagtgactaatgggataaagatgacttaattatcttaaatgtgcttgtacataacaagacagttacaaaatatgtaatacaaaaaagatagaaaggaaaggagaaagaaacaagtctaacattatagttggagattaacatttgtctctcattaattgatagaaaaggcaggcagaaaatcagtagagttgtagacaacataaatagcacaatcaaccaaattattgtaatagacatttaaaagaacactcaaccctaaaacagcaaaatatacattattttcaagtacacataaaacattcaccaatatagacaatattgtgggtcttgaactattttttaccaattttgagagaactgaattcattaaaagaaaatgtcatttgaccagaatattaaagtagaaagcaatagaatatagaaaacctgcaaagatttagaaattaaatcatattattctaaaaaa

SEQ ID NO: 461181 - DNA, 661 bp, Homo sapiens
ttaataaaattgatctagccacaccgataaggaaaaatatcagaatgaacgaggggacactgctcctgatactacagataaaaagagactattytgaagaatttcatgacaataaatttaacattataaacagaatggacaaattcattaaaaagtataaacaccaaagctcactaaaaagaaatagttaatctgaatagtttcatatgtatttttaaagattaaattagtaatttataaatttctcaaaaaggaaacatcaggtccagatgagatcactgctaaattcttccaaacatttttgagagaaagtagatcaattctgaagagttgtccagaaaataaaagatgagggagcacttcttaactcattatttcagaccagcatctccctggtaccaaaccagacaaagacatgagaaaattagactagtattactaaagaactgagtataaaatgtccctatgaaaatataaactatttttaaaggtttgcgtatcataacaagtgggaaaccaagattggtttaatatttgaaactccaatgttattaaccatattcagaaactgaaaaagaaaagctgaatgatcatatcaatatatccagaaatagcatatgataaaattcaatactcattcatcacaaacttttagcctcct

SEQ ID NO: 461182 - DNA, 661 bp, Homo sapiens
ttaataaaattgatctagccacaccgataaggaaaaatatcagaatgaacgaggggacactgctcctgatactacagataaaaagagactattttgaagaatttcatgacaataaatttaacattataaacagaatggacaaattcattaaaaagtataaacaccaaagctcactaaaaagaaatagttaatctgaatagtttcatatgtatttttaaagattaaattagtaatttataaatttctcaaaaaggaaacatcaggtccagatgagatcactgctaaattcttccaaacatttttgagagaaagtagatcaattctgaagagttgtccagaaaataaaasatgagggagcacttcttaactcattatttcagaccagcatctccctggtaccaaaccagacaaagacatgagaaaattagactagtattactaaagaactgagtataaaatgtccctatgaaaatataaactatttttaaaggtttgcgtatcataacaagtgggaaaccaagattggtttaatatttgaaactccaatgttattaaccatattcagaaactgaaaaagaaaagctgaatgatcatatcaatatatccagaaatagcatatgataaaattcaatactcattcatcacaaacttttagcctcct

SEQ ID NO: 461183 - DNA, 661 bp, Homo sapiens
ttaataaaattgatctagccacaccgataaggaaaaatatcagaatgaacgaggggacactgctcctgatactacagataaaaagagactattttgaagaatttcatgacaataaatttaacattataaacagaatggacaaattcattaaaaagtataaacaccaaagctcactaaaaagaaatagttaatctgaatagtttcatatgtatttttaaagattaaattagtaatttataaatttctcaaaaaggaaacatcaggtccagatgagatcactgctaaattcttccaaacatttttgagagaaagtagatcaattctgaagagttgtccagaaaataaaagatgagggagcacttcttaactcattatttcagaccagcatctccctggtaccaaaccagacaaagacatgagaaaattagactagtattactaaagaactragtataaaatgtccctatgaaaatataaactatttttaaaggtttgcgtatcataacaagtgggaaaccaagattggtttaatatttgaaactccaatgttattaaccatattcagaaactgaaaaagaaaagctgaatgatcatatcaatatatccagaaatagcatatgataaaattcaatactcattcatcacaaacttttagcctcct

SEQ ID NO: 461184 - DNA, 566 bp, Homo sapiens
gtttaaaaactacctttttttttttttgaggaaattatttcctacctggaaattatgcacggttaaacttgagtaattctagtagttagggtccaagtaacttattgttttctggcattttacaatcttaggatgtttaactatatggcttactataaacttactactactgaatatattaactactgctttatgaatgatttctgtttcagttgttatttttctgtttctgaggaagctgagaatccagactaatacaggcatagagttgtgcgtacctagagcagctgacttatacaacctgccacaaacccacctatttatttcatgtaatttattgattactggtgttaaataatattaattcataacttcacctagggaggttatatttaaaggaaaccctcaagattagttcactgcctggtttctgtacattcagctttttgtttaatgaacctctttttattggaatatcagaaaagtaactcaggatgaacaggcacattgatcacagatcrgtagcatcatattcacaaatagccctgtttttgtcatttatagag

SEQ ID NO: 461185 - DNA, 640 bp, Homo sapiens
ttgaaaattccaaaaaccaggatgcgtcttctttcccaaaggatcacaacacctcgccagcaatggaacaraactggacagagaatgagtttgataaattgacagaagtaggcttcagaaggtgggtaataacaaactcctccgagctaaaggagcatgtactaacccaatgcatggaagctaagaaccttgatataaggttacaggaactgctaattagaataaccagtttagagaggaacataaatgacctaatggagctgaaaaacacagcacaagaacttcgtgaagcatacacaagtatcaatagccaaatcgatcaagcagaagaaaggatgtcagagattgaacatcaaattaatgaaataaaatgtgaagacaagttagagaaaaaagacttaaaaggaatgaacaaagcctccaagaaatatgggaatatgtgaagagaccaagcctacatttgattggtgtaccggaaagggatggggagaatggaaccaagttggaaaacactcttcaggatattatcaaggagaacttccccaacctagaaagacagcccaacattcaaattcaggaaatacagagaacaccacaaagatattccttgagaagagcaaccccaagacatataatcatc

SEQ ID NO: 461186 - DNA, 422 bp, Homo sapiens
gatgcagggaagggaggaagaggaaggagaagatttgaggagaatggataagagaatgaatctaatatttttttccataaatgctcacaggcagttgtaaaaagaaaaacataatattctctatctagttgatcatagcttctgggaactgctgtattgggatgtttaattaataacactttatatctgcagtataccattgctttcccaagtcrctgtgtctgtgatgtgagagtgtcacagacaacacagtcttgttacagagtgtcttttctggcaatttcaagaaggcaccagcaaggactgagaagcacacagtctctcctcttctctctctctcaatctctctctctcttttattacagtttgggttaaatataatacactggagccttgctataacaaccagtctttgccaccag

SEQ ID NO: 461187 - DNA, 629 bp, Homo sapiens
ttatggcctctgtgcactatttttgcaatatcctataattttctttaattctaaaaaaaaaaatttcaaagaatyatcattgcccttaaggaaaaacaaatccagccgcatcatcctgattcacaagactgaagagcctgacctcagattgcatctaaagcttcattgtttgccactcatgtgatttggttgtaagtgggccagtgaatcctaattcattttatcctgttgttttattcatttaaagatctaaaatagttttaaatgaatatttaaaaacaaaaataaataccatgccttatattcttggtggatgcatcatcagttagctatcatagcataacaaactacccaaaactcagaatcttaaaagaacagtcttatattatcactcaggtcattgtgtcacctgggctcgcttatgcatctatggtcagctgtggatcactctttgctagccactgttcagctagctataggcatttctaaaatggccttagctgaaacaactaagcccttccacatggtgtctaatcctcggcagactattcacacagctgtagcaaggttccaagagaagaaggaagtgctcgaagccagaatggtgtgtggtcactttcaccaagttc

SEQ ID NO: 461188 - DNA, 547 bp, Homo sapiens
tagcccagggagagtggatgcaagaggagaccagcagactccttaaatcaaaaagattaagttgggaatcttgggggaccaagcagctagaatttgcagaatagaatagcagagaggtgagatattcatagggtcccccgatgcattcagtagagtcctggtcagcatatgaatgtaaggaaaccccctgaggctggggaaagactcgccctaaaggattagagggagcaagtacccagcacgcacacagmactagcaataatgctcaattccaccaatcaggctgcaaagcctcaccaggaattgaatagaatattcagaaagatcttgctacagtggtgggcaaaattaatcctacataattcattctcaacctggggacattttgcccccaggggacatttgacaatgtctagagacatttttttattgtcaacactgaagggagcttctagtggcatctagtgggtagaggccagggatgctgttaaatatcctacagaaaagtattatctcatacaaaatggcaaaagtactgaggttggaa

SEQ ID NO: 461189 - DNA, 547 bp, Homo sapiens
tagcccagggagagtggatgcaagaggagaccagcagactccttaaatcaaaaagattaagttgggaatcttgggggaccaagcagctagaatttgcagaatagaatagcagagaggtgagatattcatagggtcccccgatgcattcagtagagtcctggtcagcatatgaatgtaaggaaaccccctgaggctggggaaagactcgccctaaaggattagagggagcaagtacccagcacgcacacagcactagcaataatgctcaattccaccaatcaggctgcaaagcctcaccaggaattgaakagaatattcagaaagatcttgctacagtggtgggcaaaattaatcctacataattcattctcaacctggggacattttgcccccaggggacatttgacaatgtctagagacatttttttattgtcaacactgaagggagcttctagtggcatctagtgggtagaggccagggatgctgttaaatatcctacagaaaagtattatctcatacaaaatggcaaaagtactgaggttggaa

SEQ ID NO: 461190 - DNA, 597 bp, Homo sapiens
gtgtttaatgtgaaaggaatgtgttgttgagtacctgcctgagtgtgaatgtgccaggatgggtctgaagcagtgcgtgggaatggaagtggggagacagaattgctttgcacagtagagggagaagagttgagagccagaggaagtaatgggaaagagccgtaagagggataagaggaagtgagaagccagttagagaatggagagtgggctaaagtggcctcaagtggcgagtggaaagactccttactacttgagtggtctgaaatgtcaggcatggttgtttgtttaatgaatgtaaggcatcgttgtttaatattctatttgaagttgcctgcattgttgagatgtaacctgggtcttcccagagcttcattaaacctaacacacacacacacacacacacacacrcacacacacacacacacaagtgctttgtgtgggtgataattttgttgaaaactaagagctgcattctatggctggatctttgtgctgcagcagacagagcatgagcaagtggttaagaagtttcaaaatggagctgattcacaagtgaagggtcctcagacaaaggtggataccagaatgtgagct

SEQ ID NO: 461191 - DNA, 597 bp, Homo sapiens
gtgtttaatgtgaaaggaatgtgttgttgagtacctgcctgagtgtgaatgtgccaggatgggtctgaagcagtgcgtgggaatggaagtggggagacagaattgctttgcacagtagagggagaagagttgagagccagaggaagtaatgggaaagagccgtaagagggataagaggaagtgagaagccagttagagaatggagagtgggctaaagtggcctcaagtggcgagtggaaagactccttactacttgagtggtctgaaatgtcaggcatggttgtttgtttaatgaatgtaaggcatcgttgtttaatattctatttgaagttgcctgcattgttgagatgtaacctgggtcttcccagagcttcattaaacctaacacacacacacacacacacacacacgcacacacacacacacacaagtgctttgtgtgggtgataattttgttgaaaactaagagctgcattctatggctggatctttgtgctgcagcaracagagcatgagcaagtggttaagaagtttcaaaatggagctgattcacaagtgaagggtcctcagacaaaggtggataccagaatgtgagct

SEQ ID NO: 461192 - DNA, 515 bp, Homo sapiens
atcttagaaaacatattttggggaaaaattgtacatcttttgcttatagcaaaataactatgcaaaattatctagaatattgatttatgatttctataaaaatcctatttagccagccccagtggtgarcgtctgcagttccagttacttgggaggctgagacagaaggatcacttgagctcaggagtttgaggccagcttgaacaacacagtgagacatatgtattaaatgtctctaaaataaaacaaaaaaaccccaaaaaacttatttgtagttatcctgtttgtttgctaaactagtaagcagtggggcatagattttatcccaggcctgaatttgtttcttagtacctgaaagctgtctcagcactacataatctggaagctgataagaactgttaaaagaaaaatcttggccgggcatggtggctcacgcctgtaagcccagcactttgggaggccaaggcaggcagatcacttgaggccaggagttcaagaccagcctgggcaacatg

SEQ ID NO: 461193 - DNA, 543 bp, Homo sapiens
ctatacaaccccaaaataaaacaccacagtaaaataaatgggaaaaaacataatattttatttgcaaagcttgacaaaatgttaatatctttaatgataaacgagctcttagaaatcagtaacaaagagactaacattacaagggaagtgaaaaaaacagaggaaaatgaaataacacaaatgacttacaaggctatgtgaagatgatatagcttaaaattaatagatgaaaaagcaatttcactataaattacattatcagtgtttacaaatattgatatctaatgtttgtatagttttaggaagtgggaaatcttcaaatactgggaaaatttactctggttataggaaatttacacaaagtatagattttgcatatactttgctccagcagttccagttcatggggatcattccaacaaagtagttggatgaatttwtatatatatatatatatatatatatatatatatgtaaatatataagcaggttcactacatagaaaatctttagctaatatgtcatccccccagaaactactta

SEQ ID NO: 461194 - DNA, 569 bp, Homo sapiens
cttcattagagttctgggaattgttatccagttcaatggtatgatcttaaagttatcaaaaccctgtacttgtcagagtcctttccatgagtcacctcaaagacaaacactaggtttgtagttgcttgtaatagttttcaggaaagtaccagagtaaaccaattaactgtttgtggatgacaaaatttaaaatggccatggtgaaaatctgatgagggttcattataccacagttgacaaggaaattttatttctgtgacatacactattttaagataataactaaaattatgactggtagcatcataccaaatctatcagatttctgggcattctgtataatttatgaaacacatattaaacacatattaataatatatggcttaaagaaggttcagcatcacttattagacaatacttcccaaacaatttaacatatcaaataagcctagktagtttcatatctctcttcttatgaaaagagaacaaatttttttgaaatactctagcgacctgtctggaagctcccagagttagtttgaggtagaaagatcttaatttaggatttg

SEQ ID NO: 461195 - DNA, 393 bp, Homo sapiens
tccagaactcaaaataaaagttgaagaaaaaaaagagccataattccrttcaacggctagatatgtcccatgtgcagactagtaatggaccagtacccacagcagcccacagcagcccagtgggtgatcactaggtagcagccaacctctcccccaacacccctctactgcagcacttccacagcaattgctgagtcacagttctgcctagaattagttgcaaatatctaagcattgctagcactattgtatcagacacttatctatcccatgtcattttcatttgttgagtttttggctaccctcacaaataacagggctcttgagtacatgagctctgttttcctagtctttatgggaggcagtttaatgaagcgaaaatggcaatgaatt

SEQ ID NO: 461196 - DNA, 300 bp, Homo sapiens
gttgaatgcctggccattgccattgctatgtgaccttgggcaagtcatgtcacctcacttgtaaacccrgcttggtattctctgcttgctccaatgggggacatataggacagaagccatgtaaagcatctcacacagagcttcccaactcaatgactagtcgttgctactattgtgttcttctggaacttgctttctttgccttcttggctggcttttcaccaacagttgagccagcctcacttcaaaggtggatgggattatgggttctgaccccttgtagtctcctcagaagatttt

SEQ ID NO: 461197 - DNA, 300 bp, Homo sapiens
gttgaatgcctggccattgccattgctatgtgaccttgggcaagtcatgtcacctcacttgtaaacccggcttggtattctctgcttgctccaatgggggacatataggacagaagccrtgtaaagcatctcacacagagcttcccaactcaatgactagtcgttgctactattgtgttcttctggaacttgctttctttgccttcttggctggcttttcaccaacagttgagccagcctcacttcaaaggtggatgggattatgggttctgaccccttgtagtctcctcagaagatttt

SEQ ID NO: 461198 - DNA, 592 bp, Homo sapiens
tgtggtcttccccaaaaaccccataacccctgtctatcatcagaaattctaagaggaagggacattctacaaaatacctgaccagtatttcaatcctcaaagctatcaaggtcatcaaaaccaaagaaagtctaagaaactgtcacaaccaataggaaccaaaggagacaggactgctagatgtactgcgatgtactggatgtgatctgagaactgaaaatggacatcagagacaaaaatmatgaaatataaatgaaggcatgggctttagttaataacaacataccaatattggctcattaattgtaacaaatataccacgctaatgttaacatgttaggagtaggggaaactggatgtagggacataggagctatactatcttcacaataattctgtaaatctaaaactattctaaaataaaaagtgtattagcaacaacaacaaaagaaacatcagtgataagtaacgttcaggaagaatgatgaataagcatttaatctgctattgtttcattttttgttgaaaaaaatttttataagagtcacatccaggttagaacaagtgtcgcctcataaaggcagcaataaac

SEQ ID NO: 461199 - DNA, 566 bp, Homo sapiens
ctataaatggacatgcaagtaggacagatatcgctaaattcttttcctagtaaggaacataatattaagaccctaggaagagaactgcatttcttgggggaggtctataaatggccgctctgggagtgtctgtcctatgcagttgagataaggactgagatacaccctggtctcctgcagtaccctcaggcttgctggaattgggaaaccccagccctggtaaatttgaggtcaaacccgttctctgctctcgaaccctgttttctgttaagatgtttatcaagacaatgtgygcactgctgaatatagacccttatcaggagtttctgattttgctctggtactgtttcctcagaagcatgtgatctctgctctgccttttgccccttgaagcatgtgacctactccctgtatgtacactccctccccttttgaaatccctaaaaaaaactagctggttttgcagctcaggtgggcatcacggacctgctgatatgtgatgtcacccccagcggcccagctgtaaaattcctctctttgtactctttctctttatttatcagaca

SEQ ID NO: 461200 - DNA, 598 bp, Homo sapiens
taagagtagaaataaatgaaacaactgaaaaaaaaatcactaggaaggctaaagtagctccatcttggatgctagtcctccatgttgacttttgattaactgtagttttgggaatgcctctgagatttctactttatctacagttccttatgcatgaacacataatttctgtaaatcttgcccttaggtgaaaacaaactggatgttatagcataaattacaggctataaggcacgtattttttttcccagaaagaagactttaattgtcctgcacattccctctggagcatgtataacatttccctattgtacatrggtcccaggcctggagcatgtataacatttccctattgtacataggtcccaggcctgaagagcagcagcatggagttctacctgtcttgtggctgcccaagaccacattcctgtttgttagttccccagtaaataaccttctgccaactgactggatttgtctgccttgttctttggtttcttggctccttctatgtttgggtgtcattttgcatatatggacctttcatgaatcaatcactgaaaccaaaagttagttctctgggaatatcaataatgtt

SEQ ID NO: 461201 - DNA, 475 bp, Homo sapiens
aagcaaagaaaactctcataccagctacttcactggtgaattctgcaatttaaggaataattaaaattctacaaattttcttccagaaaatttaagaggattatgatgcttctcaackgtttctttgtggccagtattactctcatataaaaacccaggcaaagacattgtaaggaaaaaaaatataggtccatgtcctgaggaacatagatgcaaaaaatcctgacaaatttttagcaaataaaattcagcaatacatacaagagggtttatgcaagtggagtttataccaggaatgcaaggttggtttaacacttgaaatcatccagtgtatctcaccatattaacacaaaaattaatctgttgaacaggtgatgtctgttgcctattatcaggagtagaagtctgagcatttctgcccactgcctcttggtattggagccaccaaagaaaattcaattcagtcaatcactgg

SEQ ID NO: 461202 - DNA, 604 bp, Homo sapiens
tgaagtctcactctctagatgatagatggagacttttttgcttcatcctcacatggtggaaggggcaagggagttctctgaggcttctcttataagggcatgaatttcattcatgacacattaggtcccccccatgacctaattrttccctaaatgcccaaccttttaatactattgcactggggactagatttcagcatattagtttggggaacacaaacattttagcattccactcctagaccacttaaaacaatgtccttcttgcatgcaaaatacattcgttctattccagtagcccccaaagtctcaacttgttctagcatcaactttaaaatttaagtccaaagtcttatttaaatgtcacctatatcagatataggtgaagctcaaagtactattcattctgagacaaattgttctccagctgtgaacctgtgaaatcaaacatgttattcgcttccaaaatacaatagtaggagaggcataggatagacattcccatttcaaaagggagaaacaggaaagaaggaagggatgacaggtcccaagtgagtccaaaacccaacaaggcaaatagcattaaagcttaggattccaaagt

SEQ ID NO: 461203 - DNA, 609 bp, Homo sapiens
tggtatcaatgttcatttctctttcctttggaggagaaactctgagagagctggaacagtgtctcattgagtgctgtgcctggagggtggttaaataatgagccaccattcagaacattacactgggccctgtgtgggctaaggagtgggggtgcagtgtaaatagagcagctgtcacaaacgggccaatgataatctattgattgatgtcaaaaccatagctggccatgcgtcattctcatctccaatgtgggccatcaacsttcttgtcaagacctcccttacaccctcccttcttccttttctctctcccttttaccctcccaacctccctccattccttttcctttactcctgcaaagatcacatcaaagcagatgctgatcaaaaatatatttgagaattctctacaggaacttacaatccagtggatggaactgagcctgtcagtttccccgtaagtccaaagtcaaattgtttccatcaaagactctttggagcttgcacagtcagagactcaaataaatcaacctcgtctagtttctggtagtgtttaagacacattagaaaggcagaatatgccaatgcacttctgaaggagtacaaaag

SEQ ID NO: 461204 - DNA, 586 bp, Homo sapiens
attaaataggctgaaccttgctttagacctgagataagatgtagaaatgtcagcactcaccattgattaagcatctgcttggaatttctttatttcttgccctgctttcacagaacacctgctagagaagtgcaaataattgcaagatcatttgaaacatgaacatgaacttatctttacgtctggtatactaaccctaagtctctatcataaaggccaaacagagttgagccacaggagattttcttcctggccagtacyaagaaaagcaaccatggtgctttgcatccaagggacaaggacggtcaggtttaaaacatttgtttctattgttgtcactgatgggctgggagctctctgcagctccactgattggatggagaaggaggaagccattctccatgcttgaccattccgccctgcccagtttcttaggagatgaaaatgataacatgctcgaggtacagatacatcctcatgtctcacaaaccagatgcccattcatttgttttgaacatagagtatgtgacatatcagtcagattcgactagatgcaccttggaacaaacatccttcaaatcccggt

SEQ ID NO: 461205 - DNA, 521 bp, Homo sapiens
attttctccatctctctgtctcctgacttcaccttgcacccaatcaactatctccacacttcagcccactcccaaacccttacaaaccctagcctctctaggagagacagrcctcatgtattcagacccctgagccaggtgtcttatttttaatttttaaaaactgtggcatgtaccattcacatagaagaatgtataaaatatatataggtgcagtttaaaggatgaggataaaatgaacaccatatacccaccacttgggttaagacacaggacatccccagtcctggtcttgtggaagcccgtttgctcctctcttagttcgttgttctcttcccccagaggtaactaaaactgtgactcatgctgatcacactcttgcttttctttatagtgttatcacatgagtaagtaaccctagtgatatttatttggaaaaactgagcagcaagtacacctctagtgtcataagaaagggaaagcattgccactgtcagatgaaggctcctggaagaaaataa

SEQ ID NO: 461206 - DNA, 521 bp, Homo sapiens
attttctccatctctctgtctcctgacttcaccttgcacccaatcaactatctccacacttcagcccactcccaaacccttacaaaccctagcctctctaggagagacaggcctcatgtattcagacccctgagccaggtgtcttatttttaatttttaaaaactgtggcatgtaccattcacatagaagaatgtataaaatatatataggtgcagtttaaaggatgaggataaaatgaacaccatatacccaccacttgggttaagacacaggacatccccagtcctggtcttgtggaagcccstttgctcctctcttagttcgttgttctcttcccccagaggtaactaaaactgtgactcatgctgatcacactcttgcttttctttatagtgttatcacatgagtaagtaaccctagtgatatttatttggaaaaactgagcagcaagtacacctctagtgtcataagaaagggaaagcattgccactgtcagatgaaggctcctggaagaaaataa

SEQ ID NO: 461207 - DNA, 608 bp, Homo sapiens
tagagctcattgcaacctgaaactcctgggctgaagtgatcctctctctgcagcctcccaartaactaggactacaggggcatgccactgtacctggctttattttaaattgtttgtagagacaaggtctcactatattgcccatcctgatcttgaactcctggcctcaagcaatcctcccagctcagcctcccaaagttgctggtactacagatgagagccactatgcccagcctaatgtagttcttttacacttcttaacctccacagaattagaaaacaactgaggatagtaattttgcagattcaattttaaatcctccacagtgcccaaaatggaccatgttctacatagatagcaaataaagcatggttaaactttcctaaataatcatccattacatcataattgaattaatacaatcaaagcgatttccttgcaaatcttcattacagcaaataacatatgtattttttgcattcagtcttttgttaattctacatatttgaagatagagtactgaacaatgaagatgttggcttcacgggggacacagtctagaagaaaaaatggaaggaagaaagaaggaaagtaatcccaataagtt

SEQ ID NO: 461208 - DNA, 545 bp, Homo sapiens
cctacttactccaatcttagagaaacattacaataatggtacttatagcaatatattaaaaacttatgtgctacttaccaaaaatgcatttatatttttaaaaaagattgtagtgaaaagctgggtgtagtggcttacgcccataatctcagcactttrggaggcccaggcaggtggatcacctgaggtcaggagttcgagaccagcctgcccaacacgtcaaaatcccatctctactaaaaagatttaaaaattagctgggctgtggtggcgagtacctgtaatcctagctactcaggaggctgaggcaggagaatcacttgaacctggaaggtggaggttgcagtgagccatgattgcgccactgcactccagcctgggcgacaggagtgaaactctgtctcaaaaaaaaaaaaaaaaaaaaattgtagtgaaagataatggttatatacagataaatgaataacttatatacattttttatttagtatgcaagttattttagggaaaaacaggtaattagttaattcaaaaaacatttaata

SEQ ID NO: 461209 - DNA, 545 bp, Homo sapiens
cctacttactccaatcttagagaaacattacaataatggtacttatagcaatatattaaaaacttatgtgctacttaccaaaaatgcatttatatttttaaaaaagattgtagtgaaaagctgggtgtagtggcttacgcccataatctcagcactttgggaggcycaggcaggtggatcacctgaggtcaggagttcgagaccagcctgcccaacacgtcaaaatcccatctctactaaaaagatttaaaaattagctgggctgtggtggcgagtacctgtaatcctagctactcaggaggctgaggcaggagaatcacttgaacctggaaggtggaggttgcagtgagccatgattgcgccactgcactccagcctgggcgacaggagtgaaactctgtctcaaaaaaaaaaaaaaaaaaaaattgtagtgaaagataatggttatatacagataaatgaataacttatatacattttttatttagtatgcaagttattttagggaaaaacaggtaattagttaattcaaaaaacatttaata

SEQ ID NO: 461210 - DNA, 509 bp, Homo sapiens
ctgggggttgctagaggctctacctcgaatcccacttctgacacaacctgataaaagaaaaacttcagccaaattaaatttaaaggagtttaactsagcaatgaatgatttgtgaattgggcagcccccagaatcacagcagattcacagagactccagtgcagccacatggtggaagaagatttatagacaaaaaaagggaaatgacgtacacaaatcgaaagtgaggtacagaacggttggattggttacaggttagcctttgccttatttgaacacagtttgaacactcagcagggtatgaatggttgaagtatggcatctgggattggcccagacttagctattgttacaggcacatactcctaagttttcgatcttgtctacctattaagctaggttgcagttcatccacaaaaacttaaatatagaagtatagagccctcaggccatatttagttcactttaacacactcttctgtgcattctgaattataatcctcatttct

SEQ ID NO: 461211 - DNA, 618 bp, Homo sapiens
gtctgagaatgtgaaggattctttttcctttcaattggtgtaggaaaaaaagattttgtgtttcatcaagataattttttgtgctttggcttttattaggtctttattttttatttttatttagttatttatttttgagacaacgtctggctctattgcccaggctggagtgcagtggcaccatcttggctcactgcaacctctgccacctgggctcatgccatcctcccacctcagcctctcaagtagctgggactacaggtgcacaccaccaggcccggctaatttttgtattttttgtcaagacaaggtttcaccatgttgcccaggctggtctcaaactcgtgaactcaagcaatccacctgcctcagcctcccaaactgctgagattayaggtgtgcaccaccatgcccagcctgggtctttgattatttaagtgagtcttcacaatgttaaaatacctaagtttttgttgacaactctgtaatgtatatttgccttttgaagtattttaattattactctggttaaatcaatgattgttattccacagtgacctgagatcctattttaatcaagtgttttaaacctttttatattttgacaaatttcccaaa

SEQ ID NO: 461212 - DNA, 559 bp, Homo sapiens
tgtacaggaagcatgactctggaggcctcaggttttttacaatcatagcagaaggcaaaggggaagcaggcacctcttgtgagcaggaggaagagagtgaaaggggaggtactatacacttttcaacaaccagatcttgggataattcactcactatcatgagaacagcaaggggaaatctgcccctatgatccaatcacctcccaccaggcccctcctctaacactggggattacaatttgacatgagatttgggcggagacagaaatccaaaccatatcatatggctttgtatgrtgtgtcatacaactgttttcctctcaattgtctttttattctcttaacaatgtccttcactgataaaatgctttaaattttgatgaaatccaatttatcaattttttgtttcatggattgtgcttttgatattatatgttacagctctttggcacacacttgtagtcccagcttctcaggaggctgagatgggaggattgcttgaacccaggagtttgaagggagcttgggcaacatagtgagatgctctcaaaaaaaaaaa

SEQ ID NO: 461213 - DNA, 486 bp, Homo sapiens
ttgggggtgggtgggccacatcaggtttgtgagcatctgctggtgggcttaggctctgttaccacaccctyccagcgggatggccctagccaggagaggctgtgcaagcccaagcctccacgccatctgctagtcctccctctaagaccaagtcctggataatctggacgttcccacaatgtcatgcctgagccccacaccaccacgcaggcctggcatctcccactacagtgggacgtggtatcttagttgctccagtctgcggacccccagaagctaaacccatctcgcactcctggcgcttgatcagtcacttttagaaaacccctgccttggtttccccagccacctggggaggccacgacggtgatgagctgagcctggcactgctgacaccacagcccccctccctcctctgtcctgcatcttccgagctctgaggcaggttggcaggggggccagtcgctggtgggcccagccctgtac

SEQ ID NO: 461214 - DNA, 527 bp, Homo sapiens
tatttcattctttttaatggccaaatagcattccattatgtatatatactacttttttaatctattcatccattgatggacacttatgttgactccataactttgctattgtgaatcagcctatgataaacatgtgaatgcaagtgtccctttgacagggtgatatttttttcctttggaaaaatacccagtagtgagattgatggattgtatgatagttttagttttaaagaaatctccacactgttttccatattggttatattaatttatattccctccaacagtgtataagtgctcccttttctccgcatcctcaccagaatctgttatttttttctttttataatagccactcyaactgggctgaaataatatctccttggggttttgatttgcatttccctgatggttagtgatgttgagcattttttcataaacctgttggccatgtgtatgtggtcttttgagaaatgtctattctcaaaatatgtcctgtgcccatattttagtgactttttttgttt

SEQ ID NO: 461215 - DNA, 610 bp, Homo sapiens
ggctgcttctaatctgctaagggtggaaattaggtcatagggactgttacaaacatgagtaaagtgagggataaaagactcagaattaggaactctgtgttctcttgtaaattaaaggcaggagatttagataataaacattctcatatctactgtggatattcaaaatgccttttgtatgctcattacaagtttccaactgtgttccagctagaaggtgtgaggtacrtgatagctgtactactaaggatttgccatgaagtacagtgatctataaaagaatattccagacaagcagttccttacatccacctccatgcctgaagaagggatgttagtccatagctcttagagctgcagccttgtggagaggacagtgcgggcagtgagggggatcccttcccattgcaagggggctctgttcctcctgccccaaggcaaggcagcggtgtgagcttctctcaagattcagggagatggcatcgcatgcctgagttgcagtctggtcgtgcagcagatctgtcacttacttactagagctgggaaagaacagaattggagagagatgagaggacagaagggcagtctccctcccactggttgctgtgtc

SEQ ID NO: 461216 - DNA, 610 bp, Homo sapiens
ggctgcttctaatctgctaagggtggaaattaggtcatagggactgttacaaacatgagtaaagtgagggataaaagactcagaattaggaactctgtgttctcttgtaaattaaaggcaggagatttagataataaacattctcatatctactgtggatattcaaaatgccttttgtatgctcattacaagtttccaactgtgttccagctagaaggtgtgaggtacatgatagctgtactactaaggatttgccatgaagtacagtgatctataaaagaatattccagacaagcagttccttacatccacctccatgcctgaagaagggatgttagtccatagctcttagagctgcagccttgtggagaggacagtgcgggcagtgaggrggatcccttcccattgcaagggggctctgttcctcctgccccaaggcaaggcagcggtgtgagcttctctcaagattcagggagatggcatcgcatgcctgagttgcagtctggtcgtgcagcagatctgtcacttacttactagagctgggaaagaacagaattggagagagatgagaggacagaagggcagtctccctcccactggttgctgtgtc

SEQ ID NO: 461217 - DNA, 654 bp, Homo sapiens
ctggcacatagggtcacgagcacccagcatcaaagacaggaattgtgttcagaacagcagcagacgcactgcccccttcttcccacagatccaaacatgagagaggagatgtaaagaattttatctgacatatccctttcctgtgattattcacaaattttgccacatttgcatgctgtgtgcagcactcttaaagtatttkcatctttgtttattcatttctttaaacctttttaaatgcaccaccagcaggtcttccagttctaaaaaataaaataaagtcagtgaagtagatgccagtggcaggcaagagcagaaaggccagagaggccagcttttctctcatcatattcgtggtagaagaagttcctgtcaatcaacattgtgatagcatcagtcttaagcattgcctcagacaccagaggctccacacagagatatccaggtgttgcaggacctgtgcaggctgaaaaaccttcagagctcataagcagaaagtcgtctacccttctagttattctagatgggcccccatctcagggggagccccagcagcagaaagccttattaaaattaaaattagctaagaaggaaacaaaagataaacttttcctccttcttcctctttaaagcagaatgagttatccactggat

SEQ ID NO: 461218 - DNA, 617 bp, Homo sapiens
tttgcatcacaacctgaaacctgcagttcccatctgagagacctctctccttacttctccataacctctcaggtagtaccccacaaccaaatccagtgattttttttccccttttacacgtttaagtaacagggactgcctggtgcaacatctgcctagaataaacctccttttggatccatgtcttgtccattcttcaagacctaaattcaaacctttcctgatgctacagaccacagtgagctttccctcctccaaatttttatgcgactgataggcaaacactgcactacataagctaataaatgccatcacttttcctcattrtttcaggtatataagtaaatatgggttcagttgttgtatttctacttaaaaggtaaatattcagggatgatacctcctatatttctcatttcctccctgtaaccagcacattactgttttgccagccttgaaggaaacttccttgtctgtatttattatcccaggtttcccagacaccgtcctatcttgctttcatcatactgttttgtacttttgccaacatttgttattgtgcatcttagaggcccttatgtccttctccttccttgctctgatgcttagcatgcttc

SEQ ID NO: 461219 - DNA, 601 bp, Homo sapiens
tggcctaaaaccacacaagtttgttatttcacagttttcatgggtaaggagtctggcacattttagttgggtcctctgctcgagtcttcacaggctgaaatcaaggtataggctgctgggtcccatctagaggcatgaccaagaaacaaccctcttctgagcattttcacggctttaaaggaattgagtttcttgtggttttagacctgaagtctttattttcttgctggctgctgggccaggaccactctcatcccctggagacctctccatagccctctcacacctcacccttcaaatatctgccttcaggaagagcccactctccttgcaaggttaacctgattcgttcaagcccaccaggattgttttccttttggttcttctgatgaactcagagtcaactgatttaggactttaataacatttgataaatctcttcacctttgcgtaatctaatcacagaagtgaaatctatcatcttcacagtcccacctaggctgtccacactcaaaaggaagatgaytacatagggcatgtacatcagggagcagaaatcttgggggccatctcagaattctgccggctacagacaaacagc

SEQ ID NO: 461220 - DNA, 227 bp, Homo sapiens
gtgaattatcaaagtaaaaaggagatgaaggtgatcaagacactaaaagtaayatgcacaaggatttgttcacatacacctcattcatgctatggcaagaaataggattgtcaaggaagactgttgagagaaaacaaagcgaagtcctaggacaaaatgttggagaactttggacatgaaaggagaaagaggaaccaggagaggagtcagaacttggacggttagag

SEQ ID NO: 461221 - DNA, 575 bp, Homo sapiens
tggcttcttgttcagtagttttgattattatagccctttatagcttatgagtcattgggtttactcaaaatgtccagctcctcatyctcatttttttctctatggcccagccatgcccgtcctgaaaaatttttaaaaaggaataataaaaataaataaataaaagtcatgtactctatatttcatttccaatgagttgcttcttgtttgggtaattttttattgtattagagacaaggccttactctgtcacccaggctggagtacagtggtatgatcatagttcacagcagcctccaactcctgggctctagtgatcctctcacctcagcctcccaagtagctaagactacaggcacacaccacctaatctgactaggtttttattttttctaaagacaaggcctggcaatgttgcccaggctggtctcaaactcctgggctcaaatgatcctcctgtctcagcctcccaaagtgctggaattacaggccaccatacctggccttgtttggataattatagcaataggagtccaccgaagtaagttgtgtttttttagttatttggcattctc

SEQ ID NO: 461222 - DNA, 584 bp, Homo sapiens
atttaacacttctttttatctgttcacaattggttgccagttccctggagttccctactgctgggaaaatggagtgtgtgggttcagagaggtgctatagcttggagccatagttttcaatgggaaaaggaagtaagaggaaaagaaagaagacaatgagaagtgttgctgagatccatacatttttgtggcataatgagaatttctaaaaactctgcaagtctgacttagcagcattattatactgtcacccagcctgaatcttcaagctgacaatttgctgcgagttcttcrttcacttctttttctccttccttctggaaccatgcatattttgccttaagagaacaaagtgatgatataaaaaagggtgtgtgtgtgtgtgtgtgtgtgtgtgtgtgtgtgtgtgtttcaatgaagaaaacatttcaaaacatactaaatgcccgcagtatgagaggcttcttactaggatactcaggtgaatgtttgggaatctaccactgtgttcaatatgtctttgctatttgcaagatttgcagtctacttaagaatctcaggaatgcatcgatcagccttacatc

SEQ ID NO: 461223 - DNA, 624 bp, Homo sapiens
gttttatcaattgatagcaatgtgggttgtttctagtttttgactatcatgaataatgttgctatraacatttgtatacaagaatttgtgtaaatgtatgttttcatttctcttatatgcacccgtacatggaattgctgggtcatatgacaagtctatatgtttaacattttaagtaactgccaaagagctttccaaataggctgtaccattttactatcccaccaacagtgtatgagggttcaaattcctccctatccaggtcaacacttgctggtttgggtgcagttgggcaggggttgattttacccattctagtgtgtgtaaagtgatatctcatggttttaacttgcattctctgatgtctaataatgttgaacatctttctgtatgtttataggccatttttacttcttctttgaagaaatgattcctctaatttgcacatttttaattggatttcttgaatttattgttgaattgtaaacatttttaaaacattcctgtgcgagatccttatcagagatatgattttcaaaatttttctccaatctgtgggttgtcttttcgtttccttcgctatttcttttgaagtacaaatattcttaattttaatgaagtaca

SEQ ID NO: 461224 - DNA, 686 bp, Homo sapiens
aacagtctctcagcagattgccaaatgacaggccacaggcaattttttctttaacttctcaagagttcccaccttcyctaaagaggaatttctgctctaggaagccactttaactttacttttgcagtaacaattaagctgcctgtgctgccagccaaggccaagtattcttaaaggatctgtcatagaagccggcaccaagacctaagggagaagctctctattctatgtgataataaccttggccttggctataccaattcattacctggggatacccttgggcagtcatatggacagggatcttgccctgaacccaaggtgggcaccagtagacaaagatcaccctggtgcaccgtgacatttgtcttccctacacttcaaccctatgccataaccttgccatttatggccagttgttttccttttagttatgtattttcttaaaagtcccattggctactcttcttccacgattaaaggcgttgctccaagattattcagaaacatataaactgggggcagaatgaaagagacatttaaaaggcttgggctgggaaagagaactgaggcacagtagaactcaaaagtccctgtttggtcagagagactatttagcaccactggcctgagcttttcccattctaacacatatgatctctgaaatgctgattcttgaagtatac

SEQ ID NO: 461225 - DNA, 570 bp, Homo sapiens
gagagttacttgacagcatcaggaaaaggagaaatgcaatgggggaggtatgcataagaagcagggcagaggtatcttcatggatgccccaacctgtgggaaaaattcatctgttctaatcctctgctttcagaatgtggcagggaggactttcagcatctcctctgggcattgcagatatgcctggcttcccaactcaaagagctgctgctggtgctataattaactatttgtggggaacaggggagaattatttactacagctacagaaaggcacagggaaagctgctaatgagtaagcctggtttttttctagatgctgtttttttctagatgttcatttttaaatgatgggtactgttcgtgctgtcatgcttcctaaaggaaaagygggaactctctgggaggcatcatgctagcaaagccagagatctcttggaagttttaactttctttgggagaattcttacaagccctggtatagagaaaagttaacacagagaaaattggtggctctgtatcgtctttacaattcacaaggtgaagagtctctaatggtgggctagcaaa

SEQ ID NO: 461226 - DNA, 641 bp, Homo sapiens
taaaccattcatgagtgatgcaagttgagagttacttgacagcatcaggaaaaggagaaatgcaatgggggaggtatgcataagaagcagggcagaggtatcttcatggatgccccaacctgtgggaaaaattcatctgttctaatcctctgctttcagaatgtggcagggaggactttcagcatctcctctgggcattgcagatatgcctggcttcccaactcaaagagctgctgctggtgctataattaactatttgtggggaacaggggagaattatttactacagctacagaaaggcacagggaaagctgctaatgagtaagcctggtttttttctagatgctgtttttttctagatgttcatttttaaatgatgggtactgttcgtgctgtcatgcttcctaaaggaaaagtgggaactctctgggaggcatcatgctagcaaagccagagatctcttggaagttttaactttctttgggagaattcttacaagccctggtatasagaaaagttaacacagagaaaattggtggctctgtatcgtctttacaattcacaaggtgaagagtctctaatggtgggctagcaaacctttaggacttcctgggaaaatcttagatgtttgaagggcaaaa

SEQ ID NO: 461227 - DNA, 356 bp, Homo sapiens
ttcacccagccagcctctcagaaggctgtttttgttatattcattacaaatgctatacttaaatatgtcataatttgaatgtaaatgtatcccttgtatagcatgtgtcatattttacataggtgatatgtcagtcaggatgtcagtatgaaagagttggtttacacagatggagtaattgaggagagtytgttgagggactacttacaaatgtatggaagaataaagcaaatgaagcatagtgaagtccatgggactagcaacagattggagtcattatcctgctaggcctaaagagacaagggaatggcaaggttaatggaatctggagagggctccctgatgggagctacagc

SEQ ID NO: 461228 - DNA, 606 bp, Homo sapiens
aaagcaaatgaagcatagtgaagtccatgggactagcaacagattggagtcattatcctgctaggcctaaagagacaagggaatggcaaggttaatggaatctggagagggctccctgatgggagctacagcatttgggacaggaatgaagttagtatgtaatgagccagcaggaagggagcctggaaaatgaaaatcctgagatgactctcccacccaactctccaagtttttaaaygcacttcctgttggctgaatccagtgggaggccataaagcaatgaatctcattgatgtggtccataaaagccaatctccaggcacagcacacagtggagaaccatggagaggagatctgaagggaaaacagaaataaccagacacatatagtatgcattgttggatctacaaaataatgttgaaaaaattgcagaggcattataaacccaatatgatctatattgtagaacccaatttatccatattgaccacttggtacttatagcaagtgactgatcttcaggggtatcttgctcagatactttgtcctctcttgaggattaaagccaattattcatcatgagattcctcactcaatgccactcac

SEQ ID NO: 461229 - DNA, 554 bp, Homo sapiens
cacatccaggtcttcagcagcaccaggcttggccccgtatacatgaactctgactgctccatcactaacaaggcacatctaatctggaactgtgccttatgctttgctaactgtgacatacagcacactattggcaatggctttcgtccactccatccaccatcaccactggctctactttgcaggagttatctgatccattttctctgttgtttccttgtgagggagagcagacatgcacaagctattgtcaaaggwcaaattacaacaaatttagtttaaagatctcgctgggctttatagcaattttagaattggtcaacacttaattccataaaatagaataagtgttccaatgagcctagcagaagaggttggctttctagacagagaatgtaattgtactaggtttgttgcccgatgtgcatggcaaatcaatatgccaagacactggattgtgacagagaagagatttaaccatagggccaccaaatgaggaagagggagggaaaatcaaatctgtctccccaaggagtttggggatagagttttta

SEQ ID NO: 461230 - DNA, 554 bp, Homo sapiens
cacatccaggtcttcagcagcaccaggcttggccccgtatacatgaactctgactgctccatcactaacaaggcacatctaatctggaactgtgccttatgctttgctaactgtgacatacagcacactattggcaatggctttcgtccactccatccaccatcaccactggctctactttgcaggagttatctgatccattttctctgttgtttccttgtgagggagagcagacatgcacaagctattgtcaaaggacaaattacaacaaatttagtttaaagatctcrctgggctttatagcaattttagaattggtcaacacttaattccataaaatagaataagtgttccaatgagcctagcagaagaggttggctttctagacagagaatgtaattgtactaggtttgttgcccgatgtgcatggcaaatcaatatgccaagacactggattgtgacagagaagagatttaaccatagggccaccaaatgaggaagagggagggaaaatcaaatctgtctccccaaggagtttggggatagagttttta

SEQ ID NO: 461231 - DNA, 592 bp, Homo sapiens
ctttcatcctgtaggttgtgagcattcttaygtgaagtattcccagattttaagtttttctatcttgggccctttgcacaataactggcgtagggtatgtgttgaacttgtaactaatttaatgccattgtaagtagaatcttctttctggttaattttttcaagtaaagcagattacctcaggttgatttgctacatctttgctaggatgtcaaaaatgtctgttgacatctcttttgatacttttatctcaccgttcatgtgtcaactgccagttgctatgtgagctctgattctgaatttagcaataaatgctcttcacattacttttctctccaccgtctatctcttctgggctttgagttcaattcgagcagtgaactttgagttctctgacatcagacttcttgacctccagtcaatcatagagtaactcctccctctcaatcaaaaccaaataaaagttatataccctagttgagtcaacttgactgcagccttaagaaaatctcaccaaatgcagccttacatgttctgacttgaaatacatcatgtgtttcccttcggtccttcagcaggggtttgttctatt

SEQ ID NO: 461232 - DNA, 671 bp, Homo sapiens
tgcaaacttgattttataggtttagtaatatctccagggaataattctctttccctttccctacttctgtaattggtatatactctaaatgccattagacccagcttgctctaaagatctgtagggatagtatttctctctctccctcattcagtatgtgcccatgtcaggcctaactgaacacagggaccaaataaatagaagatattccattcagattttatagcctgactgctttactctgcaacctctattattgagaattatctattttgactgcaaacacgtcatttcatcaaaggttctttacaaagcagatgacattgaaaagcagcctcacatttttcaggtttagagactagatttttatggacttsgaaacttggaagtcagctcaccattctggcatagtcttcctgccaagcccaaattctgaaatcagtgtgggagcaatcagtgggtgacatccatctcagagtcaaagaaacaggggacttctgattccttgtaatttctctagaagtaaatcctcttttccttgactggcactcttctcttttgagggccaataacaacctactcattaagaaccatttaacattttccaaaaatacttccaaaaccattaactcatttgatccatgtatcaattctatgaagtcagtaggcca

SEQ ID NO: 461233 - DNA, 671 bp, Homo sapiens
tgcaaacttgattttataggtttagtaatatctccagggaataattctctttccctttccctacttctgtaattggtatatactctaaatgccattagacccagcttgctctaaagatctgtagggatagtatttctctctctccctcattcagtatgtgcccatgtcaggcctaactgaacacagggaccaaataaatagaagatattccattcagattttatagcctgactgctttactctgcaacctctattattgagaattatctattttgactgcaaacacgtcatttcatcaaaggttctttacaaagcagatgacattgaaaagcagcctcacatttttcaggtttagagactagatttttatggacttggaaacttggaagtcagctcaccattctggcatagtcttcctgccaagcccaaattctgaaatcagtgtgggagcaatcagwgggtgacatccatctcagagtcaaagaaacaggggacttctgattccttgtaatttctctagaagtaaatcctcttttccttgactggcactcttctcttttgagggccaataacaacctactcattaagaaccatttaacattttccaaaaatacttccaaaaccattaactcatttgatccatgtatcaattctatgaagtcagtaggcca

SEQ ID NO: 461234 - DNA, 480 bp, Homo sapiens
acaatatgtatcatttaaagaacaacaacaaaaataaacycttgtaaatattgcacttccatttgcaagcagaagattaatacaataataacaccttggatatgaaaaacaaacactcagtgaaatgcaaacctggctaaaagaaattgccttctttcttggagaagagtcacaggagactagaacacaaattatttttcttagctctgggcctttagggtatcaaagcttcctgaaaaggatcatgcatcacggaaagtgttaatgtaccttattattccatttctctctgatgaattctttggaatcaataaggtacttaacagttaagaatttcattaggttgcattgcaataccaggaatctcttagatttatataacacctatcttcagcaagttcttttaaagcaatcatagaggaaaatatgttctcctgctgtgtgaactcagtgaatcatgtcgacatagggtatttttct

SEQ ID NO: 461235 - DNA, 480 bp, Homo sapiens
acaatatgtatcatttaaagaacaacaacaaaaataaacccttgtaaatattgcacttccatttgcaagcagaagattaatacaataataacaccttggatatgaaaaacaaacactcagtgaaatgcaaacctggctaaaagaaattgccttctttcttggagaagagtcacaggagactagaacacaaattatttttctyagctctgggcctttagggtatcaaagcttcctgaaaaggatcatgcatcacggaaagtgttaatgtaccttattattccatttctctctgatgaattctttggaatcaataaggtacttaacagttaagaatttcattaggttgcattgcaataccaggaatctcttagatttatataacacctatcttcagcaagttcttttaaagcaatcatagaggaaaatatgttctcctgctgtgtgaactcagtgaatcatgtcgacatagggtatttttct

SEQ ID NO: 461236 - DNA, 480 bp, Homo sapiens
acaatatgtatcatttaaagaacaacaacaaaaataaacccttgtaaatattgcacttccatttgcaagcagaagattaatacaataataacaccttggatatgaaaaacaaacactcagtgaaatgcaaacctggctaaaagaaattgccttctttcttggagaagagtcacaggagactagaacacaaattatttttcttagctctggrcctttagggtatcaaagcttcctgaaaaggatcatgcatcacggaaagtgttaatgtaccttattattccatttctctctgatgaattctttggaatcaataaggtacttaacagttaagaatttcattaggttgcattgcaataccaggaatctcttagatttatataacacctatcttcagcaagttcttttaaagcaatcatagaggaaaatatgttctcctgctgtgtgaactcagtgaatcatgtcgacatagggtatttttct

SEQ ID NO: 461237 - DNA, 367 bp, Homo sapiens
gctaagttttcaagtgatcctggaagaattgggcaatagtttttaaatccaggaaaaacttaactaagaatcttgcccagcttcytacactagttattttatcaaataagaaaccaaaaccttgggaaatttagtgacagtcatggtcacaggtttaaaggcaatgcagtagatctctagatatttaattagggtttcttcttgtttcatcacagagaaaatacaaggactacacccacattgagcatgggacatggaaaaatctgatgtgtgtgtgtatgtgtgtgttttcataaaaatagttaatactcagagaataaagtcttaatatgtgctaataaaatggaggagtgacaggaagaaacaa

SEQ ID NO: 461238 - DNA, 494 bp, Homo sapiens
gttttggaaaataatagactatgccactttccagaatcttagaaaggagtaatgataagctgtcctagaaaccatttgaaggaaaggaatgtcatttccttcagcttatcatgagaactagccttagccgaagcaaggtcacttttttgaaatgcacttgttttgtaaaaaggatggctagactgacccaatgcattgaaatgtccaggactcaakctcctgtccaccagctccttaggatcttttcagcctgcagactggacgtgcacacagtggcaggcaatgtatctctggattttcacgctcctggagtagatgagctgtgtttgctataaaatgtcatgtttgctgtgtatctgggaagacttaatgaagcattgtgcacgcagaggcaggatgatgctgacattaatcattgctgctaacttctggatgtgaaagcagatggcgacacccatggcttctcagacagcacaggttgaggatgtgagttg

SEQ ID NO: 461239 - DNA, 494 bp, Homo sapiens
gttttggaaaataatagactatgccactttccagaatcttagaaaggagtaatgataagctgtcctagaaaccatttgaaggaaaggaatgtcatttccttcagcttatcatgagaactagccttagccgaagcaaggtcacttttttgaaatgcacttgttttgtaaaaaggatggctagactgacccaatgcattgaaatgtccaggactcaatctcctgtccaccagctccttaggatcttttcagcctgcagactggacgtgcacacagtggcaggcaatgtatctctggattttcacgctcctggagtagatgagctgtgtttgctataaaatgtcatgtttgctgtgtatctgggaagacttaatgaagcattgtgcacgcagaggcaggatgatgctgacattaatcatygctgctaacttctggatgtgaaagcagatggcgacacccatggcttctcagacagcacaggttgaggatgtgagttg

SEQ ID NO: 461240 - DNA, 483 bp, Homo sapiens
atctgggctaatgaacagatctgctaattatgttttatgtgaaatgtgaaattcaaagaaaacattaggggatattagcattgctaaacacagtcctatgccatttaaaaaaatatgtttattactgctctgccactaatctcttatgaaacttcagaaaattagttaacatatttaagcttcgttgtttttccaatcctgcatttgtaacatgctgcaatcagtgttggtgatttccaaggcacactgcaaccgcattggacaactgtttgatgggaatatgcaaaaggtaaaccaacatgctatgacttatattactatgtttaggtataagcccaatagaaatgtatatatgtgcccaccaaaagacatgtataaaaatattcacagcagcactattcaktatagctcactggtgagatgaatgatgccctccctaaaagatgtatctgcatcttaacccccagaacccgtgaatgtgcc

SEQ ID NO: 461241 - DNA, 550 bp, Homo sapiens
tttacagaaattatttagaattctttggtgcaggaaatgtatttattctctctcatttatttgtttattcatttctttatattcatatggattcaaggacttttattttattttatatgttggattataatccaatgctacttgattgattgctcaaatttttgcaactttgaccattgggagctctttcagttggctactgtgcaccttggcataccccatccttataggtttggattttttgttttgcttkgtttctttttcatcacttccttactttctgcactgcaagatgctctaggttatctcgtgtattttattccccagtcctagaatcagctatttctccaggaaccctttgttctttttacaggagaatgatattagaaaccaaaatctggacactaacttgctcactactgctgagatgccattgcttctgcttgctccctgtggaaagagatatatgtgtatatactaacccatgtatgtaaacatatctataaatatttctatatgtaaccatctgtgtctatattgacctaaacat

SEQ ID NO: 461242 - DNA, 550 bp, Homo sapiens
tttacagaaattatttagaattctttggtgcaggaaatgtatttattctctctcatttatttgtttattcatttctttatattcatatggattcaaggacttttattttattttatatgttggattataatccaatgctacttgattgattgctcaaatttttgcaactttgaccattgggagctctttcagttggctactgtgcaccttggcataccccatccttataggtttggattttttgttttgcttggtttctttttcatcacttccttactttctgcactgcaagatgctctaggttatctygtgtattttattccccagtcctagaatcagctatttctccaggaaccctttgttctttttacaggagaatgatattagaaaccaaaatctggacactaacttgctcactactgctgagatgccattgcttctgcttgctccctgtggaaagagatatatgtgtatatactaacccatgtatgtaaacatatctataaatatttctatatgtaaccatctgtgtctatattgacctaaacat

SEQ ID NO: 461243 - DNA, 600 bp, Homo sapiens
aagcaatattttcaacgacctcttgatttgataggtaattttacaagaactgactgcccatttgtatgtttttaaagcacttggcttaaagaaaaggtcaacgttcttactgtgaataaaatatttatgaaagtagctgtggcttttctttctttgtttccccacctgtgcccagacaccccaccttgcaatgtgttaatgacctaccttgcccatgctggtcttagtgcctttcaggggtattttcaccacatcctctctcaaagaattgagccttttttccacggttgtcaaggctttcattctttttctatctcctctttttctctgaaaatattccacttaccttttcttccctaacaggtggtaagtatagtgaatgacaattttttagaacatgtgtcacaaaaattgtggagctgccatattgcacagctccagcaggagcattcacatcatggcaacttcctctagttgtggagtgcccagaccatataaaacaggcagcagcytggccagcactgcttgaaggagttgggattcagatttctacgggtttagggtaaaagggaatgggttaagtccattgcatagaggatt

SEQ ID NO: 461244 - DNA, 608 bp, Homo sapiens
gatgcagtattctatgaatttcaatagagcaagctgattataatgctgttcaggtaaactatattttgttgctatttctgcctgcttaatctctcaattactgacaaggggtattaaattctccaagcataatagtgaatttatccctccttcagttatatgagttattgcctcatgtattttgatgatctgtttttagatacatacatgtttagaattgttatatcttcttcaaaaatttacccattcataattacccagtgctgctctttatctctgacaattctccttgttttgaagtctgctttggctgaagttaatattttcattccagttttctttcrattagtatggtttctctttctccgttgtccatttctttaattttagcttatcggagtctttatatttaaagtgaattttatgtaaacaacatatacttgggtcttgcatttttatctgacaatctctgtcttttagctggtatatttaggctactcattccaagggattattcatatatttgctttaacatcaaccatgtttgtagttgttttatgctttccgttgttttaattaagtctctgtattgttccattttatctcct

SEQ ID NO: 461245 - DNA, 608 bp, Homo sapiens
gatgcagtattctatgaatttcaatagagcaagctgattataatgctgttcaggtaaactatattttgttgctatttctgcctgcttaatctctcaattactgacaaggggtattaaattctccaagcataatagtgaatttatccctccttcagttatatgagttattgcctcatgtattttgatgatctgtttttagatacatacatgtttagaattgttatatcttcttcaaaaatttacccattcataattacccagtgctgctctttatctctgacaattctccttgttttgaagtctgctttggctgaagttaatattttcattccagttttctttcaattagtatggtttctctttctccrttgtccatttctttaattttagcttatcggagtctttatatttaaagtgaattttatgtaaacaacatatacttgggtcttgcatttttatctgacaatctctgtcttttagctggtatatttaggctactcattccaagggattattcatatatttgctttaacatcaaccatgtttgtagttgttttatgctttccgttgttttaattaagtctctgtattgttccattttatctcct

SEQ ID NO: 461246 - DNA, 608 bp, Homo sapiens
gatgcagtattctatgaatttcaatagagcaagctgattataatgctgttcaggtaaactatattttgttgctatttctgcctgcttaatctctcaattactgacaaggggtattaaattctccaagcataatagtgaatttatccctccttcagttatatgagttattgcctcatgtattttgatgatctgtttttagatacatacatgtttagaattgttatatcttcttcaaaaatttacccattcataattacccagtgctgctctttatctctgacaattctccttgttttgaagtctgctttggctgaagttaatattttcattccagttttctttcaattagtatggtttctctttctccgttgtccatttctttaattttagcttatcggagtctttatatttaaagtgaattttatgtaaacaacatatacttgggtcttgcatttttatctgacaatctctgtcttttagctggtatatttagrctactcattccaagggattattcatatatttgctttaacatcaaccatgtttgtagttgttttatgctttccgttgttttaattaagtctctgtattgttccattttatctcct

SEQ ID NO: 461247 - DNA, 542 bp, Homo sapiens
gtaggagcagaatggcttccctctgcaaactcagactgatcaggttaagtggacaagcacacccaaagaaagaccattccaaaggagcagttgttcctacaactggaagctacgcaaaggggaataagggagggatgcactgagagagaccccagaagtgtcagtcaatgaatatcaataattcacatccrattgacaagatagaaattcaaacctcattttgacctgctgctattcaagtcatcaactcaaatctctcactcctttgttctgattctgtgctcaccaagtatctggaaagcatagagaatttgagtagttctacgtcagtgaagtttttttctcactgcaaataataaatgggcattccagcctcatacatcagtatcttgattcaaaaaagccagccagtggtgagtttcacagcctgcatgtctaagagccaagaccctggaccatgacacatttaccaagttgtatgaaagattgcattttcaaaaaaaaagaaaagaaaagaaaagaaaagataaaatggccacagc

SEQ ID NO: 461248 - DNA, 583 bp, Homo sapiens
ttccttttgattgtgaccaagattccttgtgaccttccagctgagagccatctccagcttctaggggcccctgtcttccttgacttgtggcctcctttctccatattcaaagccagcaatgacagattgagttcccctcatgcttcaacacccttctccttcttccagcttatctctctctccccagctgggaaagattctccacttttaaggacttgtgtgattaaagtgggctcacctggataatccaggatattttttccctgtctcaagttctgtaaccttaatcacatgccaagtcccttctgccatacatgtgaagtgacacgttcatgagtaccagggattaaggcatggacatctttgggagacctttttctgctaaccacagtgggatagagaggcrgttctatcacagtctggttctcacagtttgggaaccaagtgagcacttcaagctgcagaaaacccttgcatgggggaaggaaagaggatggctctgttctttcctttttcctgctctccctcccctgccttcactgtctagatgccaggatccaagccatgggctgaggaaagtcaa

SEQ ID NO: 461249 - DNA, 311 bp, Homo sapiens
caagctcaaacctcaaagctttctggtaaattcctgaacaaagaaaattgttatctttgatacctctggttggcctactcaaaaagagactgccaggtggacctttctctgcttacttccagatcatcagcttaggcaaaaattgtgcaaacaagattcactgtgtccagactaccaacagttttatttttytcctgtcttatgactcccgtttttgcctttgtttcctggctcattctaccaactgactcctcatgtgagtaaacaatatgagtgcaaaataaactaataagcatgctgcaaaataacta

SEQ ID NO: 461250 - DNA, 404 bp, Homo sapiens
tgatatggatttcaagcacaagtctgctctcaaaaagcacttaacctctgtccatggcagaagcagtggtgaaaaactatctaggcctgatctcaaaaggcaaagtctactataattataatcacagacttgttatataamgtttgtattattctattacgcaagtctttctgtagagatgcagcatttgtaatatttcatccccccaatctttgtttcttatattttgtcggcttacacataatcattctttctgaacttctaacagttccaaagttatgggaggcacagtaaagctgatgggattctgtctcatctcataccttacatataagtctcagtagtatccctagagaaatagtgttcctctcttatatattcttgattctagtgacaaaggatcc

SEQ ID NO: 461251 - DNA, 569 bp, Homo sapiens
cccattgtacttgcctaattargtttggcccaaagtggcatccatacatagtgactgtactctaacttaacgtgtaaataagttgtaagctaatgtagatgtatggacttgtaaccaagcaactgagactcaaccaatcataggagccaaacccttagtcaatcccaaactgaatgctgccaaattatgcccaaataaggcaaatattgaactgcaccaatcagggaaactctgaatataattttctatgttctggttataaatacatctcaccactctggatgtggagtcactctgaacaatcttcgttctgggatggtgcctagttctcaaacctttttcttggtcaaataaacttagtgaaatttaacatgtcttagttgtatttttttaaacaacattcaaagacctacaaaataggacagggaacttgtatttagactatactgtctaaatgcaacttatttatgctagttatttgtgtgttatagagaatatagtgatattgatatactttaagtcatttatgtacatcgggaagaggaaaaaaaaaaagttacccaattcaa

SEQ ID NO: 461252 - DNA, 569 bp, Homo sapiens
cccattgtacttgcctaattaggtttggcccaaagtggcatccatacatagtgactgtactctaacttaaygtgtaaataagttgtaagctaatgtagatgtatggacttgtaaccaagcaactgagactcaaccaatcataggagccaaacccttagtcaatcccaaactgaatgctgccaaattatgcccaaataaggcaaatattgaactgcaccaatcagggaaactctgaatataattttctatgttctggttataaatacatctcaccactctggatgtggagtcactctgaacaatcttcgttctgggatggtgcctagttctcaaacctttttcttggtcaaataaacttagtgaaatttaacatgtcttagttgtatttttttaaacaacattcaaagacctacaaaataggacagggaacttgtatttagactatactgtctaaatgcaacttatttatgctagttatttgtgtgttatagagaatatagtgatattgatatactttaagtcatttatgtacatcgggaagaggaaaaaaaaaaagttacccaattcaa

SEQ ID NO: 461253 - DNA, 569 bp, Homo sapiens
cccattgtacttgcctaattaggtttggcccaaagtggcatccatacatagtgactgtactctaacttaacgtgtaaataagttgtaagctaatgtagatgtatggacttgtaaccaagcaactgagactcaaccaatcataggagccaaacccttagtcaatcccaaactgaatgctgccaaattatgcccaaataaggcaaatattgaactgcaccaatcagggaaactctgaatataattttctatgttctggttataaatacatctcaccactctggatgtggagtcactctgaacaatcttcgttctgggatggtgcctagttctcaaacctttttcttggtcaaataaacttagtgaaatttaacatgtcttagttgtatttttttaaacaacattcaaagacctacaaaataggacarggaacttgtatttagactatactgtctaaatgcaacttatttatgctagttatttgtgtgttatagagaatatagtgatattgatatactttaagtcatttatgtacatcgggaagaggaaaaaaaaaaagttacccaattcaa

SEQ ID NO: 461254 - DNA, 529 bp, Homo sapiens
aatcaaaacaaagaaagattctacagaccagtctaaccaacaagacaattataaactagtggttcaaatatcaaaaaccaatttcaatgacaaatgcatggtatgaaaaccctgcaaatgtcaagtagaatatattatacttgaatgaaattatgagttgagagtaggaaatctatgtttaaccaagcaaattaaataaagtttatgaggaaattatactgctaatgttttattatttggcaagctattcagtggaacacaaagatattcttaatgaagtcgaaaatatattttaaaatgtgactgaagtggattaaaaaataatgaggacatgaataactttaaaaagtattcagggataaagagagaaaaataaatttagatttcatacatacataaaatatatttaaaaagttatrttttttggttgcttgaataaaaggaacagatatttaaattccatgcctttcattttaaagtttaggaattgcttatagctttccacactgacttttatactaacacagtt

SEQ ID NO: 461255 - DNA, 583 bp, Homo sapiens
tgtaacaacatatcacatgtacatrtgtaccacacaaatatgtacaaatatttgttgtgtaccaattaaaaataaacaaaacttgaaaaatacattatatctacacaatgaaatattattcagcattaagacactgcaagttggatgaaccttgaaaacatgctacatgaaagagtgcatgaaagatcacaaattgggctgagcgtggtggctcacgcctgtaatcccagcactttggaagaccaaggcaggcgcatcgcttgagctcaggacttccagagcagcctgggcaacatgacgaaggccgtctctacaaagaaattaggcaggcgtggtggtgcgcgcctgtggtcccagctactggctactcaccagggtgatacaggaggatcacttgagcctttcctgcctgcttcgctgaaggcatcatgcactttcacggctgggatcaactcttctggaagcaggtcctagcaggactgtgggtgtccacatccaggattagggtcctgcatagagcttggaatacttacccctcaatctggggggaggagcaggggctggcgccttaaggactaactgt

SEQ ID NO: 461256 - DNA, 583 bp, Homo sapiens
tgtaacaacatatcacatgtacatatgtaccacacaaatatgtacaaatatttgttgtgtaccaattaaaaataaacaaaacttgaaaaatacattatatctacacaatgaaatattattcagcattaagacactgcaagttggatgaaccttgaaaacatgctacatgaaagagtgcatraaagatcacaaattgggctgagcgtggtggctcacgcctgtaatcccagcactttggaagaccaaggcaggcgcatcgcttgagctcaggacttccagagcagcctgggcaacatgacgaaggccgtctctacaaagaaattaggcaggcgtggtggtgcgcgcctgtggtcccagctactggctactcaccagggtgatacaggaggatcacttgagcctttcctgcctgcttcgctgaaggcatcatgcactttcacggctgggatcaactcttctggaagcaggtcctagcaggactgtgggtgtccacatccaggattagggtcctgcatagagcttggaatacttacccctcaatctggggggaggagcaggggctggcgccttaaggactaactgt

SEQ ID NO: 461257 - DNA, 583 bp, Homo sapiens
tgtaacaacatatcacatgtacatatgtaccacacaaatatgtacaaatatttgttgtgtaccaattaaaaataaacaaaacttgaaaaatacattatatctacacaatgaaatattattcagcattaagacactgcaagttggatgaaccttgaaaacatgctacatgaaagagtgcatgaaagatcacaaattgggctgagcgtggtggctcacgcctgtaatcccagcactttggaagaccaaggcrggcgcatcgcttgagctcaggacttccagagcagcctgggcaacatgacgaaggccgtctctacaaagaaattaggcaggcgtggtggtgcgcgcctgtggtcccagctactggctactcaccagggtgatacaggaggatcacttgagcctttcctgcctgcttcgctgaaggcatcatgcactttcacggctgggatcaactcttctggaagcaggtcctagcaggactgtgggtgtccacatccaggattagggtcctgcatagagcttggaatacttacccctcaatctggggggaggagcaggggctggcgccttaaggactaactgt

SEQ ID NO: 461258 - DNA, 488 bp, Homo sapiens
gcatttgttcattttaggaaaaaattatgaaggcaaaataaagaccagacttgtgggccaattmttaacgcgaccgcttgctagcaggaacagctctcccgcctcctcgttctcctccatctttcctttgtggccacagtcctgggttgtcacacttccacaatagggaaaaacaaccaccactcgcatctgcatatttgacaactccagcttttctccccaaaaggaaccttagctccaggcgcttaaactggcaccctttgctttacactttctttataatacctagggtgtagaaaaacagtaaaacgtttttattgtttaatttgaagcaattatgattgtatgtaatagaatccatttagttcagttacttaagagtttaaacaagtaaccaaatttctggcaaatggagagtgtgcaacagggaatttctgggccaaagtggctaaaacagcattcagggattgtctcctgcatgtgatcac

SEQ ID NO: 461259 - DNA, 568 bp, Homo sapiens
gcatcccgccctcccagcttcccgctgccgctgagcatccttaccyttcaggcgaggcagtggaggcttagagagtttgggtcatctctagtggcatggctggtagggatggagactaggcctggtggtaaacagggcaagaagaggagccctggatgcaggaggccatcctcatgttcccgctgcagaggttgttcttggagaatttggtcccctaaactccacagacagggaaagggaggtttcgcttaaaggggcctggatggaggtggctttctcatctccttacatggaaaatggggacgaggctgtcttcaagctaagtacctttttgggaatgactaaagaatcgtcactgtgcccaagggagtgagtgaccctggaatggatgtgagggaggcttgcgatctcctctctggaaatgcagaccccccagggaagctggctctgtgccaggggaaggttgtgcagggaccaagtgaagtgcccttccaagtctgagctccctggtcccatctgaagtctagccgagccaggaatggcggctcttgaagggctttttcaagtc

SEQ ID NO: 461260 - DNA, 490 bp, Homo sapiens
ctgacatgttcaaacgtcactgccccaccaggcctgctcatccggcaaactccccagctcagctgatgtaggcacggctttgctaacctcagctccagaggtggcrggggaggagggtcagctagggaagccccagctgtgacagagacactttttcctcctctctctagatctcaggaaagctcagagacccaggacccacctaggaaggtggctgttttcaaggaagaggggcagttggtaacttgccagtcacagactggactggcggggaaaggttggaaactcctgagagatgggcaggtgaggagtcccttggcctcccccagcacagaacagacagccaccctggtgtcctcttgtgtctctgcaatacagtgagctcctgagggcaggacctgcgtgagtggagctcggaacctcgcacagggcaggtgctcactaagggcttgcaggcaagctaggcaatggcctctggggacactcccta

SEQ ID NO: 461261 - DNA, 490 bp, Homo sapiens
ctgacatgttcaaacgtcactgccccaccaggcctgctcatccggcaaactccccagctcagctgatgtaggcacggctttgctaacctcagctccagaggtggcgggggaggagggtcagctagggaagccccagctgtgacagagacactttttcctcctctctctagatctcaggaaagctcagagacccaggacccacctaggaaggtggctgttttcaaggaagaggggcagttggtaacttgccagtcacagactggactggcggggaaaggttggaaactcctgagagatgggcaggtgaggagtcccttggcctcccccagcacmgaacagacagccaccctggtgtcctcttgtgtctctgcaatacagtgagctcctgagggcaggacctgcgtgagtggagctcggaacctcgcacagggcaggtgctcactaagggcttgcaggcaagctaggcaatggcctctggggacactcccta

SEQ ID NO: 461262 - DNA, 547 bp, Homo sapiens
aagctacactgataaagcacttcctgttagagaggaagcatcaaaaaccaataggacacattagctaggatcacatagtagagttgacagtgccccacatcgggtattttactgagtatatgccatgtgcaatattctatgattaaagttatttcatttgtataatgtgccataatttatgaagagttttcaaataagttatcttaactaactctcataataaatcatttaagaaggtcgycattttgtaggtaaaaaaacttgtcatttttcaaggtcaacagttagtaaattatagatgtatgagagtgttattgaatattagactcttgtacagcgctttttttattgtcccatctctgcctcccagtagccacaaatatttatgtcacttcaaatacaagtaccactctttagaatgaatctattagtcatagtatcacatgatttaagtatgtattttcaaaccagttaaagctgccattgtagcaaaaatattgccttaaaattataccaattgtcgtaatttaaaagaagaatttaaaaa

SEQ ID NO: 461263 - DNA, 551 bp, Homo sapiens
agatggcagttagggaaacttaaataagttggtttggataaaattaaaggaggcagccctctgatcgtttctttccccaaagaggatttaagtctgcccctaggacacaggacacagagtcattattttaaatattatattgaattatataatgtcttaatttttaatcaaataattcatgcacataattattaatagtatcagaggattcttttgaaatcagtgtcctctgcattgctcttctctaaattgcttagaaggagtattaatacttttagttgtatcttccggcattagccataatttcttcacttttcaaaacctaagtaacatggctgtatttctttcccttgatttattaattataaatatatagtaaatttattattttgaaaaagaaggtaaactcgttcatgccaactcttatcttcaaatacatagtatatcttatattgtatgtactttatcataattattagttgatkatgtagtttcattacagtgaatatataaatattgtttgctaaataagaaagcagtgtaatatgttg

SEQ ID NO: 461264 - DNA, 526 bp, Homo sapiens
tgtatttatatataattgatatgcaataattggacatatttatggagtacagggtgatgtttcaatgcatgtatacattgcataattgatcacattgaggtaattaccatatttattcytttaaatatttatcatttctttctggcaacaacattcaaaatcttcttttctagctattttcaaatatatactacactgttatttgctgtagtcactctactgtgtaatagaacaccagaatttattcttcctaactgtgacattgtactggttgatgaactctttttagtgccccaaccctcttacactctcaagcctctggtaaccactcttttactctgcacttctatgatttcaactttttaattttatttatttttagtttttatttattttttgagacagggtcttgctttttcatgcaagctagagtgcagtggcacaatcacagctcactgcagcctcaacctcctgggctcaagcaaatcttccacctcgagtagctgggacaacaggtacacaccac

SEQ ID NO: 461265 - DNA, 613 bp, Homo sapiens
ctccagccatatgaaagggatgagatttgatgttgattttagggattttttttcatccagcagagcacaagtgatttatcacccagggcttgattaagtaayattttcattcatgaaccgttaagtgtgttatgaaagatgtagaaataaaaaagataatttctccacagtcaagaagttcataatctcatgaaggtgattatgctatagtaaacatgatgacaatgatgatgaccatagagaaagaggagaaggaaaggtagaaagaagaaaagaggtgaaagggaagtagagaaggagagaaggagaaggaaatgacataacatgcattaactatatacatgccaattcctgagctaaatatgtcacacggatttttttttcctttttttttttcagtgcccatggagggaaacgctcttattattccccttttacagatgaaactagtttccaaaaattaaataagttacttagagttacaaagttggcagtctgacttcacagcttagatttaaatttatgctatctctatctttcttagtatgacatagtgattaagagagcagagaccatggggttagaattctaggcaattatgcctaattgccaa

SEQ ID NO: 461266 - DNA, 613 bp, Homo sapiens
ctccagccatatgaaagggatgagatttgatgttgattttagggattttttttcatccagcagagcacaagtgatttatcacccagggcttgattaagtaacattttcattcatgaaccgttaagtgtgttatgaaagatgtagaaataaaaaagataatttctccacagtcaagaagttcataatctcatgaaggtgattatgctatagtaaacatgatgacaatgatgatgaccatagagaaagaggagaaggaaaggtagaaagaagaaaagaggtgaaagggaagtagagaaggagagaaggagaaggaaatgacataacatgcattaactatatrcatgccaattcctgagctaaatatgtcacacggatttttttttcctttttttttttcagtgcccatggagggaaacgctcttattattccccttttacagatgaaactagtttccaaaaattaaataagttacttagagttacaaagttggcagtctgacttcacagcttagatttaaatttatgctatctctatctttcttagtatgacatagtgattaagagagcagagaccatggggttagaattctaggcaattatgcctaattgccaa

SEQ ID NO: 461267 - DNA, 386 bp, Homo sapiens
caagacatactaaacagcagcagaactctattctaccctaactgtagtctccaccaccacatgtaaagaaaagattagcgatatctcaggacatatattggactatatacatgcataatttggttacaatgaaaacagttatctaatttactgattagatatctgtttatacaacagagttgctaatctgcacttgtacatttgaarcaggggaggggtttagggagggtagaaaacttgaggtatatggcagagtggagagagagggttgtgtagtggaaagagctgcagtgaggccagtgcgctctcatttctttgggtggcagtagatttgtgcctcatcatggcccagtggacaataaggaagtaactgtgctttagatgtc

SEQ ID NO: 461268 - DNA, 621 bp, Homo sapiens
aaggaaaggaggaaaagaaaaatgctgtatttcaagttcctcttccaacattggattttttttcctctctctcctctttatttaaatttaatctctttgtaggtgattatttattctactttaaatgaaatatgcataagaaaattgatacatgtttgcaagttacagtaaattttgtaacattggttctgacaatctccttaataatgaatgtgtatgtgttctgatccagaactagatttcattgtgtgatacctgttaaaagtttggatgatatttactatctttatttgtattctctttacatatggacaattaaccactctagaaagctcatttcaattctaatagagattttaaatgtgttgtgatgattctrtgattcatgctacgaagtgctctaaaataaatacaaaatgcaactatctttaatactctgaaattattcattattaaattaaagtagcattcattttatgctggttttaatagctaatttaactatttaaagaagctactttaaaaaataagacacttctttccatattacgtggtgggtattctcaatcttcatccccaaccacattctcccagaatttgggttggttaaaatttagtatt

SEQ ID NO: 461269 - DNA, 605 bp, Homo sapiens
tttaagatgaaacaatttgttttagaggtgggcaattcttaaaaagaccagtagttggagttggttacacacacacaayagttatgtttccaatgtggaaaatgcacccagtttctaaaattcagcaaatgattttcatttggtagatgttcaaacatattaattattctgggagtgccaaaataaattttaaaaaaacttttctgggcaaatttgacacccaaaatttggtcgtatgctgctctattaaataataattatatggattaatccattgtattcttatatataaattatttacaatatatagtaatttatatttacatatgtgtacacaatttatatttccatatatgtaaaaaattattttattttttcttatctaaatatattagtataatatagaataagtatataacagaatttggggagttttctagaactatgacccaaactcaaacatcctaaattcactccctaatttatgtaaggctgtttttaagcttatgattatgtaaggctgtttttgttttgttttgttttttgtttttttgtatttttgagatggagtctggatctgctacccaggctggagtgcagtggcg

SEQ ID NO: 461270 - DNA, 530 bp, Homo sapiens
actcaataaagtgaaagtttaagtctgtcatatttcctgaaataatgaaaatcataggtgaatatggtgtattgaaaagactaaggcataaagaggcaggagacaaggatcacttacccctaattcttctcctgataccagctgtttgaccttggtttaactactcattcatttataaatctattctgaagcaatcattatgtcccaggcactcttcaaaggttatggttgactcatctgaaaaatgaggagaatacacttcttttcaccttcagatgtaracaggactaggaccattatggtagttttgattattggtcttttgggtttggtgaggaatgaatgttttgcactggtatagaaccagtaagtaggtaattagtgtccattttgctcctaggcatattttctaggaattacccaagaaagcattttgaccactagaacatcaagttcctactttttcttctttcttctttcaagtacctcttctcccatttggactcatttttcttctcttgccataattt

SEQ ID NO: 461271 - DNA, 600 bp, Homo sapiens
taatgtcctacagtgaccactgaaaggatcaatgacattggagctactggagaggttaaaagagaacatttgtgaagagtagtaaccaggagaggaaacctttatctatcttaaaaatggtatgaaaaatataaaatggtattaatccttaattcacaatagagaagagatagaaagttccattttaatcagtttttctaatgactcactatgtattcatgagaccctgaagatgtcatgcgctctgaagattcaaggcatagtattgtcaaagagatgattaataaagtggtatctttatttataagaaaagtaaatcaattctgagttattttgtcttaccatggtttaagaaatcctctcatatttaggaagccatacataggtcaaataaattcccctatgatattttagattttggttgaaaaaytcatctaagtctttctcaaactcctatagattacacctgcagcatgatatcttccatgaatccatactccaataggactttaaagcaaacactcacagaaagtggcatgccttagaagctgaaggcatagctctaagttctgtctcccatatttaccacttgtttacatt

SEQ ID NO: 461272 - DNA, 582 bp, Homo sapiens
tgatatgacaagtagacagaaaaccataaggatataaatttgaacaatactatcaaatatctacttgacacagaacattcaacccaacaatagcagaatacacattcttttgaagtgcacacaaagcatttaccaagatacacagtattctggtccacagaacaagtctaaataaatgttaaggattcatgtcactcaaagcatgttgcctgatacaatggaattaaattagaagtcaatgtagaacaatatctgaaaaacctccaaatattctgaaactccacaacttggccccaaacagcctatggtcaaggaaaaattcaaaatgaaaattttaaagtstttttaagtgaatagaaatgaaaatgcaacccatccaaatttgtgaataaccctgaagatgtacttaaaacaaacgtatagcattaaatgcctatatcagaaagcaaccatggcttcaaatcaatgatctcagcttacaccttaagaaattagaaaaagatgagcaaattatagacaaaataatagcagaaaggaaaaaaaaatagcagaaaggaaaaaaaatagcagaaatcaacgaaa

SEQ ID NO: 461273 - DNA, 603 bp, Homo sapiens
gaatcctggtagacttctttgatagaaattttttctaygtaatccatttagaaagcgactctaaaatttgtatggaaatgccaaatacactgaatagccaaaacaactttaaaaaataagaacaaagttggaaggttaacattacctaatttcaagacctattatacatccaccataatcaaaacagtgtggtattggtgtaaagatagacaaatagatcaatggaacagaacagagtctagaaatagttgcacataaatatggccaactaatccttgacaaaggtaatttagtagagaaataatagctttttacaacaaatgatactggaaattttggatactatattcatacacacacacaaaaaaacacctaacctccctcaacctgaaaaaaactacttgagtccatacattgcaaaatatacaaaaattaactaaaaattgatcaaagacctaaatttgaagcctaaaattacaaaacttctagaggaggcataagaagaaacctttttggccttgggttaggcaaagatttcttagatgtgacagcaaaaacatgattcataaaagaacatataaattggacttcataaaaaaacaa

SEQ ID NO: 461274 - DNA, 437 bp, Homo sapiens
cgtcttgctatgttgcccagactagtcttgaactctcggcctcaagtgattctcccaaggtgctaggattgcaggtgtgagccactgtgctggccttattggtttttattaaatacaatttttgctacttagaaatttcagaaaacacaattttcaaaattacctgtgattgcatcccccgatttaactactattaatgctttagagtttttcctccaaagtgcacgagttactttccatgaaaaaatgctctcacacttactatatttaacaaattaggtttgtccatcttacttttttgtggtcttatttttttccatagtgtttgccatctttccacatmaaattcagagtgatatcatgcctttaatagctaatacatttaatttttactagaggaagtatactctaatgtatgagactttcattttagaaat

SEQ ID NO: 461275 - DNA, 607 bp, Homo sapiens
gaggctggaggatcatcctaagcccattatgtcaaggctacagtgagctgggatagtgccattgcactccagcctaggtaacagagtgagaccctgtctgtaaaaataaataaataagatttgttagttttcttgattgttttgaaaaaccctacttctggcaaggtgtatataggctgctycaggaacatgcgcacagctgcctaccctgtgcctttcttgttaaaatgtagcataccattttaattcttctgaatttttctttttactattttgtgtatgtatgtgtatttttatggtggttgctgtagggtttataaaatgcatcctaacatcacaaatgatttcagattattaatattaacttctgttaaaatgcagaaatttcactccagcatagcttcatttcctcctccctctgttgtgctatttttatcattcatatatatgaatatataaaatatattaaaaaagagaaaataagatgcatatatgcatctatatatgttataaactcaacaacctgtagttttattgtggttttaaatgatattatttaatgaaattaagagaaatctttatactaaccaacatatttatcatatcc

SEQ ID NO: 461276 - DNA, 364 bp, Homo sapiens
acatagcccgggcatgtgtgagagggcaagtgcagagccggtcgcaaagccgcgcagcttaccttgaattcgtatttgagcccctcagaggcgcagtggagtccggacagggctgcggcaccgccgaggagtgagctccctgcgagtggggaagggggacgcatctctgcccttattagtctctcccagtgtgaccctcccaytccgcgaggacagaggactctgcaagaaggtactcagccaactcaggcacaggttttctttaatgacagcgatgtcgccttagagctgggagtaatgcctttcaggtttatgttttactagcagtttcacagataaaatgacggttggatgcaaatgccta

SEQ ID NO: 461277 - DNA, 595 bp, Homo sapiens
ggcttggtttttctcagtgtccacagaagtattttgtgattttaaatacatctttccatgggttggtgcttccartcttggcttttgaactcttttgggatccctttgaatatgtgaaagtgtcattttcctgcagatttctgtgtaggtgcatgtatgtgtgtgtagagagagtatatatatatttgtaggcatatatagtaggtttatatacatatataggaggtatatatggatacttgtaggcatatatatttgtaggtatatatacatatatagtaaatttatatgtatacatatagtgtatgcatatgtatgtgtatatatgaaaaacagaatgatttatagaattcagaagagtaaaccaggcattagaaaacagataaactggttttacatttttatttcagtattgccacagtgggagaaataggataaattatattattgatccacaatggtgaaaatcatcaagcttaaaagttaccttagaaccatagaaatacacttcacatatcagagctcacagatcaaggaataaataaaatcaggcaggcaaaaaataaagatgttaagaaaaatgttaaaagatagc

SEQ ID NO: 461278 - DNA, 431 bp, Homo sapiens
ttagaccatgaaaaatgatctaactcctaaatgtttttaaacaaccaattctatctacaacatttttaaaaagaataatgcaacattggcgtatcataaatgatcacttggctcatatgttatgtaaagtttatgtctataaaattgagcttctctttgttgtaactttttactggaacatttattttcaatttagaacygatttagcttattccatgattctcatagaatcattttgtaaaaatccccttgtgctagcctgggcacagtgctaacttctttacatagttcatcttttttaactccttcagtaattttgttgtcctatttttacagtacaataaggctatgaacaaatctctgatgtagccaggatttgcacccagatctgtctcattccaaagttcagagtcacattcactatgctctag

SEQ ID NO: 461279 - DNA, 636 bp, Homo sapiens
gaggtctgagactgtgttgcctccaattgctacacagtgatctattgtagaagataagctggcaatagaaagaagtattcattttggtctatttatcacattaaattctttctaggcttttttattttgaatccttatgctaaaactgtgttatcttcatattgtatatatataaaataagatttcttaactgctttcttgagattttttttaatttactttttgcaataggatacaataaccactcaccaaagtgtcatttgaaagagaaacaagaatatttattctaattaattctggaaattataatatgtttgattactggactggtgaaatattttcttactgatctgctatgccaaggaaaacatattctttctctcctgtatatgtgtgtaattatgtgtatgtaataygtatgtttgcatttaaaaatctatttctgcaatattaagaattgaaccttgtcttatattacgtaaaatttttaaagattctgtactcattggcagttgagttatggattatgaagaagacataatgtatttttcttcagggtgggaaaaaacaccaaagaagaggaaaagaaaacctccaaaggcaaagaatatttttcttttgtttttaatatatgac

SEQ ID NO: 461280 - DNA, 621 bp, Homo sapiens
aataatcgataaaaacaacaaatacgccttcctaaagtgacttaaattatgctaaattgaagcagcaaaattagtactagctcaaatttcaaactttctttaaaagaaaaacaatgtttaaaaagtataataaaatgtagcattgtgtttatttatttttgtgaaacactatgcstgaaacttttaataaaaataaatacattggcccacccagtggctcacagctgtaattccagcactttgggaggccaaggtgggtagatcacctgaggtcaggggttccagaccagcccggccaacatggcgaaaccctgtctctactaaaaatacaaaaattaaccaggcatggtggggcgcctgtaatcccagctactcaggaggttgagacaggaaaatcgcttgaaaccaggaggcagaggttgcagtgaacccagatcccgccactgcactccagcctgggtgacagagcaagaccccacctcaaaagaaaaattaaaaataaataaataaatacattgttttttatctaacccaaaatgttaaatgaaacaagacatttcaagtaaaacttggttttgcccacacttttagcacaagtgtaaagtgaaaatctttctctgc

SEQ ID NO: 461281 - DNA, 621 bp, Homo sapiens
aataatcgataaaaacaacaaatacgccttcctaaagtgacttaaattatgctaaattgaagcagcaaaattagtactagctcaaatttcaaactttctttaaaagaaaaacaatgtttaaaaagtataataaaatgtagcattgtgtttatttatttttgtgaaacactatgcgtgaaacttttaataaaaataaatacattggcccacccagtggctcacagctgtaattccagcactttgggaggccaaggtgggtagatcacctgaggtcaggggttccagaccagcccggccaacatggcgaaaccctgtctctactaaaaatacaaaaattaaccaggcatggtggggcrcctgtaatcccagctactcaggaggttgagacaggaaaatcgcttgaaaccaggaggcagaggttgcagtgaacccagatcccgccactgcactccagcctgggtgacagagcaagaccccacctcaaaagaaaaattaaaaataaataaataaatacattgttttttatctaacccaaaatgttaaatgaaacaagacatttcaagtaaaacttggttttgcccacacttttagcacaagtgtaaagtgaaaatctttctctgc

SEQ ID NO: 461282 - DNA, 552 bp, Homo sapiens
acaagctgtaaagtcagactgacttggttcaaatcccatatctgccacttactagctgtatgacttgagcatgctactaaatckctctgtgcctcagtttcttcatctgtaaaagacatgttaatggcatataacagtaattccacaagggtagcctctaagaaaagagagacaatgaccattgcaatgagtacaaaatggaaaaagaataacaaaattcatgtggaaagtaaaaaatccatccattggtctttattgtttttaacatcttcctttttaaaaatccacattcccagcaagaaaataaaagcaacttatcaggaacttaagtatatattactcagttatatgcataaatttttttgatcaagaaaaagcaagtaaataaatacccctactctcatgcatgaaggcactggttctcaaagtgctgctccagagcagcagcagcaacagcatcccctgggccttgttagaaatgcaaattatcttgccccaccccagacttactggatcagaaattttgcgaatgggtccagcacttggtccttt

SEQ ID NO: 461283 - DNA, 552 bp, Homo sapiens
acaagctgtaaagtcagactgacttggttcaaatcccatatctgccacttactagctgtatgacttgagcatgctactaaatcgctctgtgcctcagtttcttcatctgtaaaagacatgttaatggcatataacagtaattccacaagggtagcctctaagaaaagagagacaatgaccattgcaatgagtacaaaatggaaaaagaataacaaaattcatgtggaaagtaaaaaatccatccattggtctttattgtttttaacatcttcctttttaaaaatccacattcccagcaagaaaataaaagcaacttatcaggaacttaagtatatattwctcagttatatgcataaatttttttgatcaagaaaaagcaagtaaataaatacccctactctcatgcatgaaggcactggttctcaaagtgctgctccagagcagcagcagcaacagcatcccctgggccttgttagaaatgcaaattatcttgccccaccccagacttactggatcagaaattttgcgaatgggtccagcacttggtccttt

SEQ ID NO: 461284 - DNA, 552 bp, Homo sapiens
acaagctgtaaagtcagactgacttggttcaaatcccatatctgccacttactagctgtatgacttgagcatgctactaaatcgctctgtgcctcagtttcttcatctgtaaaagacatgttaatggcatataacagtaattccacaagggtagcctctaagaaaagagagacaatgaccattgcaatgagtacaaaatggaaaaagaataacaaaattcatgtggaaagtaaaaaatccatccattggtctttattgtttttaacatcttcctttttaaaaatccacattcccagcaagaaaataaaagcaacttatcaggaacttaagtatatattactcagttatatrcataaatttttttgatcaagaaaaagcaagtaaataaatacccctactctcatgcatgaaggcactggttctcaaagtgctgctccagagcagcagcagcaacagcatcccctgggccttgttagaaatgcaaattatcttgccccaccccagacttactggatcagaaattttgcgaatgggtccagcacttggtccttt

SEQ ID NO: 461285 - DNA, 359 bp, Homo sapiens
tttaaaccagtctttatgagaaggcaataatttaaaaacaaaaataggagcagaattagagtagattaataataatatgaactagacctgtgacctccaatatttgtgtttcctgcccttaaaatttctgatctagattccttaaccatctcaaagaaattctgaagaaaaaatggtaaatgaaggaaaagctgttcacaacacatattctctgatgctgtctcctgattatagtctyatattctttatctgggtggaatgtgcatcatcaataaaatgtacatgtatttcatttctgacctcaaattttttttcacatagtctgataaatgtttattccttacaaacagccatggtac

SEQ ID NO: 461286 - DNA, 580 bp, Homo sapiens
agcacagagttgaaagaggtgcagaggccaatctcagtagcaagtcatagctgacagaatgtgtagaatgctggcatagcaggatgagatatgtcatttcatgtctcttgagaaacatgacaaccccatagatgtagcacacttctcattgatttctatttatcctttaaactagaataggcagcacaacacagaactgtagtagtctatccaaacattttcccttttatatttacattttccatgaaaataaattcaatgaaacctgaacaataaacctaaataaagctaatggaaatgattaaatctatcaagtgaaatttaatttctcattggtttatactcctctttataaattctggaaccactggacatctattggaatgttcagtggtgtaaattctggaaccattgagtatrgaaatgttgaaaaattgaaaatcctcatatcatccctatgatacttttgatccaatcctctacagttttaaaacaagagtccatgatttgtcattttgttctgttataaatttatgtgacacatggaggtttttgctaattattagataggatataagtc

SEQ ID NO: 461287 - DNA, 598 bp, Homo sapiens
ggatagctaaggatctctctgtcctacatttatggggcaaatttatgcatttgtatgattttgtttcctggacatatattgctctcaagaaaatttacagtggcatgggtgcccgatggagcactagtacgggctaaagtcactcttttcacaatatattcarcttgaattttgaatgatttcccccatattggaaagagtcaggtacaattaaataattaaatccaagatagataagaaaggaagtaaaagaacatgtaatccttaactgtgttaaaatttccacttcaagataagtgaattgtgtcattagttaggcaggttaaggtatagggcatgctccagcacttgaaaatgcagagtgcaatagagaagttgggaacaaagagtgagcaggaagctgaggacaagcatacaggagaaaggtaacttgacagcaaacattggcctcaatgagaggaacaagtgtttaaagacgactcaaacaagactcaagtaagcattgacaccaacttaatctcaaatgcagggtttagcagcaagggaatctgattagttgttcaatttgtaagttggcagaatccccaccccttcacat

SEQ ID NO: 461288 - DNA, 564 bp, Homo sapiens
actgtaatatattttacttgtaatattttttactctgcctcctgttgttcattttaaaactactccctagttcaggtccattttgctttttactattatgatagttttccagtggattccctacctccaaagcatgttatttattgttgcaacatttattcttaaaatgtaggagtaattatgtcaccttcctgcttataatcctgaaaggcttcctatgctttaccaaattaaaaataaaawccttgtctcacatcttgacagcagctgtatcctactctttaactttatttttcatcatttataccagagatgaggacagtttttgcatcacttgtgcccaaatccctgggtgcctgtcaagatgtgtatttctaaggtacgttttttacctactgaagcaaaatctgtaggtgtggaggcttagaatttacagtttcaaaaaccttcttatacactttaaagttgtagaaacattatccaaaattcagtcaaagttgtcaatttgctgattgtcaaatatggcctatgccttcttgcctcttctctttattcatgctcctc

SEQ ID NO: 461289 - DNA, 594 bp, Homo sapiens
agcgtattcaagaaataattagacaaataaactatagcaagaagaatgatgrttagatatcaggaggaacttgatatcactatgaagtctataaagtcataaaaataatattaggaataaaaatattagaaataatattagaataagtatatagtctatagaagaaaaaaatcttttcagtctgcattatgcaaatgggtcaaaagcacataccacttatgtcatgtgaacagatataaaatagggcttactaggggaaaacataaaaagaaatagtagagggtatacaaataactcaaatctcgttgctaaggtcagacaaagatagtttgcacacgctatgtttgacagtccagataagactttcctcctcaacattctgcagatgtataggatggagaatcaggaaacatctatatgaccatgtaatggtggaagctcctgtttgagcaaatggcattgttagaaagggataatttctggaacccaatatatggtaaccgccactttttcagttgcactaactctgacctgtagaatctgctcactccctagctgaatgccctgaatcacagtcaaaaaagcatagcaaag

SEQ ID NO: 461290 - DNA, 581 bp, Homo sapiens
aaaaaccttcctctattattaagaaaacattttataaggctatagataccatagatagtgattccacttatggatcttggcatattgaaacattctggaaaggattcaccattctagatgccattaagaatgtgtggttcatgggaggaggtcaaattatcaatattaacaggagtttaaagaggtctgatttcaatcattatgattcattttaaggtgttcaggcttcggtggaagaaggaaatacaaatacggtagaaataacaagagaactagaattagaagaarggcctaaagatgcgattgaactgctgcaatctcatgataaaacttgtatagataaggagttctttatgaaggagcaaataaaatggtttcttaagatggaatgtacttcttgtgaaggtgctgtgaacattgttgaaataacaacaaattatttaaaatcttacaaaaacttagttcatgaaaccatggcaggcttaaagggaattgccttaaattttgaaagaagctccactgtgggtaaaacgctgtcaaacagcaacacatgccacagagaaatcttgtgtaaaaggaac

SEQ ID NO: 461291 - DNA, 498 bp, Homo sapiens
attatttattcttatgggtcaatacatgtcttgatcatggtaatgtatgtatgggtggttagtggtagctaacaacatctactctcttaaaatctattatcctgagtgtatatgtatatgtgtgtatgtatgtatatacaggtgcatgtgcctagaaaacaagcaggatgggcattcttaaatttaargacaaatataaattcatgcatttatgtataacaactccaccaaagaatctgatgaggcaccaactctattgaaagcttcttaaagtcaaatacttttgctgcttaatttgcattgtggagagcaaagaaaaaaaattcactgtgtggttactgaataaatgctttctgaacccaaattaaccttccccatattttgcccatcagtcttatttcttctgtctgcaattacacagaaaaaaagttataggtcttatacatgacatccctttgtgccactatcaagccttctattcagtaaaccactcatttt

SEQ ID NO: 461292 - DNA, 498 bp, Homo sapiens
attatttattcttatgggtcaatacatgtcttgatcatggtaatgtatgtatgggtggttagtggtagctaacaacatctactctcttaaaatctattatcctgagtgtatatgtatatgtgtgtatgtatgtatatacaggtgcatgtgcctagaaaacaagcaggatgggcattcttaaatttaaggacaaatataaattcatgcatttatgtataacaactccaccaaagaatctgatgargcaccaactctattgaaagcttcttaaagtcaaatacttttgctgcttaatttgcattgtggagagcaaagaaaaaaaattcactgtgtggttactgaataaatgctttctgaacccaaattaaccttccccatattttgcccatcagtcttatttcttctgtctgcaattacacagaaaaaaagttataggtcttatacatgacatccctttgtgccactatcaagccttctattcagtaaaccactcatttt

SEQ ID NO: 461293 - DNA, 614 bp, Homo sapiens
caggtgattctctgcttaagaggtatttttctctaaagtggaaaacattcttgttttataaagcctaacaatttcataggcaggaagtattccattgatagaataaagctaagttgtctttttttttcctcctcatttaatggcctcaatttctataataaattgtcacatgcattaggcattttaaattatgttttaaacttaggaagtctaaaattaagcacagaaaaattaggtgaggctagaaatatagagaggaagccaaatggcttaaaattctctagcttttatactacttgcctataagtttctgagtctctgaagcattaatgctacatctggaccagcactgttagaaagttcattataattcacaacagtgattggccttgtctgcacttacataaactgtaacagcatctgcctttattttctgaagctgcagtcttctcataaaatgtctttttagggaaaatcaagattcaragatcatagtcatttcattttccagcagaaaagaaatacaaagactgttagggaacaatggatctgcctcattcagtctcatctcactgcagtgctgagggcttcagagtttatggtgaaaagaccca

SEQ ID NO: 461294 - DNA, 506 bp, Homo sapiens
tcaccaaagcaataaatcctgtcctatgagacctcttggaagatggtcaacctttgccatgtaggacccttcccggatatcaggtggacaggcaggcttctgaatgtatgcccctcattacctcttggtagccttatgtcacagttaattgaatattgtcatattgtattattcataatacattgttattaaagtacagatgtgtggagatatgtgcattttagcaaagttaaaatataagttatawcttgaccagacaaattatgttttctttccctgcaatcagcaaactggtgtataagtaatacaagaaccctcactaaactgcaaagagtataacagaactcgtttacatttattttgcacgatgactgtaactttgattttcccatttgtttttgtattacccaaggaatgacctcatcccctggcttttcctaaggccagaagcctctgtgtccagagagcaactagtccattttcagtctgagtattagcagtataca

SEQ ID NO: 461295 - DNA, 617 bp, Homo sapiens
attaattaacaaatccatggtgagctgagagttgaaggctgtgccctatgctggcagtctcaaataaagcagctaagagagaggagagaaaccttaggctccagcagaagccttcctgtctctgatataccagctcaggataactctgttaaggagtcattttgctgaacaaatctgcagagccatcacaaagagagtaagaaaaaaaacatacacmtattttaaaaattgtttgtggcctaagaacctcaagcaatttcaatttccaagggaaggaattcagggcactatactccataaattcttaaatattttatttgctgctagcagtcaggtagaaaaaatagcccaggacactgtcttccaggaatatgtgagttttctttacgaaaatgaggcccacctggcagtagaatgagcttcccataattccagtgacctgacggtaagggattggctttccttagaaactggggccactccctggtgcgtgggagatctggtgcatgggagaactcagagcatctttgtgtatgctttctgaatgtgtattctaaaagtttaacaggtgatgaaataggtacccagaaaggggcatgtcaattcatgtctagctt

SEQ ID NO: 461296 - DNA, 644 bp, Homo sapiens
acaggcccctgagctctgtgagtaaattcttgaacagctgagagtgctaccattttgtcatagccctaagggtgcagatgatgctgaaagcgtgttggccaaatctgaaygatgaaagccaattacaaactagaaaatgaaaacagaccccagatgcaaggagatgagacagttaaatttacttcctcttttctaatctgagaggtttcatgttgaagaaaatcagtgttggggttgcaggagacctaaacacagtcaccatgaagctgggctgtgtcctcatggcctgggccctctacctttcccttggtgtgctctgggtggcccagatgctactgggtaagtaaaatatttgaatattggtgtgggaatggagctttgcttaccttgggagaaaggaccagaaggaaagaaacatggactaattctggccctccaaagaagcagtattcaggtggaataagaagggtaggtataagaaagtttggtgtacaggattgaattactttctgaatataaaaatcttccatcctgaaagtcccctctgatcatgatatcctctctagctctaatctcaactcttttctttcacttgtgagacaagttttcttaaaagaatagtttgcacttgctatctccacttc

SEQ ID NO: 461297 - DNA, 644 bp, Homo sapiens
acaggcccctgagctctgtgagtaaattcttgaacagctgagagtgctaccattttgtcatagccctaagggtgcagatgatgctgaaagcgtgttggccaaatctgaatgatgaaagccaattacaaactagaaaatgaaaacagaccccagatgcaaggagatgagacagttaratttacttcctcttttctaatctgagaggtttcatgttgaagaaaatcagtgttggggttgcaggagacctaaacacagtcaccatgaagctgggctgtgtcctcatggcctgggccctctacctttcccttggtgtgctctgggtggcccagatgctactgggtaagtaaaatatttgaatattggtgtgggaatggagctttgcttaccttgggagaaaggaccagaaggaaagaaacatggactaattctggccctccaaagaagcagtattcaggtggaataagaagggtaggtataagaaagtttggtgtacaggattgaattactttctgaatataaaaatcttccatcctgaaagtcccctctgatcatgatatcctctctagctctaatctcaactcttttctttcacttgtgagacaagttttcttaaaagaatagtttgcacttgctatctccacttc

SEQ ID NO: 461298 - DNA, 644 bp, Homo sapiens
acaggcccctgagctctgtgagtaaattcttgaacagctgagagtgctaccattttgtcatagccctaagggtgcagatgatgctgaaagcgtgttggccaaatctgaatgatgaaagccaattacaaactagaaaatgaaaacagaccccagatgcaaggagatgagacagttaaatttacttcctcttttctaatctgagaggtttcatgttgaagaaaatcagtgttggggttgcaggagacctaaacacagtcaccatgaagctgggctgtgtcctcatggcctgggccctctacctttcccttggtgtgctctgggtggcccagatgctactgggtaagtaaaatatttgaatattggtgtgggaatggagctttgcttaccttgggagaaaggaccagaaggaaagaaacatggactaattctggccctccaaagaagcagtattcaggtggaataagaagggtaggtataagaaagtttggtgtacaggattgaattactttctgaatataaaaatcttccatcctgaaagtcccctctgatcatgatrtcctctctagctctaatctcaactcttttctttcacttgtgagacaagttttcttaaaagaatagtttgcacttgctatctccacttc

SEQ ID NO: 461299 - DNA, 644 bp, Homo sapiens
acaggcccctgagctctgtgagtaaattcttgaacagctgagagtgctaccattttgtcatagccctaagggtgcagatgatgctgaaagcgtgttggccaaatctgaatgatgaaagccaattacaaactagaaaatgaaaacagaccccagatgcaaggagatgagacagttaaatttacttcctcttttctaatctgagaggtttcatgttgaagaaaatcagtgttggggttgcaggagacctaaacacagtcaccatgaagctgggctgtgtcctcatggcctgggccctctacctttcccttggtgtgctctgggtggcccagatgctactgggtaagtaaaatatttgaatattggtgtgggaatggagctttgcttaccttgggagaaaggaccagaaggaaagaaacatggactaattctggccctccaaagaagcagtattcaggtggaataagaagggtaggtataagaaagtttggtgtacaggattgaattactttctgaatataaaaatcttccatcctgaaagtcccctctgatcatgatatcctctctagctctaatctcaactcttttctttcacttrtgagacaagttttcttaaaagaatagtttgcacttgctatctccacttc

SEQ ID NO: 461300 - DNA, 595 bp, Homo sapiens
caggatgttaggcccaaggaaggaaatgctatctttagagagggagctgggttgctttcccgtcaaggaaaggagaagaggctctctgtyttaggattagtagatacacacaaacacacacacacacacacacacacacacacacacacagccacaatttgtttttatcaccattaaaactgcaatcttgatgaatattgagtaagcaaaaatttcttataaatgctaagagatcgtcaagtgtgcgatggcttgcttttttgagaaggcacccattttatgtaacaaggctgaccgcatgcggatacacatgaccccagtcttcttactctagttgtttctcaaaacttgtgggcttctagagcatagtcacagttgtgatttataattatcatctatagaacatttactataagtgcagatctctgctgagcagtcacagagaaatttcccttcttttgtctcatcacctcctcatcatggtccaaatacaagttcctctttctattaatatttccagcattgccaccagtgccctcctgcatccgtgagttatcagtaactgtttgtcaatttttacaattatgttcttaat

SEQ ID NO: 461301 - DNA, 625 bp, Homo sapiens
gcaaatacccggccaagagtggtggctcacacckgtaatccgagcactttgggaggccaaagtgggtggatcacttcagccagggaggagggagagagtaacatttctaagttttacggcttgctttggggaagagggattttggtttctatgacttgcttcaggggagaaggaagggtaaaggacagaagggcaagagaatgtcagagagaccttgcttctgaggtcttccaatctcccttagttcaaagcactcagcaggccaaagtgccatatattggggtattgtttctgtgccccagctggcaacactgggtaaaattggaaattagtcaatgcttatcatcattaggaacatggtggttagaaccaggaagaacttgtaaaaagtatccaattattggtgaaagaacagacaaatagattaatggaacagaatagggagcccccaaataggctcacatgaatagagtcaactgatctttcacaaagaagcaaatgcaaagcaactgagaaaagtcattaaagaccctcgtttcagaggagtactgccccacacccaggaggaaggaatggtacacaggccaagaagaatctaaacacacaggccttgctaagttttccc

SEQ ID NO: 461302 - DNA, 625 bp, Homo sapiens
gcaaatacccggccaagagtggtggctcacacctgtaatccsagcactttgggaggccaaagtgggtggatcacttcagccagggaggagggagagagtaacatttctaagttttacggcttgctttggggaagagggattttggtttctatgacttgcttcaggggagaaggaagggtaaaggacagaagggcaagagaatgtcagagagaccttgcttctgaggtcttccaatctcccttagttcaaagcactcagcaggccaaagtgccatatattggggtattgtttctgtgccccagctggcaacactgggtaaaattggaaattagtcaatgcttatcatcattaggaacatggtggttagaaccaggaagaacttgtaaaaagtatccaattattggtgaaagaacagacaaatagattaatggaacagaatagggagcccccaaataggctcacatgaatagagtcaactgatctttcacaaagaagcaaatgcaaagcaactgagaaaagtcattaaagaccctcgtttcagaggagtactgccccacacccaggaggaaggaatggtacacaggccaagaagaatctaaacacacaggccttgctaagttttccc

SEQ ID NO: 461303 - DNA, 625 bp, Homo sapiens
gcaaatacccggccaagagtggtggctcacacctgtaatccgagcactttgggaggccaaagtgggtggatcacttcagccagggaggagggagagagtaacatttctaagttttayggcttgctttggggaagagggattttggtttctatgacttgcttcaggggagaaggaagggtaaaggacagaagggcaagagaatgtcagagagaccttgcttctgaggtcttccaatctcccttagttcaaagcactcagcaggccaaagtgccatatattggggtattgtttctgtgccccagctggcaacactgggtaaaattggaaattagtcaatgcttatcatcattaggaacatggtggttagaaccaggaagaacttgtaaaaagtatccaattattggtgaaagaacagacaaatagattaatggaacagaatagggagcccccaaataggctcacatgaatagagtcaactgatctttcacaaagaagcaaatgcaaagcaactgagaaaagtcattaaagaccctcgtttcagaggagtactgccccacacccaggaggaaggaatggtacacaggccaagaagaatctaaacacacaggccttgctaagttttccc

SEQ ID NO: 461304 - DNA, 591 bp, Homo sapiens
caaggttatattagaagggagggagagggatggatatcaggctagtacatcatattctatttgttgagttaactgagcatagcaattgttgagttggaaaaaactcagaacctactgtggattcaagttcaagaaatcattctttcctacatacaacagcattgctctgtagccctgagctaagagagcatcacgaaatacagtcttcttgctgtttataatcgtaagcaaactcttggacctgggaggggatgaatggataatgtctgtctgacttgcttctttctagttagtaccaactacctcccttcttcctgtgattgttcttagaataggataaaaaatyttcccttccctagatcttacagtctccccttcccccaggcctttctatttttcaggattttactctaatcacaccaccgaagaatcaagaaatctttaaagtgtattagagtagctagttgtggcagcactaaaacacggctgcaaattctttgacactctctccatccagaaatgaggcctacatcctctacccttgaatctgggtgggcttataacttctggtgattagactacagcagaaag

SEQ ID NO: 461305 - DNA, 591 bp, Homo sapiens
caaggttatattagaagggagggagagggatggatatcaggctagtacatcatattctatttgttgagttaactgagcatagcaattgttgagttggaaaaaactcagaacctactgtggattcaagttcaagaaatcattctttcctacatacaacagcattgctctgtagccctgagctaagagagcatcacgaaatacagtcttcttgctgtttataatcgtaagcaaactcttggacctgggaggggatgaatggataatgtctgtctgacttgcttctttctagttagtaccaactacctcccttcttcctgtgattgttcttagaataggataaaaaattttcccttccctagatcttacagtctccccttcccccaggcctttctatttttcaggattttactctaatcacaccaccgaagaatcaagaaatctttaaagtgtattagagtagctagttgtggcagcactaaaacacggctgcaaattctttgacactctctccatcmagaaatgaggcctacatcctctacccttgaatctgggtgggcttataacttctggtgattagactacagcagaaag

SEQ ID NO: 461306 - DNA, 574 bp, Homo sapiens
tctcttgaaactacctttgcagaattgtgtctgaaacagtgagagagatctaacttaattgactccatcttgcttctaacctccaagctgtctttcctcattcttgggcataggctgaactaactttgggagaaacttagtttatagtttgtggtttaaagcaaagatgataacagccctttcccagggcagacctcctttttttctgaagactagattgtctttgtaggactaacattagccacaagatkggaaattatggtttaggaatcatgcaggtggaggctacaagattctgacccttcctaagcactgatcctaagatcggtgcttgagatattttgcagaccctgcacttgatggatcacctggcaacacccagatcaataaactggctcatctgatcttgtggtgcccacccaggaactgactcagaacaagaagacagcttcaacttcctgtgatttcatccctgaccaatcaacactcctggctcactggcttcccctccaccaaccaagttgtccttaaaaactctgctccccgaatactctggaagactgatttgagtaat

SEQ ID NO: 461307 - DNA, 535 bp, Homo sapiens
aattcttgttctggggtttggtattaggaagcccaytgttgccatatacccaagccacattccataatgttatgttatcaggaacgatgctgatatttagatttccatcttcttcatgccttcatgttatctctcacttggttcataacatggaaaagcaaaatgttattttggggctgtgcctgtgtattaagctattgtctctcccctctaaacatatctttttatcttctgttttgtgatgctgaggctggacctctgtagaccaaccatgtttctgactttgctgccagctccaaagagactgcaaggctggaggaggaaaggggatgtgctccttcctgtctgctccctgctttcagcttcttgctcctatctgccactccctaacaatgctaggctacaccatttcagtgtgcagtttctccagcactcgtaggaccaatctcattccctcaaagacaccacccccgagaccagccagtgtcaccctcttgggcatatggacccagcccagaagggccttcagccagct

SEQ ID NO: 461308 - DNA, 532 bp, Homo sapiens
ttgctcctatctgccactccctaacaatgctaggctacaccatttcagtgtgcagtttctccagcactcgtaggaccaatctcattccctcaaagacaccacccccgagaccagccagtgtcaccctcttgggcatatggacccagcccagaagggccttcagccagctcaggcagcactaactgaacttttctcagcaaacggaaaataccaacaatgcaggacaggcaagcccccaaactggggcttatcccaggaaggttcttgacttcaaccaggaaataattcaagggcgacctggtggtgttagacagcaatcatcttaatgaagcgtactgctcctygcagagcagggctaactcataggcagcaatgcagagtcagcaacatatgggctctcggaactgtgtttattcccactttcaattacaggcaaattaaggggtgagctagtgcaaattgaggggtgggttatttagaacttcctaggaaaggggcagtaacttccggtagttgccatggcatttgtaag

SEQ ID NO: 461309 - DNA, 651 bp, Homo sapiens
gacttgagcatccccacgaagcctgatcactggggacgtcactgtggttgctgcacagcgagggctgactccccctccctgcttccacaccaccgtgaccctctctgtggtcacacaaagccataacaggccacgagggagtgactcactgatcctggaaacagacagtgaccctgtaggtcccggggaatctctcctatagtgacatggacaacaaagagcactaatggatgtagaccaaatcctgtagagaaagccagcagtacctggttaaatgggaactggccttttcatttgtaacaacaaagctatgctacacacttggctctcagaaccaccctgacaactaccctaaccaaatgacagtgacacttgagaatgtaaaataaccactgacaaccaaacgccaaatgccaaaatttgagtggagataggccacagttaagaataaaagacacagggcacctcactgtttaaggacagactctgaagccaggtctcctattgaagactgcttaagattaggaattccaggaaaagtttgcrtctgtgtctatacacagatgactaaaggaaggaagaagaaaagagagactgcctttgggggaagagctaggctcaaggctgtgacaactctttacctcccctctc

SEQ ID NO: 461310 - DNA, 508 bp, Homo sapiens
tcgctgcaaattagcatcgctgctgtaaactaatcagtatgcaaaatgagcaaatccctcaggggcaagaaataaaaacatgcagggtagaatgttagaacagcactcagtgccaatggggattcaggtgtccaagatcacaccyggaacccacagtgtcatacaggtctccatcggcaccaccccagtacgggaaaaatcttggccttttccatcaataatttaaaggaggataaaatccattcataaaataagatcctacatcacagaaaaaattagctccaaattgcacaggaaaaatgttttcattccattgacaatttttaccatgtgactgtttgaatgcatatttcaggaatattgaaaaaagaatgaagaaatcgtctaggtgtctgtggttcctgtgccggcttgttaaggggtgcacgcctgtgatgagcctacattgccacctccttcccagcccagcactcaggccccctgggccctctagtgcccttggcattgc

SEQ ID NO: 461311 - DNA, 628 bp, Homo sapiens
tgttctttttttaaagaagaaacataagactctgaagggaaaggggagttcatagaccctaaagtttctgaacggatacaaataagatggagaagaactctccttgatttgctacattttctaccagagagatggcatatccagattttataaaatggagaataaagaatgagtagctagagtatgtgatttatttgaaaaatagtggtcatctggtgtttgtcaaggtatcaggagataaaagcaaatggaattagacttcaggggctctgttgctgaaaggctttttgagtttgttttttactgctgtgtagcatctctcaaatctttgtggaaactctgatatgtctctgagactatatttaaaatgctaagacctgtcatggagagccggcagggctggaggcatggagagaagaggataagcgcaaagacaggtattttttatcttaaactctgcattagctgctacagccatcggtacagctgccaaatggaactgaaagaaataaagaaacaraaaaaagagtaaggagtacagagaaaacaaaaaaataggcagcatttaaatgtaggatgttttatttggaagtataaaaaaaacaattacagacctagacctattggt

SEQ ID NO: 461312 - DNA, 609 bp, Homo sapiens
atactctgtagttgtgcatgcggtgtgcagcctgagtgaccctacatagaagtccctgacacatcccagagagaagtaccagacacatatgcagaataagcattagcatattaccaatttccagggtgtaagaaagaaggcaagcagttcattgcaagaaggaagaagttggtggtatggatttcattggggtgagctataaatgttttgagttctccctgttcctacacctacctgccatgcatgggagggaatgcttccctgcttccccctcgcattaaaccaaatgaagagggttttcagagcataactcagagaaaatggtccttgcctctgaatttggagaatgcagtgaaaaatatgtactttgagatataagtctgtcatataagcacagtattccaaacattatcggtttgatgcaaaacacaaaggaacttttatatctgagagcataaaccagtaccacattgatagttttagttaccatgtcacaaaattgccttatattcmgtttccaagcaactaaaatatccaggtatttccagatgaactgaaatttggtcacatatattgatactttatatgggcaaataattttttgaaaat

SEQ ID NO: 461313 - DNA, 574 bp, Homo sapiens
atctatgtcttaaagtcccatcaggtggcatttccttaatcaagtctgagttacaacatgaatgcgtaagtaataaagttatgtttattctttttttaaaggtartataggtcacatggttttttctatgagcttgagtatcatctacctctcaaatgaacaatcctagtcttctgttcgagaccatgaatctacttataacctaagtttaagaatcataattttcttgtctatacaatttaattcaaaggttgtggagaggaacagaataaggcaattcagccagcagtttatgatgcaggaatacttgaagaccagtgctgctatgcttccatggaagagccaactcaaagtcatttaaaccaaatgaagctataaaaatgttttggagatggtggctcttaagggtgagagggcatggagtatactatttactctgtcagaaaacagatgtgtggtaatgaatgaaattcctgctcttcagttttgtttttcaccagccacattattgagtcactgtgagtgatgagggttgggagaagaacagttggcacaattgagaacagcttttatt

SEQ ID NO: 461314 - DNA, 520 bp, Homo sapiens
gtttaagctaagtgttacaggatgaatagaagttttccaagtagtcaagggtgaaagtatgtttccactagagggatagcgcaagagtttggttttgctagagtttaaggtagtggagaaagtggtcacacaggctcgggaaagacactggggccaggtgatgagggcccctgaatgtcacactaaggagtttgaactctgtcatactcagtgggtctttaccacgtgaggaaaagcagaatgacrttaatgaggtgatgctcttcccacctctaaatgtggctgacccagaatagagaccctagaaagctcagtcaccactgatgcgtccaacccttcacttatacatgaggaacctgaggccagagatcaagtcattctgcaaaacacctgaccaagcatgaacaaaacaagaataggttatctaagtctagtgcttaaacttcctccacattcagatcctcctttaaatccaggctgcttcatctaagccctgcattccatgtactggattccaatg

SEQ ID NO: 461315 - DNA, 580 bp, Homo sapiens
  misc_feature (1)...(580): n = A,T,C or G
taaaagttaatatatttgtgtatgtatgtgtgtgtatatatatacatacatatgtatgtatacacatttaatctgaaatttaaattgtatcacagaagaacacacagaggtgtatatatacatgtttgtacattaactgtaaagtagaaatttgacatttgacatttggatcaagtatgaaaaagctggytttatgtgcaatcaaagcttagctctgggcacctgccatcttacttcaaagtaaagcttatttttgattattcagagaaaaaaaggaattaaaaaataagtaaaaccaatctattaaaaattatttttgtttattattttatttaggtgaaacaagaatctacttcttttaccctttttcaattttttacctttaaaacttttaacagcctaactcacattctaaatactgaaagtgcataacataggtcagtgttaattttttaaatgtcaattcaacttagtagaaaaaagcaattgatgtgtttcagttacatcnntcacttgttttaacttgttatgttagcacttgcaattctgtttaattggcatgtaatttaattgccacata

SEQ ID NO: 461316 - DNA, 546 bp, Homo sapiens
acttctcagttttcctggaatagttcaaaattctgcccctttcccccccatttcctaatttttagtaacacttctttcactatgtgtccaagtttggatgataaatttcayggtcaccctacttgatgtccagaattcaccagggcttcgtgaagaagatggagaggagttattacccaacactatcaacaagaacaggccctttgacactatactgtttgtgtgggcatggataaaagagatttcagtgaaaacttagtatatcaattcaatgctaaatgttgcaaatatataatgactgatgggttaaccactcaatgggcttgctgtttctttatcagctcagttgtacttgcctgagaaatctgaaaagaaatgagaaggaaagtcataagcaactggtgaaggaaatcagaaagaagagctttagttatgcaggggcatgaggccttgttcctgttcttcaaatggaactgaattttcatggaaggttttgatacttacttgaggatagcagaaagggccgagaaaccttattaaagtttc

SEQ ID NO: 461317 - DNA, 564 bp, Homo sapiens
gttattaatttcattatatgcacacaagtgtaaattgtttagtgatttgtaatttccattccagaaataatcagacttggagaggcaaaacatatcatcttatatgtatatacttttgggtgcattcgagtcaatagtgttattctagtgaacatcacatgggctgggtaaraaaaaaagaagcaaaaaaaaagtgaaagagagaaaggaaactctaagattttgttcagtttaaggtacagaaagtgaatcttacagcagtgaatgcgcttaattccatgctaactttctctccttttattcacctttgattttagataaattatgcttcagatatttgctgttaaaagaacccaaatagtgccagaaattaaactgttcatcctaaaatatttgcagaggtttgaatcattatcacacaaatactgttaggacattagcaatctatgcaatagattataatatccatagattttcttgtgcagttctgcaaaacttcattatttccatgactgttgaactggaactatttccagttactaagaaggcaggtcgaatattatg

SEQ ID NO: 461318 - DNA, 571 bp, Homo sapiens
acttattctaatggaggaaaagctaataacgtacctacaaagcaattaatatatgtgagatggtcagtatgatgaacacaaaacagggtaagggagatacatggagtgaagggagacaagagtcatggggagtgtgttattttatgcaggatagttaggaagggcctctctgataagatgtsttttgaacagaaaccagaaaaaaaatttctttcttgaaatagcttttgagatagaggaaaagcatatacagaaggcatgaagcaggcacgtgtttgttgtgtctaaggtagcttggccagcacaaaaggaatagaaccatgaaattggagatggggtcgcagagaccatgaggctaagccatgtagagtcctatggtcattgcaaggactttaacttttatctgagaaggatgggaagcttctaaagcgggttttgagcaatgacttgtcatgatttaatagtaactcttatgggaaaaataaacaagggtgtgtggggaaaatatcagaaactgctttaatccagagaagagataatggtggaatgagttagaagtaattttaaaggt

SEQ ID NO: 461319 - DNA, 544 bp, Homo sapiens
gagcaccaaactaggcactgtgcacacactgtctcattttatcctcaccattcaacatgrtaggtattattactacttcaattttacaggctgggaaattgaggcttagatacacaaaaagaaagtagcagaataagaatttgcacccaggtttgtctaattccaaagctcaatctttcaaacactatacaaccttctattctgtacaagttagcctacccactaaatggttgtggatagtgtgtccaaagtatcagaaagggagagctgctttgtgtccctcatactcaagagacaaagcttggatagggggcacaataaccatgggttggggtacctgtggaagggctggcttcgggaaagggacaacttctaggtatcttcttccccacctcatatttttgctgcccaagtgtttcagaaatccaagagaataattacagggctgttatagcactagacttcatgtttgattattactgactaaagtgaatcttttacaaaagatttcacttagagcacttttaccagctcaccattcttc

SEQ ID NO: 461320 - DNA, 602 bp, Homo sapiens
tacatacaaatatttatgtaattttttacaaatatgtaagcatataattcatgttactcttgaaattatttttttcagtttaactgtgcacatattaagtatcctaaaaagtcaatacgtgtatgaataacttattattgctaatagcaatatgaaagtttatggtatgccaatttattgttttgtgtactgatatttctgtatctttaggctagatttccttaagtatttgcttatgtttgattttagtaaatcctggcagattgctttctgaaagggtcatataattcacattcctaacaaggatataagagaaagcctgttttgtgatacacccactcacctggattttattaatcttatttatgttaatcttatggacaaaaaaatactagcttcttgttttagtttttattaccctaactcctggtgggttgagcatctttccttatattcattgtccatttatatttccttttctgtgaatattttgcttgctttactcatttstctattggatattatggctattgaggggctctttattaggcatagtttatcacatgctgtcatgctttcattcaatttttttttacttcatt

SEQ ID NO: 461321 - DNA, 334 bp, Homo sapiens
gttaatactatttgcataaaagaactaatggaaactctataccttaactccattcccctgctttttaactttttatggtttccatttatatattattgcattgactatgtctggaagatwttttgtagttattatttttataggtatatttttagcctttctacttaggataataatattttacacaccacagttagtgatataatattctgtgcttttctgtgtacttactatgaccagtgagtttttttcatttaggtaactatttctcattaatatccttttgtctctgattgaagtgctccctttagcattttttgcaggatagttctga

SEQ ID NO: 461322 - DNA, 623 bp, Homo sapiens
tggtgcctgaatgtgcaaagtgctatgtagaatacatacagacacgctactcaaaatttacgtgtggaatgggctttatatttcagttgaaatggatttttctctatatgatttaagagaacaatgcataaaacaatatttataaatcagtgttgatgggcacacataatgtataaaatgtaatttgtgataacaacataaatgggaagggaggaaactrtataggaggagagttcttgtatatgattgaagcgaagttggtattaattcaaactagatcgttataagtttaagatgttgattgtaaccactaagaaaataactaaaaatatacagaaaaggaaaagagaaagtacaatacaaaaagtcaactgaacacaaaagaaggcagttatattgaaattgaggaataaaaagcatgtaagacatgcaggaaacaaatagcaaaatggctgaattgaagtcttccttatcagtattttaaatgtaaagagactcttcagttaaaaagcagagattggtagatgaatgaagaaatataatccaactattcactgtctataagacactcactccccatcattttaccccaaagcctccaaaattgtctcagtgtttgcagt

SEQ ID NO: 461323 - DNA, 432 bp, Homo sapiens
aaacaaggatactttgacttctttatttcaaatttggttgccctttatatctttcgtttgtctgattgctctagctaggacttcttgcactatgtttaataacagagktggcagtgggcatccttattgtttttcagatcttagagaaaagcctttcagttttttctcatttagtatgatactagctgtaggtctgttgtagatggcttttattatgttaaggtgtgtttcttctatcctctgttttttgagggcttttatcatgaagggatgttgaattttatcaaatgctttttcaacattaattgaatgatcaaatggtttttaatccttcatcgtgttgatatgatattttgcattgcttgatttgtgtatattgaactatccttgcatcatggagataaatcccactttgtcatgataaacaatctt

SEQ ID NO: 461324 - DNA, 481 bp, Homo sapiens
tttaataatgaacataaatagagagagatatatagatatagatatatattcattcagtatatctgcttcaggatgctgtcctcttccataatactatttattacaacctcttatatggaaacatcagtgcttcacctgaggaagtgtatgyagtggcaaaattagctggacttcatgatgcaattcttcgaatgccacatggatatgacacccaagtaggggaacgaggactcaagctttcaggtgatcagagattttagacctgcccccttcttgtatacttctttcaaactctaatttgtcagagccattttttagaaaatgtaatgagagacttcaaatgtagtgctcgttgagtcacatttgattgggttactaatctcctagccctcactataaccaattcaacatattagtaactattctcaagtcatgcaagtcttttttttttcacttgcagctgcaaacactgtaggtgttt

SEQ ID NO: 461325 - DNA, 481 bp, Homo sapiens
tttaataatgaacataaatagagagagatatatagatatagatatatattcattcagtatatctgcttcaggatgctgtcctcttccataatactatttattacaacctcttatatggaaacatcagtgcttcacctgaggaagtgtatgcrgtggcaaaattagctggacttcatgatgcaattcttcgaatgccacatggatatgacacccaagtaggggaacgaggactcaagctttcaggtgatcagagattttagacctgcccccttcttgtatacttctttcaaactctaatttgtcagagccattttttagaaaatgtaatgagagacttcaaatgtagtgctcgttgagtcacatttgattgggttactaatctcctagccctcactataaccaattcaacatattagtaactattctcaagtcatgcaagtcttttttttttcacttgcagctgcaaacactgtaggtgttt

SEQ ID NO: 461326 - DNA, 647 bp, Homo sapiens
aggaaaagaaagaataagtggacttgagaacagatcatttgaaattgtgcagacagaggagaaaagaatgaacaaatcttctggaatttaagggataccaccaagagaaccaatatagtcacggaattttcagaagaggagagagaaaagaggcaaaaagcttatataaagaaataatggctgaaaacttccaaaatcttgagagggaaatcaacatccagattcataaagctcaaaagttcccaaataggataaaccaaaagaggacctcattttaagatatacaattataagtgcatcatataatgaaacacattacaatcaaattaycaaagccaaggacaaggagagaattttgcaagcagcaacagaaaagtggcttatctcatgtaagagaacctcaataaggctaccagtagattcctaaccagaaacttttcaagccaggtgagagtgggatgatatagttaaacttctgaaagaaaaaaaaaaaaactgtcagccaagaattctacacctggtaaaattatcttctgtgaatgaaggaaagataaattcttcctgtgatggttaatactgagtgtcaacttgattggattgaagaatacaaagtattgatcctgggtgtgtctgtgtggatgttgcca

SEQ ID NO: 461327 - DNA, 622 bp, Homo sapiens
  misc_feature (1)...(622): n = A,T,C or G
atacaacaccccctcaagctgagaggttgggggatgctgttcacattctctaggtttttaaatataaatatgtacaaagacttgagcagggaatggacaatgcagttgtgaagtcattctcgaccccacatgaaagtggggtaagctcttcttcatgcttcaagaagttacgcaggaaaaccaaagtcatcttcctgtaggctgatcacagtgagatctccattttggctccaagagccagactcaaagttaatatgattttctacagcttanacattccaattaaatacctgcatttatttttttggaagaaagtaagcagaacatttatttcagttatagaaataagcatgtctttggcttgtattaaagactgttggtctcctaagctctgttcaaaattcacaacacaggaatttacagaattttcataaaagcaattgaaattacgcatctccatgaactcccagggtgaacttctattaacaaaagawgttttgctttactcacacctgctcagttctccatgggggctcaagcgatacacattccaatagagcagcgtcaataaaatcaaataaaaatgaagttccagggaagggagtggagatataaaatatta

SEQ ID NO: 461328 - DNA, 296 bp, Homo sapiens
aaaacttaggagtaagttaaaaatatggcttggaaaaataacacagggccaagttaaagttagcagacaaaagcacagggccagaattcccaaccagttgctggatctgcactgtaaactccattctgggtcctgctgtgactgttgccaagacatcatgactcagcactctccctgagacccaccacatgcaacgcaaggagacaggttaccccatcacccatttcatgcacacaccaggatgcagatgcactcagtgaaaagaggrctgagctttctgcatttggaaaactgcc

SEQ ID NO: 461329 - DNA, 613 bp, Homo sapiens
atttttctttaatcttttggaaaaaraactgattttgatataatctgtgtcataaaacataatacagtaactcttaagtatacaaaagcaattattgctgttaactaaatggagaattttaaaaattctgtgaagagacatttaatgaaacaggatctacattaattttaaagatttccgagttctgaaatgaacacatatgcccagaaaaacctaattgaacaccaaatttatctatcgttaagtatttttattccttacaaatacttttaatgtatgaaattagaattttatgttacagaataaatgctaatttttttaaaagtcttactttcatatctattacctgtgtttattcattcaacatgtattatcaatcacgtgctctgtgcaagatactataatatagactttgtaagagaaaaatatcagtaaggcattgacttttaataatctttaaattcaacagaggagatcagataggtagaaaacaagtaataatagtacaagatagaaaattctaagtatagttcaattttaattatgaatataagttctaaataaatatttagtaatgcaaatttggcaacattaacattaattataagtataa

SEQ ID NO: 461330 - DNA, 613 bp, Homo sapiens
atttttctttaatcttttggaaaaagaactgattttgatataatctgtgtcataaaacataatacagtaactcttaagtatacaaaagcaattattgctgttaactaaatggagaattttaaaaattctgtgaagagacatttaatgaaacaggatctacattaattttaaagatttccgagttctgaaatgaacacatatgcccagaaaaacctaattgaacaccaaatttatctatcgttaagtatttttattccttacaaatacttttaatgtatgaaattagaattttatgttacagaataaatgctaatttttttaaaagkcttactttcatatctattacctgtgtttattcattcaacatgtattatcaatcacgtgctctgtgcaagatactataatatagactttgtaagagaaaaatatcagtaaggcattgacttttaataatctttaaattcaacagaggagatcagataggtagaaaacaagtaataatagtacaagatagaaaattctaagtatagttcaattttaattatgaatataagttctaaataaatatttagtaatgcaaatttggcaacattaacattaattataagtataa

SEQ ID NO: 461331 - DNA, 428 bp, Homo sapiens
tagtattataaacttaaatagaataaataaaagtgtaaattaactgcctgtgatgtaaagagtatctaaaagtaggaaagcacaatgaacacggtacagatctaaattttgactgcttttctcttatcagcttatattcctatcatagattatagtctatccaagagaaggctaaagccatatttaatggccattatatgtgtgaccgatggtacagaccattcaatgattttaataaagttttattgaagcttaaaatacwtgtttaaatgttcttaaacaatgaatgtacacttgctgaaatatcacaaagtaaacacagtcatatcaccattattcagatcaagcatttttcatattactagcaatccacaaaccctgccagaagcatgtcacaatcatggccaactctcctcaccacagataac

SEQ ID NO: 461332 - DNA, 440 bp, Homo sapiens
  misc_feature (1)...(440): n = A,T,C or G
naatatatattagcatagaaaatgactgtgtgtagggaaaagaatagtgtacagaataatacatttctatgaccctattgttataawttatgtacaatagctttatgtatgtttataagaatagaagaaagcttaggaggatataaataaatcatttgctgtgattaaatatggtaaaattacggggaactttcactgcatactttgaacattttaacagtagttgaatttcctgttttaaaagcatgtataatattacatataatgaaataaagcatttccattttggaacaaagtaattgaatgatagaaaaataattttgtcatagtttatatcttgcaaacattgttcctcaaatttaatgaacaaaaatgtcactggatgagagagttttcttataatgcaggattgcaggctctaccctggaaattcaaactca

SEQ ID NO: 461333 - DNA, 440 bp, Homo sapiens
  misc_feature (1)...(440): n = A,T,C or G
naatatatattagcatagaaaatgactgtgtgtagggaaaagaatagtgtacagaataatacatttctatgaccctattgttataaattatgtacaatagctttatgtatgtttataagaatagaagaaagcttaggaggatataaataaatcatttgctgtgattaaatatggtaaaattacggggaactttcactgcatactttgaacattttaacagtagttgaatttcctgttttaaaagcatgtataatattacatataatgaaataaarcatttccattttggaacaaagtaattgaatgatagaaaaataattttgtcatagtttatatcttgcaaacattgttcctcaaatttaatgaacaaaaatgtcactggatgagagagttttcttataatgcaggattgcaggctctaccctggaaattcaaactca

SEQ ID NO: 461334 - DNA, 585 bp, Homo sapiens
tttctgttctgagatttattatttcctttcttctactaattttgggtttagtttgctttctttttttctagttccctgaggtgtaacattatgttttaaatttgaaattcttctttaaatttccctcttagagcttcatttactgcatcctataaattttgatatgttactatgtcaattttcatttgtctcaagatattctaaaaatttccttcttratatctcattcagaagcacattgtttagtttccatgtatttgtgaattttctgaaatgcctcctgttgttgatttttagactcattccattgtggttataaaaggtagttatatgatttcaatcttctttaatttgttaagacttgctttgtggcctaacatatgaatatcctggagaatgttccttgtgagcttgagaagaatgtgtattccactgctgctagatgcaatgttctgtatatatctgttaggtccatttgatctaaagtgtagtttaagtctgatgttttcttttgattttttgtctggatgagctatcctttgctgaaagaggagtactgaagactccaaatattattgtattgca

SEQ ID NO: 461335 - DNA, 578 bp, Homo sapiens
tacacttataaacctgtcacacttacttcaatatagaaacataacagcaacttttaattggccacatctatatggaaataatcataagaagacaactattatgcatcaagtattttagtatattayttctcgtttaaaaatcacagtcctgaaaggatagtcttatttaatcatccatatgaccccatcaactaggtgtacatcatttcaaatgaggaaactaaagctctcagaggttgaattcccccaaactaggaacatgtaagtcttgctggtccaaagcccacagtctttctttcatgtgattctagatatagagaaattgcttctttatgtccaaaaatagctattaggtaaagaatagaatagagacattgctcaacttagtgctgacttataatttcacgatcgttttatttaatacataaggaatatagatgcaccgttttatcattttaccattgacatttggaaacaaatcaagataaggtgcatagaaaagaattataacaatagatttgaatatacccttaactcagatactgacttttacaagatgattaaatctacagtacagt

SEQ ID NO: 461336 - DNA, 578 bp, Homo sapiens
tacacttataaacctgtcacacttacttcaatatagaaacataacagcaacttttaattggccacatctatatggaaataatcataagaagacaactattatgcatcaagtattttagtatattacttctcgtttaaaaatcacagtcctgaaaggatagtctyatttaatcatccatatgaccccatcaactaggtgtacatcatttcaaatgaggaaactaaagctctcagaggttgaattcccccaaactaggaacatgtaagtcttgctggtccaaagcccacagtctttctttcatgtgattctagatatagagaaattgcttctttatgtccaaaaatagctattaggtaaagaatagaatagagacattgctcaacttagtgctgacttataatttcacgatcgttttatttaatacataaggaatatagatgcaccgttttatcattttaccattgacatttggaaacaaatcaagataaggtgcatagaaaagaattataacaatagatttgaatatacccttaactcagatactgacttttacaagatgattaaatctacagtacagt

SEQ ID NO: 461337 - DNA, 487 bp, Homo sapiens
catttcagcttcccttatttcattttcatcatggaagttatcactgttgttattctctgtctctgttttatccaaccattggatgtaaagttgtccacaagaacagggaccctcttttgttttgctcaatgtagtgccttcctgtgtttagaacagtgacacggaatgactgggatacagtatgtgctcaatgaattgtgtaaaatgagaattwaaaaaaaaatttttaaaggctatactagaatactaggagagcgtaaaagattctttgggaactcagaacagaaacctatagtttaattcctgcagaggataatacttgaatttatctcaaaggattagttgaaatgaatgaagctgattgaggtggggaatccaactcacagaagaaaatatatcaaggaaatagaagaaagcagggtgcatcccagaaaaacatgtggttctgcattatgtgctatggaatcctagaggaggaataggatgt

SEQ ID NO: 461338 - DNA, 492 bp, Homo sapiens
gatgatggttctacagtatagtgaatgtgattaatgccactgaattgtgtacttcaaaatgttaaaatgacaaattttatgttatatatattttaacacaatttggaaaaattgagaatgtaatataccaaaacccattgaattatatgctttaagtggataaattatattgcaatacactgtttaaaaaaagaaaaggaagagaggagaaaaagggcctggtgaggagggttagagagccttcccctgygcacctgtcttccttcacacctgagaccactattgttccagcttttatgggtttacagcctggaaagtggccttgccctttgtcctcacgcaacccatgtgaggtgggcattgaaatatcgttattcgcgctttcaggtgagaaactaaggccctgaaaggttgagtgactttctcaggtggtgattttggctttttcactctctggggtctttccagtgacccacagctctcaaacgtgag

SEQ ID NO: 461339 - DNA, 582 bp, Homo sapiens
tgacttcttgcacaataaatccatcctcctaattattagcttaattaacttaattatcagttagtctaatatttaagttagttggtattctctaagttattcatagtgcaaaagggcccatgagcatgcaaggtcaagaggcctggggctgaggtcacactgatgggtaactgggagttgacaggcattcccaatgagaacatcaggcatgccactgacctgatgtaaaccagctaaacagggctctgggtcagccaggcccctatcctctccagttatcttcgggagagtttttctcaagggtgttgatcatcactgaattgagggaagttgccctatgtcaccatgctggtgctcgcctccatgcccttattcatcctgcctgtggtacccttagccttaaacttcactgaactgtctcctacccaaactttatgactcagctcagtgaygcctcctgctggcagctgtctcaatgggcttgctaatcaactgttcatgtatcagtagcacccagcacatttacctgtggggcaatgcactctataaatatttgatgaagaaatgaatcaattattgtgt

SEQ ID NO: 461340 - DNA, 583 bp, Homo sapiens
gcccagctggtagtacttaaaatttttaaataaccatactatcaggcccataattatatttctagaaacccattctatgaaaattgttgcatgtgtgcactgaaacatatgaataagggcaatcattgcagcattaactataatcacaaaaaatggaactaacctaaatgcccaataatagcagagggaataaacaaatactgacatatgtatactatggaatatcatgacaccattaaaaaaatggagcagacctctagagagtaacattgtgaggcacacaaggcagacaacgaatacaaaacaatcacatgcatgctctttaaacgttgtaagtgcatatgcactacacttacygaaagtactgaaagaacaatacaaaaatactaatagtggtggataccaaagaaaaatgtgggaacgccactctgtatccctctgtactgtttgaatcatttaaaagacaacatttataccacatgatctcacttatatgtggaatataaaacaagtgaactcctaaaaatagagagttttgaaatgatgattaccaggagctgtgggggatgagggggagttgtgg

SEQ ID NO: 461341 - DNA, 572 bp, Homo sapiens
tgaggggttgaggggtcatgagacaagcctctcagatgttaacagatcacggtcacttcagtttttttgaggtcccttgtatattaaaagaaacaatttaaaaaatgggaatcataagaattacgaaattttttgatgtttacattttataagttaaaactttttccagaaaaaatgcaatatagtgcattttaatagtcacaaaatctggaaaaatattaattcacagtcatcctgtgctatagacagtgttgtatagtcacaaggctcagggtttaaggttggacaatgaatattgctttcctttgctcctatawctttgggactgtctgatagatcttatttggggataaagttaaaagtctaatctgagaccttggtgaatgtagaggccagctggctctcctgcccttcttgtctcttctgagctcttccagaaaccaactgtgtgatcttggccactcatactttcatcagggtagaaaatctaacttagtgtctttggctatctttgatttactctcttgctaaaggtctaattgtttaaaacacataaaaaatcaaaactgtga

SEQ ID NO: 461342 - DNA, 334 bp, Homo sapiens
agaaatagggcaaagaaagcattctgtacgtctggactcagcacaaatagctctgaaaaagcaagtctactttacctgaggccctaccttttataaaccctttatccaggatagctttctttttacatttgggggtggaataattattaagccaaaatgttagcagatttcatttttcctatcaattcattgcctaagctttttatttgccttttataaaggtcttttaaaagaggtaataaaaacattgaaatcttttyagaaacttctgcacataaataggcatccctgggttagcctagtttgggagctttcatttttaaatgcacttttt

SEQ ID NO: 461343 - DNA, 562 bp, Homo sapiens
tgagatggggataatgatagctatctcatggtgttgcatatacctaattacataatgcatacagagtgccttccatcagtgctcaataattgacaggaattggttttagtaattctttctaaggacaagagtttcagatatttcaccccatgacctagggttcatcttcaggttgccacttgctagttccttacctggaaatattcctaaataaaccactcagactaaggtaaaagtcatgaggaggccattccagcggagcttccaaacaggtgtgtctgaagtattgatttccttggggtatgagacagccagagccctaggcctgttgtctctggctccaaatgcctcccagtaagcccagtgcgctgtgtcaatattggtcatttgatttatggaccttttctgaaaaagttgggggatggggcactgaggaaaacccatgcttgagaaggggttgctggtgtcctgagaakttgttgctctggattttcctggaggacaggatagagtgtctggcatatggggcactgatgggattcacgccttcctgattcagcca

SEQ ID NO: 461344 - DNA, 597 bp, Homo sapiens
tggttccatctattgatctcaccatactgggggtataatgttctttctttttaaaaaatttctgtctcgcaatcctttccttagtactctctggaagggatttttacttaaaaaaagaaaaaaattaggccctgctctcagcccagagtttaccttacaaagatgtctcagcaagagaatagagaaagactatgactcattgcaataaagtagatattgtgacaagaaagatgttaacatcttaatgaaagccctaaggggaaatttgcataaaacaatctccttgttgcttaaaaagagccactgatgccttatttgaaaaaatcaaaccccaattttgttaaatattcagtctggggatgatttgaagaattttctttatctcctgtgagwtttttcctcgtcagaatcacagatgctgagagttgaagaggcccatcttccctcagcccactctcccggcaggcactgtggtaggaacactgtcttactccttccaggtccctgaagctttttgaagttggggtaaaactagaagatgggccagctcctaggactgggaattttgatagagcaagaaagcccttgctcaagtct

SEQ ID NO: 461345 - DNA, 615 bp, Homo sapiens
ttttttccccagggtttgaggcaaattacctcagggaagaaagcttcagctgcaatgatgttggctctttctgctaaaggaacagctgaattgacagcctacatcccactgggaagtatgtcagtttcttgagtagccagactctgcagctccagccagtggcaggtacaacaggaagtttgagggaaatgttgaaacagaagggctaacctgattaggcctgtcaaacttgcttgcttttagtcattcacttctagttgattttaaaacctatatagctaaaaatcatgtagctaggcaaaatataattaaacttccactcactagctttcttatagataacagctttgatgtaatggtcactatggtaacagttgcctaagttrtttttcaggaacttagggtcagtttttgtccagttcaaaccagctgagaccaccaaccctccaactgagcctacatgagcatcctatgggtgaccttttgctgtcagaggaccaaaaactccactctcagatcacgcaaatgagacatgcaggctggccaattccctattttaagatggtctgaatgaaaaagtttggcttatttaaccatcagccagtcagtaacaaa

SEQ ID NO: 461346 - DNA, 615 bp, Homo sapiens
ttttttccccagggtttgaggcaaattacctcagggaagaaagcttcagctgcaatgatgttggctctttctgctaaaggaacagctgaattgacagcctacatcccactgggaagtatgtcagtttcttgagtagccagactctgcagctccagccagtggcaggtacaacaggaagtttgagggaaatgttgaaacagaagggctaacctgattaggcctgtcaaacttgcttgcttttagtcattcacttctagttgattttaaaacctatatagctaaaaatcatgtagctaggcaaaatataattaaacttccactcactagctttcttatagataacagctttgatgtaatggtcactatggtaacagttgcctaagttgtttttcaggaacttagggtcagtttttgtccagttcaaaccagctgagaccaccaaccctccaactgagcctacatgagcatcctatgggtgaccttttgctgtcagaggaccaaaaactccactctcagatcaygcaaatgagacatgcaggctggccaattccctattttaagatggtctgaatgaaaaagtttggcttatttaaccatcagccagtcagtaacaaa

SEQ ID NO: 461347 - DNA, 451 bp, Homo sapiens
agttgagatagagaagtcacaaagatggggcatggcagagcggagattttccttgtgctgactaactccaaagcctgcccacattggcagatgatgagggcttcctgaaaccagcttgttgggcttaacagtaaaaaaatgcagcctgagattcacttttatatttatttctttattttgactttgacaataataaagacaagaatatacttaagcatattggttcaaatgatattagtaaattcaggattgtgttttccagttccagacaatcagatctcaaccttgatcacaactgccagcatgtcaaactcaaatgccagttttaataaaatatgatttaaacattctttaaaggtatcttatgtactttaagaayggattagtattgcagattttatttaatgcagatatattaaatgcactattgtgggagaatagatgtgatgac

SEQ ID NO: 461348 - DNA, 562 bp, Homo sapiens
tttcggcctccagtgccagtgagcagccccatgccctgtttcttgaatgcaggagcacgttgtgctgaactgataagcctgcagagcccaccaggccctgacctccagcccctcctggggaggcaactctagccccactcattcacaatacccaktacatgtaaagggactggccttgcaagagcagctcctccctgccagtgtgacctcatctagagtgcatcaggatgccccatgagcggcccaggcctcattgtcactgtggacaggatgggcagggtggcctgcaggtagtgctcctgcctaaggaactgcctagtggctttgatgatgctgaggattaattggtctccactcaggcctccttgagggaatcacaagccgggttttagcagggctttctggagtcttcagaagagagtcactggataattggggggtgcctagaaatggtcccagggtgaagtgaagaagctggaattagcctgaagatggggaggtggcagggtgctgaatagatgagggttttccagagtatggatggctgccattggccagaagc

SEQ ID NO: 461349 - DNA, 562 bp, Homo sapiens
tttcggcctccagtgccagtgagcagccccatgccctgtttcttgaatgcaggagcacgttgtgctgaactgataagcctgcagagcccaccaggccctgacctccagcccctcctggggaggcaactctagccccactcattcacaatacccagyacatgtaaagggactggccttgcaagagcagctcctccctgccagtgtgacctcatctagagtgcatcaggatgccccatgagcggcccaggcctcattgtcactgtggacaggatgggcagggtggcctgcaggtagtgctcctgcctaaggaactgcctagtggctttgatgatgctgaggattaattggtctccactcaggcctccttgagggaatcacaagccgggttttagcagggctttctggagtcttcagaagagagtcactggataattggggggtgcctagaaatggtcccagggtgaagtgaagaagctggaattagcctgaagatggggaggtggcagggtgctgaatagatgagggttttccagagtatggatggctgccattggccagaagc

SEQ ID NO: 461350 - DNA, 432 bp, Homo sapiens
ctgtcgaaatcaagtggccaggtttaattgagtgaactgcacttcgcccgttgcctgcaatgccctctcttaacctaagctgatttatagaaactataattagtgagataattttagctatgatggacagagttgaaaagtgtccttatcgcttcctcactgatttactagttgtttaatgctgagcccgggaaagacttcgaccctgttgcatgatcagctaggctgacctcagacaaggcygctgcagcttcaggagacagattctctttgtggaacccaggaaggctgatctcctcaacatgaaggctgatctccttctcaaaatgaacattctgtcccctggctattttcttgctcccaactctcagaactaacacacagtaacttgtttatatttttttttcttctttggggggataggtgggaaat

SEQ ID NO: 461351 - DNA, 588 bp, Homo sapiens
gtccgggtttccctggggaacagagcatgrcttcccaaaagattgttgggccagagtgggagtggtgaggggctagatattttcatgtaaatcaaacacaaccatgctaggtggtaagaacagtatatacatgcaagtctcaagctaaatcagctgtaaacataagagaggcagcttgtgggccattggtttccccaggacagcaagggagcccaactcttagactcttacctccgaataaatctgaccacctgtctactcagtgtcgccattcttattgattgattgattgatcgattgattgagatggggccttgctatgttgctcaggctggtctcaaactcctggactcaagcgatcctcctgccttggcctcccaaagtgttgggattacaggcatgagccactgcaccctactggcatctccattctgatgggaccgtgtcaggcatcttaaactgagtgtatgcaaaacagcccagcctcaccctgacctccaaacttgactctcccccaaggttttctctacctctgagcaacccccaacctcatgcacagccagttgtaaccccaagatacagtcagtc

SEQ ID NO: 461352 - DNA, 570 bp, Homo sapiens
ccctttttaccgcatttcccacctctacccttcccattttgttaaagcatgttttattcgttttatatgcatgtaatattactgcacataaatacaatcatgctatagatacagtgctggttcttgtttttcattctctatgtgttcatgctctatgctccatggagctatgtgtctacctctgatgctcatggtattccatagtgtgtgcctctagagtgctttttttttttttttgaggcggagtcttaccctatcatccagcctggagtacagtggtgcaatctcggctcactgcaacctctgcctgccaggttcaaaagattctcctgcctcagcctcctgagtagctgggactacaggcacacaccaccacacccagcgaatttttgcrtttttagtagagacagggtttcaccatgttggccaggatggtcttgatctcttgatctcatgatctgctcacctcagcctcccatagtgctgggattacaggtgtgagccacagtgcccagccactttcttaatccattccccagtgatgcacatataagttgcctccagtgccct

SEQ ID NO: 461353 - DNA, 570 bp, Homo sapiens
ccctttttaccgcatttcccacctctacccttcccattttgttaaagcatgttttattcgttttatatgcatgtaatattactgcacataaatacaatcatgctatagatacagtgctggttcttgtttttcattctctatgtgttcatgctctatgctccatggagctatgtgtctacctctgatgctcatggtattccatagtgtgtgcctctagagtgctttttttttttttttgaggcggagtcttaccctatcatccagcctggagtacagtggtgcaatctcggctcactgcaacctctgcctgccaggttcaaaagattctcctgcctcagcctcctgagtagctgggactacaggcacacaccaccacacccagcgaatttttgcgtttttagtagagacagggtttcaccatgttggccaggatggtcttgatctcttgayctcatgatctgctcacctcagcctcccatagtgctgggattacaggtgtgagccacagtgcccagccactttcttaatccattccccagtgatgcacatataagttgcctccagtgccct

SEQ ID NO: 461354 - DNA, 570 bp, Homo sapiens
ccctttttaccgcatttcccacctctacccttcccattttgttaaagcatgttttattcgttttatatgcatgtaatattactgcacataaatacaatcatgctatagatacagtgctggttcttgtttttcattctctatgtgttcatgctctatgctccatggagctatgtgtctacctctgatgctcatggtattccatagtgtgtgcctctagagtgctttttttttttttttgaggcggagtcttaccctatcatccagcctggagtacagtggtgcaatctcggctcactgcaacctctgcctgccaggttcaaaagattctcctgcctcagcctcctgagtagctgggactacaggcacacaccaccacacccagcgaatttttgcgtttttagtagagacagggtttcaccatgttggccaggatggtcttgatctcttgatctcatgatctgctcacctcagcctcccatagtgctgggattacaggtrtgagccacagtgcccagccactttcttaatccattccccagtgatgcacatataagttgcctccagtgccct

SEQ ID NO: 461355 - DNA, 606 bp, Homo sapiens
tcccttccagcatctctgccacttggcacaggaggttggagctgccggggccaacgtcccataggacacacgtggaaagtgaggtgtgtaaacaccacgcagtgaggctggggcagggggcctcagctcactttaccccccaagtcaaagcttcctgcatggaggttgtggaagggccaggggtgggacagggatgtgggcctccttcttgggctggacatggacagcagccctgaagagccagagtggtccagggaagtgaggggttcccacagggggtggtgagctctgagcatgggagaggatctcamagaagtgggagaggccagtaacaggaagctactgcaccaggacagtgaccagaatcttcaggcgtgggctctgggacacactggggaggactgagcaggtggccaggcagatcagagagtaacgtgttggaagagacacagtcgcctcttgtctaggaaaagttctgcttggacccactctctcctgctcccctctgcagcccctctgtggtccaggccacctgtggtcagctctccacgcatcgttcttctcggcagcctagcaccttgctgcgaaagggcaggacacaggtca

SEQ ID NO: 461356 - DNA, 595 bp, Homo sapiens
ttgccttctctctctcacttccccacccactgccttagctgtacttcctgggattatttcccaaatcaactgcaatgctcacatcctagtctcagggtcagcctctgggagacccaacccaagacaccagctactgaacagctgccatgaccccaacactgtactctgccttgtggagaagacacaagtgtgtcagctcactgtacagccaggtgcagaaacaagatgcccatggcttgccaggaagctcctccaccccatatcagggagcaagttaaggctgaaagagtccagagaagagaataacctcagaggtggccatatcttggacatcctgggagacttgtgcagggcagcacctatggtgggaaaagatgtggggaaaggagagagggtaaccggtcaggaggcctggcacatgcaaaggtctgggaactggaacacgcaagctctatgtagcgtaagggatgtcttggattcagccatgggcttgtgacttacctctgctttgcagaagctgggagggtgggggcaaatcacttggatgcttggagcctgtatgytcttctctataaaatagaggcaaaatggtgcc

SEQ ID NO: 461357 - DNA, 541 bp, Homo sapiens
ggtctcaaactcctgggttcaagtgattctcttgcctcggcctcccaacatgctgggactatacaggagagagccactctgcctggcctgaaacttactttaaaacacaagtcaagaggacgatcatcaaatccaagtgtgaacaggggacaaaggagtcattttctttttttcgtccaggcaccaataatagttgcctggtacatagaaggcctcagtaaattattgttagaggaatgaaggaaagaatggcatcaataatattcatgaaaaaaatgcaccaactccttatagaagggaagaaaatggaaaggaaatggaaaatgaagctagacaaaacattcagattaataaatcacgaatatccatttatctatccaatttggggaaagcaacagagtgctaggcagccatgattataataccagcccctgttttggttgacaaattaatctgcccagggtttgggaagtgaggcrgcatctcagtatatcattccacaggcccagcagcctcatctgatttcaggggaatagatgga

SEQ ID NO: 461358 - DNA, 559 bp, Homo sapiens
ttaatcctctcaggaggaacccacccaaggtggccctcctccctaactccattgtcaagcaattggggcctgggttatctcttcaattcaggctgcgggccaagcccacctctccacgggtccaagtttccaggaatgtagttctggctcttccgctctccagttgagacctagggcaagttgaggggagcctggaccccttcctctttgaccatccctctgctaccttccctgacagcggcccacctctgctcaagggcctgcttcctgttcctcagtagaaccacttaacccgtttctaatgctcttagataaaagtccaaacttccttaatacctttactgggccctgcaccgtgcgcccaccccctgcctccaaccctccttctccttcctccaattccacctctgctttcagccttgccyagtccccaaagtcctgcccctttcctatatttcatctttgtgcaagcagctcttttctctcagaatgccattggcttctccttcttcttacttgtgaaagatgccactgaatgtccaggcagtggagtcgggag

SEQ ID NO: 461359 - DNA, 571 bp, Homo sapiens
aaggtgtcatggagttgcagagagaggcaggactttgcggcctaacagcctgggtcagatcccaattgcaccccttgcccattgtatctgaacttgggccagacccttggcctctctgagcctcagttttctcatctgcacactggggatcatgacacctacctctcaggttgtttggaagactagagggcagaaggtgcaaagtaaaggcacctgcagaaaggagaagaaggggccccatccctaactttcccttctaacctgccaccaaggcatccagctctcctgatgtcttccatcttctcaggaatgctgagcaggtttgatctcggggatagcagagaccagcactaggctgtccctttattcactgcctcttgtattcattgartggctattactgagcacttactgtgtactctgtctagtgccaggtcctggggatacagaaatggagaagccccatgccttgctttcaaatgtttattatctagaaaggagagagatgtgaacaatcgctgagtgtgcaggtggtgggggacacacatcacaagagcccacagaagaacag

SEQ ID NO: 461360 - DNA, 571 bp, Homo sapiens
aaggtgtcatggagttgcagagagaggcaggactttgcggcctaacagcctgggtcagatcccaattgcaccccttgcccattgtatctgaacttgggccagacccttggcctctctgagcctcagttttctcatctgcacactggggatcatgacacctacctctcaggttgtttggaagactagagggcagaaggtgcaaagtaaaggcacctgcagaaaggagaagaaggggccccatccctaactttcccttctaacctgccaccaaggcatccagctctcctgatgtcttccatcttctcaggaatgctgagcaggtttgatctcggggatagcagagaccagcactaggctgtccctttattcactgcctcttgtattcattgagtggctattactgagcacttactgtgtactctgtctagtgccaggtcctggggatasagaaatggagaagccccatgccttgctttcaaatgtttattatctagaaaggagagagatgtgaacaatcgctgagtgtgcaggtggtgggggacacacatcacaagagcccacagaagaacag

SEQ ID NO: 461361 - DNA, 571 bp, Homo sapiens
aaggtgtcatggagttgcagagagaggcaggactttgcggcctaacagcctgggtcagatcccaattgcaccccttgcccattgtatctgaacttgggccagacccttggcctctctgagcctcagttttctcatctgcacactggggatcatgacacctacctctcaggttgtttggaagactagagggcagaaggtgcaaagtaaaggcacctgcagaaaggagaagaaggggccccatccctaactttcccttctaacctgccaccaaggcatccagctctcctgatgtcttccatcttctcaggaatgctgagcaggtttgatctcggggatagcagagaccagcactaggctgtccctttattcactgcctcttgtattcattgagtggctattactgagcacttactgtgtactctgtctagtgccaggtcctggggatacagaaatggagaagccccatgccttgctttcaaatgtttattatctagaaaggagagagatgtgaacaatcgctgagtgtgcaggtggtgggrgacacacatcacaagagcccacagaagaacag

SEQ ID NO: 461362 - DNA, 574 bp, Homo sapiens
gaaatgttaccttatcttagaagttcttcttacccttgttggatcatgcaagaagtcacaccctcggctgggctcagtggctcacacctgtaatcccagcactttgggaggccgaggtgggcggatcacctgaggtcaggagttagagactagcctgtcaacatggtgaaaccccatctctattaaaaaaaaaatacacacaaaaaaattagccaggcgtggtggcaggtgtctgtaatctcagctactcaggaggctgaggcaggaaaatcgcttgaacccaggaggtggaggctgcagtgagccaagatcacgccactgtactccagagtgggctgcagagtgaaactccgtctaaaaaaaaacaaaacaaaacacccaaaaaacaaaaaacgaagaagtcacaccctcttctgcattcctgagagacttccarcatgggtcaccaactgcactgcccacagggaccaggtaagtgatgcctccctactgaggctggcagggaagacccacacatgctagccttaaagagaaaactgattgtcccctacaggatgtgggcccagggctgcca

SEQ ID NO: 461363 - DNA, 586 bp, Homo sapiens
gctggcccggaaagtgcacctccgcgaggagaaagtggaggtaggcgccggggcctgccgtgggcgcctagcggtccttccccgcgaggtggggccccagtcgggtttgcccagccctgcttggctctccccgcactttaaaaacatcccgatggcggcccgcaggctgctggagggcgctttaggcccaggaagttgaatgaaaacgcggaagcgggagcgagckgctcccctccttttgttggcctgcgcggggtgtcccgccgccacaccaagctccccgggtgccccgggactgggggaagcgcgcctttgatctgaactgttttgtcctccgttgcgcaacaggtctggtttaagaaccgccgcgccaaatggaggcggcagaagcggtcctcatcagaggagtcggagaacgcggagaagtggaacaagacgtcgtcgtcgaaggcgtcaccggagaagagggaagaggaaggtaaaagcgatttggactcggacagctgacggccgcgggacacttgcccgtattacttacctaactcgaaggacttgcacagacagacgatgctactttcttgcacac

SEQ ID NO: 461364 - DNA, 557 bp, Homo sapiens
gaagtcaaattttaaagctccaaaatgatctcctttgactccaggtctcacatccaggacacaatgatgcgagaggtgggttcccatggtcttgggcacctctgcccctgtggctttgcagggtacaccctccctcccagctgtttccatgggctggtattgagtgtctgtggcttttccaggggcatggtgcaagctgtcagtggagctaccattttggcatctggaggatggtggccttcttttcacagctccactaggcagtgccccagtagggactctgtgtgggggctctgattccacatttcccttccatactgccatagcagaggttctccatgacagccccacccctgcagcaaacttttgcctgggcatccagkcatttccatacatcttctgaaatctaggtggaggttcccaaacatcaattcttgacttctatgcagccacaggctcaataccacttggaagctgccaaggctttgggcttccaccctctgaggctacagccagggctctacactggcccgtttcagccatggctggagtggctg

SEQ ID NO: 461365 - DNA, 403 bp, Homo sapiens
gtatccacacctgtggcacctgggctcttgtttggcatccaggaaaaatcaggtcgcatgaacgaattgaagggtggtgaatatggaggattttattgccaatgaaagtggctctcagtgggaggggagctggaaaagggatggaacaggaagacgatcttcccctggagtccagccatccccagccagactcctctccaaagcaaagcggtcaagctgtccctctgaagtcaagctgcttctctccgacgtcaaaccgcagtccccgacgtccagctgyttttcctcttctccccttctctgttctctgctggtggagcctggggtttttacaggtacagaattgggggcagagcaagtgaggggtggttttggaaaaggcaacattccaatgggaaaacag

SEQ ID NO: 461366 - DNA, 545 bp, Homo sapiens
ttagacatttgtgatgtctcatcagagtagtttcctatcaagtccaattattcttccatatttctttaacacttcttcattgagctgcatagcagtttgaatgaaagccaagatgtagaagaataaacatagttagattgaaccaacagtgggcttttttggttgaaactcaggcctgggagcaaacacgaatgataaagttattatgaaggcgggtttaaatgattacacattaaaaattaaattttgaaatgttaagctaatacatttggaaatgggcagccatttaaagatgtatacccataatgtgtattttatgaatttgttccctattaagcgtgaagctctagttccataacttctgggaagcaatggccagtctcagacttaaggattaagaggtacgtgatttttaaatatattaaatgatatmtaacacctggaaaatatataaacaatagaaatagaaactcaggtgtacctacttaagaatttctaaatatgaggttttatttcctctgtagaggaagagtttacattttaag

SEQ ID NO: 461367 - DNA, 600 bp, Homo sapiens
attctgcagcagggaggcgttgtctggggtggacccccctgattcctgatacaagtctaaaccagacagggtcctgtggaaccttggtgggttcarttggctgagagctgagtaacctatgttgatccaggaggagacttatctccagaaagccgcttccaacacctcattccccatttcccaaccttctctgaaccactttgtgcataccaagtccacactattcctgctttgctctgtcagaagtctgtgtctttgagtcatgcctcccagactacactgcagcacttggatggtttggttcatcataacaaggactaaaaagaaaagaataggtaggaagaggttccagtctcttttcctctcaggttaggcccaagtctccagaaagtaagaaaaggtcactgaatgagaacaaatcccagggagtgattgaggcttttgtgatagaggctagttagtttgaagatttgacttaaacactgctttagaagaaggtaggagaatttacaaataataaatatgcaaaacacactttttaaataaatgcatacttagcctcaggtgtctaagattttcattgtttatacaatattatta

SEQ ID NO: 461368 - DNA, 399 bp, Homo sapiens
caggtttatttttctaaaataaatctgtctttgactgttgagccacattttgtgtttctttcctctttaactcttatatttggtgccaaaacctgggatgagtgctgagggtagagctctcttgcaacccaggaaacagtgggcaatggcagctcatcctgagctaactcctggattctgagggtctctggccacctgccccatcttctctcctatttcacttttttgagcaatttgcatgaggaggacaagtaacctgaagggaactgtgaggctctggcaagggctactccctagagtaatcaaaaccctcagtcttgggaatccacctccaaccactggcaatgtgtatttcactctcttccctcttcctscctcaacctctctctctctcctctc

SEQ ID NO: 461369 - DNA, 616 bp, Homo sapiens
ctggggctgtcattgccctcagtgaccactttctcaagctcattttctggtatgacaatgaatttggttatagcaacaaagtggtgaacctcatggcccacacggcctccaaggagtaagatccctggaccaccagccccagcgagagcawgagaggaaaagagaggccctcaggtgctggggagactctgccacactcagtcccccacgacactgagaatctcccctcctcacagtttccatgcagaacccctgaagagggaggggcctagggaaccccaccttgtcctgtaccatcaataaagtcccctgtctgtgctaggccaaaaaaaaaatgctatattaggaaaactcacaaagattactgatcagaaaaagaatagatagcatgatttctctattctcttttttatgctaatgcataaattgtcaagaaatgatgggctcacaacggcaatctgcattccaatgtaggaacactagtctcccttattataattttttttttgtcatgtaagcagaaggacacagctttaacaatggaggaacacacaggctgttggtgtgaaacagtctggatttaggtgccaactgttcacaagatggtgaaactcaa

SEQ ID NO: 461370 - DNA, 616 bp, Homo sapiens
ctggggctgtcattgccctcagtgaccactttctcaagctcattttctggtatgacaatgaatttggttatagcaacaaagtggtgaacctcatggcccacacggcctccaaggagtaagatccctggaccaccagccccagcgagagcaagagaggaaaagagaggccctcaggtgctggggagactctgccacactcagtcccccacgacactgagaatctcccctcctcacagtttccatgcagaacccctgaagagggaggggcctagggaaccccaccttgtcctgtaccatcaataaagtcccctgtctgtgctaggccaaaaaaaaaatgctatattaggaaaactcacaaagattactgatcagaaaaagaatagatagcatgatttctctattctcttttttatgctaatgcataaattgtcaagaaatgatgggctcacaayggcaatctgcattccaatgtaggaacactagtctcccttattataattttttttttgtcatgtaagcagaaggacacagctttaacaatggaggaacacacaggctgttggtgtgaaacagtctggatttaggtgccaactgttcacaagatggtgaaactcaa

SEQ ID NO: 461371 - DNA, 474 bp, Homo sapiens
gaacacacaggctgttggtgtgaaacagtctggatttaggtgccaactgttcacaagatggtgaaactcaactgcccagcacctagagtccttgggcctcatgcaaagagttttccttttcttaggggataaagccacccattgtacagggagctatagtaggcacagcccctcatgttgggaaaaggaaatccctcttttaggccagcttattaaatttctgkgttactttaggataatgacaccccttgtgctatagtcctagagaggtcaatttggacatgagtagcacagaataatttttaaaggcacaggattagatgaaataaactagggtaagaatattcatggataaaagggaaagttcctggactgaatcctggaatagatgtatcaatatttagaggttgaacagagaaggagggaccagctaaatgtactgagtaggagttggtagcaggcaagaggaaaatt

SEQ ID NO: 461372 - DNA, 523 bp, Homo sapiens
caaatggaaggaggctaactaagaaagatggtatctgacaaagagttctatgatttagaagggaaattccaaagagtaaagttctagaaatggcaccaagtcccactgtccatgagggtgattcctgatggatgacaggggtattagggttggggaacaggccaaaggagagcaaagtcagcctaggtttggtcatttactgtggggcrtggctggtgggacagctcttcatgagtctgcccacagtctgaggctgtgttcttggggactgctgggtaagagaagatttcttagactttaatctctgccattcatttagctctgtagtaatttattgagaaagcctccatctatctactaaaactatccaatatgaccaaaataaacatatctcctttctcatttactggtgaagaactggacttgtcaatattaatttgcttccagggtccctgaatctcttatttgaaaactctgctacttttcttggaagtcagtgcattgcacagaatagacattagcc

SEQ ID NO: 461373 - DNA, 603 bp, Homo sapiens
ttttacttctgggttctgaattgcagttataggcaagtagagctgtaccgccatacttcatttttcctttctaaatatgtggtggtagacaccctatatatatatatgtttgggttaagcaaatagaccttaaaagttattaccaggtagtctgctatgggactgctttctcttttggtgttttccatgctaatgttcttttgacccagctcttggctctgtgggttaatatgggcaaaagtgaacctgtactatggtgtgggttcatgcaggaaagtgtccagtcaaggaatgatagaagacttttcaggtctgttggcttaggtagtgacccattctgctgggttccrtcctaactcacagttttcctccttggacggttataattttccagatctgctaatgtattttgatccagctttgccttcctggattaatttatttaataaatatttatgaggccctctatgacactgggcatgattctaagctcttgggaacgtagcagggagcaagactgcctaaggtccctatgcgggtacagataaacaataaaatctacaactgaggttagttgcaggttttggtaagagctaggaggag

SEQ ID NO: 461374 - DNA, 455 bp, Homo sapiens
atccatgaccagctatctctaactttgctgtgagtgggcctctgcccaccttccaattagagaaactgtacctggtcaccttggaattcttgaggtttgattggtttaagctacagattttcttaaccttggagagctgttttgtttttcttttaaatgtagagagtgattcgttagagtgaggcctaagtatctgtaattttgtagaaactccccaggtgattttaatgaggaaacagggttgagaatactgtgggaccaattagggaccmcccattctttcttggggattacagtaagtataaaacataaggctcaaatcctctcctccaccaatattatggaggcaaagggcagtgcaaggtgcaacaggctttgtctgcttctggtagaccacctttcacacaactgctccaaatagtgaagacagtaaaataagagccaggaaaagtgcc

SEQ ID NO: 461375 - DNA, 487 bp, Homo sapiens
aggcattgcatgatttcaggttttggatctaattcccagtccctttataaccatgrcagctggacttcaccttcatcagcatttccttttccctgctcatgggcctctcactcccacattcactcttcacatcacacaaacaagttcattctcaaccccatacctgctgtgtggcttcccttttttcccattctcatcatgataatccaggttcttcaggttcatcaacaccttgaaaagtcatctttgaattctttcttgctttgtcattcaaagcattctgctccctgactccccatctcttcctctctccattctaacagttccatttgcttgtgttttatccatccatccatccgcccacccattcatccatccatgcatccatccattcttccatcagcccacgtgtctattttgtgtcagacactggggagagagagattatatggtgagttactgtcctcgagacatggcagtgtagggg

SEQ ID NO: 461376 - DNA, 587 bp, Homo sapiens
cttcccctccacacactctgaccccacaacaacctcctcacctgcttcagttcaactttgtccctggtgcccctgagactggacttttttgtttgtttgtttttactgttgcttctttggttggttattgactatgtcatcattgaagtccccaaacttgtcctgatttgcctccacttctcaggcacattgagaagaataagagggccagtgattaaaagggagatggagggaaggaaagtggctaaggagatggaagaataaaggaagaaaggatgtgattcaaaggagagaaggataaagaaaaaggaagaggcagttaaatctggggatgtgggatagtacacttctactttttgagctgaataagagctgtattttgacgaagttcacacttgttccctttacttgcccaagaacccatgatgtggcttcatcatgtgatttgaaaggstgaaatgcaaggttgttaatgaccagaatggccaacacacatatagccaggtttgtcttagagaccttcaaggaaattggcactaaagctggtggaggctggatgcatttttgcttgctctcccctgctcaag

SEQ ID NO: 461377 - DNA, 544 bp, Homo sapiens
agttcaggctgtttgatttggtggaaagataaggactttcagggtcaattttctgatagcaggcctagccactaatcagttgactgtgaacaaatttcctcaccaataaaatggaaatagtcaccccacctcataggtttctgatgwgtattaaatgaggtaatatatgtcatatgtagctcatgttgtacatgcctgcaataagggcagagcttattcagccttcaaccacccttcctgaccctcccactactctgcccaccccccaaccccagtttcatgcaactcttctaagttggagatggtgatacctggaaatgaaagggaaaggaggaaagtatgtattaacagaaaccatacctccctccaggttaagcattaaaacatttattgctcatttccttgaactgtgtgaagaaataggagacttaaaagaaaagaaatccttctcttttaggaggagaaatggagagctctagcagttaaaagagacccttaagataaaagagaccacagttgttcagaatcagccactgagatttgg

SEQ ID NO: 461378 - DNA, 559 bp, Homo sapiens
atctggcctcatactgcctcctactctgtttctgctctgtgctgtgcacttgtgcacactctctccctctcactgatgccctctctctctcttatcctctctctttctcattcattcagactttctcattctctctcctcctcattttctctctctctctgacacacacacacaaaccacacaaacacttatacactcatctttacctttgctcccttttattttgccttcactaaaaatcctaaggaagcttccaaacaaaacaaagtccagcacagtctagaaaggcaggatccactggtgaggtctttagggtaatggtgtcctttgtgaatgttgcaaagcaatcgccaagacaaaaagcttcagacataaaagagttgtaggcaagaaagataacagatgtaggattttcttaatagawgaagagaggcccggaggctgaggtggctgcctctcaagttctgagtcagggccagaatccagtctctggacactcctttaagtatatttcacactatgaaattttatgctatttaatatttcctttttgatgact

SEQ ID NO: 461379 - DNA, 567 bp, Homo sapiens
agccattatcaccatgaactcctgccacaaactcattgctctctgctcctccaggatcccttttctcagaagaatagtgacctttaagttttatctcccaggaacagaaagagaaattcaaggctgcaatgtgacaaagagtcttgggtttagacttaacaggacactggtcagttgataccagctctctggkatctgcaatctgtgaacttaaagtagactgggagaaatcttcaagtgcaatgtgaattctgaccttgtgcagtgaatacattcggaaggaaatccacattagcccattatctcctctctcagactatcatttgagatgttgctcctgtcttgcaaggtctagaaatttgcgatgttgacagctctaatcactaagttttatgtgaggtgactttctctcctacccaatatatccaaaacctcaattgcaattttcccctggagagctctggattcctagacaaagaacatcactgaagggaagctatctagtgataactgcttaataatatggcctgtaccacaagagtggggatttctggttgtatgacccag

SEQ ID NO: 461380 - DNA, 567 bp, Homo sapiens
agccattatcaccatgaactcctgccacaaactcattgctctctgctcctccaggatcccttttctcagaagaatagtgacctttaagttttatctcccaggaacagaaagagaaattcaaggctgcaatgtgacaaagagtcttgggtttagacttaacaggacactggtcagttgataccagctctctgggatctgcaatctgtgaacttaaagtagactgggagaaatcttcaagtgcaatgtgaattctgacctygtgcagtgaatacattcggaaggaaatccacattagcccattatctcctctctcagactatcatttgagatgttgctcctgtcttgcaaggtctagaaatttgcgatgttgacagctctaatcactaagttttatgtgaggtgactttctctcctacccaatatatccaaaacctcaattgcaattttcccctggagagctctggattcctagacaaagaacatcactgaagggaagctatctagtgataactgcttaataatatggcctgtaccacaagagtggggatttctggttgtatgacccag

SEQ ID NO: 461381 - DNA, 479 bp, Homo sapiens
ctgtcagttctcaccaggacatcatgggctccgcaccccaccccaaccactggaccctgcctgtcaggtctgtggctgactcttgcacctgagctccctcatctgccctctgtacacgcttcccagaaggtgggggcarggagctcctcatacccctcatcctcctctgcaccattgcccaggctgcgttccctacctggacccaggaatctaagtcctcattcaagccccatgggctcctgtggcttttcccagtgacttcagcttagctccattctctgtacttatatacatctagtctttaggccagtggctgagcactttcctgtgtgttcattcattccttgccaggtaaaccgcagagccacctaggtggagaaaagggacccaaaagtccccaccaggtcaggtttccttgttcttccctctgagcctttgatgtctccatgtggtgcatcgcatgaggtgcagcagagctt

SEQ ID NO: 461382 - DNA, 479 bp, Homo sapiens
ctgtcagttctcaccaggacatcatgggctccgcaccccaccccaaccactggaccctgcctgtcaggtctgtggctgactcttgcacctgagctccctcatctgccctctgtacacgcttcccagaaggtgggggcaaggagctcctcatacccctcatcctcctctgcaccattgcccaggctgcgttccctacctggacccaggaatctaagtcctcrttcaagccccatgggctcctgtggcttttcccagtgacttcagcttagctccattctctgtacttatatacatctagtctttaggccagtggctgagcactttcctgtgtgttcattcattccttgccaggtaaaccgcagagccacctaggtggagaaaagggacccaaaagtccccaccaggtcaggtttccttgttcttccctctgagcctttgatgtctccatgtggtgcatcgcatgaggtgcagcagagctt

SEQ ID NO: 461383 - DNA, 595 bp, Homo sapiens
attcaaatatcttgctcattttaaaattgggttatttttctttttgttgtttagttgtgagtgcattttacattctggatatgagtcctttatcaaatatatgatttaaatttttttcctccagtctgtggcttatcttttcattttcttattgatgtcttttaacatgtaaacatttttagttttgatcatgtctcatttttcgacttttttccttctaccaggaaaatttgggcttttgcctaatccagtgtcatgtatgtattaatctctgatttcttcaagaagtgtatagtttagcccttacatttaggcctataatccatgttgagagaatttttgcttatgtgtgagttaatggcctaaattcgtacgaccaattgattttgacaaaagcaarttcaatggaaaaaatgatagtctttcatacatgcaatcctgagacaatgaaattgtcctccacatgctcagagaaggtcagcatgctgtgtaaagtgatactcatctgagttaccacctattggcatcagagtttgtaaagaatttctcaatatgatgatcacgggttaaataatatgctgtattaggaaaactc

SEQ ID NO: 461384 - DNA, 455 bp, Homo sapiens
agcttattaaaattctgggttactttaggataattacaccccctgtgctagtcctagagaggtcaatttgtatgtgagaagcatataataatttttaaaggcacaggactagatgaaataagctagggtaataatattcatggataaaaggaaaagtttccagactgaatcctggaatagatatatcaacatttagaggttgaaaagaggaggaggggccagctaaagatactgagtagaagttggtggcaggaggaaaattaggaggggatggcatwgtaaaagtcaactggagaaagtgtttcaagaggagcgtggtccactatgatggatgctgctggtgcatcaaatacaataggaagagaattgaccattggttttggcaacatcctaagtaatttggtaagagcaatttcctcgaatatttgggttgaaagttcaactggaaagtacaa

SEQ ID NO: 461385 - DNA, 633 bp, Homo sapiens
attgtgaatccatctggtcctggacattttttttgttgataatattttcattaccttttcatcctcattgcttgttattggtctgttcagggtttcgaattcttcccgatttaagctaggatgattgtatctttccaggaatttatccatctcctctagctttttcagtttatgcacattaaagtgttcatagtagccttgaataatcttttgtatttctgtggtgttggttggaatgtctcctgttttgtttctagttgaacttatttggctctcttcctggttaatcttgytaatggtctatcaattttatttatctttttaaagatccacctttttattttatttatcatttctattttttgtttcaattttatttagttctgctctgttcttgtttttttctttcttctgctgggtttggatttggtttgttcttgtttctctagttctgtaggtatgaccttagattatctatttgtgctctttcagatttttgatgtaggcatttaaggctatgaactttctttttagcactgcctttgctgtatcccagaaattttgatatgttatgccattattatcatttagtttgaagaattctttaatttttttcttgatttcattgttgac

SEQ ID NO: 461386 - DNA, 524 bp, Homo sapiens
atgtaggcatttaaggctatgaactttctttttagcactgcctttgctgtatcccagaaattttgatatgttatgccattattatcatttagtttgaagaattctttaatttttttcttgatttcattgttgacccaatgatcactcaggagcaggttatttaatttccatgtagttgcttggttttgaaggttccttttgaagtttatttccaattttagtccactgtggtmtgagagtgtacttgatataatctgaattttcttaaatttattgagatttgttttgcggcctatcatatggtctgtcttggagaaagttccatgcactgatgaatagaatgtatattctgaagttgttcggtagaatgctctgtaaatatatgttaagtccatttgttccagggtatagttaaatctatagtttctttgttgacttttgttttgatgacctgtctagttctgtcagtggggtattgaagtcccctactattattgtgttactgtctatctcacttcttaggt

SEQ ID NO: 461387 - DNA, 605 bp, Homo sapiens
acataagtttactatttatttgtgtaaatgcaatggagcrtgattgctggatcatatggtaaggatacgttcagttttatgagaaactgccaaactgccttacaaagtatctgtaccattttgcatccccaccagcaatgggtgagcattcctgatgctccacattcttgctagcacttggtgttgtcagtgttgtggattttcaccattctaataggtgtgcagtggtatcacattttcattttagtttgcaattctctaatgacatatgatgtttagtatcttttcatatgcttttttttaagctgtatatcttctttggcgaggtgtctgctcaggtcttgtgaatacctatatcagattgcattccaaatgtaacacatttttagaagttaagagattcgttctgagatttcatatgtacccttcagtttactgtgggcattccttttttcatgtttctgagcaatggagaacagccttttgatattatcttgataatattcttgcttatttcccttgtaattttggatctagacctctaagcccagagacaacttaaaaaattacatacatgtgtatctgggagcaatgttatcaccaga

SEQ ID NO: 461388 - DNA, 605 bp, Homo sapiens
acataagtttactatttatttgtgtaaatgcaatggagcgtgattgctggatcatatggtaaggatacgttcagttttatgagaaactgccaaactgccttacaaagtatctgtaccattttgcatccccaccagcaatgggtgagcattcctgatgctccacattcttgctagcacttggtgttgtcagtgttgtggattttcaccattctaataggtgtgcagtggtatcwcattttcattttagtttgcaattctctaatgacatatgatgtttagtatcttttcatatgcttttttttaagctgtatatcttctttggcgaggtgtctgctcaggtcttgtgaatacctatatcagattgcattccaaatgtaacacatttttagaagttaagagattcgttctgagatttcatatgtacccttcagtttactgtgggcattccttttttcatgtttctgagcaatggagaacagccttttgatattatcttgataatattcttgcttatttcccttgtaattttggatctagacctctaagcccagagacaacttaaaaaattacatacatgtgtatctgggagcaatgttatcaccaga

SEQ ID NO: 461389 - DNA, 552 bp, Homo sapiens
ggaggctgaggcagaagaatcgcatgaacccaggaggtggaggttgcagtgagctgagattgcgccactgcactccagcctgggtgacagagcaagactctgtctcaaaaaagaaaatagaagcgttgtaacatgaagatgatcatatgctatacagcagcccccgcttatctgcggttccactttctgtggtttcagttacccgtggtcaacctcggtccgaaaataattgaaaagttccagaaataaacaattaatgagttttaaattgtgtgccgttctgagagcacgatgtttagtctgccttgccttgcatttgtcctggaaactccaataaagcctctggcccagtgctgtctttgcccctgcttctacctcctcacccaagggtgtacactccacagggtgtgcaggaagcatgacgcaggcatctgcacggcttcctggtgctgcctccrtggccctctgtggcactgtgtgatgccttgtcttggaattgtaagtaatcaattctttctttctatgtcatcagtcacccccataaattaacat

SEQ ID NO: 461390 - DNA, 604 bp, Homo sapiens
ctgtgcagctgtgcttgtttttcttccccgtttcagtccgcagccctgataggggagggggtaagctggaggcggtcactttttttcctgcctgtgttcccccatcccagggagtcctccaagactgtcctccaggagcctacacgtgctgctttcacctggtttcttataaagcagagtctcgggtctgcggagtgggaatgggtcttcatggatctagctgttgaaacatcagaatgatccatgggggtgcaatccaggcagacatctgcctcccccaataggattasaaccccaggggctaggagcagaattgcagtgttaataaacacagatggttagttagacccagcttgactatacagattgagaaaaactggggcccagagagggacagagattgctcagggtcactgaataagacctatggctaaacctaagctaactccattcattcattcattcattcattcattcattcataaaaacattcactcagcattgactacttccggccctttgccaagggtttagcagggcgggagttggctcacaagatgctcacaataagcaagcatgtatacaacaaacatccttcaaaagt

SEQ ID NO: 461391 - DNA, 621 bp, Homo sapiens
agccctgggagagagttaagtgattcttattggggggaggagacacatccagcagttcttgtaagggcgggcagactcacgcccctttcatccgccagggtggtttctcctccattttcctccctagattcccyagaaaggagaccttcctaaagcgatggtcagtctgaaccactattgctaatgggcagggtagctgtggagagatcccaggacttagatttggagttgtagtttgggttatttgcccctatttttcaccctgccctgcattcatacccttgccattgcctatcatggcagggttgaggaaggtgcctttgcttgcccttgactttgggcttggccacgtgaaatgatttggccatggtatataaattctgagcctgggccttaagaggacctgtgtgttcctgctttccctttttacacctctgctatcaccaagaatatgctctgcataacccactggtccaaggaggaggagacacaggtggagccaagcctcctctgctaagcccaacccagatcagctaagccccagccgacagatacataagtgatgacagccgattgttgttttaagccacagaattagggatggtttgttacacagcaata

SEQ ID NO: 461392 - DNA, 438 bp, Homo sapiens
tccctgcctgtggggccctaaccacaatggaaaaccacagcggcccttcctctttcccaccctcaccaggttccttcctcctttccacattctactgacttgcatttccccasccgactcttttatagctccctggttcaacctcaaggccttgaggttttggcagctctggaggatgagagagaacatggccaggggcccttgcaacgcgccgagatgggcgtccctgatggtgctggtcgccataggcaccgccgtgacagcggccgtcaaccctggcgtcgtggtcaggatctcccagaagggcctggactacggtaactggatgcctcccttccctcctctccacccctgaggagcacttacttagcatctactgtgtgcacccctttagatccagcacctggcacactcatagcacctcagggcaggtcccct

SEQ ID NO: 461393 - DNA, 438 bp, Homo sapiens
tccctgcctgtggggccctaaccacaatggaaaaccacagcggcccttcctctttcccaccctcaccaggttccttcctcctttccacattctactgacttgcatttccccagccgactcttttatagctccctggttcaacctcaaggccttgaggttttggcagctctggaggatgagagagaacatggccaggggcccttgcaacgcgccgagatgggygtccctgatggtgctggtcgccataggcaccgccgtgacagcggccgtcaaccctggcgtcgtggtcaggatctcccagaagggcctggactacggtaactggatgcctcccttccctcctctccacccctgaggagcacttacttagcatctactgtgtgcacccctttagatccagcacctggcacactcatagcacctcagggcaggtcccct

SEQ ID NO: 461394 - DNA, 438 bp, Homo sapiens
tccctgcctgtggggccctaaccacaatggaaaaccacagcggcccttcctctttcccaccctcaccaggttccttcctcctttccacattctactgacttgcatttccccagccgactcttttatagctccctggttcaacctcaaggccttgaggttttggcagctctggaggatgagagagaacatggccaggggcccttgcaacgcgccgagatgggcgtccctgatggtgctsgtcgccataggcaccgccgtgacagcggccgtcaaccctggcgtcgtggtcaggatctcccagaagggcctggactacggtaactggatgcctcccttccctcctctccacccctgaggagcacttacttagcatctactgtgtgcacccctttagatccagcacctggcacactcatagcacctcagggcaggtcccct

SEQ ID NO: 461395 - DNA, 433 bp, Homo sapiens
ggacagtgtgacaacgtgagtcactcctccctgggtgaagctccctggcataaatcaggacagttaaacaaggtaagttttcagtcttttttaggagctctaagaggttttatttccataggttatttccatctcatccttcccaccgagattgtgggcatcctaggaaagggtgaggcagtgtttgaggtccctaacctacccacaggtcactccccaaagcccatcctaggacctcatcaggraacatttaaacatcagattttcccctgtgaaaagaggaggtcattgagagaagaagctgtcttttttgtctttttccttctccgtgtttctgaagtggatatttttttttccaaaggatttgttgtttaccttgtgttcccatccccctgtttgttttggagagcttctcctctctctatgcagccct

SEQ ID NO: 461396 - DNA, 525 bp, Homo sapiens
actcacaacactcagaggccctcaggacccagcaagcttgcaggataaagctaaatggtaaggcgaagccttccaggcttgggttttgcatgggctaaacaaattcagctcctaaactgtcaccatggttgaatatcctgctgtcattctcactatttgttaagcctgagcttgctcctctgatgctcaatcttttggtttagcagctgtcttcaggttcatgttcctacatgtgtctccccttcggtaactgacccttggcttcatttgcaggttccagtgcctaatatgactacacaaaaccatttcattkcccttcatattgcggtcagctcagtcctggatcagccatccttctccacctggcagcctttttgccttctgcagatgagctttctttttagcacaagaattagagaggagctaatcaacattgagcaattcacaatcacaatgttgtattcttattttcttctttactggagaagaagccaaaacaaaagaaaaacaaattgttacagagat

SEQ ID NO: 461397 - DNA, 465 bp, Homo sapiens
agtcatgcactaccacgcctagctaattttttgtatttttagggtttcactatgttggccaggctggtctcaaactcctgggcacaagtgatcygcccacctaggcctcctaaagtgttgggattacaggtgtgagccaccatgcccagactatttttcataaagtaaaaattaacaagtccttaagcaggggaaaatgtatcactactttgttcccacattttttccttatctttaaataagtaatcaatgaagatggtgatgtgttacttatctggtaagacacaaacaagggagataggtacctagggacagtagcaaacataacagagtcttcaggaagaactttttgactgagacttttgacgtatgagaagatgaatcagtctctatctctgtctctctctttctccaccacccctactcctatctcccactcccttccccttagaaccaaccccaggg

SEQ ID NO: 461398 - DNA, 625 bp, Homo sapiens
tgtgcacttcctgtggagttagagaacaatttttagtgtcacataggtcacttggagcatctctaggaacaaatatttgagtcgttcagatgcctgtgtgtgccatggaagcattagaatcacctctagtattcatcgttgttgagtgctgaccaaaacaaggagcggacttctattgtttttccctgaatgaatttattgaggactatgtgttagataatgaccttgccatgttatttttttctctagaggttttcattagcatttaaaagcaagttggggccaggcatgtggctcacacctgtaatcccagcactttargaggccgaggtgggaggattgcttgagcccagaaggtggaggctgcagtgagccgtgattgtgccactgcactccagcctcagcagcagagccaagaccttgtctcaaaaaatagtttttttttttaaaaatacaaatcttccatgatatattaaattcaaccaggaaaatgaaacacacacacacacagacacacacatgcatgcacacacaatgctgggaagataatcaacgaggaagaaatcgtttagctgttgcttgaactttccagcagaaagttcctccaagagcacctcctgcttcc

SEQ ID NO: 461399 - DNA, 527 bp, Homo sapiens
tcctgaaatgggatgactgaatcatgtagtagttctacttttaattttttgagagacctccgtactgttttctataatagctgtatcaatttgcatccttgccaacagtgtgcaagagttccctttcctccacacccttgccaacactttccccacacccttacctcttgcctctttgataatagccattctaacaagagtgtggtgatagcttgttgcagtattgatgttcatttcactccttttaaatttgtttggaaataacttcaaatgtatagaaaagttgtaagaatgtgacattcataaaaagggatcatattatatattatgytttataatatttttttaataatctagaaactctccttacattcaggcttcttgcttcttttacaatttaatgtgaatgttaatgagtgtttcagtatttggagctaaaactaatttatttttccaatcccaatctgtcccttcctttcttcttccttccctctcctttccttctttcctccttccctcccttcctc

SEQ ID NO: 461400 - DNA, 525 bp, Homo sapiens
ggggcacacatggggtgctaaaaaaggttgtgttttagggcaggatcagaaagggattttattgttatgggagagagataggaaaaataatgccaataattttctttaaaagaatgacatgacagcaaaattataacccagtggttctcatgtatatatggttatgatgactttggataagttacccaaacttctgtgggccttattctcccatatataaaatgaagacctgggcactcttttttattattattattatactttaagttctgggatatatgtgcagaacctgcaggtttkttagtcctgggtattcttaatgtctcttctagcttgaaaaaaaattactgtgactgatacctttctcaatagtcatggaacttgaagtaacttcacccacctttccacctcatactgaaaaggttctgattctcacccacaagcccagaaaaaatacatattatataagagatgaacttagccagtcaagtgcagccactaggattcccttataacccaaaagtt

SEQ ID NO: 461401 - DNA, 582 bp, Homo sapiens
ctgcttcagaacttctcaagaccttaatatgttagtgctcatggactggttcccaagtgtatttgaccccaggaccttttctctctctctctttttttttttttttttttgaggaatacatctgtaaccatcttatgtctactggaacatgcttttgaaaatactgcccatttcaacgttagtttcttggagaccctaaagtctcagaattcccgagttttgtagaatatacgatagtatctgcatatatgactataaaccttgtgactaacttataacttaagaaaatccttccaaaatgtactaaatagatttctattagcataagtcaaataaatatatacagtgcttgttaaggaaatcttcaacaacaaatstagatctttccataactggtcctttcctatcactcaggaattctctgaccatccaatctcagcctctttttgcctccttcacattccttgaatcaatttttattacataaccctgtttaattttcctcatagtatttatcagtatctgaaatcattttactgttttgtcttgacttagaatctaagacgcatgaaagttgagtca

SEQ ID NO: 461402 - DNA, 519 bp, Homo sapiens
tagagaatcttctatatgtgaagggcagcacatccagctcttcttttgcaatatagagaagtcaggctaaagtgctcagctagttagtccccggcatccaaagcaggacaaagagaacccgtgttgctgtgtgagcgactcgccagctggtaccatctgcagcaggttgccacaaagagcctgcagtcatcacagctgtttagcctcatatcggatggctctaaacatgtaaacaggtacctgagcaaaattatgtagagctgaacagtcggagccrcccgcagggaagtaataggagcattgtcgaaggactttaaaaggctctctccttgaggtatctgacagaggcgcccttgtaaacataaaatattcgtgattccagaaggactctgaccagaaaatcctcagaagttgttttataagcagcttccctcctgagggaataatcatggattttgtaaatatccatctcaacatactgatgactgaaaaatcaaagctgctgttttccagatggac

SEQ ID NO: 461403 - DNA, 589 bp, Homo sapiens
tgaaaatatggagaaattgggatcctctggtggtaggaatggaaaatcgggcaattgctttggaaaacactttggcatttcctcaactggttaagcatagagcttaccatatgatccagaaagtctactcctaggtatatcccaagagacttgaaacagctactcaaacaaaaacacaaatgtttatagcagcactattcataatagccaagaagtgaaaagtattcaaatgtccatcaacagatgaatggataataaaatgtggtataaccatacaacagaattttacttggcaataaaaagagataaaaggggatatgtggaaaatctckgtacctctcaattttgctgtgaacctaaaactgctccaaaaatatatagtcttaatttaaaaagaaaaatacagcatattgatatattgataagtgctacaacatggacaagccttgaaaacattaagcaaaagaagccagacacaaaggaccacaggtgatatgattccatttatatgaaatatccagaagaagcaaatctgcaaagagagaaagtagattagtgattgcctggatctctgcggaatgggatgatt

SEQ ID NO: 461404 - DNA, 565 bp, Homo sapiens
ttatgtttaccactatactatcgatgccaccccaaatcccactgaaacaaggcctttggtttatattttctggcagctgaaactatgggtattttgttgtagaaagtctgttgagaagagaagcagtatatagagtgttatcatcttcccatgttggttagactgacctgtttctccattagagtattagtaataaatgcccaatgctttattgaaaacaaataaccatattccatttttgcttcttagyagccgaagccttgagattcacacttgcacaatgatgtctttcaaactgcatcctgacagatacttcttgagctgtcataaggcctatggagaacatccagtcaatgtgtaggttaagttgtcaatgaacaattatggttcttctgagccatgttttaaagcaaggcattgtgcccctccagtgctgcagtgtgtccgggctgtgtgggatgcaaagtgtgtgcaggaaatacagtcacactgtggttttacacggaagctcaggttgcctcttatgaatatgtatgatggggctggatcatgctcttgccacttg

SEQ ID NO: 461405 - DNA, 509 bp, Homo sapiens
  misc_feature (1)...(509): n = A,T,C or G
gttctgtctgtctaaacaattgtttcccagcgctgacaaacagactcttgttttatcacctgttctttagtatatttcttaagtgattctttgncttcattacagttatggacaggccaaacacggaaaagtaccccaagcacataaccccacaattccttctgtgtaaacagccatacaggaacagctgcccacagcagtgaytggcacctgacccaagagcagccaatcaatgaactagccaggagtctagagttggtcttgcataaatctttaaatatggatgactgtatttaactgggtctctctagagggcatttgaaacggagacaggaaggagaactcatctactaagaacagctgaataagcctaaaagacccacaaacacacacaaaaaaatcagcaacagaaagtacctgagtcataataacgaagagaataggtttgaagatgaataaacttctgatgctgtggtggcgatgagataatacagctgctaatatatata

SEQ ID NO: 461406 - DNA, 509 bp, Homo sapiens
  misc_feature (1)...(509): n = A,T,C or G
gttctgtctgtctaaacaattgtttcccagcgctgacaaacagactcttgttttatcacctgttctttagtatatttcttaagtgattctttgncttcattacagttatggacaggccaaacacggaaaagtaccccaagcacataaccccacaattccttctgtgtaaacagccatacaggaacagctgcccacagcagtgattggcacctgacccaagagcagccaatcaatraactagccaggagtctagagttggtcttgcataaatctttaaatatggatgactgtatttaactgggtctctctagagggcatttgaaacggagacaggaaggagaactcatctactaagaacagctgaataagcctaaaagacccacaaacacacacaaaaaaatcagcaacagaaagtacctgagtcataataacgaagagaataggtttgaagatgaataaacttctgatgctgtggtggcgatgagataatacagctgctaatatatata

SEQ ID NO: 461407 - DNA, 487 bp, Homo sapiens
acatgatgtatgggttcctaaaaatcccgacactatgcaaaattgggcaataaaaacacattttactaaaaaaatggggataggcacacaatacctagaaatatcactagtggcacattacaaaaaatatgggaatttagtaacaatgacagcaatattttacacatgttaatggttaagaaatttacaataaatatggcagtttactttgaaaaagacctaacgttccctgtggaagttggccttcaaaagggtgcagcttgtgagtttttgagaagtgttgggaggagagtcgttgttgtcccagttgtgagcaggtggggcttttctacctgtgtggggaagtgtggtagctgatggatatggtatgtggattttgtgtattcctacgctgcttggtttagctgggtgcagttttctgcatttacctggygtttcttgtggatagaatcacatataagcaaatcccagacttgtgttgtgatca

SEQ ID NO: 461408 - DNA, 579 bp, Homo sapiens
gagataggaagcaaaagagagatggggaggtgctgggctcttttaaacagccagctctcgtgggagctaatagaataagaactcacttactatcccctgcaaaagaaggcattaatctgttcataaagaatcttcccctatgacccaaacacctttcattaggctctacctccaacattgagatcaaatctctacatgacatttggggagacaaacagcgaaaactcagcacagggctccctgggattagatataatttttctgtttatgatcctggctataataatactcatagaatggactaacaaatattcttggatacttaaatcatgtgctatacgtaacccttaaatggtgtcaaaatttttgtctacatagactataatatagattatatatatatgagatatatattataaactacatatatcacaaaccaacctcaacacatgcagataaatatttttaaatttggcaaaatgacagtaygttcatccatatttctggagctgcaacaataattataaattatacttgaaataataataattaacatctgttgagcatctctcatgaatc

SEQ ID NO: 461409 - DNA, 552 bp, Homo sapiens
tggaggaagaaatgtcggaaaaaaacagaacaaaagtaatctttccccaaatgaagcctttgagaaggcctgtgggtgaggtgcctttctctctccctctctctggaatgggccttggcccattttcatgaaaatattggtttgggttgaggaaggtgtgacagtggcctggggagaatgactattatggctccaggagaggagaagaggaggagaaaaaagagaggcctccctgtagagccagaggtggaaagggcttctctaggcagcctgctctagggytgtgggaccctgggcccattctgggtcaagtattccaagctaagcttggcagttcttgcttagatattagaaaaactaacttggatgctccaccctctggccagtgtcaggactgtgaaggtggaaagaattgtgaagagtttggggaaagaccacaatgtgtgcccacttatgcccattgaattggtaagaatacagaaatctaagacaccacatgtggaagaggatgtggatgggcacaacttggaatgcagctagatgtacaaattg

SEQ ID NO: 461410 - DNA, 584 bp, Homo sapiens
gacaccctcacgaaccctgactgagacagggagttaggacttgatggataaacctggatttttctcagggcttgtgatttgagaggaagttcatatatagtgccaaattcgtaaaggctagaaytcatatctttccatatattggagccaatacatagcacgtaataggtgtcaacagatgcttgctgaatgaataaaaaaatgaatataagatagacctgtaatcccagcactttgggaggccgaggcaggcggatcacgaggtcaggagatctagaccatcctggctaacacggtgaaaccccgtctctactaaaaatacaaaaaaattagccgggcgtggtggtgggtgcctgtagtcccagctactcgggaggctgaggcaggagaacggcgtgaacccgggaggcggagcttgcagtaagctgagattgcgccactgcactccagcctgggtgacagagcgagactccatctaaaaaaaaaacaacaacaacaacaagaaaaagagaatataagatagataaataaaagtatttctgtgcatgcagtcatatacaatactcattatccaatatatttgt

SEQ ID NO: 461411 - DNA, 593 bp, Homo sapiens
atctcctttctccttcctacacagataatcttcctggcctcttgagagcaccattcagtccagggtattcttaatgcacaaaattaccacttttggtcttctgaaagactgacagggacagactgagatgagaaaaaaatgtatttcctgcttaggatgaagttcaagacattaaacatatatacacataaaacaattagagaaaccatacataatggtacaatctaacgttgaatgttgtggcacaggctttaagcattataggatttcttcttcctgatggtacaattcaattcaacatgcartttttttgaataatgtttaccacttgtatacatgagtgtaaccatgaccacaagatgaattttttttttaaaaaaagacccaaacgcagaacattttcaagaaatttcagaacactttgggcatggagagcattgtgaaagattctagagggggaccactatgtcctacaaagaaaaaagaatgtaatttcttattagaatacctagatgctataacttcaactttctgagaaaaataattatggacctaacattccacactcagtaaaaatatcaatcaagtgagaa

SEQ ID NO: 461412 - DNA, 538 bp, Homo sapiens
cttgttttaggaagacccttttcagtcattacctgtacgagatctctttgtaktaagatacaattaatcatgctctcttttctcagtgtctaggacaatgctctggcaaactcctgaaatattttacagtacaaaggagcatatcatttaaaaataaataaataaataaataaataaatatcacagggagagaaagcatacgcgctcacctgagtcttttctttgttttcaggttcctcattccacattcagtattagccagtatacccaggcctctgtcttctatgtctacaatccttatttctacatctaactgtagaattcttgacctgttttgtcaagctgcctactgatagtctctatcaggataataacctgtctcaatcccacactggagacaaaataaattatcttctctactccaaaccaattcttttttgtggtcccaatctcaatttatcttctcaatcacccaaacaagaagccatgagattgccttgaccacagctcctcccttaccagtatatgtagcctgtta

SEQ ID NO: 461413 - DNA, 536 bp, Homo sapiens
cttgttgaatactttgtattagctgggattctaagccacactgccttgagttacttttcacctgcgtgatgttcatgtattaatagacttgtttgtttttctcttgttaatctgtcatttgttacaggagactgtctcaattaaaaacttacgagggttcagaaaaattataatttcttcccaacaatgacaatagcagagcataaaactaagcacagggcccatgtgagtatggggtcctgtaayagtgcaggtcacaggcctatgaaattgcccctgcctatgaatttcacctgactattccaagccaagagctacttattatctatgctgaacatttctaatgatttccatcttttccaatagcagaattcagtggtctcaaataattcagccaactcacattatagaactcaagtctatgtaactccaagtcactgttcatgcactatagtcatggagttctttttaaatacctgtcatccccatgttcaaacccttcaatgtctccctagtaattaacaaaatttagtcaa

SEQ ID NO: 461414 - DNA, 646 bp, Homo sapiens
ttaatcttccctatagacatgccaggtacctgttatcactttattctggtatccgctccattttttggcatcctatgcttcttccatgcctgactttatctcccgtttgagcctctttctctgccaacgcccatagaaataaaattcaaatgaattctcttgattattcatttggctcttctgttakgcagcattgtgttgcatttttaaaaattatatgtaaatctccatttcagaagagattttgagctcctcagggcacgaaacgtatcacatagctctttattgtctcaagtactagcatagtgctttgtatgcaatatttaattaatattttctgtgtgggtgaaaatgttaatgtcttttttgttggacattcatttccaaagcagaacaattaatatgactggatgtttaaagggtctggatgaataggtgagtgaaggacagaaatgtgctggtaaaaagccctgatctatagtgcttgccaatttccgtggtgtaaatacttccactatagccaattttaagctaccaacagttagagccaactcacaaaattcttgaaaatttcataatcagtggttttgtgtgagccagcataagtcagcttcggtatctctttgagggatttaataatgaactc

SEQ ID NO: 461415 - DNA, 406 bp, Homo sapiens
ggtcatattttcaaacattataatatcttggagatactaaatagttattttcaatctctgtggtttcaaaattacaargagaataatagttttggtttttggtaggactcaccaatccaaaagagggaggcaggcaaaaatcacaactgttataatagctgtcactcttcaatgttttcccttctagattacactcattttctgagactctttaggccctcagaagtagaaaataaatagctgctgatgtctgctttattaaaaacacaatataaaataattgataaatataatatagttgataaatagaacaggatgaagcctatggagaaacacattttactctgaggtcacagagagaggacactaactctgaggcaaacagaaagaacaaaaatagaaaatc

SEQ ID NO: 461416 - DNA, 511 bp, Homo sapiens
ttaactttaccaatgcctttcaaataatattttgaaattttccctgaaaggatattgagaaaagccaaatgtaaaaattattgttttttttccttgggatttgcatgttttgaaaacgttctcaattgttagggaagtcagctgtaaaacacaggctaaatatacttttgtctaccaagaattccctttacttgtctgtttcgtgatttgtttaatctttcttagttatgcatgtaccattttaccatagttacctggagatattcttgtctctgccttagtttggcaggcttttcaagtggctcactgagctactgtttctatttcttttagaaagttgtggaggcatttattactctcataactgcytcaaaatctcaagcacatggcctagttaaatcatcttgaggttctgcccatatggttgcagaaggatattagtcattggaaaaaatgggtctaaaatgataatattcaaagatgttttccaatattcttggcaatcttattc

SEQ ID NO: 461417 - DNA, 539 bp, Homo sapiens
tgtaatttgtagccattgaatgtttttgcaaaaaaattgaaaagagaaagaatgaaggaagaggaggatatatattttagctaattttctcttcttgagaatttttataattttttatttttctccttctaaaaatgttttattgcttaaatcttaagcttttacttttttatctttctatccttcctttattatactgctgtagttttatttacttttaatttcctcttatattttatcatacaatttaaaaatgctaatggtcagaaagaacaaaaaccacaagggataacatggaaattatccatttcacacaggggaggttgaaacatttcttctggttcaccttcccataaactatgtgtttaaaatgtgtgatttaatacttcgtctagaaactgtcatttctaggactctagcctataraaatattattataaatttgtattgagtaatattattgtaaatgtgtattgaatattgtgagatatatgtatatataatctccaaagatgttcagggaaatcccagtttataat

SEQ ID NO: 461418 - DNA, 539 bp, Homo sapiens
tgtaatttgtagccattgaatgtttttgcaaaaaaattgaaaagagaaagaatgaaggaagaggaggatatatattttagctaattttctcttcttgagaatttttataattttttatttttctccttctaaaaatgttttattgcttaaatcttaagcttttacttttttatctttctatccttcctttattatactgctgtagttttatttacttttaatttcctcttatattttatcatacaatttaaaaatgctaatggtcagaaagaacaaaaaccacaagggataacatggaaattatccatttcacacaggggaggttgaaacatttcttctggttcaccttcccataaactatgtgtttaaaatgtgtgatttaatacttcgtctagaaactgtcatttctaggactctagcctatagaaatatyattataaatttgtattgagtaatattattgtaaatgtgtattgaatattgtgagatatatgtatatataatctccaaagatgttcagggaaatcccagtttataat

SEQ ID NO: 461419 - DNA, 609 bp, Homo sapiens
tggtacagcagctgcaattggagtcactgcttggtgaagcttatgataatccactgtcattctccaggatccatctatcttctgcacaggccaaataggaaagttragcagggatgtggtggggatcaccacccctgcatcttttaagtccttgatggtggcacgaatctctgcaatttctccaatgatacaacactacttttcatttactatttccctaggtagaggcagctctaatggcttccatttggcctttcccatcataatacccccccactccacaagtcaggaaacaaatgtggggattctaccaggtgctaagtatgcctattctaattatgcatattagaattggagaaataaccacagttgcactggggacataaccacagttagaattgaggaaataaccacaagatgggttttgggatcgagtggacacaccgtaagttggatctgagctaaaatttcattaatcacatgacccccataattgcctactctaactagagggcaacagtgatgtttcgtgtctcctggaatcaacatcagttgagagccagtgtccagtagtccccaaaagatcagatcatttcccttttcccaatg

SEQ ID NO: 461420 - DNA, 609 bp, Homo sapiens
tggtacagcagctgcaattggagtcactgcttggtgaagcttatgataatccactgtcattctccaggatccatctatcttctgcacaggccaaataggaaagttaagcagggatgtggtggggatcaccacccctgcatcttttaagtccttgatggtggcacgaatctctgcaatttctccaatgatacaacactacttttcatttactatttccctaggtagaggcagctctaatggcttccatttggcctttcccatcataatacccccccactccacaagtcaggaaacaaatgtggggattctaccaggtgctaagtatgcctattctaattatgcatattagaattggagaaataaccacagttgcactggggacataaccacagttagaattgaggaaataaccacaagatgggttttgggatcgagtggacacacygtaagttggatctgagctaaaatttcattaatcacatgacccccataattgcctactctaactagagggcaacagtgatgtttcgtgtctcctggaatcaacatcagttgagagccagtgtccagtagtccccaaaagatcagatcatttcccttttcccaatg

SEQ ID NO: 461421 - DNA, 609 bp, Homo sapiens
tggtacagcagctgcaattggagtcactgcttggtgaagcttatgataatccactgtcattctccaggatccatctatcttctgcacaggccaaataggaaagttaagcagggatgtggtggggatcaccacccctgcatcttttaagtccttgatggtggcacgaatctctgcaatttctccaatgatacaacactacttttcatttactatttccctaggtagaggcagctctaatggcttccatttggcctttcccatcataatacccccccactccacaagtcaggaaacaaatgtggggattctaccaggtgctaagtatgcctattctaattatgcatattagaattggagaaataaccacagttgcactggggacataaccacagttagaattgaggaaataaccacaagatgggttttgggatcgagtggacacaccgtaagttggatctgagctaaaatttcattaatcacatgacccccataattgcctactctaactagagggcaacagtgatgtttcrtgtctcctggaatcaacatcagttgagagccagtgtccagtagtccccaaaagatcagatcatttcccttttcccaatg

SEQ ID NO: 461422 - DNA, 609 bp, Homo sapiens
tggtacagcagctgcaattggagtcactgcttggtgaagcttatgataatccactgtcattctccaggatccatctatcttctgcacaggccaaataggaaagttaagcagggatgtggtggggatcaccacccctgcatcttttaagtccttgatggtggcacgaatctctgcaatttctccaatgatacaacactacttttcatttactatttccctaggtagaggcagctctaatggcttccatttggcctttcccatcataatacccccccactccacaagtcaggaaacaaatgtggggattctaccaggtgctaagtatgcctattctaattatgcatattagaattggagaaataaccacagttgcactggggacataaccacagttagaattgaggaaataaccacaagatgggttttgggatcgagtggacacaccgtaagttggatctgagctaaaatttcattaatcacatgacccccataattgcctactctaactagagggcaacagtgatgtttcgtgtctcytggaatcaacatcagttgagagccagtgtccagtagtccccaaaagatcagatcatttcccttttcccaatg

SEQ ID NO: 461423 - DNA, 522 bp, Homo sapiens
ggtcctgctcccagtgccaccaactgggtgagaccctgcaacaggggttgtcagacattttatacagaagcattcctgctggcattaggtcggtgcccctcaaggtcagcgataccaatggaaggagcaggcacccatctttactgttctccagcttcccccagtgacatctccaggtgcaggagygaaccagatgaataaggcctgaaatgaacccccagcaaaccacagcagccctacagaagagggacctgaccactgaaagaaaaacaaacagaaaacaacaacagcatgaacaaaaaacgtccccacaaaaacctcatccaagggtcagcagcctcaaagatggaaactagacaaactcatgaagatgagaaagaatcaacgaaaaaacgctgaaaatccaaaaggccagagtgccttttctcctccaaatgatcacaacacctctccagcaagggcgtgaactggatggaggatgaaatagatgaactgacagaggcaggcttcagaaggtgggta

SEQ ID NO: 461424 - DNA, 496 bp, Homo sapiens
ctcacagttccacatagctggggaggcttcacaatcgtggtggaaggcaaaggagaagccaaggcacgttgtacgtggcagcaggcaagagagcatgtgcaggggaattgccctttataaaaccatcgtatctcgtgagacttattcactatcacgagaacagcatgggaaagactccccaccccaattctgttacctcccactgggtcccacccatgacatgtaggaattatgggagctacaattcaaaatgagatttgggtgggtacacagccaaaccatatcatggggggtgttgcttttgtcagtttttggaaaactgtcagccattgtctcatgaaatattactcctaaactgcttttttttttcttttctctttctgaacttcaattacatatattttttgtcttttgaatatgttccaacatttcatatgctctttttctcatttttcattcttatttctmaccatgctttaatttatctgtctctttt

SEQ ID NO: 461425 - DNA, 625 bp, Homo sapiens
agaggtctctgcttacagaagtcatatgtaagtagcaggtgaagagtatgtgtttcacagaagtttattacaatatattaacaagagcaaaaaattttggaagcaatctaaatgttcaataataragctccaattaaataacaataaatccaaataatgaaaaataatgcagccctttaagaataagcacttgcaagccgtaattcatgacatgggaaaattatcataatggaaaaagaagcaagctatatacagtgcatgatcctatacacacacatacatacatacatatttcctatccctttatatgaataagaaaacaagcgggaggaaagtcgtatctttagtcaagtcttgtttactaacgtactattaatgattatcttttctttttctttatacctttttgcatttttcaatttcctaaaatagccttacatgccttttatcaccaggagaaaaattacttctaaagtaatttcagtcaacatgcatactaagaactcttcagatttatctgttagaagctgtgcatgaatgccagtccttgcatctgtcttggaactcacagagagctcttttcccatggctttaagcaatactcaaaaagactagcatacgtgaa

SEQ ID NO: 461426 - DNA, 625 bp, Homo sapiens
agaggtctctgcttacagaagtcatatgtaagtagcaggtgaagagtatgtgtttcacagaagtttattacaatatattaacaagagcaaaaaattttggaagcaatctaaatgttcaataataaagctccaattaaataacaataaatccaaataatgaaaaataatgcagccctttaagaataagcacttgcaagccgtaattcatgacatgggaaaattatcataatggaaaaagaagcaagctatatayagtgcatgatcctatacacacacatacatacatacatatttcctatccctttatatgaataagaaaacaagcgggaggaaagtcgtatctttagtcaagtcttgtttactaacgtactattaatgattatcttttctttttctttatacctttttgcatttttcaatttcctaaaatagccttacatgccttttatcaccaggagaaaaattacttctaaagtaatttcagtcaacatgcatactaagaactcttcagatttatctgttagaagctgtgcatgaatgccagtccttgcatctgtcttggaactcacagagagctcttttcccatggctttaagcaatactcaaaaagactagcatacgtgaa

SEQ ID NO: 461427 - DNA, 625 bp, Homo sapiens
agaggtctctgcttacagaagtcatatgtaagtagcaggtgaagagtatgtgtttcacagaagtttattacaatatattaacaagagcaaaaaattttggaagcaatctaaatgttcaataataaagctccaattaaataacaataaatccaaataatgaaaaataatgcagccctttaagaataagcacttgcaagccgtaattcatgacatgggaaaattatcataatggaaaaagaagcaagctatatacagtgcatgatcctatacacacacatacatacatacatatttcctatccctttatatgmataagaaaacaagcgggaggaaagtcgtatctttagtcaagtcttgtttactaacgtactattaatgattatcttttctttttctttatacctttttgcatttttcaatttcctaaaatagccttacatgccttttatcaccaggagaaaaattacttctaaagtaatttcagtcaacatgcatactaagaactcttcagatttatctgttagaagctgtgcatgaatgccagtccttgcatctgtcttggaactcacagagagctcttttcccatggctttaagcaatactcaaaaagactagcatacgtgaa

SEQ ID NO: 461428 - DNA, 625 bp, Homo sapiens
agaggtctctgcttacagaagtcatatgtaagtagcaggtgaagagtatgtgtttcacagaagtttattacaatatattaacaagagcaaaaaattttggaagcaatctaaatgttcaataataaagctccaattaaataacaataaatccaaataatgaaaaataatgcagccctttaagaataagcacttgcaagccgtaattcatgacatgggaaaattatcataatggaaaaagaagcaagctatatacagtgcatgatcctatacacacacatacatacatacatatttcctatccctttatatgaataagaaaacaagcgggaggaaagtcrtatctttagtcaagtcttgtttactaacgtactattaatgattatcttttctttttctttatacctttttgcatttttcaatttcctaaaatagccttacatgccttttatcaccaggagaaaaattacttctaaagtaatttcagtcaacatgcatactaagaactcttcagatttatctgttagaagctgtgcatgaatgccagtccttgcatctgtcttggaactcacagagagctcttttcccatggctttaagcaatactcaaaaagactagcatacgtgaa

SEQ ID NO: 461429 - DNA, 553 bp, Homo sapiens
ctgaaaccataaaactcctagaagaaaacatagggggaaagcctcttgacattggccttagcaataattttttggatatcgcaccacaagccaggctacaaatgtaaacataaacaaggaggactgcatcaaactaaaaagcttctgcacagcaaaggaacaaccaacaaaatgaaaggggaacctacagactggaagaaatatttgctaccacatatctgataaagtgttaatatccaaaaatcagtaaagaactcttacaacttaagagcagaaaaacaacccagttgaaaaatgggccaaataggaaatgaccaataggaaatggggagatgtacattaaaataatacaaagtagcagacatgtaggatgaacaagttagagatctagtgtacatcatgagggcwatagttaataaaaatatattgtctttgggatttttgttaaataagtagattttagctgttcctgtcacacaaacaaaaatctaactatgtgagatggtagctatgttaatttgcttcactatagtaaccagtttactatctatat

SEQ ID NO: 461430 - DNA, 627 bp, Homo sapiens
caccagatatcgaagtttagaaatttttttaaagctaaacttctgaaaatagaataaaaacaccttcacatgtcaaattagtcaatttctataggactaattcatttaaatatattaaaatacaaaataattcaaactactaaagtgataatacaagactataaatttaaaggctaattattaagtcaaattgctgtattctacgtgttagagtgagttcaaaagatccattgyattactgaataggcaaaagttttaatttcagaggatgaaactgatatattactgccaccttgtggatattctgttattacaggctattataaaaagcaatgagggtatgtaatctgttctaagaagaagcatttcctttttttgaggtttttattattgttattattacattttaagttctgagatacatgtacagaacgtggaggtttgttacataggtatacacatgccatggtggtttactgcacccgtcaacccatcatctacattaggtatttctcctaatgctatcactcccctagcctcccacccccctgacaagccccggtatgtgatgttcccctccctgtgtccatgtgttctcattgttcaactcaaaagaaaaacagaagc

SEQ ID NO: 461431 - DNA, 580 bp, Homo sapiens
ttctgatttcccaatttcttaaatacaatgcaactttatgtataatttaactaacttaatcctgtgagacaaggactagctccgctgccttgctggagtggatggttgtgaatatggttcagtgaaacctccacctccctggctcaagtgatcctccttcctcagcctctggagtagctaggaccacaggcacgcaccaccatggccagctaatttcttttttattttttrtagagatgaggtctcactttgttgtccatgctggtctcaaactcctgggctcaaaggatcctcttgccatggcctcccacagcgctgggatttataggtgtgtgccatggcaccaggcctaagcaactgtagagaagcctttttttctttcataaaaacagttgtagatattttccttatggaatttatttgtggtgaaatattttaatagatggtttgttaataatttgtctcagataataattgattaatattaaaactacaaaacaagtaggatcttctttttctatgaaaaatgaaagttgattctgacatttatgtaaacattttaaatattcaaagtatataa

SEQ ID NO: 461432 - DNA, 567 bp, Homo sapiens
ttctgatttcccaatttcttaaatacaatgcaactttatgtataatttaactaacttaatcctgtgagacaaggactagctccgctgccttgctggagtggatggttgtgaatatggttcagtgaaacctccacctccctggctcaagtgatcctccttcctcagcctctggagtagctaggaccacaggcacgcaccaccatggccagctaatttcttttttattttttgtagagatgaggtctcactttgttgtccaygctggtctcaaactcctgggctcaaaggatcctcttgccatggcctcccacagcgctgggatttataggtgtgtgccatggcaccaggcctaagcaactgtagagaagcctttttttctttcataaaaacagttgtagatattttccttatggaatttatttgtggtgaaatattttaatagatggtttgttaataatttgtctcagataataattgattaatattaaaactacaaaacaagtaggatcttctttttctatgaaaaatgaaagttgattctgacatttatgtaaacattttaaatat

SEQ ID NO: 461433 - DNA, 567 bp, Homo sapiens
ttctgatttcccaatttcttaaatacaatgcaactttatgtataatttaactaacttaatcctgtgagacaaggactagctccgctgccttgctggagtggatggttgtgaatatggttcagtgaaacctccacctccctggctcaagtgatcctccttcctcagcctctggagtagctaggaccacaggcacgcaccaccatggccagctaatttcttttttattttttgtagagatgaggtctcactttgttgtccatgctggtctcaaactcctgggctcaaaggatcctcttgccatggcctyccacagcgctgggatttataggtgtgtgccatggcaccaggcctaagcaactgtagagaagcctttttttctttcataaaaacagttgtagatattttccttatggaatttatttgtggtgaaatattttaatagatggtttgttaataatttgtctcagataataattgattaatattaaaactacaaaacaagtaggatcttctttttctatgaaaaatgaaagttgattctgacatttatgtaaacattttaaatat

SEQ ID NO: 461434 - DNA, 580 bp, Homo sapiens
ttctgatttcccaatttcttaaatacaatgcaactttatgtataatttaactaacttaatcctgtgagacaaggactagctccgctgccttgctggagtggatggttgtgaatatggttcagtgaaacctccacctccctggctcaagtgatcctccttcctcagcctctggagtagctaggaccacaggcacgcaccaccatggccagctaatttcttttttattttttgtagagatgaggtctcactttgttgtccatgctggtctcaaactcctgggctcaaaggatcctcttgccatggcctcccacagcgctgggatttataggtgtgtgccatggcaccaggcctaagcaactgtagagaagcctttttttctttcataaaaacagttgtagatattttccttatggaatttatttgtggtgaaatattttaatagatggtttgttaataatttgtctcagataataattgattaatattaaaactacaaaacaagtaggrtcttctttttctatgaaaaatgaaagttgattctgacatttatgtaaacattttaaatattcaaagtatataa

SEQ ID NO: 461435 - DNA, 390 bp, Homo sapiens
tgcactaatgctgggtgtgtgctgggtgctaaccaactgtcctgccctgatgcacacactgttgctgacccgcgtggctttctgtgcccagaaagccatccctcatttctaytgtgatcctagtgctctcctgaagcttgcctgctcagatacccatgtaaacgagctgatgatcatcaccatgggcttgctgttcctcactgttcccctcctgctgatcgtcttctcctatgtccgcattttctgggctgtgtttgtcatctcatctcctggagggagatggaaggccttctctacctgtggttctcatctcacggtggttctgctcttctatgggtctcttatgggtgtgtatttacttcctccatcaacttactctacagagaggga

SEQ ID NO: 461436 - DNA, 390 bp, Homo sapiens
tgcactaatgctgggtgtgtgctgggtgctaaccaactgtcctgccctgatgcacacactgttgctgacccgcgtggctttctgtgcccagaaagccatccctcatttctattgtgatccyagtgctctcctgaagcttgcctgctcagatacccatgtaaacgagctgatgatcatcaccatgggcttgctgttcctcactgttcccctcctgctgatcgtcttctcctatgtccgcattttctgggctgtgtttgtcatctcatctcctggagggagatggaaggccttctctacctgtggttctcatctcacggtggttctgctcttctatgggtctcttatgggtgtgtatttacttcctccatcaacttactctacagagaggga

SEQ ID NO: 461437 - DNA, 390 bp, Homo sapiens
tgcactaatgctgggtgtgtgctgggtgctaaccaactgtcctgccctgatgcacacactgttgctgacccgcgtggctttctgtgcccagaaagccatccctcatttctattgtgatcctagtgctctcctgaagcttgcctgctcagatacccatgtaaacgagctgatgatcatcaccatgggcttgctgttcctcactgttcccctcctgctgatcgtcttctcctatgtccgcattttctgggctgtgtttgkcatctcatctcctggagggagatggaaggccttctctacctgtggttctcatctcacggtggttctgctcttctatgggtctcttatgggtgtgtatttacttcctccatcaacttactctacagagaggga

SEQ ID NO: 461438 - DNA, 507 bp, Homo sapiens
ccacttcactcccctgctacctccattggagcaggtgctggttatctgtggcggagagacctgaagagggatcayatcacaggattctgcagacactcccctataccagcccagagcccagtagcttcactgggtggctagattgagaagagaaacaacagtcactgcagtttggctctcaggaggctctatctcagggggaaaggagagagcaccacatcaagggagcaaccctgtgggacaaaggaatctgaacagcagcccttgagttccaaacttccctctgacatagtctacccaaatgagaaggaaccagaaaaacagtgctggcaatatgacaaaacaaggttctttaacacccccaaaagatcacactagctcaccagcaatggatccaaaccaaggtgaaatctctgaagtgccagaaaaagaattcagaagatcagctattaagccaatcagggaggcaccagagaaagatgcagtccaacttaaagaaatcaaaaa

SEQ ID NO: 461439 - DNA, 577 bp, Homo sapiens
tcagttactttcgagggggaagagaaaagggtagcagctgaaagagagcatgagagtgtcactcataaatgggaatacataaggttgtatggaaaagcacatggataagacttatttagaactggagccattatctttcatggtctgttaatctcacctgtttcccaagaggaaaaaataataaaaacctcagatacatgactctcaggtttcatgccctgtcttcagatttcatcaagccagcacacctcaggggctctctctcagatctctggttctgccccatctctgccccatctttcccatgagtccttggtgaagattcttgggaaagagaaggttggtggctacagaagttctctgtggctgaggctccaattgyagaccatcataccagcccacacttagcctttaaatatttgttaaaaactctactgttttgggccaggtgtggtggctcacgcctgtaaccctagcactttgggaggccaaggtgggtggatcacctgaggtcaggagtttaagaccagcctggccaacatggtgaaaccctgtctctactaaaattacaaaaatt

SEQ ID NO: 461440 - DNA, 488 bp, Homo sapiens
aaagaaggagaaatattccatttctatgttcttttctttaatctcatttcttgggataaatatgaacttttaatccagataggtggatgatagaattttcacctaaattctcatcgcttggatacccagtgaaattcattaaaaacacaattgataattgtgctacaaacrtgttgctaatttaaataaaaaatctggcgtctgagtcaaagaacatcttaactattactttgtagtttggatttaccatcatgtagtgtgaaaatccatttattctctactgattataaacttttattattttccttgagggattcttatcatgtatgtaatgtgtactttgcttcaagttattattcatgttttagtaaaaattatatatataatattttactggttttgctttttgattatccctttgctttttatattactatgtatgtacaattagcaattataatctgttttaaaataaacatttaagtaat

SEQ ID NO: 461441 - DNA, 569 bp, Homo sapiens
gaggtcagtgtggtctcagtaaagaaagcaattactttgtgtatttgttaagtaacatctggtttattccaaatcagctgtaatggcaaatcctttaaatagagtgtcttatttttataacaatcattaaagcctatgactaaagattatatgattacatttttgcaccttgaatattttagaaggcacaaaakccaaataaatgtttttgagaactgacacttctaccaaaggaagtgcacattgagaggaatttcactaagcagatgaagtgtatgagagggagacaactccagttggagaagacagcaggtgctaacacacataacattacaaaacagcatctacagagccttagaggtcctcagtgtccctataaaatagagccaaaggacagtgatcaggagaaaaagggctagtgtggttaagttagaaaaataaacagaggtcaaaacatgaagggctttataaatcaggcagaagttgtgcaaagtcaatgtgtgcaggaatcaagcaatttgggcaaatatgagatcctgcaatgtaagggaaacaggagtgttggcccc

SEQ ID NO: 461442 - DNA, 569 bp, Homo sapiens
gaggtcagtgtggtctcagtaaagaaagcaattactttgtgtatttgttaagtaacatctggtttattccaaatcagctgtaatggcaaatcctttaaatagagtgtcttatttttataacaatcattaaagcctatgactaaagattatatgattacatttttgcaccttgaatattttagaaggcacaaaagccaaataaatgtttttgagaactgacacttctaccaaaggaagtgcacattgagaggaatttcactaagcagatgaagtgtatgagagggagacaactccagttggagaagacagcaggtgctaacacacataacattacaaaacagcatctacagagccttagaggtcctcagtrtccctataaaatagagccaaaggacagtgatcaggagaaaaagggctagtgtggttaagttagaaaaataaacagaggtcaaaacatgaagggctttataaatcaggcagaagttgtgcaaagtcaatgtgtgcaggaatcaagcaatttgggcaaatatgagatcctgcaatgtaagggaaacaggagtgttggcccc

SEQ ID NO: 461443 - DNA, 569 bp, Homo sapiens
gaggtcagtgtggtctcagtaaagaaagcaattactttgtgtatttgttaagtaacatctggtttattccaaatcagctgtaatggcaaatcctttaaatagagtgtcttatttttataacaatcattaaagcctatgactaaagattatatgattacatttttgcaccttgaatattttagaaggcacaaaagccaaataaatgtttttgagaactgacacttctaccaaaggaagtgcacattgagaggaatttcactaagcagatgaagtgtatgagagggagacaactccagttggagaagacagcaggtgctaacacacataacattacaaaacagcatctacagagccttagaggtcctcagtgtccctataaaatagagccaaaggacagtgatcaggagaaaaagggctagtgtrgttaagttagaaaaataaacagaggtcaaaacatgaagggctttataaatcaggcagaagttgtgcaaagtcaatgtgtgcaggaatcaagcaatttgggcaaatatgagatcctgcaatgtaagggaaacaggagtgttggcccc

SEQ ID NO: 461444 - DNA, 561 bp, Homo sapiens
atttaaccaacaccaccactgaggcacaaataatttaaataatttgcccaagatcacatgactaggtagaattaggcttgaacccaggtggtctagtgttccagaatttgagtaattaactactctgcatgttgtttcctatttaattaaaattcacattttcagattgaacagtcttatgtatgtgtgttgtaaatattaaagaaattaaacatattttattagttataaaattatgtatgggcatttacagttggagccatttcagagccaaaataagtaacacgtacaaactgtctagtaaatgtttctaawtttctgttttattcaatgaagaacaaaatcagttttctaaatagcaattttgtatttaaaaataaatctaaactctacacctttctacaaaatgactgccattaattaaacttctttgactttcatattaaaataatgaaagaagtcaatgttgagaatgtaatatatctttaaagtattctcattgtgcaaagggggaaattatatcatcagagaagtattcactatctgtgagacaacagcgca

SEQ ID NO: 461445 - DNA, 602 bp, Homo sapiens
ggactctgaaaatttccaatgtagagataaaagtttgaaatttatcagaatagatataacatttaaagccatgtgacgaggtgagatgacctagagagaggcacagattgagcgaagtgccttgggaaactccaaaatgtagtaaaaaaggagaagccaggaaaccagtcagagaggaaacaccaaaaaaagtgagagatcaactaacaatctcgaattctttagtttgctagatattaaaaataagaccagtaaaattttacattcatttgaaacatcaaaatgtgatatttaaggttaacattaaggcccctacagaaagcatttcaccttcatattttagatatcatctccaacttcgtttatcaagtgatatttgttaaatactaaagtgtacacaattcttatttatcaacatttttgtttttgggcactctaaaaaatatgtaattttgatgtgcaaacctgtattatatccatcattacaactgttaatatattctyactctcgctattatcagctaattgatttttatggaggaagaagtctgcaaagagcaattttggaggagatttggaatcatctgagaatagtaagcttt

SEQ ID NO: 461446 - DNA, 575 bp, Homo sapiens
tgactatatttgaaattaaaaattttgaatgtaaaatgtttcctcaacactgctcagcattcacaaactagatttctagaatgcttactttgctattactcccaaaaatgacagtttcagttttttcctctatttccaaaattaccatttcctcattggtaatgttcagcagattaacctttgctcattttgcattcttaaaaaaatataaattatcatgtaagtagtctcttaaattgtgactgccaaatctccaaacatacctgcaaccatcttattctgtaccctcctgttacaacctaggcactcctcgtcctcctatcaagggccagactctcakattaaacctgaattttctctcttctcctctcattcttctaagattttactctttcctcagtaattttctctctttgacactctacctagctcgctgatagatactttaacatctttaatctttaaagataaccacaatgacctctcattctttttcaagtagtaatcaacctggaaacatttacagttaaacaaacatttacagccaaagttcttaaagagttgtctacagaact

SEQ ID NO: 461447 - DNA, 544 bp, Homo sapiens
attttttagagacagggcctcattgtgtcgccccgggctgcagtgcacggtcgccatccgagcccattacagccccaaactcctgggctcaagtaatcttcctgcctcagcctccagactagctgggactacaggtgtgtaccatctcactcagcaaatttgtttgtttgtttgtttgtttggtagagatgggggggtctcacttttgaactcctgccctcaggtgatcctcccacctaggcctagcaaaatgttgggattacaggtgtgagccaccacactcagctgatacgctctcgactttaaaggaagtaaacagaatgattgaattctaatgtaaaatcttccacttggtgagagtgaacacgtttaacacttgagagcaacttcccacttttgcccagcagaggctggaaaacagaaagaagaggtgggcacattggggagcacatttcagagggaaggtgaggaggcytaaaaagcacagtgcctctgggggcagataaaaggggatagctgaggctggctgaaacaagaccacgca

SEQ ID NO: 461448 - DNA, 544 bp, Homo sapiens
attttttagagacagggcctcattgtgtcgccccgggctgcagtgcacggtcgccatccgagcccattacagccccaaactcctgggctcaagtaatcttcctgcctcagcctccagactagctgggactacaggtgtgtaccatctcactcagcaaatttgtttgtttgtttgtttgtttggtagagatgggggggtctcacttttgaactcctgccctcaggtgatcctcccacctaggcctagcaaaatgttgggattacaggtgtgagccaccacactcagctgatacgctctcgactttaaaggaagtaaacagaatgattgaattctaatgtaaaatcttccacttggtgagagtgaacacgtttaacacttgagagcaacttcccacttttgcccagcagaggctggaaaacagaaagaagaggtgggcacattggggagcacatttcagagggaaggtgaggaggcctaaaaagcacagtgcctctgggggcagataaaaggggatagctgaggctggmtgaaacaagaccacgca

SEQ ID NO: 461449 - DNA, 625 bp, Homo sapiens
agtatcagggtctgaagcaggtactgaactgccagaggtctgtgtttgatattaggaatattaatctttcatgttttaagtgttgcaaatattttacctaggtctatcatttttttaaactttgtgctgtctttcatcatgtggaagtttaaaatgtttcaatattcaaatctataatagttttcttcatggcttctgggtttcctgtcttgtgtaagcagtctccccatgctgatgttatstaattattttcctctgtttgcttataatacttttatggctccatatatttataattgcatctttagtatatcagaaatttacatttggaatagatgaagaatttatattctcagcatacaggatgtgtttctgaggttgtcttctctcatcactctaaatgtactgggggggctcatttttgagtaaaagaggtcaatatcaaatatgatcccattattgtactcacttatataaacaattctacaatttgttaatgttgattattaactagaatgttaatactggttatttctatgtgatgggttgcagatattaactttttcatcttatcacctatattttctttttctacataaacaattatgatttgtgtagtgaaatg

SEQ ID NO: 461450 - DNA, 552 bp, Homo sapiens
attcttttgcacagttgtatagtactcatttgctgagcccaggctttcaaacacaaggcaaagttcagctggaaacatataggtaggctttgctaaactgtctaaatttcatgaggcaccaaggagcaaaggggtaatgatatggatttatttttagaagattccttatattaggtaggaagatgcacacagcacagcctgcctaaacatgtagccccacctcagtacaaagacatgatgtactgccacagtggtggctggagaaaagcccttccatggaacaagttctgacttatctctggccctgttgcctgcagccctgcggcctctgctttttaagatgtcttccccatgatctgcctgtggaaattttacggaacttcctgtgcctaggatgcagaaaccacgtgtagtcttaatgtgtcaccctgggctactkctctgggtgacgcattaagacaacttataataattgtgcaagagctcgagacgcttcacaggtggtacttaaagtattcccaggcctctagtattccctgggaaagcttgctg

SEQ ID NO: 461451 - DNA, 631 bp, Homo sapiens
agtttacatatctttttcacttagcatcctttccctaataacctccacctggcaaccttcactcaacccaaaactcagggcctcaagctgctgtacagcccatgtttcacaggatggtctgggggctcagatgttcctgacagacaaggaacgaatctcctggttggccacttccagattccctagctcagaacacacattcaggtgcatttgtcatacaagttcattctcagggtatgctttagttattgctatcagatgcatttaccatacaaacacccagtctgaaaatgggcccaaatgtaataacatgtaataacataaatgtagaaacatattccagatgttcttgatcttttctgggacatgattcttttgggggccttatgggaaaaagttattgacccattgtggcatcaaatgcatattcataataaaacttgcataaaattttagggtgttcttgcaccctctgaagccaaccagtaaatcactgggctagatttactgtcctcaaagagagctctctgaaaacaaaacatatcatagaccyatgtaacacaagaaacgatagtaagactctcagttgtcccctgagcagttattttttttctttcttttgaactcttgg

SEQ ID NO: 461452 - DNA, 647 bp, Homo sapiens
cttgggagttagtcagtaaagagtgatggagtatagaagtacgaatattcacaaattatgggttttttctttgtttgttttgtttgtttgtttttgtttttggacagagtctcactgtgtcgcacaggctggagtgcagtggtgcgatcttgactcactgcagcctctgcctccctggttcaagcgattctcccaattcagcctcccaagtagctgggattacaggagtctgccatcatgcccagctaatttttgtatttttagtagagttggggtttcaccatgttgaccaggatggtctcgaactcctgacctcacgtgatctgcctgcctcgacctcccaaagtgctgggattacaggcttgaaccaatgctcccaggcaataaattacattttaaaaaccttttggattacagatattattttcatcaacatcatttgggaaggcaatcctttttccctgggccacccctccaacaagtgacttgaagaccaggagacaattcaagccagctggagcctccaccctgagmtgctgggtctccaaccaggtcaactactagggaaggattcttcttggaagatggaccatgttgccccttctcaacaattctaaggggctgaggacaaccaggaaggactgcct

SEQ ID NO: 461453 - DNA, 415 bp, Homo sapiens
ttaattgactgtgtcgttttctttcttaattgtacaaaaaataaagatgagagagttacaattgatgccctcttagatgaaaaatattattcggatctttcaaagaacataaagtgagatcagatatgcaatacatagcaacatgtcgttaaatctctcctttttttggagatttaacccagaagcctcacattctctctctactytccaccaaaacacctcaaaacatccctgactgcttccccagaaagagtgtgagagtgtgttctctttcttcctcccccgctttttcctcttctctctggaagtccatctcaaccatccttggtgggcctctccccagccccgctcctctggctcttccccaaccctgctgattgagctgctctacttaataagaaaaagagagaggagt

SEQ ID NO: 461454 - DNA, 494 bp, Homo sapiens
aattgttcaaaatacagcatcaaaagcaaaaatatggaaagcacagaagagtggatttagactataggggataagtcagaaggcccaacatatatttgactggagtcccaaaagaggacaatggggatgggaatgaggtaatatggaaaagataaaagctgagaattttccaggactattgaaagacactaagtggtcaaaagaccagagaatcccaagcaaagtaaatgttaaggaatgtacacctagacccatcgtagttaccagtgatcacagtgattaaaaccaagagaaaagcttagagaaaaaaatatacagattatcttaaaagggatcatacttagactaaaaaatatctcaacatcaaaaatggaagccaaaagacagtggaataatatctttaatacrctgaaagaaaataatgacaaatctataattctgatgaggaaagatgaatgacccccaaagatattcaggtcatagtccctggaagc

SEQ ID NO: 461455 - DNA, 541 bp, Homo sapiens
agaagtgatctaagatgctactttagaacagagtccccagtgttaaaaaaaaaaaaacaagccaaaattgggctcacactgctcagttgtagaatataactattgagatacatctctctctacaagaaaaatcctaaagtagttaactccatgggcacctaatttaccggggttctgttcttttttttaattaaatttaatttttttgagatggagtctcactctgtcgcccaggttggagtgcagaggtgcgatctcggctcactgcaaactcctcctctcaggttcacgccattctcctgcctcggcctcctgagtagctgggactacaggcgcccgccrccacgcccggataattttttgtatttttagtagagatggggtttcaccttgttagccaggatggtctcgatctcctgccctcgtgatctgcccaccttggcctcctcacaggcatgagccaccacacccggccggttctgttctttttataatgaaaatgaaccataaagagatcctttcatggtttcaagggtttctc

SEQ ID NO: 461456 - DNA, 499 bp, Homo sapiens
tcaacattacaaatcatcagggaaatgcgaatcaaaaccacaataatgtatcatttcgcctcagagtggctattattaaaaggacaaaaatagcaaatgctggtgaggatgcaaagtaagagaaacacttgcacactgttggtgggaatgtgaagtagtacactcattatagaaaacagtatggaggatcctcaaaaaactaaaactagaactactatatgatccagcaacctcactactggttatatatccaaatgaaaggaaatcactacatcaaagagatacctgcattcccatgtttattccagcactattcacaagtcaagatatataatcaacctaagtgttcatcaattaataaatggttatgacacatggtatatatacacaatggaatattattcagtcataaaaaatgaaatsctgtcatttgcagcaatatggatggaactggaggtcattaagtgaaataaaccaggcacagaaagacaaatattgc

SEQ ID NO: 461457 - DNA, 601 bp, Homo sapiens
tatgagaattaactgagttagtatttgtgaatcacttcagactgtgcctaggacacagtaagcattatgtagatgttagataaattaattaagtacataatagatgtaaaaatataatagctattgaaaggaggtcaaggatatatggagaagaaactaagcaaaggcatagaggcacaagaagatttggcatgcctgcagattttcaaacagttctggttttcgggggatttagggtttatgtggggaattgcagtaggtgagtgaaatacctactaattttgaactttgtaatacacaaaggggaaccactgaaggtattaaaacggaggagattcaatggtgagattttgcytttaaaaggtaaaccctggtgttaactattgggactttaatagtatatgtttttcatcctttttaaaaattttttacctaaccttatatccatgaaaaaaattatggaaacaaatctgaattaggagcctgaagatctgggatatagattttgttcttccacttgcataaacctcttgctctcttagggtcttagtttccttacctgccaaatgaatttaggaaagcctatgcacaaagttaggat

SEQ ID NO: 461458 - DNA, 601 bp, Homo sapiens
tatgagaattaactgagttagtatttgtgaatcacttcagactgtgcctaggacacagtaagcattatgtagatgttagataaattaattaagtacataatagatgtaaaaatataatagctattgaaaggaggtcaaggatatatggagaagaaactaagcaaaggcatagaggcacaagaagatttggcatgcctgcagattttcaaacagttctggttttcgggggatttagggtttatgtggggaattgcagtaggtgagtgaaatacctactaattttgaactttgtaatacacaaaggggaaccactgaaggtattaaaacggaggagattcaatggtgagattttgcttttaaaaggtaaaccctggtgttaactattgggactttaatagtatatgtttttcatcctttttaaaaattttttacctaaccttatatccatgaaaaaaattatggaaacaaatctgaattaggagcctgaagatctgggatatagattttgttctwccacttgcataaacctcttgctctcttagggtcttagtttccttacctgccaaatgaatttaggaaagcctatgcacaaagttaggat

SEQ ID NO: 461459 - DNA, 601 bp, Homo sapiens
tatgagaattaactgagttagtatttgtgaatcacttcagactgtgcctaggacacagtaagcattatgtagatgttagataaattaattaagtacataatagatgtaaaaatataatagctattgaaaggaggtcaaggatatatggagaagaaactaagcaaaggcatagaggcacaagaagatttggcatgcctgcagattttcaaacagttctggttttcgggggatttagggtttatgtggggaattgcagtaggtgagtgaaatacctactaattttgaactttgtaatacacaaaggggaaccactgaaggtattaaaacggaggagattcaatggtgagattttgcttttaaaaggtaaaccctggtgttaactattgggactttaatagtatatgtttttcatcctttttaaaaattttttacctaaccttatatccatgaaaaaaattatggaaacaaatctgaattaggagcctgaagatctgggatatagattttgttcttccacttgcataaacctcttgctctcttagggtcttagtttccttacctgccaaatgaatttaggaawgcctatgcacaaagttaggat

SEQ ID NO: 461460 - DNA, 576 bp, Homo sapiens
acaaacatttgaaatttgagtccaaaatgacgtctgagaaaagctatagacaaatgataagagaggatttaaataaatatgtcctcccaatataaactataaaatagttacagcactgtgtttmgggagttcagaactatatcaattatgaactcagaaactgggtcaagtatgaaagaacaaaatataagtattagaatatattttaatataaaaatgtaatatgcacaggtatgtttcttctagcactattcacaatagcaaagacatgtaatcaacccaaatggccactaattattgactggaaaaagaaaatgtggtccatatacaccatggaatactatgcagccataaaaaagaacaagatcatgccccttgcagggacatggatggagctggaaaccattatcctcagcaaactaatggaggaacagaaaatcaatctcacttacaagcgggagctgaatgatgagaacacatgtatacgtgaggggtgagaacacgtgtatacatgggggtaacaacacacactggggcctggggaggctgtggggagggagagtaccagaaagaata

SEQ ID NO: 461461 - DNA, 576 bp, Homo sapiens
acaaacatttgaaatttgagtccaaaatgacgtctgagaaaagctatagacaaatgataagagaggatttaaataaatatgtcctcccaatataaactataaaatagttacagcactgtgtttcgggagttcagaactatatcaattatgaactcagaaactgggtcaagtatgaaagaacaaaatataagtattagaatatattttaatataaaaatgtaatatgcacaggtatgtttcttctagcactattcacaatagcaaagacatgtaatcaacccaaatggccactaattattgactggaaaaagaaaatgtggtccatatacaccayggaatactatgcagccataaaaaagaacaagatcatgccccttgcagggacatggatggagctggaaaccattatcctcagcaaactaatggaggaacagaaaatcaatctcacttacaagcgggagctgaatgatgagaacacatgtatacgtgaggggtgagaacacgtgtatacatgggggtaacaacacacactggggcctggggaggctgtggggagggagagtaccagaaagaata

SEQ ID NO: 461462 - DNA, 592 bp, Homo sapiens
taactagaaaaatcactgccaatttttttttccaaacaagtatgattttacatatccctgcctgttcttcaaagaaagacatgctatagcaaagcatcaagttttcacaaatatgggctgcagttatgaaaatgaggagtatactcatgtaatcagaaaagaaaaaggtgagaatgatgacactgtagaccataaaggtcatgcccagcttctaacgaagccagaaactgctctgaacatactgctcaaaaaatctaatgagacaatgtacaataagcactccaatgsggaaagtgagtcctgggcagtgcttcctggttaacacgctttttgtataatgttttccaatttgcagtcacttaacacattcattgggtatccagtctatactagtactaagcaaggcactgtgaaagacacaaaaatggtggcctccctgattcttatcaaagttattatttacttgaacaaatccacacgaatcagaatagaacacacaacagcataatgcctggtgaacaactcataggaatgatctgaatattaaatacagaaggaatttgaaaaggcagagattgaggagagggcaata

SEQ ID NO: 461463 - DNA, 592 bp, Homo sapiens
taactagaaaaatcactgccaatttttttttccaaacaagtatgattttacatatccctgcctgttcttcaaagaaagacatgctatagcaaagcatcaagttttcacaaatatgggctgcagttatgaaaatgaggagtatactcatgtaatcagaaaagaaaaaggtgagaatgatgacactgtagaccataaaggtcatgcccagcttctaacgaagccagaaactgctctgaacatactgctcaaaaaatctaatgagacaatgtacaataagcactccaatgcggaaagtgagtcctgggcagtgcttcctggttaacacgctttttgtataatgttttccaatttgcagtmacttaacacattcattgggtatccagtctatactagtactaagcaaggcactgtgaaagacacaaaaatggtggcctccctgattcttatcaaagttattatttacttgaacaaatccacacgaatcagaatagaacacacaacagcataatgcctggtgaacaactcataggaatgatctgaatattaaatacagaaggaatttgaaaaggcagagattgaggagagggcaata

SEQ ID NO: 461464 - DNA, 592 bp, Homo sapiens
taactagaaaaatcactgccaatttttttttccaaacaagtatgattttacatatccctgcctgttcttcaaagaaagacatgctatagcaaagcatcaagttttcacaaatatgggctgcagttatgaaaatgaggagtatactcatgtaatcagaaaagaaaaaggtgagaatgatgacactgtagaccataaaggtcatgcccagcttctaacgaagccagaaactgctctgaacatactgctcaaaaaatctaatgagacaatgtacaataagcactccaatgcggaaagtgagtcctgggcagtgcttcctggttaacacgctttttgtataatgttttccaatttgcagtcacttaacacattcattgggtatccagtctatactagtactaagcaaggcactgtgaaagacacaaaaatggtggcctccctgattcttatcaaagttattatttacttgaacaaatccacacgaatcagaatrgaacacacaacagcataatgcctggtgaacaactcataggaatgatctgaatattaaatacagaaggaatttgaaaaggcagagattgaggagagggcaata

SEQ ID NO: 461465 - DNA, 582 bp, Homo sapiens
gtcaatgacacatgcaagccttgatagggaataaagttggctgtctaactgggacttttctttttaaatttattttttactttttccttctcttttcttactacaagggactctacttttaaatactaaaataggtaaaaatcctagtgtgattcaggaaaaatgaataaatatctcagtggctagatataataaatttcttttgaaattaaaaacatgtgactttataccaagaacgttggttttcccttttgggaatttctaaatttggacacaaaagtgttggttgaatgtcattgttcactctygattttactattagaccattaaatctgagtgagaaaacagcttcctgggggtttgattctgcactgtctgatggaagagcagatctattttctggagtctattctatctaattttcttaggtcatcacttctcattttctcttagaattcagaagggttgctttgattccaggtatgcaaaagagttcaatgaatttcatggcaatttctgaagtatcttaacctcagagtagcgtacttacattttcggaagcagctgtcccttagacctttc

SEQ ID NO: 461466 - DNA, 432 bp, Homo sapiens
tacaaaactgtgactaatgtaagtatcgttttcttcctgaggacaagttttgaaaaaggaaaaatatttgagaactaaatggataaaaaatatatgaaacatccaaaatgattcattctaattaacaagagcaaaasgggttaattgttgttcagtgtgtggctacgtatatttaaaagacagagaaaggaatacagaatatatacctcttttgcgtttcttagcgttgatgacttggtcttaccaaaaccagaaatagtgaaacgcttcacatgtaaaatgaatgctgacatttttccttcctacttgtacttttccctgttttcaccttttcttgccaagtcattcttatttttccatttatttattcattcacccacgtttattgagatcaaattaccaggcattctgaaagaggcaggaggaacaagt

SEQ ID NO: 461467 - DNA, 672 bp, Homo sapiens
cttccccatcaaggaatcaatgcaacctattcatttgctacatttttaccttgttctcttcctgccttgttaccttctgaggaagttctggcatgttataaatgtgacargaaaaactacaatcacatttgtttggatcagtgtgtgcaaattttggaatcaaaccttcagatgaggtttactaagctgcctgcccagaacactctggtttaaaaaatgtgcattgctattaatattttgagtgtagatttattttggacagtaaatgttcattttctgcccataaaaccaagtatgagtcacaacggaacatttacttcgagtcaaaaatgcaatgtgtactgacgttcaagagcagagcatcttatcactatgactgtggcaatcagccgtactaaaagtcaccattcctttttcttctttaaaagtaaatttgagatcaaaggccataatcctcaattcataaatcctagcattaacttctatccataaatgacttgcagtaattaagagccataatctgggttggctgcaaagaggctctcattcccctctttacctggttccatagtacatgtgcatagatggaaagtaattcattaaaggcggtacgggcaagctctgcaaagcctatccatcaaaaaattccaggaacaccacagtgagtgagtt

SEQ ID NO: 461468 - DNA, 629 bp, Homo sapiens
taaggttacatactgaaaaataaatctccagatccagaaaatttcactggggcatggtagcagccatttaaagaataaatatattcaattccatacaatctcttccagaaaaaaagaagacaagcaattacttctctactcatcgtttgaggccattttgtgctaatactaacaccaaacaaagacaatacaaaaaagaatacgacagaccagtatctctcatgaacacagataaaaagcctcaacaaaatactgccgaatcaaactagaaatctatataaagaataatacaccatgaccaagtacastttatcccagaaatgcagagttggttatttaaaaaccaattaatgtaattcatcacaataacaatctaaagaagaaaaaccacaggactttgtcagttgaggtaaaagagaatttaataaaattcatcatcccttcatgttattaactctcagcaaaccaggaaaggaagggaacttcctcaatctgataaagggcatttataaaaacctacagctaacatcatactcaatggtgagaaactgaatgctttcctcttaagattaggaataagataaggacctccattgtcatcattcctattcactattgtattgcatgcg

SEQ ID NO: 461469 - DNA, 587 bp, Homo sapiens
tagccaggatggtcgatctcctgacctcgtgatctgcccgcctcggcctcccaaagtgctgggataacaggcgtgagccaccgtgcctggccaagtcttaccattttcttaattgcccataatgtaggataaatggatggatttggccttcagattattttaaaaatagccctatttctgtgctacttaatttaacaagtggattaaacatctcggatgcagggggaaaataagaatattgaagaaacagggccaagaaaaagygatggatgctaaactctacatcagtttttggagtttagatgggaatatggaaatgtttctcagaaagtctgagaggggtggaaagaaggaagagagaaaccctacagaatgtctcataccctgggattttgacctgtagagcatttacgtattttctaattagaataaacagtgataccattccctactttaaaagaaaaacagctgaagcaatgcagtgtctttcacaaaaaaagagcactgcctatagatttctatttctcatttttatgtgtcagatacaagggtacctaattgcttgcttagggatgtagtattaatca

SEQ ID NO: 461470 - DNA, 575 bp, Homo sapiens
gcttaagccttcattagtagtcacagctactcaygaggctgaggcaggaggatccctttagcccaggagttcaagaccatcctggggagcatagcaaaaccctgtctcttataagaaagaagaagaagaaggaggagaacttaaacccagaggaaatactaaatagacacaagagagatcaaaattaagttgactctgcaagacttgaaaagcatttgaaattagagtgataagttgaagcgggaataaaggaaacaaagaggtatatgcatatttaggacttttgtacttgccgatccctctgttgaagaagctctttcctcaatatcatgggcatttttattattccacatttctcttccgcattgcccagaagatattctctatgagggctccacccctgcagcagacttttgcctggacatccaggcattttcatacatcctctgaaatctaagcagaggttcccaaacctcaattcttctgcacacctgcaggaccaccacaacatggaagctgccaaggcttggggcttgcaccccctaaagcaatggcctgagctgtaccttggccac

SEQ ID NO: 461471 - DNA, 569 bp, Homo sapiens
tctttcctgacctacccagctgaaaaacagaaatttccctcatactatataacctcccctaagatagacattgctctcatgttaaagtcagatgggacatgtcttttctaagtcacttgatgaaggcttgatttgtacactgatayaacaaaattgggagcaggctctcctatctttcagagtctgcatgcattctgcatttggacagtctctaaaaggctattacgatgtatgagtggcaggcgcagtggctcatgcctgtaatcccggcactttgggaggccgaggcaggcagatcacctgaggtcaggagttaagaccagcctggtcaacatggtgaaacaccgtctctactaaaaatataaaaattatcttgatgttgtggtgggcacctgtaatcccagctactcgggaggctgaagcacgagaatcgcgtgaaaccaggaggtggaggtcgcagtgagctgagatcgtgtcattgcactccagactgggcaacaagagcaaaactccatctcaaagaaaaaaaaaaaaaatttatgggtgggaggagtgtggagagtaattta

SEQ ID NO: 461472 - DNA, 569 bp, Homo sapiens
tctttcctgacctacccagctgaaaaacagaaatttccctcatactatataacctcccctaagatagacattgctctcatgttaaagtcagatgggacatgtcttttctaagtcacttgatgaaggcttgatttgtacactgatacaacaaaattgggagcaggctctcctatctttcagagtctgcatgcattctgcatttggacagtctctaaaaggctattacgatgtatgagtggcaggcgcagtggctcatgcctgtaatccyggcactttgggaggccgaggcaggcagatcacctgaggtcaggagttaagaccagcctggtcaacatggtgaaacaccgtctctactaaaaatataaaaattatcttgatgttgtggtgggcacctgtaatcccagctactcgggaggctgaagcacgagaatcgcgtgaaaccaggaggtggaggtcgcagtgagctgagatcgtgtcattgcactccagactgggcaacaagagcaaaactccatctcaaagaaaaaaaaaaaaaatttatgggtgggaggagtgtggagagtaattta

SEQ ID NO: 461473 - DNA, 564 bp, Homo sapiens
catctcaaagaaaaaaaaaaaaaatttatgggtgggaggagtgtggagagtaatttaaaggatctatttttcactttctcaatcccatggataatgaggacttaaagcagcgttatgtagcagaaagaacatgggccctcttgaatcctgagctgccacttaccagttatgtgctttcaaacgcgtgtattaacctctctcagtctcaatcttcttgcatataaaaatatcgttctaatatatgtacaaacagaaaatgttaatacattgttgatggtaattctaaaattggaaacaaatggaggatggctggttaaataaggtgtgatatgctcatagcatggaatgctatacagtcattaagaagattaacgtggatctatttgtacaaacctgtgagttcttacaaatcatcttgttacaagtgtaagaaagcatattgtggagtgataacctataatatgatctcagtttttaataatccccagamtgaaatgtgtctggttgtgtggcaccatcccaaggcattgaaggacacacatccaactgatcacctaatacaga

SEQ ID NO: 461474 - DNA, 507 bp, Homo sapiens
agaccttttaatttattttcctatctgtgrgtgcattcctagaatatacccaacttgctcataatatattatattgtttacatcttgttttggtttcctaataatttgtttaggacaatttgcctctatgtttatgagtaattttatttcttatataattcttatctgattttaataaaagaaattgggacatgtttcttcttttctagtctttgaaagagtttattttatattgagattgtctattcctttcatgtttagtaaatcttgcttgtaaaattatgagaagagattttctttgggggaagatttttcattaccgctgaatttttttttttttttttaagtctacatgcagtatagcctagtgcccaaagaatgagttttggaggcaaactgtctagattcagtctcaggtctgacctcctaactgtgtagaaagtcacttaacctcacggtgcctcagtctcctcatttgcaaaatgaggcacatagggtcgtcgtgag

SEQ ID NO: 461475 - DNA, 537 bp, Homo sapiens
taataaaagcttgacttatggtcttagcatctgtctttcccctttaaactggaagcatcataaaggcaggtacaataattgactttttactatagctgagtacttgataagtgtctctatgtttttgaacatatgtggtcaatagttattgagagtgattaagtggaaagctttattaatcatgcaaatcttactctagatgactttaatcagtctttccccttctttacctttatctaagtgtagcccactgaaggaaatgtaattttcataggaagaagaaaggaaaattgactttggagcctaatactattcaggatgaggctggtgctaagaagctatgctataagcctcaaaggacaatctaaaagcactgggttktagaggtcagaaaacacatttctctattttttaagtttcttaaaatatgtccatgctccaagatcaacaaactaagaagtatgagcacatttgaacaaagttgaatgttgtcatccattaaacttataacccagtaaatttggcacatgatattgt

SEQ ID NO: 461476 - DNA, 537 bp, Homo sapiens
gagtttgtaaatggtgaaagatttgaaaattaagstatgatttcagtgaaaagtaccaagtgttgtattgtgcgaaggaaaagtagactagagttatttttctttccttgagtgtcacttgaatataaaagaataaaaatttttgaatagtgtttatcaattatgtactagactttgaaattatcccctggattggctattcctgaagtgtgtgtttgtgtttgtgtgtgtgtgtgtgtgtgtgtatttagagactggattttcattgactcagtttcagaataaatcaggtaagaccaattctaaaatccccaagtaaactgtaggaaaacttgctactttactataatttccattgtattgaaaattcagacacactgtagagaaagtcatggaagagccagctaggttggacttaagccagttaaatctttaaaacaggattacaaaaaggtttgatttctggtatccatccattcatcaatgtctactctaggtagggaattagtaaggtgaaaaagggtttgtatgtttgtc

SEQ ID NO: 461477 - DNA, 537 bp, Homo sapiens
gagtttgtaaatggtgaaagatttgaaaattaaggtatgatttcagtgaaaagtaccaagtgttgtattgtgcraaggaaaagtagactagagttatttttctttccttgagtgtcacttgaatataaaagaataaaaatttttgaatagtgtttatcaattatgtactagactttgaaattatcccctggattggctattcctgaagtgtgtgtttgtgtttgtgtgtgtgtgtgtgtgtgtgtatttagagactggattttcattgactcagtttcagaataaatcaggtaagaccaattctaaaatccccaagtaaactgtaggaaaacttgctactttactataatttccattgtattgaaaattcagacacactgtagagaaagtcatggaagagccagctaggttggacttaagccagttaaatctttaaaacaggattacaaaaaggtttgatttctggtatccatccattcatcaatgtctactctaggtagggaattagtaaggtgaaaaagggtttgtatgtttgtc

SEQ ID NO: 461478 - DNA, 607 bp, Homo sapiens
ttggtttctatttgcatggagtatcttttcccatcccttcactttcagtttgtgtgcccttataggtgaagtgagcttcttgtttacagcgtatagttgggccttattatttattccattcagccactctttatcttttaattgaagaatttagcccatttacatttaatgttattatcgataagtaaggacttcttattgccatttggttagttgttttcttgtgattttgtaacctctctcttccttttttactgtctttctttgtgcctaagtgatttttctctaatattaggttggtgcaaaagttattgtggttttggaccataaattttaaatcactgtaactaggctcaaacacatctttattaaccaraataggagccattacaatcagtacattttggccaatgagaaataagtttgtttattcctgtagcataaaaattcatgcttcaggatttgactaactcttggaaagcattttctgcatcctgctggttgtggaggcattttccctgcaaaaagttatcgagatgcttgaagaagtggtaagcagttggcaagagttcaggtgagtatggcagatgaggcaaaacttatagcc

SEQ ID NO: 461479 - DNA, 673 bp, Homo sapiens
gtagctactttaattgtaaagatccttaatgaaaaaaatttaaagcatcaagtaccttccagattttgagcctttgaacataattgtacccaagttttagcacattcatggttgccaaagactcccttggaacaatcctaataagggctgctttccagagtcaggaaaatccacccaggccctaaaattagtataataaaccccacctgtcatctctattgcctctttggttagactgccctgaggagcccaaatcaagaaggaacaaagtgtttttgatgtggactgactgcttgtgatccaagagaacacttaagattctgaaaaatctagggagaatggcaagcaatgatctgtgtggttaatagaacaacaaggccaagacaaattcagagaccctggggatattttgaacctctctacaaagctaatcgcaaatcagtacctttgaaagggaccgtggagaaattatcagctgaatctccttattttgttttattttattttatatgaaacataaaatrtgaccagcatcagggcaggatgtgacttacccgaagtctctcaactagcaagtggcaaagccagaaacactcaaacctgggtcttctggctccaagtccactgctctttaatctgaatgaagtgagaatgctttttatgtgtgttttta

SEQ ID NO: 461480 - DNA, 562 bp, Homo sapiens
tttgttgctgttgatgtcattgctttgtttgttagttttccttctaacagtcaggcccctcttctgcacgtctgctggattttgctggaagtccactccagaccctgtttgtctgggtatcaccagcagaggctatagaacagcaaagattgctgcctgctccttcctctggaagcgtcatcccagaggggtacctgtctgatggcagatggagctctcctgtgtgaggtgtctgttgacctctcctgggaggtgtctcccagtcaggaggcacaggggtcagggacccacttaaggaggcagtctgtcccttagcagagcttgagcacygggctgggagatctgatggtcttcagaaccagcaggtaagaatgttttaagtctgctgaagctgcacccacagcctccccttcccccaggtgctctgtcccagggaaatgggaattttctctataggtccttgactggggctgctgcctttctttcagagatattattcccagtgaggaggaatctagagaggcagtctggccacagcctctttgccatgctgtggtacgtt

SEQ ID NO: 461481 - DNA, 470 bp, Homo sapiens
atatcccatggaactttctccaagatagacaatataataggccatgaaatgagcctcaataaatttaagaaaattgaaattatatcaagcactctctcagaccacactggaataaaactggaaattaactcgcaaatgaaccttcaaaaccatgcaaatacatggaaattaaataacctgctcctgaatgagcattgggacaaaaacaaaatcaagatggarattaaaaaattgttcaaactgaacaacaataatgacacaaccgaccaaaacctctggtatacagcaaaggcggtgctaatagcaaagttcatagacctaaactgcctacatcaaaaagactgaaagagcacaaactgacattctaaggtcacacctcaaggaactagaggaacaataacaaaccaaacccaaacataacagaaaaaaagaaataaccaagatcagatcagaactaaatgaaattgata

SEQ ID NO: 461482 - DNA, 550 bp, Homo sapiens
gacacaaacaaatggaaacacattgtgatggttaatactgagtgtcaacttgattggattaaaggatacaaagtattggtcctggttgtgtctgtgaaggtgtacccaaaagagattaacatttgagtcagtgagctggggaaggcagacccacccttaatctggtaggcacaatctaatcagctaccagcaaatataaagcaagcagaaacccaygaaaaggactggcctagcctcccagcctacatctttctcccatgctggatgcttcctgcccttgaacattgaactccaagttcttcagttttgggatttggactggctctccttgctccttagcttgcagacagcctattgtgggaccttgtgctcatataagttaatacttaataaacttatatatataaaatatattatacatataatatatagaagtctatatatatagaaaaaaggaaggccatatatatatatatatatatatatatatgtatctcctaatagttctgtccctctagagaaccctgactaatacacacatcccatgctc

SEQ ID NO: 461483 - DNA, 606 bp, Homo sapiens
ctgtcaaattattctaccttgtacattcagtaaaaggggcatagatggggcagagagcaagttgcagcccatcagcagcttcacagaaaatcttagggctcccctaaggtaaagagaaaaactgaggccactgtgtttgcatatgtaatccagtcctattcyagttgatgtcagaatagataggcacacatttttggcatttgaaataaaagcaggaggaggaaattacaagagtgagcatgcacaacaaaatgctcttaatttttcctgtaatgaaacagaatcaaagtggatcattataactgttcattgaggccgggcacggtggctgacacctgtaactccagcacgttgggaagccgaggcaagtggatcacctgaggtcgggagatcgagaccagcctggcaaaaccccatctctactaaaaatacaaaaattagccaggcgtggtggggtgcctgtaatcccagctactcaggaggctgaggcaggagaatcgcttgaaccccagaggcagaggttgcagtgagccgagacggcgccattgcactccagcctgggcaacagtctcaaaataaaataaaataatgttcattgagaaatca

SEQ ID NO: 461484 - DNA, 621 bp, Homo sapiens
cgtgtaactggttgtgagcaaaattactggaagaaatatggacaatttctgatgaggccattctgatgaggtctcagacagaaaaarggaacatgttattggacaaaggaggaaaggccacccttgttattaagtagaaaagtacttggctgaattgtgttagtgtcctagtgttttgtggaagatagaatttgtgaatgatgaaagcagatatttggctgaagagatttctaagcaaagtgttgaaagcatggtttggctcttcttgactgcttgtagtaaaattagagaagagagaaatgacttaaagatataattgttcatcaaaaggagagcaaaatttaaaaatctggagattttgcagctgattcatattggaaaaaatgagaaaacctgttcaggaaagaacaaaggtgcagccaagagactatttgataaggagattcatatgaattgaacatctcaacggaagtcaagtactattcatcaagacaatgggattattagtcagccatctaaacaaaagccaggacctattgtataagacaatagaagaaggacccaaaagacatatcagagatcatcagggcttcttctccaccataggcccagagtgccagg

SEQ ID NO: 461485 - DNA, 529 bp, Homo sapiens
tcttgacagcagtttgtgtgaaatagacctagagattttagttggcctcaagatcaatacgagccagcagtgagatctgactgctaaagatgctggtacaatctaaagctamactaggagaagtattttgtctgcttcacaaaaagcaattgtcccactgtaccctgttacagtccaaccatatgtgtgatattgttttcaacattttaagaaaaacatttacaaactgattaagttcagagtagataaactagaatgatgagagaatgtagaaaatatagtatatgacagatagctaaaggaccaggggacatatacactgagaacagaaaatctggggtcaaggaatgtagcagcatctctaggaaagaggaaagaaacaggtggtaaagagtggtgaggggcatgtgtgatttgagaaagtcccatcaatgcgtcaaatacacacagaatccaccatacccatgccacatacatggctgaggactactgtccctgaggaaataaaccagccagctgaatattatag

SEQ ID NO: 461486 - DNA, 589 bp, Homo sapiens
tcagtaacatattatgcttttgacctttgtcaaatcatttaaaattgattaatctctatttttcatctgcaaggtaagaataaaaatgctttccttggccatcacatggagtaataattaactgagacagtgtatcatataagatttaaaagtgtttcataacctgtaaagcaccaggcatcattcaacccactggtgtatgaataaacggctaactacttctctggcaaatttctattgctatcaatatcaatattactcctcgcctcacccacctccagcctcactccaagaacatgtaaaccttccagtggctcaagccatttgatatttcctatgaggctctattcctytccctccttctaaatacaagtacaaagaacttctttatgttattacatctaaaggtggtcttttaaacttttattttaggttcagggggtacaggtgaaggtataggtataattacttttgcaccaactgaataactttttgagtaatcgccatactgctttccacaatggttgaactaatttacactcctacgaacagtgtataagtattcccttttctccacaacctagccagc

SEQ ID NO: 461487 - DNA, 589 bp, Homo sapiens
tcagtaacatattatgcttttgacctttgtcaaatcatttaaaattgattaatctctatttttcatctgcaaggtaagaataaaaatgctttccttggccatcacatggagtaataattaactgagacagtgtatcatataagatttaaaagtgtttcataacctgtaaagcaccaggcatcattcaacccactggtgtatgaataaacggctaactacttctctggcaaatttctattgctatcaatatcaatattactcctcgcctcacccacctccagcctcactccaagaacatgtaaaccttccagtggctcaagccatttgatatttcctatgaggctctattcctttccctccttctaaatacaagtacaaagaacttytttatgttattacatctaaaggtggtcttttaaacttttattttaggttcagggggtacaggtgaaggtataggtataattacttttgcaccaactgaataactttttgagtaatcgccatactgctttccacaatggttgaactaatttacactcctacgaacagtgtataagtattcccttttctccacaacctagccagc

SEQ ID NO: 461488 - DNA, 589 bp, Homo sapiens
tcagtaacatattatgcttttgacctttgtcaaatcatttaaaattgattaatctctatttttcatctgcaaggtaagaataaaaatgctttccttggccatcacatggagtaataattaactgagacagtgtatcatataagatttaaaagtgtttcataacctgtaaagcaccaggcatcattcaacccactggtgtatgaataaacggctaactacttctctggcaaatttctattgctatcaatatcaatattactcctcgcctcacccacctccagcctcactccaagaacatgtaaaccttccagtggctcaagccatttgatatttcctatgaggctctattcctttccctccttctaaatacaagtacaaagaacttctttatgttattacatctaaaggtggtcttttaaacttttattttaggttcagggggtacaggtgaaggtataggtataattacttttgcaccaactgaataactttttgagtaatcgccatactgctttccacaatggttgaactaatttacactcctaygaacagtgtataagtattcccttttctccacaacctagccagc

SEQ ID NO: 461489 - DNA, 549 bp, Homo sapiens
ttattacatctaaaggtggtcttttaaacttttattttaggttcagggggtacaggtgaaggtataggtataattacttttgcaccaactgaataactttttgagtaatcgccatactgctttccacaatggttgaactaatttacactcctacgaacagtgtataagtattcccttttctccacaacctagccagcatctgatatattttgactttttagtaataggcattctgattggtgtgagatggtatctcattgtggttttgatttgcatttctctagtsctcagtgatattgcgctttttttattcatatacttcttggccccatatatgtcttcaaaggtctaataaccaacgactataaggaacttaaaaaaatttatgaaagaaaaacaaacaacctcaataaaaagtgggcaaagaataggaacttcttaacaatgtgttgaaagaaaaaaccatttggtaatggaaaatgggtggtcctcctacagcctctgcagcctgtcttttaagaaccttcttcaccaccatcaaaaccatta

SEQ ID NO: 461490 - DNA, 557 bp, Homo sapiens
aaaaacaaacaacctcaataaaaagtgggcaaagaataggaacttcttaacaatgtgttgaaagaaaaaaccatttggtaatggaaaatgggtggtcctcctacagcctctgcagcctgtcttttaagaaccttcttcaccaccatcaaaaccattagccaggctcccaacttcctcctcctattcctatgctaattaggatggccattactgcatcccccagtcttcccctcctcagacagccccttgggcctcctttcctttcctcttcactttagtagctgactgactctggctctcttctgaaaactgtttcttggaaatgctgtgaaaaaatcttccaggctgaagtactaaacactgatagcatgtcctttttctcctccttttctgggagctgtccattgatagagatcaaatgccttcttatcccaaaggaatgagccactaggggacaggaatgtcattatttgatwacacagagcttttcatggaattttttacataggcaacataggtgaaaccgcctttgcaaaattatgactgagacagtgaaa

SEQ ID NO: 461491 - DNA, 457 bp, Homo sapiens
aatctactctgcaagcaatggcaaagaccgcttgaccaaccagcagccacttggcaacatttcaaggctgggtccagaagagctggaagcaattcaattccttgattttagaatcaaggaatcccaacagtttgaacaaaattgggaatggtttttccagatccctcagggagaagacagcgtccctgtttgttaacatcaggatttatgttgctcaaagccaacacaacttraggatatacaaaaatgcacctagatatgtaagcccagtaaacaccctcagttctgtactgcaaagtggatattggcaaagaaaatctttaaattaccctcacagcatgtgtctcctcagcaaagcaccaaatgtgcctttcttcagtagccaaactaatgaggaaaagatacatccacagatggcaacaagacctgtattgagctaatcattataatcctttct

SEQ ID NO: 461492 - DNA, 457 bp, Homo sapiens
aatctactctgcaagcaatggcaaagaccgcttgaccaaccagcagccacttggcaacatttcaaggctgggtccagaagagctggaagcaattcaattccttgattttagaatcaaggaatcccaacagtttgaacaaaattgggaatggtttttccagatccctcagggagaagacagcgtccctgtttgttaacatcaggatttatgttgctcaaagccaacacaacttgaggatatacaaaaatgcacctagatatgtaagcccagtaaacaccctcagttctgtactgcraagtggatattggcaaagaaaatctttaaattaccctcacagcatgtgtctcctcagcaaagcaccaaatgtgcctttcttcagtagccaaactaatgaggaaaagatacatccacagatggcaacaagacctgtattgagctaatcattataatcctttct

SEQ ID NO: 461493 - DNA, 457 bp, Homo sapiens
aatctactctgcaagcaatggcaaagaccgcttgaccaaccagcagccacttggcaacatttcaaggctgggtccagaagagctggaagcaattcaattccttgattttagaatcaaggaatcccaacagtttgaacaaaattgggaatggtttttccagatccctcagggagaagacagcgtccctgtttgttaacatcaggatttatgttgctcaaagccaacacaacttgaggatatacaaaaatgcacctagatatgtaagcccagtaaacaccctcagttctgtactgcaaagtggatattggcaaagaaaatctttaaattaccctcacagcatgtgtctcctcrgcaaagcaccaaatgtgcctttcttcagtagccaaactaatgaggaaaagatacatccacagatggcaacaagacctgtattgagctaatcattataatcctttct

SEQ ID NO: 461494 - DNA, 482 bp, Homo sapiens
taagaatgaacaagactagctaagaacctttttctcatcttataaactattgtcaaaggagaagtgggacaaaggctgattatagggtcaggaacacrtgagattcctggccacatcaatccagtgccaaagagaggatgagtaagtgacaaaacaagttgggaatgcagttgttctcatttcctcttcatgctgagtttactaagctctgctgtttcctagccagaccacttaaactcattcatttcacttttccactcataaacttgtgctaataacttcacctgtagcactggtttaaatgattaaatgagataatgcatgtaaaatttccttataaactgcttgcttctttgtaaaagttattataactactttttagtttttcttttgcaccttgattaaatataaagatattttagtttttcttttgcaccttgattaaatataaagatattttagtttttcttttgcatctttat

SEQ ID NO: 461495 - DNA, 648 bp, Homo sapiens
gttatctcctatggcaaccaacagattgcttttgcttaatagaaaataacatttgttggataaatgaatgaatgagagcctacattttgcatattttagtagtaccatttattcattattatataagtcttgtgctatatgtattagcttgctagggctaccataacaaaataccacaaactgggtggctttaacaacagatatttgttttcatgcagttctagaggctgaagtttgacatcaaggtgttggcagggctggtttcttctgaggcctctcttcctccctggattgtagatggctgtcttctccctgtgttttcatataagtcttcctyctctacaaatctgtgtcctagttttctcttcttataaattcactagttattttgaattagggcccactttaatgaccacattttaatttaatcactttttttacagatcttatctataaatactgtcagattctgaggtactagaagtgaggacttcagcatattaatttggggcaatatacaactcagcccataacactacataagatgcaatcatttatctcagccaatagagagtaacagttcaacttagacaataagatcagagagcctgaatctgagtactgtgtgatctggggcacgatcgttaa

SEQ ID NO: 461496 - DNA, 648 bp, Homo sapiens
gttatctcctatggcaaccaacagattgcttttgcttaatagaaaataacatttgttggataaatgaatgaatgagagcctacattttgcatattttagtagtaccatttattcattattatataagtcttgtgctatatgtattagcttgctagggctaccataacaaaataccacaaactgggtggctttaacaacagatatttgttttcatgcagttctagaggctgaagtttgacatcaaggtgttggcagggctggtttcttctgaggcctctcttcctccctggattgtagatggctgtcttctccctgtgttttcatataagtcttccttctctacaaatctgtgtcctagttttctcttcttataaattcactagttattttgaattagggcccactttaatgaccacattttaatttaatcactttttttacagatcttatctataaatactgtcagattctgaggtacyagaagtgaggacttcagcatattaatttggggcaatatacaactcagcccataacactacataagatgcaatcatttatctcagccaatagagagtaacagttcaacttagacaataagatcagagagcctgaatctgagtactgtgtgatctggggcacgatcgttaa

SEQ ID NO: 461497 - DNA, 505 bp, Homo sapiens
catatgtccacaaaatctcgtacatgtatgttcataacattattattcataatacccaaaaagtaaaagcaatccaaatgttcattatctgatgaatagatgaatgaaatgtggtataactgtataatggcgtatcattcagtcataaaaaagaatgaagtactgatgcatgctacaaacatagatgaacrttgaaattattattctaaatgagagaagatagtcataagaggtcacatattgtatgattccatttatatgaaatgttcagaaaaggcaaatccatagttgcagaaaagtggttgccagtggctggggtaaggggctgctggagagtggctgcttaatggatatatgatgttttgggtaaggtgataaaaatgttctggaattagataacagtgattgttggaccatgtcacaaatataattttaaaactactgaattgtatactctaaaatggtcaagacggttaattgtatgctatgtgaagcttgcctcaaa

SEQ ID NO: 461498 - DNA, 588 bp, Homo sapiens
tttacgttgcaagtgtcagaaaacttactttgagcaaattaaaatttttaatgagacttcatggttcaagtttgtgtgttttctagtacatttcaatgctgagattcctgtcgccatcaagcttctctttctctatgcttcactgttatgtattttgcccttctttgtgtattcaatttttcctcargctagactctcattatagtaaaagaaatggccatgctagctctagaactcactcctcaactctagactatccagaataagagtggcagtctcttcttgtagctctctctaagctatgcagaaacttctctctcagaactcctagcaaatgcttctttacatctcatttgtccaaattgggtcacatcctcaaaagtgaaaatatcaactaggcccaagggaaattttgaagtcaaactcctctattcttccatgaattgggaggaagcaatgctcacatttaatcagcatgttgttaccaagggacaaaaaaaggcaggggtggggggaaaattaatggattttggagaatcaagactagcaaatatttctacaatagcttcatttctaattttatattta

SEQ ID NO: 461499 - DNA, 516 bp, Homo sapiens
tatttatttcttggtgtgtgtatgaggttaaataatgtctgtctaaaattcttgctcactcagaacttaagaatgtgaccttatttggaaacaggggctttgcaaatgcagataacataaaatctaatgtattagggtaagcctttaatccaatgattggtgcctttataaaaaggccatatgggttgcatgcggtggctcgcacctgtaatcccagcattktgggaggccgacgcgggtgggtcacaaggtcaggagtttgagaccagcctggccaacatggtgaaaccttgtctctactaaaaatacaaaaaaattagctgggcggggtggcgggtgcttgtaatcccacctacttgggaggctgaggcaggagaatcgtttgaacctgggaggcagaggatgcagtgagccgagatagtgccattgcattccagcctgggtgacagggtgagactccacatggaaagagaaaaaaggccatatgaagacacagagatagacactgagggaaga

SEQ ID NO: 461500 - DNA, 516 bp, Homo sapiens
tatttatttcttggtgtgtgtatgaggttaaataatgtctgtctaaaattcttgctcactcagaacttaagaatgtgaccttatttggaaacaggggctttgcaaatgcagataacataaaatctaatgtattagggtaagcctttaatccaatgattggtgcctttataaaaaggccatatgggttgcatgcggtggctcgcacctgtaatcccagcattgtgggaggccgacgcgggtgggtcacaaggtcaggagtttgagaccagcctggccaacatggtgaaaccttgtctctactaaaaatacaaaaaaattagctgggcggggtggcgggtgcttgtaatcccacctacttgggaggctgaggcaggagaatcgtttgaaccygggaggcagaggatgcagtgagccgagatagtgccattgcattccagcctgggtgacagggtgagactccacatggaaagagaaaaaaggccatatgaagacacagagatagacactgagggaaga

SEQ ID NO: 461501 - DNA, 506 bp, Homo sapiens
  misc_feature (1)...(506): n = A,T,C or G
tcaacattcactattttagcattcacagcgttgattattggtgtagaaggtgcaagacatagagtgactggtaattttgctgcagcaaaaaattaaattgacatagacaaagatgctagtttgtatgaatgccattttactagtgaaagcagctaacaaattgtgcagagtctgcatctcaacaaggtttcatattatccattcaatttcatacatgcrataacacaaatgtatttttgtgagaaaaatgttaagtccggagaaaaaaaaagaaatcgtaaaaaaatggacnaactgttactttgtcatgtgaagatatgtggttaaaaaccaggtgccaagggtcttctggaattggttgggatggtaacatgatcttaccaatggtgcatgcatattgatatccttagttagagctgtgacaggaaatcttcacatgccttcctgaatctaattatcacagaacaaagtattttatactaggctacccatttggggaaaaaaaa

SEQ ID NO: 461502 - DNA, 579 bp, Homo sapiens
atttcttgaacttaaaaatgaaagacaatttgcccaggtttagtaaacatccattccaacctcttttttaatgccctgaaagctaaaagttatattttccattgagtcagtgttaaatttcttgggtatgttaacggtattatggttaagtagggaaatgtccttgttcttaggatattcatgttgaatgattcatgatgaagtgtcatgatgtctgcaacttactttcaaatagttctgcaaaatctaactcacagtaacaggtgaaggtaggcagagaataaagcatttatttatatgagagagagagagagagcaagtgtggcaatagtttaatagtgaaacaggtgaatggttatcaggtattcaaacactattctttcaactttcttgtagcttyactttctttcttattaaataatatttgaaaaagtgctaattttctttatagtcgataaacaaaagcatatttgatttcatatcaaattctggtcagaatgttctctctttaactgagagtttgttaaatgtgagtcattgttttgtttcccgcctttgttagccttagaaaagaatgtc

SEQ ID NO: 461503 - DNA, 525 bp, Homo sapiens
tattaacctgttagatgaaatatagctaaccttattatgaactaaaacagagaaatcgtgattagaacatttagctatgctatgcaaggacataaaggcaaccaaaatgttgtcacgatatttcttttattttttgaaataagagaaataaaactttattctaaagctgcagaaaatgtgggargtaaaaatatttcagcattttagtatttttcccctacacaaaattatcaggatgccattttttttaattatacgttaagttttagggtacatgtgcacaacgtgcaggtttgttacatatgtatacatgtgccatattggtgtgctgcacccattaactcgtcattaacattaagtatatctcctaatgctatccctccccacttcccccaccccacaacaggccccggtgtgtgatgttccctttcctgtgtccaagtgttctcattgttcaattccaagggtccccaaaccagcttccttccatactaacatctcctacttgttgacacacttcaggtg

SEQ ID NO: 461504 - DNA, 566 bp, Homo sapiens
gagaatagcagttaactacaggattgaggtaagaattatttgagacaatgcaagcacttagcattgtgtctggcactcattaaaggttgtagttattattatggttgctgctgattgttgttgctgtggttgttatcgtagtagtggtaaagaaagatgttcctgtctctcgcagagtttgtttcctttctcattttagtcaggtgcggtgcccacctttcaaccatgtcaacgttttaggtcattttgtactgagtgtgaggattaaaaataaataattgatctgagctagggcagagctgtgatttgaatgtttgacccctccaaaacgcaggttcaaatttaatttgcgatgtaacactgtgaagggttggrgcccttaagaagtaattacacggttataaaagggtgggttcagcctccttttgcctctcgttgtccctctttgcttttctgccttctgttatgtgatgatacagcaagaagaccctcacaagatgccggcaacttgatcttaaacttctcagccttaagaattttgagaaaatacatttctgttcattaca

SEQ ID NO: 461505 - DNA, 601 bp, Homo sapiens
tatttctggcttcatgctttcatgctgctctccgtccttggagttagaaacatggctatttgacaactcaagttcgcaactccaaaaaccacctcggtgtcaagttaaaattttcttaaggaaatgcagtgattggttcaacctggatttggtgcccatccttggaccaaacaatgatccagggtgctgggttataagtgaaccacttgagttaggtaactgtggccaatggtgtagggggtctctaagacagtagaagcttcttttcaagccaccactgtgggctgacaaagrccagatgtcaattacaatttttcatcacctatataattgcttccaaagaaaaagatcaaggcatttaaattttcagtagggcaataggaaagaaagctgcctacgttcaaattctggctgcataacttattagctgtgtggccttggacaaattacttaatgcctcctacttaagtttctcatctgaaaaattgtagtaataatgttacttacttattgaattttgaaattcaatagccccaaactgcatttcgccttctttcccttgaaacctacactttctcacagcttccctttgtcaattaat

SEQ ID NO: 461506 - DNA, 601 bp, Homo sapiens
tatttctggcttcatgctttcatgctgctctccgtccttggagttagaaacatggctatttgacaactcaagttcgcaactccaaaaaccacctcggtgtcaagttaaaattttcttaaggaaatgcagtgattggttcaacctggatttggtgcccatccttggaccaaacaatgatccagggtgctgggttataagtgaaccacttgagttaggtaactgtggccaatggtgtagggggtctctaagacagtagaagcttcttttcaagccaccactgtgggctgacaaaggccagatgtcaattacaatttttcatcacctatataattgcttccaaagaaaaagatcaaggcatttaaattttcagtagggcaataggaaagaaagctgcctacgttcaaattctggctgcataacttattagctgtgtggccttggacaaattacttaatgcctcctacttaagtttctcatcygaaaaattgtagtaataatgttacttacttattgaattttgaaattcaatagccccaaactgcatttcgccttctttcccttgaaacctacactttctcacagcttccctttgtcaattaat

SEQ ID NO: 461507 - DNA, 559 bp, Homo sapiens
tggccaaagttcttaaatgtgataaaaaccagtggttgcaaaggatggacagaaaaartgaatattcaagcatggctgctggaaacatagacatcagtttagtaatctcagaaagctgaccaagctctcattcttcatcccaatgattccttttctaactatatatcttagagcagtagttttctaagtgtggttcacagacccctgggggatgctgagatcttttcagactgtctgaaagtcaaaattagttttattataatatgaaggccatgtttgtctttttctctgtgttgacatttgcactgatggtttaaagcaatggaagataaacaaacaaaaaaacaaaaacaaaaaacggttagcacaaatcaaggcagaagcacaaaagtgtactacagttcaagttcttcaccactgtgcacttgcagttcaaaaataggtttacttacaaatatccttcataaatcagtaaaaattattaaatttctaacattttgcatcttgaatgcacatccttttaatattctatgtgaaaaaattgcaattaagcatgaaa

SEQ ID NO: 461508 - DNA, 392 bp, Homo sapiens
gttagcacaaatcaaggcagaagcacaaaagtgtactacagttcaagttcttcaccactgtgcacttgcagttcaaaaatagktttacttacaaatatccttcataaatcagtaaaaattattaaatttctaacattttgcatcttgaatgcacatccttttaatattctatgtgaaaaaattgcaattaagcatgaaatatttctgttgtatactaaagagtatagaacacttgtgtgattaagttatgagctgaattagctgcttttatttatgggacaccatttttacttgaaagaatgactgacaagttacacttattcaggaagatacatagcagacattaaaatgaacaaagtgaatttgtcatttcaagacaaacatggattatg

SEQ ID NO: 461509 - DNA, 539 bp, Homo sapiens
  misc_feature (1)...(539): n = A,T,C or G
cgtattctcctcgtaaattctgcatatagtctatgtgtcttggtgctggggtcattggtgtttcaatttaannnnnnnnnnnnnnnnnnnnnnnnnnnnnnnnnnnnnnnnnnnnnnnnnnnnnnnnnnnnnnnnnnnnnnnnnnnnnnnnnnnnnnnnnnnnnnnnnnnngagggagggagggatgaaggaggcaaggaaggaaggaagggaygagaaggagggaggaagagagagagagagaggaaaggaggagggaaagaagaaagggaggcaggaggggaagaagaaggagggaggaagaaaatttacattttaggtatcttagtctagagcttgctcatctttattttgtagatgtggtcttcagttcgcagagtaaacaaggtgattacacgcatatactttatagactgccatcttcagtgctgaaatctttattttattttctaagatgagacatatcctggcttctttttatgtgacactaaaatccccagaaccaccaaaacagactagaaaatcccttcatttgaaca

SEQ ID NO: 461510 - DNA, 322 bp, Homo sapiens
gaagtgaaaattttccaaactcattagatcagaagtgaaatattctgcagtagcttggacttcaggtttgcgtcttataatgaaagaatatatactatgctatttatggataacaacagattaattctataattctttatagtttaatcacttgacttcatgctgagaggctaatacgtctttgatagtcttggattrttaaaaaataatgctcaatctctaccacaaagacttaactctaggaagaagcatcatggcctgatgatctgtgaccttggggtcacactgacttggggtcttgcctttgccaccatgtggatgc

SEQ ID NO: 461511 - DNA, 535 bp, Homo sapiens
gcagggaggaagaaaaggggtgggaaaggaaggaaagacatcactatttatcaaatgaatgccttgtccctggcactgtgcttccacatatgttcctgattaattgtcccaacaactctgagaggtcggtgttagtatgttcagtttccagatgtggaaacagaggcttaaggacttggagtaatttactcaagatcccagagtcaggagagagggaagccaaaattgcaactgtcctgctccagtgtgcatggtcttttcatgggaggtttgtgcaaacaacaccaaatcytaagcctttactctcagcttccaatcatgcagagtatttcctgacaaattcctggtaacagcattattctacagcatgccccgggagtcttgggagtcatacttggttacgagaagtgcaaaacaaaaataaaactctaagcgcccccaaccaactgaatggatccctctcttggccaagaaggattccaaaaaatacctgaaaaaccacatcagcccatgatgggaaggaggagtcagactt

SEQ ID NO: 461512 - DNA, 608 bp, Homo sapiens
cttgctcattacacataaagctgctatgaacatttgagtatgggtttttgtgtgaacataagttcatttcccaggataaatgcccaagagtgaaattactggatcatatggtaatttcatgttttcttttataagtaaactgggargtatttttctgaatggctgtgaaattatacattactgccagtaatatacgggagataaagtttttcagcatagttgtcagaatttgatgttatcactatcttttaccattctaataggagttagtgatatcatgattttaatttgcctttgtaaccattctaataggagttagtgatatcatgattttaagttgcctttttcctaatggttaatgatgttagaacatcttttcactcatttatttgcagtttaagtggactctttggtaaaatgtctgttgatgtctttccttcattttccatttggtttgtttgttttcttattgctgagttttgaaagtactttacattctggacacaaatcctatatcattgatctattggtatatccttcatgtcaataccacactgtcttgattactgttgctttagaataactccttaaaaatctagtaatattag

SEQ ID NO: 461513 - DNA, 608 bp, Homo sapiens
cttgctcattacacataaagctgctatgaacatttgagtatgggtttttgtgtgaacataagttcatttcccaggataaatgcccaagagtgaaattactggatcatatggtaatttcatgttttcttttataagtaaactgggaggtatttttctgaatggctgtgaaattatacattactgccagtaatatacgggagataaagtttttcagcatagttgtcagaatttgatgttatcactatcttttaccattctaataggagttagtgatatcatgattttaatttgcctttgtaaccattctaataggagttagtgatatcatgattttaakttgcctttttcctaatggttaatgatgttagaacatcttttcactcatttatttgcagtttaagtggactctttggtaaaatgtctgttgatgtctttccttcattttccatttggtttgtttgttttcttattgctgagttttgaaagtactttacattctggacacaaatcctatatcattgatctattggtatatccttcatgtcaataccacactgtcttgattactgttgctttagaataactccttaaaaatctagtaatattag

SEQ ID NO: 461514 - DNA, 608 bp, Homo sapiens
cttgctcattacacataaagctgctatgaacatttgagtatgggtttttgtgtgaacataagttcatttcccaggataaatgcccaagagtgaaattactggatcatatggtaatttcatgttttcttttataagtaaactgggaggtatttttctgaatggctgtgaaattatacattactgccagtaatatacgggagataaagtttttcagcatagttgtcagaatttgatgttatcactatcttttaccattctaataggagttagtgatatcatgattttaatttgcctttgtaaccattctaataggagttagtgatatcatgattttaagttgcctttttcctaatggttaatgatgttagaacatcttttcactcatttatttgcwgtttaagtggactctttggtaaaatgtctgttgatgtctttccttcattttccatttggtttgtttgttttcttattgctgagttttgaaagtactttacattctggacacaaatcctatatcattgatctattggtatatccttcatgtcaataccacactgtcttgattactgttgctttagaataactccttaaaaatctagtaatattag

SEQ ID NO: 461515 - DNA, 603 bp, Homo sapiens
tttacagtatccactgatccctctctgatccagaggcattagcgtgagaacacacttaggaactaggctggcctgagatcaagtctcaggtccactgccactataacttcggtagtgtatttacacactgtgcctcagtttcctcaaagggttggtgtgagattctaacatggtaatatataaacagcacttacaacagggactggccctggtaaggatgagatttctttttattatctgaaaaagttgtaatgaacaaaatatatctcaaccaatggrgtgagatggggaccaatatccccggtccctggacatcctggcccagtgtaccacatagtaacccacaaccctgtgcttatgttgacagagagaaatcaactatgagctattcactggacagcaggccttgctgccatcacagatgggtctcaggtgcagggcaggatgccagcaaatgctgatctgagaaatgtcaccatcacacaagcctgagtggacacacagaccttttaccattaagaaatctgaaagcaagcgtaaatgtaagtaaacacgatttttaatttttattttttatggtggacagtgatcatttgccccaac

SEQ ID NO: 461516 - DNA, 603 bp, Homo sapiens
tttacagtatccactgatccctctctgatccagaggcattagcgtgagaacacacttaggaactaggctggcctgagatcaagtctcaggtccactgccactataacttcggtagtgtatttacacactgtgcctcagtttcctcaaagggttggtgtgagattctaacatggtaatatataaacagcacttacaacagggactggccctggtaaggatgagatttctttttattatctgaaaaagttgtaatgaacaaaatatatctcaaccaatggagtgagatggggaccaatatccccggtccctggacatcctggcccagtgtaccacrtagtaacccacaaccctgtgcttatgttgacagagagaaatcaactatgagctattcactggacagcaggccttgctgccatcacagatgggtctcaggtgcagggcaggatgccagcaaatgctgatctgagaaatgtcaccatcacacaagcctgagtggacacacagaccttttaccattaagaaatctgaaagcaagcgtaaatgtaagtaaacacgatttttaatttttattttttatggtggacagtgatcatttgccccaac

SEQ ID NO: 461517 - DNA, 598 bp, Homo sapiens
gaacaaatctaacactttaaaaaagcatacaacaaaatccagcaccccaaaatgtaaatcacaatgttcatcaaccaaccattactagataagcaaaraagtgggaaaataggaccagtgactaagataaaatcagttaataaagactaaaaatgagagatgatggtattacgagaaaagaacatcttcaaaactgttataatctcaatgtgctcaagcatttaaagaaaaacatgaacataatgcagaaatgaaagactaggaataaaaatttcattgaatatgttgaaccaattagatactaaaaagatcagagaacctgaaggcacagcaatagacaggagaagaaacagaaaaaacgatgaacctgagtgccctgtaggacaatattaagcagtctagcatatgtgtaatttgagtctcagagaaggggtgtgtatgtatgtgtgtgtgtgtgtgtgtgtgtgtgtgtgtgtaagtaaaacatttgcagaaataatagtggaaagttttccatatttgataaaaaccagaagctgacagattcaagaagcttaaaaaatactaactatgataaatacacacaaaccccaaacta

SEQ ID NO: 461518 - DNA, 598 bp, Homo sapiens
gaacaaatctaacactttaaaaaagcatacaacaaaatccagcaccccaaaatgtaaatcacaatgttcatcaaccaaccattactagataagcaaaaaagtgggaaaataggaccagtgactaagataaaatcagttaataaagactaaaaatgagagatgatggtattacgagaaaagaacatcttcaaaactgttataatctcaatgtgctcaagsatttaaagaaaaacatgaacataatgcagaaatgaaagactaggaataaaaatttcattgaatatgttgaaccaattagatactaaaaagatcagagaacctgaaggcacagcaatagacaggagaagaaacagaaaaaacgatgaacctgagtgccctgtaggacaatattaagcagtctagcatatgtgtaatttgagtctcagagaaggggtgtgtatgtatgtgtgtgtgtgtgtgtgtgtgtgtgtgtgtgtaagtaaaacatttgcagaaataatagtggaaagttttccatatttgataaaaaccagaagctgacagattcaagaagcttaaaaaatactaactatgataaatacacacaaaccccaaacta

SEQ ID NO: 461519 - DNA, 598 bp, Homo sapiens
gaacaaatctaacactttaaaaaagcatacaacaaaatccagcaccccaaaatgtaaatcacaatgttcatcaaccaaccattactagataagcaaaaaagtgggaaaataggaccagtgactaagataaaatcagttaataaagactaaaaatgagagatgatggtattacgagaaaagaacatcttcaaaactgttataatctcaatgtgctcaagcatttaaagaaaaacatgaacataatgcagaaatgaaagactaggaataaaaatttcattgaatrtgttgaaccaattagatactaaaaagatcagagaacctgaaggcacagcaatagacaggagaagaaacagaaaaaacgatgaacctgagtgccctgtaggacaatattaagcagtctagcatatgtgtaatttgagtctcagagaaggggtgtgtatgtatgtgtgtgtgtgtgtgtgtgtgtgtgtgtgtgtaagtaaaacatttgcagaaataatagtggaaagttttccatatttgataaaaaccagaagctgacagattcaagaagcttaaaaaatactaactatgataaatacacacaaaccccaaacta

SEQ ID NO: 461520 - DNA, 552 bp, Homo sapiens
ttacagcttggtgggtcagataatgcccaccgagtcacatgataacttggtggcccatggtcaagcatccagctactacaaagtccagcygcaggccaagagctgtctctcaaaaggagaatagttatgtgcagatgatggcaaggcctggctccaaaatcctaagggcctgtgctgcaattcacctatagaggttggccaaaggctccaaacagcgcccctcttgccactgacacctcaagaaccattggatctgttgaatcatacggccaaagtggtagagctgcttgcacagagaagtgtcactttccccttatctcttttcccctccatggcctttcgtccccactgtcctcacatacctacctgttgcagagtcttctcctgttctgggtcccactcaaaactagcagctttttaagtcactcaatagatgggccagagtaacacacccaagtgagaaatatgttgcctccaaaatctggtaccagatcgactatgtagatatactataatatataatacatatgtattagtctgttcttgcaatgc

SEQ ID NO: 461521 - DNA, 552 bp, Homo sapiens
ttacagcttggtgggtcagataatgcccaccgagtcacatgataacttggtggcccatggtcaagcatccagctactacaaagtccagccgcaggccaagagctgtctctcaaaaggagaatagttatgtgcagatgatggcaaggcctggctccaaaatcctaagggcctgtgctgcaattcacctatagaggttggccaaaggctccaaacagcgcccctcttgccactgacacctcaagaaccattggatctgttgaatcatacggccaaagtggtagagctgcttgcacagagaagtgtcactttccccttatctcttttcccctccatggccyttcgtccccactgtcctcacatacctacctgttgcagagtcttctcctgttctgggtcccactcaaaactagcagctttttaagtcactcaatagatgggccagagtaacacacccaagtgagaaatatgttgcctccaaaatctggtaccagatcgactatgtagatatactataatatataatacatatgtattagtctgttcttgcaatgc

SEQ ID NO: 461522 - DNA, 556 bp, Homo sapiens
tttttaactttttattgagttaaaaaatatatatatataatttaccatctgtacatttttagaggacagtttagtggtgataaatacatttatattttcttctcttaatctcctcttcccactccccttgagggcctctagcaaccaccaatttactttctatcttcatgagatccacttttttactgcccacatatgagtgacaacatgtggtatttgcctttctgtgcttggctcattccacttaacataatggcctatgttcattacgttaaaccaaatggccagtgccacctatgttgctgtgaatgacagaatttcattcttctttgtttctgagtagtattgcattatgtatatatatgacttttaaaatctattcatttgttkatgagcacttacgttgattccatattttgtctattgtgaatagtgctgcagtacacatcggcatgtagatatgtctttgatacattaatttcctttattttggatatacatccagtaaagaaattgctggaccacatggtagttctatttttacttttttgaggaa

SEQ ID NO: 461523 - DNA, 556 bp, Homo sapiens
tttttaactttttattgagttaaaaaatatatatatataatttaccatctgtacatttttagaggacagtttagtggtgataaatacatttatattttcttctcttaatctcctcttcccactccccttgagggcctctagcaaccaccaatttactttctatcttcatgagatccacttttttactgcccacatatgagtgacaacatgtggtatttgcctttctgtgcttggctcattccacttaacataatggcctatgttcattacgttaaaccaaatggccagtgccacctatgttgctgtgaatgacagaatttcattcttctttgtttctgagtagtattgcattatgtatatatatgacttttaaaatctattcatttgtttatgagcacttacgttgattccatattttgtctattgtgaatagtgctgcagtacacatcggcatgtagatatgtctttgatacattaatttcctttattttggatatayatccagtaaagaaattgctggaccacatggtagttctatttttacttttttgaggaa

SEQ ID NO: 461524 - DNA, 489 bp, Homo sapiens
gaggtatgagccaaccatgcccagctcatattacttactcatgaatctatgcgtgtatatgtctaggtgtaataagtatgaagcaagttattctctttagcatagtgagtttgggggtcccagttttatactgacatttgggtgttaattctagagtcataattagttttatttttataagatgtttaccagtatttaattaaattttcaaaacaaattagaaattccagctttaaatattttatttaaatttttatattcatttactataattagtattataaaccaaaaataaaattytaaactccccaatcagctgatggaccctcccctcggccaagggcattccagaattaacctgaaaaaccagttcaggccatgatgagaagtgggggtcagacatgcctcattataccctccttgctttggaattcaggtacagctgaccagcattaacactaaaacggagatcttaagactgacaaaaca

SEQ ID NO: 461525 - DNA, 602 bp, Homo sapiens
gattttataactcatcatatataatgttttaaaggaaaaaaatattattatacataacagagcaagaactaaacaccaattcatgctatgatgtttgacactacttcatgagtttatctggatgtcttgactctatccaatgccttccatattttaaggtctatgggattatctggacctatggtcactcttgatttctttcctacgggctcttataacaagttttgtgaactgattgcagtataaatagactgtgaattaacttctggtaagctcatcttactcagacacactcaaaagctattccgcacacaaacagctcttgaaactgccatgtcagaacaggtctgtatttctatctttaaagttaatctagaatgaaaacaggtgagayttacactgtatcttcttatttttacacatactgttactgaaaatacccttgatctttagtattttagaacctaggtactttatataaataaatgcatttctaaaccagtcaaccatcagctcccaagacaagagagggaacaactaagatgccatcttctaatccagagctttaattctgatcttttattgttaatctttacagcact

SEQ ID NO: 461526 - DNA, 418 bp, Homo sapiens
ttgtaatctataccttaattttaccccccaaaaaaagaaagaaagggtaaataatcactttcttcagtgtttatgggtctaggaaagtttctcmatttgcagaccttcaggccaatacactaaacaccacagacctaaactctggcctttcagcagggttgaggtggagctccactccttccagaccatctagtgacattcatctaagagttgctcacctgaattctatagcagtccatagctggtgtatcagatgtatttggttttaagtataaatcacttagtcacaattagcttgcatatcttaaatctccttatcatgtaacctggaattgaaattactttaatctatgttaggatttcattatggaggaacaccttgctttatgcaataaatatgttctttgtaaacatgtat

SEQ ID NO: 461527 - DNA, 565 bp, Homo sapiens
atgctggcccttggattatttccttctcttttatttttttgagacagagtcttactttgtcgcccaggctggagtgtagcagcacaatctcagttcactgcaacctccacctcctgggttcaagtgattttctcatctcagcctcccaagtagctgggactacaggcataagccaccacgcccagcatttttttttttttttttttttggkattttttggtagagacagggtttcaccatgttgcccaggctgatattgaacttctgttctcaagtgatcgtcccgcttcagcttcccaaagtgctggaattacaggcatgagccaccatacccagcctcttttcaatttttttggaggagtttgacaaggattggtattagttcaagtatttttaatgtacaaatttattatgtgttttaattggctgccacattttacaaattattaactcttcctatcttctttgacagacaacagaaagatcagagttaatggaaccaaagaacctatcgagttcaaatccaatcagtggtttggagctccagtgaaagctcacaaagaaa

SEQ ID NO: 461528 - DNA, 546 bp, Homo sapiens
gggtctggttctcttgcttgctttttgtcttcttcctgcctccacataatcattatcttactgactctcgtcaggtgtttttccctttgtcaatatcctctgctactcctctaaattctcctctgattttttttttctgatattctgttgtaatctttgctcagttaaccagctctgccttgtcaaaggcctccttaaattcccccacgctccaatgtctttgcttggcgagaaagaccaagagcatgagcattcaacaaggatcccctgaacatgctgtggttggtgtcaggcaatatgctgggtgctgggaatgagacgcacagtctctaccctccaggagttaaaatccargcaggttaaacagtctggcaggatctcccaggaccttctgtcacttagcaaggaaggaaaagggctgttgaaaatgaatagtttgggtgccactcattctgctgtatttatcccgtgatgtccctggcgtttgcatgggtgctaaataagctgtttctcagtcttgtgttacagaagaagaacaaaactaca

SEQ ID NO: 461529 - DNA, 613 bp, Homo sapiens
gtccacttcgcctcctcctgtccctccactcccattgcgatcagagcagaacctcactttcactggcatctcttcttgttcagttagaaagtctttatgagccagtggcctgttkattaaaatccagtcagaagagtagtgatccaaatcctattgatcccacctcatttaacttagtgaattaaatacttaggaatacagggtgtatctggctaggtcaaggtgaccagaacaaggttatctatgattgattatatattttaaaatattatcaatatctaagcttaaacatattcactgtgactcaattctcttccaacagaaatattaataatccaaataatattctttgtgaaataacctgaatacagactaacatttttccttctctcctgttgtacctcctaaagtgaaatgatcttgaacagaagtggaagtcattgcccactagtcctatggcgagggtacatttatctcccattaatctctgtttcacaactgccaccatgtctatgaagttggccttctgcctccacagatgtcctaagcctaaaacacttccacagatgacttggcttcagcttcatggaccacataatatcagaaatcagcc

SEQ ID NO: 461530 - DNA, 613 bp, Homo sapiens
gtccacttcgcctcctcctgtccctccactcccattgcgatcagagcagaacctcactttcactggcatctcttcttgttcagttagaaagtctttatgagccagtggcctgtttattaaaatccagtcagaagagtagtgatccaaatcctattgatcccacctcatttaacttagtgaattaaatacttaggaatacagggtgtatctggctaggtcaaggtgaccagaacaaggttatctatgattgattatatattttaaaatattatcaatatctaagcttaaacatattcactgtgactcaattctcttccaacakaaatattaataatccaaataatattctttgtgaaataacctgaatacagactaacatttttccttctctcctgttgtacctcctaaagtgaaatgatcttgaacagaagtggaagtcattgcccactagtcctatggcgagggtacatttatctcccattaatctctgtttcacaactgccaccatgtctatgaagttggccttctgcctccacagatgtcctaagcctaaaacacttccacagatgacttggcttcagcttcatggaccacataatatcagaaatcagcc

SEQ ID NO: 461531 - DNA, 594 bp, Homo sapiens
tacaaagtatttcttcaatgttcttagagacacaagagcatttatttatcagtcactacagaaattgtaaggccagtgtccaaaggaaggaggaaattcagagttaggagccaatacttggagttatttttatctgtaagaagcctctatacttctactgaaataaagtgcatgaatatgggggtgggaagggcttgtggcactagagggagaaaaattgtaatccagggtcttgaaaggattcagtgataaatacctcacacttggtctatggtctaggacaaaagatgaatgggaaatagatgggcccttccagcaagtaaagcccacattcaaaccaactcaatccttgacaattgactaaagtggttgcatagtattagtgttcatggcaacttgccagaagtaagtgttaaactccatctggaagaaggtggcatcattctaggcttaaatttgtcatatatttttttcatacctgggatctaatatttaatkttttaaatgttcacaagataatgtgaacaaaactcaagagaaacaagagaaaatacaaacataccccaccccagagtgcacacaatagacacagta

SEQ ID NO: 461532 - DNA, 524 bp, Homo sapiens
aaacaggttacaccatttgccatagaattggagccttttttaaaaactacaacttgaatcatttaaaattttttgtaaagtgtgataaatggttagctaaatgtaaaacaaaaatgaaagcccacggaatgatcttatttaaaaaaaaaaagccgattaaagtttttgtttatggttaagtctgggatgctttcagaaaaaacgcaygcttattaatctgaactggagaaataaaagttgaattcaagaatactgagagcaattaacttgatgattagttgatttagtcaggatttttgtccaaatccatttctgttcttattctatgataaattgatcattatggttctttgcaagaaaaattagattttaaaatgctatccacatggcaaaaatattccttttacttaaacttagacaaccgtgatgctttctagatacttttgtaaaagatgaactttatttaaaatgtttttctttcagaagatctatttatttgcttttcctaatttcataataatggg

SEQ ID NO: 461533 - DNA, 610 bp, Homo sapiens
tgtattttaagctaagcattattaaaaaagagtcaaaagttaaagtttataaaataaaaaagttacagtaagctaaggttaatttattattggagaaagaaattaaaaatgagtgtagcctaagtgtacagtgttgagaaagtctacagcagtgtatagtaacgtcctaggccttaatattactcatcactcactcactgactcactcagagcaacttctagtcctgcaaacttcactcctagtaagtgccctatacaggtatgctatttttattgtaccttttctatgtttaggtattgatagatactcaaataccattgcgttacaattgcctacaatattcatacagtaatatgttgtaygagcttttatcttaggagcgataggctataccatatagcttaggtgtgcagcaggttacactatctaggtttgtgtaagtgcattctatgatgtctgcacaaaaatgaaatcacccaaagacatatttttcggaactgtccccatcattaagcaacacaagactgtatgatagttgccctagctattttgagtggaggtttggcagtaatcctaccacatcctaaatcatgagtgacctgggtcctt

SEQ ID NO: 461534 - DNA, 512 bp, Homo sapiens
attttttcctgttttgtgccgttgtcttccggatgtctcgtattctgtttccagagtttgagaacttctcctactatatcacttctctgctttaacctttagtatatctttattgcttaaagaataaaatataatttcctcagyctgtcattcaaaaactttcctaatttgactgttttcctagttttatctctacctctcccctgcgtcttacattcttgccatatcttatttttgccactgccctgagcatagcctgacttctccatctctgggctgttatcacactgatccccctgtgccttctgctttatctccctttgagaagtctacctgtgtctcttagtcttcaaagaaggtaatgatgccgtaatgccacatataattacaattaattattaaaaatattaggaaaattatcttttctttgcaaatatataaaattttaggcttatatttaataataaaaccagagagcttcaaattatagcaatttagagtgtcaaatttgg

SEQ ID NO: 461535 - DNA, 395 bp, Homo sapiens
cacaaattgggagagagcattctaggtggaagaaactgcatggataaggatgtgaatacaaaaagctgtgaaatatgagcataatttaataagtgatatagatatactagatcattgactatgtaataaaatgtttgaaaaggatatttgtttgcaaagtttggtaagtaaattaggcagagccttagatgacaggttttgaaatctaagtatgatcttaaattttgtatgtgtctgcttatctttattttgatctaaatataaggaaaagatgacacttcatggagagaacagttccagaatatrtcaaagaaaacctgctcctgctaggttttttcaggcccagctgagtgctcaggcattcaacaaggacagaagataataaatgtcaataa

SEQ ID NO: 461536 - DNA, 556 bp, Homo sapiens
acggcccaatcttatttaaccccgattctgggcattgtgcrttttaaaactctttcactttcctgaacagatctcccactgacttaatgctgtaggcatggagttctttttattttcatgtaagagaaagtatgctacaagaagcaagcaataagtcaacaagaattgaatgtatgcacacacattgaaatagatggtgcagagaccttatcttaatttattacagatgcaaatggctgattacaaattggtgctatgggtaattgagtttcaaatatgtttagtaactaaagtggaggtacaattttatatttcgaagttttaaattttaattactgacaagtcatcattttagagcaaaaatgaatttaggaaaaatctttataagaacagcttcaatggccttctttgacattgaaaaaggtatcattggctgtcatctctaactgacttttaggaacagatgaggtatttgaatgttgactgtaatgataaaaagcggataggtctaacccaagttccagttgccctagttcattttcttttgctgtaagtg

SEQ ID NO: 461537 - DNA, 556 bp, Homo sapiens
acggcccaatcttatttaaccccgattctgggcattgtgcattttaaaactctttcactttcctgaacagatctcccactgacttaatgctgtaggcatggagttctttttattttcatgtaagagaaagtatgctacaagaagcaagcaataagtcaacaagaattgaatgtatgcacacacattgaaatagatggtgcagagaccttatcttaatttattacagatgcaaatggctgattacaaattggtgctatgggtaattgagtttcaaatatgtttagtaactaaagtggaggtacaattttatatttcgaagttttaaattttaattactgacaagtcatcattttagagcaaaaatgaatttaggaaaaatctttataagaacagcttcaatggccttctttgacattgaaaaaggtatcattggctgtcatctctaactgacttttaggaacagatkaggtatttgaatgttgactgtaatgataaaaagcggataggtctaacccaagttccagttgccctagttcattttcttttgctgtaagtg

SEQ ID NO: 461538 - DNA, 465 bp, Homo sapiens
ttgccccaagtagagacaaacataatcttcctcacataggaactgagccttgagaaacagaaggaaggatggaaggagtgggagctaaaycacttgatggcaccgtctccatgaatttctgctgcagaaattcttggagatgtgctgatacttgctcttcttgaagctagagaaaaaatttctctcccatttaaaatttctttgagataactgggtctgtttcttttgcctgaaaatgaagaatctgaactgactcaacctattcaataccttggaaactattaagatatttaatttacacagaattgtgaaatattttaatttatgtgagatattaacttgctgaaggttattgctatagagggcatttactaatagaattggttctaaacaaacttgtaaaataggctaaatttttcttgaagttttcagtctctcctttctggaccttccttccccttcccg

SEQ ID NO: 461539 - DNA, 533 bp, Homo sapiens
cccctccttcctatgtacttggggaaaaaggtaattccacttttgagttacattcctttatttgggaaccttgctccttctagtatcctttctctcctgtgtctaccatctttcccttattatgactttttctctttagcatacttttaagtgttaacactcccaggtccgcaagttttagccattctataaactcagttctccaatacctgacaaagtccctctcctccaccacttttcttatctctgagtacattgttctggtcttgtcttgttcctccaagaacctttttcttcccctactctgcctcagtctgtgatgggtactgctattcggtgtcctcccacattataggcatacatttgcctgtgtggaaattgtttactagtgtgtctttcccactatatgatgaacttttcgagaacaacatctatcattcatctctacatygccaatggtctactttagagtggtgttattcgccagtgtgatatagcatccatttcatgaaatattttcttacacattcact

SEQ ID NO: 461540 - DNA, 556 bp, Homo sapiens
ttaacaagattttcattctccaaaccattttgtatgtcacttmaaggttgatctcttaaatatattttaatcatgtcattatactaataaaacaatgtaaatagccttctgttgcctataggattttgggcacgtgtcacactgatatttaaggtcttcttcaaacaggttgagtgaatctaattccttaggtagcctctctaggttttagcttttgggtttctactaaaaagcatctgcaattttgtgcctagtcaattggaaaacctttctaaactctatttcttacccattgtcagtagcaattgataactttttttgagtatttattttgtgccagatatctcactgagtgctttacatgcattatcacatttacttaacacaacaaccctgtgcagtaggttctattatttccccaatagtgggagttagacacacagagatatagaacatcatttaggttacaaaactaataggctgcagggtccagtctgactctagatttaaatagcgatctaaatcagtaaactgaactgctttcattttgctttag

SEQ ID NO: 461541 - DNA, 556 bp, Homo sapiens
ttaacaagattttcattctccaaaccattttgtatgtcacttaaaggttgatctcttaaatatattttaatcatgtcattatactaataaaacaatgtaaatagccttctgttgcctataggattttgggcacgtgtcacactgatatttaaggtcttcttcaaacaggttgagtgaatctaattccttaggtagcctctctaggttttagcttttgggtttctactaaaaagcatctgcaattttgtgcctagtcaattggaaaacctttctaaactctatttcttacccattgtcagtagcaattgataactttttttgagtatttattttgtgccagatatckcactgagtgctttacatgcattatcacatttacttaacacaacaaccctgtgcagtaggttctattatttccccaatagtgggagttagacacacagagatatagaacatcatttaggttacaaaactaataggctgcagggtccagtctgactctagatttaaatagcgatctaaatcagtaaactgaactgctttcattttgctttag

SEQ ID NO: 461542 - DNA, 582 bp, Homo sapiens
gactcaaaggaaacttattctccagccaaaagaccaggaaaatggcggcttttgaagacaaaacttttaaacaataaatgagctttatgccagcaaaacaccacagaaaaatctatggtccccaccccatccacttgaacaaaagcctagtagggagaatcaactttcatcttaatcaaagggtgcagtggtacattctaacccatttgccaccctgtcactgtcagtaaatygcctgtaaagagttagaagtttttccccatatggtggaaagaagctgaaccccaccccaccttctcttgctgtgtcagtggagagcatttgaggagctccacccagtagtaatgaggtacccccttctcttcattgctggaggattgtcagaggaaacatactggcaggtaaagactttcaccacctcccaacattaatgaggccacccctctttgttgtcagtggaggccatgtcgggggccagtaatctcattcctgctcagcaataatgaggagtttcatgggtgttgttatagcccaatggggcttcttgcctgccacacagaaaagccaatacactgtgacagt

SEQ ID NO: 461543 - DNA, 582 bp, Homo sapiens
gactcaaaggaaacttattctccagccaaaagaccaggaaaatggcggcttttgaagacaaaacttttaaacaataaatgagctttatgccagcaaaacaccacagaaaaatctatggtccccaccccatccacttgaacaaaagcctagtagggagaatcaactttcatcttaatcaaagggtgcagtggtacattctaacccatttgccaccctgtcactgtcagtaaatcgcctgtaaagagttagaagtttttccccatatggtggaaagaagctgaaccccaccccaccttctcttgctgtgtcagtggagascatttgaggagctccacccagtagtaatgaggtacccccttctcttcattgctggaggattgtcagaggaaacatactggcaggtaaagactttcaccacctcccaacattaatgaggccacccctctttgttgtcagtggaggccatgtcgggggccagtaatctcattcctgctcagcaataatgaggagtttcatgggtgttgttatagcccaatggggcttcttgcctgccacacagaaaagccaatacactgtgacagt

SEQ ID NO: 461544 - DNA, 582 bp, Homo sapiens
gactcaaaggaaacttattctccagccaaaagaccaggaaaatggcggcttttgaagacaaaacttttaaacaataaatgagctttatgccagcaaaacaccacagaaaaatctatggtccccaccccatccacttgaacaaaagcctagtagggagaatcaactttcatcttaatcaaagggtgcagtggtacattctaacccatttgccaccctgtcactgtcagtaaatcgcctgtaaagagttagaagtttttccccatatggtggaaagaagctgaaccccaccccaccttctcttgctgtgtcagtggagagcatttgaggagctccacccagtagtaatgaggtacccccttctcttcattgctggaggattgtcagaggaaacatactggcaggtaaagactttcaccacctcccaacattaatgaggccacccctctttgttgtcagtggaggccatgtcgggggccagtaatctcattcctgctcagcaataatgaggagtttcatgggtgttgttatagcccaatgggrcttcttgcctgccacacagaaaagccaatacactgtgacagt

SEQ ID NO: 461545 - DNA, 610 bp, Homo sapiens
ataatcccaacctatgcttccagcctcacctccaccaccatcccctctacttcctctatttcaaaaatacatttgctctccaaaccctgatgcattttcctaactccctgactttgaattcatggtgttcataggcttgaaaggccctccgtctacttctcatctctccatgcctggtaagctcctgtattgtgtgctgattatctgtgtatgtgtccatttgcttgtctagaatgtgagctgaaggaatagagtcttactcagcttgtgctcccaggatgtagtatagtacacagtagatactccagaagtattcagtaaaaaacaaataaaggkgaaatgaagatgtgacatcattaaattcatcacacattcagaaagccttacagggcttgtcttattctggccctgagaattgtgtagacaatgagtatatttaaaaagcaagatctattccccaatatgttgaaagacttgctttacaattttgtgaggagaaaatgtatacatgaccaaggctggcaacgaagaccaccagcgctcacacctaggttaaaggaaagcaggatcacagggctgctgaggatcagctacactggagaagccggca

SEQ ID NO: 461546 - DNA, 456 bp, Homo sapiens
tataatcccaacctatgcttccagcctcacctccaccaccatcccctctacttcctctatttcaaaaatacatttgctctccaaaccctgatgcattttcctaactccctgactttgaattcatggtgttcataggcttgaaaggccctccgtctacttctcatctctccatgcctggtaagctcctgtattgtgtgctgattatctgtgtatgtgtccatttgcttgtctagaatgtgagctgaaggaatagagtcttactcagcttgtgctcccaggatgtagtatagtacacagtagatactccagaagtattcagtaaaaaacaaataaaggggaaatgaagatgtgacatcattaaattcatcacacattcagaaagccttacagggcttgtctyattctggccctgagaattgtgtagacaatgagtatatttaaaaagcaagatctatt

SEQ ID NO: 461547 - DNA, 576 bp, Homo sapiens
aactggctcctgattcagcatatgtattgcaggtgggctgatttacaaacacattgctatcctggaaaacaggtaaccttcaaacctctctcctttcaccaacacacatgcacctatataaacataacaagacacccttgagctgccaccacgatacaaaagctgagtcacagacaggaatcaacagatttgggtggaaattttccatattttctttgttgtagttcaaattttcatggaaagcttggcccacctctgaaagtcttagaacagccttagatcaatgattctctaccctggcttgacatgataatgacctgaggaatttttaaaatatacttatgcctgagtctcaccttcggaacttctggttcaactgctctatgaggaggccaaggcactaagattttacagatgctgtcctgtgactacaacgtgcatccgtggttgtgatcaagaggcctagctcatragaccagtagcttaatcaccaaagctaccctagagagaagggtagtgtcaacgtcagcactgcagttgactgtaggagcagccaacagagggtggtgaggaaac

SEQ ID NO: 461548 - DNA, 576 bp, Homo sapiens
aactggctcctgattcagcatatgtattgcaggtgggctgatttacaaacacattgctatcctggaaaacaggtaaccttcaaacctctctcctttcaccaacacacatgcacctatataaacataacaagacacccttgagctgccaccacgatacaaaagctgagtcacagacaggaatcaacagatttgggtggaaattttccatattttctttgttgtagttcaaattttcatggaaagcttggcccacctctgaaagtcttagaacagccttagatcaatgattctctaccctggcttgacatgataatgacctgaggaatttttaaaatatacttatgcctgagtctcaccttcggaacttctggttcaactgctctatgaggaggccaaggcactaagattttacagatgctgtcctgtgactacaacgtgcatccgtggttgtgatcaagaggcctagctcatgagaccagtagcttaatcaccaaagctaccctagagagaagggtagtgtcaacgtcagcactgyagttgactgtaggagcagccaacagagggtggtgaggaaac

SEQ ID NO: 461549 - DNA, 570 bp, Homo sapiens
cagcagcgtgatttgggagtcctcagatagtactttaagtatgacacccaggacaaaaacttcagccattcttgctgtgggcagcaaagacacaggatgacactaatcagttcatttaccaaagatggggtttctaattttggcytcctataacctgctccccttcatgagatgcctgccaagggagttgagagatgtcattgtgctttctaagcacacttgaactgacttttgataacctttacctaccaaatcaggcatgaaaaccactgaacaatggttaaaacactgtttattttccttttttccccctggctttaaggcttctggctatttgttctaaactatatacagtacagtatgtttcacgagaaggctgcagagccgcactcaaccacagcttagcaattgggctattcttttaaagcttatgcaagtccttactgtaaatgcgtaaatgtaaaatagcttggatcaaaacgcatcgttgttttgacatgaaggtgagcgaatgatttgttcctaggaatagaagccctcagacaaacagtgttaatgggcctcaccaca

SEQ ID NO: 461550 - DNA, 561 bp, Homo sapiens
tgtagtatcaaaggcagaaagtgagtcctatgtaagaaattaaaaacttcaaagcagtaactttttttcagtgttcctgatactgtagcccagctgcaagggattttgtgcctgtttccgcccaaaaatataagtaaggccaagtgatcaatgttgcacgtgacatatttcactgggcctttctttccaggctgataagcagtagaagtagaagtgagaagacaaaaaatgaggtagatggtsgtaaaattacacttaaaaaagagtattttttaccctagggctcacccattactgcctgacatgtagcatcctaatcaccaccccaccccatgcccacccccaattattttgagcagtccccaggaaaagttgcataggtttagaattgagccttcatgaccaccacaggtatctgtcttttcctcctcccctgcccccactctctttagtggcatctgtgtctatggtctatgtggcccagcctggtgcctgacatccctggcacagaagacactgtgcagcaccaaagccttataaggtgctaggccaacaattggc

SEQ ID NO: 461551 - DNA, 591 bp, Homo sapiens
atgccaagagtgatgttttatggaactcccaaaggtaccaagcacatctctcacagatggtagtgcctccaatgcttgttctgctgggcctggaagctggctgctaccctaacctagtcttgtccacatgggaactgtgtcctttctgggaggctgaaccatgaatatgccacagctgtgctgttttctggaatgcctggatacaccaaaccatgctgggttctgtccaaagatacaaaaatatccacttcccctatgtgtggtgctgtgttatatccataccaaaacagagctgtttcatgtttctaatattttacttgcaagaaagtagtaaggaaagtcacaaagctgactgacattacattaaccctcaccactgagcattgaacgttgtttttagagcacatctgaagcaytgactctttactgggaagtagctttttcccaatgcaagttgattcctagagactcatatgccagaacgcaatgtctgaaaccctgtgggaaatgtagcttaagcttcattagcaaggactggaagctccctggcccaccttaaattcaacatttaaaaaattaaaaacacactga

SEQ ID NO: 461552 - DNA, 414 bp, Homo sapiens
atgtgcagaaaaatactaaaaaactgtgaagggcttataagaaaccaactagaaaagaaaatatgtcaactaaacaaaaagagcacaaaggaaaactttagaacaaagtctcaaggtagaaagaatggaatcctgggatccttgaaaccacgtatgtttaagccaatgatatcctcataaaatacctccctccctcaatctctctctctgtctctctcacacatacacacacacccacgcacacacacggctacacacacgtacacacacacacrgctacattcccataacaccatttctaagtgtgcctggtatttatttcattatttttttttctttttcattaaagtcattccttttgttcttccaatgataaggaaaatcagctatgggttaccccattttatgccctct

SEQ ID NO: 461553 - DNA, 608 bp, Homo sapiens
tactcttttctttgctgagctctggttaagcagagctcatcttggctacagcagcaacatctgaaatgcatcaatcttccctgtcatactctccccacaagtgtgacctgtggttacctcccaataaattacatgtacccaagtccttgtctcatgctttgctttcaaaggaccccaaactaagaatgacaataatcagctctgccagcttctggtttggtcagagcctacatgatcagatgactctggagayggcagtagcaacagagggaaaggaattgtgtcctgggaaagccaggcaagctcagactcaatgatatctgcatcagtatgtatgatgatgaacaagccagccctttgtagagtgcgtttagattttgccttactcatctgccatctttctctagctttaatacttacacctgattcaaggtttctgcatctgaggtttacctacataacatagtagttattaaacccatttatgcctagtgttccattattagaacactaagcatgtgggagttatttatatcctactgctcaaggtcattgtcagggtctaattgcaaaagtacaaaaaaaaattgcaacctcaggcataaatg

SEQ ID NO: 461554 - DNA, 559 bp, Homo sapiens
aagaactgcatagcaatatggaaaataagcaatgaagaaattcagagactggagacaacaaattggtttgggataattaagaaaggctaaacagcaatgaagcttgaactgaatctataaatatggtaaaactgagattagtagagaggaataagcagggttttctaggaagatgaaaagacatagataaaagtgtggtagtgsggagccccaaaatttcaatgtaaaaccatcagatttgtttcttggtaatgtaatagatcaatgtagatattcctgattggtatattttctccacttcatgattcaggtatctagggtcgttccatgttggagtcccgctgtctcccaaggcctcagagtcttctcatctagccaggatacacccacttgtcaagctccttggcctggaacagatatccatcacttccattcacactccattggtgagaactggacacatggtctcacctggatttaagcagaaactggaaaatgtagccccgagctaggctgtcacttggtgacaattccaggctatgaaagaggagcatgcatt

SEQ ID NO: 461555 - DNA, 538 bp, Homo sapiens
tcctgaccctcaaaagcaaccaatttaccatctaaccaaaatttcacaccacctcaaatcataagaaaaggcagtggatatgaaacaaatatgcagcactgagaatttggccacactatctgagatgtgatactgtgtcccatctgttcaatgagataacagagcatctagtatatcctaaaatgtcttagaaaaacatgcactagggaattctcagtttagaagatatttgtaataataaggcctcaatcgttttttcaagccttgaatatttaatatggatgacaagaaaaatacagaatattttataactatggtttaaagtacacayggaaaattcctcagttgtccacaaaccattcctttatttgtaatacagttaaatattatggaagattaacttgattgggatatccaatgggcatttctttttgtttttcttgtctttactttctggttttataaaaattttgtgttgtatccattgtctctaagagcaaagagtttgattatggccttactgcctgatcccccaccc

SEQ ID NO: 461556 - DNA, 570 bp, Homo sapiens
ccctggaaaaaataaaagctttattcagggactttttttcatttctattaaatagaaatagtttctaattagctactcaaaacaaggaatctgtgtattatgttgtatctgtaaaatatgtatctgatgatattataaattcactttcaagttacattaacagagaaaggaatcttaggaagaattcagaatgaaagagacatgcaccttgcctccagcacgggatttctacaagattctctttgcttcttggccccaytgcctatctgaaatggtcatttttactaatctgtgcctgtagagatcctttttcccttcatggtcagaatcgattcactctctacactagggacccctgatgaacaagtgtccgttttgggggttctaaagacaaagccttaagtgcctctagctgtaactgatcaatccctaggattgagaaaacaaaccattttggagaagaaaaaggaaaatcaaaaacaaaaacaaaattatcttcaaagtgtgaatttcaagatgtaggatcctatatgggttaaatccatacacggacaagatagctttcctgta

SEQ ID NO: 461557 - DNA, 616 bp, Homo sapiens
ttccaacaagtgaaaatggtaacacaattatcaaaacttatgggatacagcataagtggttctaagaggtaagtttatagcagtaaatgcctatattgaaaaagaaaaatctcacataaacaacttatgttacacckgaaggaactagataaacaaaaaatagtaagcccaaagttagtagaaggaagtaaataataaagatcaagcagaaacaaatgaaatagagactagaaaaacaacacaaaagatcaacaaaactaagagctgatttttctttttttttttttttcttttttgagatggagtttcactcttcttgcccaggctggattgcaatggcgagatctcagctcaccgcagcctccaccttccaggttcaagtgattctcctacctcagcctctcaagtagctgggattacaggcatgcgccaccatggctggttaattttgtatttttagtagagatggggtttctccatgttggtcaggctggtctcgaactcctgacctcaggtgatccacctgccttggcctcccaaagtgctgggattacaggtgtgagccaccatccccagccgagctgatttttttaagagaaacagaatcaacaaactt

SEQ ID NO: 461558 - DNA, 616 bp, Homo sapiens
ttccaacaagtgaaaatggtaacacaattatcaaaacttatgggatacagcataagtggttctaagaggtaagtttatagcagtaaatgcctatattgaaaaagaaaaatctcacataaacaacttatgttacaccggaaggaactagataaacaaaaaatagtaagcccaaagttagtagaaggaagtaaataataaagatcaagcagaaacaaatgaaatagagactagaaaaacaacacaaaagatcaacaaaactaagagctgatttttctttttttttttttttcttttttgagatggagtttcactcttcttgcccaggctggattgcaatggcgagatctcrgctcaccgcagcctccaccttccaggttcaagtgattctcctacctcagcctctcaagtagctgggattacaggcatgcgccaccatggctggttaattttgtatttttagtagagatggggtttctccatgttggtcaggctggtctcgaactcctgacctcaggtgatccacctgccttggcctcccaaagtgctgggattacaggtgtgagccaccatccccagccgagctgatttttttaagagaaacagaatcaacaaactt

SEQ ID NO: 461559 - DNA, 635 bp, Homo sapiens
aacattgaaaaaaatcctataataagaaaatatttctttagaagtaaaatttaataatactttggaaaacatttcttttttctcttttccatatgttttgagcatatggatgcctggaataaattcaacctagaggccattctgaaaaggcaacaaaaccaaagaattcttctgtatgattggcaaatctcaagagtgcyatttagaaggatgctaataattaaggatgcttctgcaagtttgggatgcttatcaaaatcttctttctgctgccagctgaacctgagaacactttggcctagctccgaacattggcaaaatggttctttagttcccattagcccccttctcctccctctgtgatcctctcgcatggggacttctactactaaaagggcacatccagactgccctgggcccctggatctcaccttttctagctcctaggatgccacctcaagctcacctctttacctaacccctcttttatcctatctgctctcatgctcagattctagaaggtataaggcaaaagttcactcatattctattatagcactgtccaatagacatataatatgtgctgcattatgtaatttaaacttttctacattaaaaaagccacattagcctgt

SEQ ID NO: 461560 - DNA, 635 bp, Homo sapiens
aacattgaaaaaaatcctataataagaaaatatttctttagaagtaaaatttaataatactttggaaaacatttcttttttctcttttccatatgttttgagcatatggatgcctggaataaattcaacctagaggccattctgaaaaggcaacaaaaccaaagaattcttctgtatgattggcaaatctcaagagtgctatttagaaggatgctaataattaaggatgcttctgcaagtttgggatgcttatcaaaatcttctttctgctgccagctgaacctgagaacactttggcctagctccgaacattggcaaaatggttctttagttcccattagcccccttctcctccctctgtgatcctctcgcatggggacttctactactaaaagggcacatccagactgccctgggcccctggatctcaccttttctagctcctaggatgccacctcaagctcacctctttacctaacccctcttttatcctatctgctctcatgctcagattctagarggtataaggcaaaagttcactcatattctattatagcactgtccaatagacatataatatgtgctgcattatgtaatttaaacttttctacattaaaaaagccacattagcctgt

SEQ ID NO: 461561 - DNA, 503 bp, Homo sapiens
ttgggtccaagcaaccatgtgaaaagctatataatcaccgagtaaatattgatcatgcaattatagagtaaatattatgttatgacamtataagtagcagatatcatttccgcctcctgaactattatcttttgatcatgtcttaacattgaaaattaaatggtgattacatttataatatctttcaatactctttctgaatattctacctgatagtagattatataggtggtaatgttttctaaattgctgttgttttattttcaacttaatttggggctctatgcaatttcttacatggatgaccaaaataatactcttgtaatgctttgtagttttgaaaggacttttacacataccttttgtcagataggcaacagatagatgactcttccagatccagattaaaaaacacaaaaatccagaagtattaccagagtcatttcatgcagtttatgcagctgaacttcccaggtggggttggtgcataattttctgattct

SEQ ID NO: 461562 - DNA, 594 bp, Homo sapiens
tgtcagtgagctaagttcatattttccactttcagtttccagatttggtattatgtgaacataacaccaacatacatgtgaccaatgccctaccaagagccagcctcataatggacaaaaaggaggagaaagtggaagagatcgtactgcttccattttcctggccagaatggtgttgctgtaagggtttctaagcaagtaaggtttagaagacagaagggggttagactgagtgctgaatacctagtacctgcctcagayacatagcagctgaacctgtttcttatgttttcaatgctcctgtggctcagtcatgaagactgagctccactgatcagatccatccacccaagacattaaactgaacattagtgacatgaagagataaggatggtataggatccattctggtaagggtgacagtagcagtagtagcagtagtggagggatctgtacccacttcccagaggtatcacatagaaatgatagttctagagttctggcggcagcactctgggcccagagggtgtttgtgtgagctgctggaactatgccttgaggtggtggcagttgcatcctgctaggatgtgtgca

SEQ ID NO: 461563 - DNA, 472 bp, Homo sapiens
agtatataaaggacctgagctagaccagactcttcacgtttgtgctgggctagcaggtttggaagaatgataaagaggactcagcttaaattgtctccatctcagtttttttttattgaaataacaaacaagcaaaggatgtatgagataataatacaggtgaatgagtagactcagctcccaggtgcctccttgtttccttcyggaggtgagtccacaattcagtggtcaatgaagtcctcatggaaagagaaattttccaggtcaaagaaggccagggctgtgtacttactgcttctgtgctattaggcctatggatgtctcatcttagcatgctagggtctacccatcaccatataagacaaacctagctgtgccacagtgatacactttcatgtcctgtttcctaatgcatcattgggcctacagcaagcctggccctggtccatcagaggaatctaagcattttgtt

SEQ ID NO: 461564 - DNA, 628 bp, Homo sapiens
tttgggtttatgttttcccttaactaatgtggattgttataaaaatatcaacaatttaaggctttgtttgtatttatcttgactgtgtgaagttcaccctgtgttaggtaaatcaagactctagtgacacatttaattaatcacctcaagttcttcttgtcagaactgtttacattctactctgactgttggattccatttctctgcggtctttcattctacatcttcaggttcattagtcacttgggtttaattctatatataagataaaaatatggactagacatttaattggtagagctaactacctatataaggcttttaaatctacaagtttattcaggggttatacatagagtgaaaaaataaactttcaatggctaggctgaaacagaggttatcaacactgcctttccacatacgtgtcatcaaattatacggatctgccctacactgacaatgcatctgttttgcatatacttyctgaaaatatgactttgaactctgtgctttccaaactcggttttagagaactaatgatagcagtctatatatctactagatcagagactggcaaactttttctgtaatgggtcatatggtaaatattttaggctttgtgggccaa

SEQ ID NO: 461565 - DNA, 557 bp, Homo sapiens
atccaaattttatatgtggattaagccaagtcatcaaagagcttgtaccagagactatttatttcatccctttggaatctggattttactgaattgtgctttgaagtatataactcagcttccccatgagagtgtccactgtttcccttgacaktctcgaaggacatccggttaagatggccaaatggcttagattagagcttttcaaattatctatgcttaagagacagtttctttctttttaaaatttataatctaggcagacggtcattaaaaatatgataaaaatgaattagtagaaaaatgaaatgctggatgttgtagcagtgtcagattgccgtgtgagtttctaaatgattactctcagtttctgtatttatctagtcacagaccaggaattaaaaaattgattaagaccttggttagaataggtatcaatgatatagtaaaatgcatataattttaccatagaaaatggaaaggcaagtctcttttggctgtctgctaggagtagcatcaggaagtgtctggctgttggtagattgggatcaaagctc

SEQ ID NO: 461566 - DNA, 620 bp, Homo sapiens
tttgaatgacaggcaaaggaattcagaaggataacagtcattttctttattgttgttattgttctagttgcttgtttgtcatttttttattagctatattaagctaaggcagcttttaaaaacttattttgaatatccttttatacaattgtaaatctgcaccctttcattcatgcattttaaaagttatattctgcatgttgaacaacctgctcaaagcagagaaaagtaacttgtcctttaactggtaagcccattgtaaggcatccttgcacatttaactggaaaatatatctaaacagcacttgataaaattacaagaagttgtatttaaatttaattttctctgcaagtacagttagcatcattttttacccccactggtctctaacatactatttttgaggaagaaaaaaatgtttttgctaccatggcaacagtatccttctcttgctttccatcacaaactatagtttctgagcataactagggaaattgaaatgtgggtagctcaaaatgataaggccaagcatggtaagcattcatctaaatgaatatttgtgtcattgttcttgcrctcgtggtaagactagaactttcaaggtcaacatatttgttca

SEQ ID NO: 461567 - DNA, 618 bp, Homo sapiens
caaaggtctaatatctagcatctataaggaacttaaatttacaagaaaaaaatcccattaaaaatgggtaaaggacatgaacagatacttctcaaaagaagacatacaygtggctgacaagcgtatgaaaaaatctcaacatcactgattattagagaagtgcaaacccaaacccaaaccacaatgagataccatctcacaccagtcagaatgactattattaaaaagtcaaaaaataacagatgctggcgaggttgtggaaaaaaagaaaaggaatgcttatacactgttggtgggagtgtaaattagttctaccattgttgaagatagtgtggtgattcctcaaagaccttaagacagaaataccattagatctagcaatcccatcactgggtatatacccaaaggaatacaagcaggtttttaaaggcaaaaaggaaaaaggagtgggctgatattaaattatttgacaggctttctcactggcttgtagggaaagtattgattagtagttgtctgtacattgttgaactctagggtatgagttatggtgtccagagcatggtgttgttaggttagttttatagatgcttggcaccagtctagagtgcacatagc

SEQ ID NO: 461568 - DNA, 561 bp, Homo sapiens
ttggcctgcagttttcttttttgttgttgttgtgtccttgccagattttggtatcaggatgatgctggttttgcaacataagtttgagagaatccttcctcctcaattttttggaatagtttcagtaagattggtagtagctattcttcgtatgtctggtagaatttgtgaatttgtctggtcctggactttcttttttgttggtagattttttggtactaattcaatttgtaactttttattggtctattcmggatttcaatttctttctattcaatcttggaaggttgtgtgtttcttggaatgtatccatttcctctaggttttctagtttttgtgcatggaggagatgttcatagtagtctctgaggatcttttaaaaaaaattctgtggtatcagtcataatgtcacctttgttgtttctggttgtgcttatttaatctctcttttttattgattaatctagctagccaactatgaattttgtttattctttcaaaaaaccaacgttttcttctgttgatttttttgtataatgattttggtttcaattttattta

SEQ ID NO: 461569 - DNA, 561 bp, Homo sapiens
ttggcctgcagttttcttttttgttgttgttgtgtccttgccagattttggtatcaggatgatgctggttttgcaacataagtttgagagaatccttcctcctcaattttttggaatagtttcagtaagattggtagtagctattcttcgtatgtctggtagaatttgtgaatttgtctggtcctggactttcttttttgttggtagattttttggtactaattcaatttgtaactttttattggtctattccggatttcaatttctttctattcaatcttggaaggttgtgtgtttcttggaatgtatccatttcctctaggttttctagtttttgtgcatggaggagatgttcatagtagtctctgaggatcttttaaaaaaaattctgtggtatcagtcataatgtcacctttgttgtttctggttgtgcttatttaatctctcttttttattgattaatctagctagccaactatgaattttgtttattctttcaaaaaaccaacgttttcttctgttgatttttttgtataatgmttttggtttcaattttattta

SEQ ID NO: 461570 - DNA, 620 bp, Homo sapiens
ccaataaatcacaggtttggttgctgtacataattccgtatttcttaaaagctttgttcatttttaaagttattttttctttatttttgtctgactaggttaattcgaaggacttgtcttcaagctctaaaattctttcttctgcttggttcagtgaatcgttaaagtttctgatggtattttgaaattcctttagtaaaattttcaattccagaagttctattttttaaaaatacagttatcttgtcttttatattctgaattgtttttctggtttctttgtgttgaacttcaactttctcttgatctgagtttccttgcaatccatattttgaatccttaaactgtcatttcagacttttcattttggttaggatccattgctggaaaatgagtgcaatcctttggaggggccaagacctcyggctttttgtactgctgtagttcttgcgctgattacttctcatctgaggggcttatcttttaatttgttgtcacttgaatgatacttaaaatttttttccctcgaaggtatgactgtggtatatgttgtgtaggactgttcatcttcatttctggatgctttctggaggccaaggttctgtgtaggttttttggtt

SEQ ID NO: 461571 - DNA, 590 bp, Homo sapiens
aatggccataagtttgtacttagatattgtcatcatctttgagccttgttttctgaacgatctcaactgtatgcttctcccagaacacaaacccagtttgtttcctctggctgtcagtcccttttccctgtagcccacaaggtgaactaatcctttatgtgtcagcttaaatatctgayatttgtcttcaggctttcatcacccctctgcctgtagctgggcagtcttcccacagactcccacaccactttctacctgcccactctgcactgtgctgtcattatttgcatataagatcatggtgtgaaccatgtgttattcatggaccatgtgttattcaaatgaaggcactttgtttccagtgcctggagtctaagtacgttaatgtatatttatggaatgggtgagaataattaaaatcacactgggaggttgtgtggcagagaagaaagaaccttggaatgatgggatacactggctatgtaggttcgtatctgtatgaccttggaagttatttaacttatctgaaccttagtttctgtgtattcaaaatgagagtaataattctcaccaagttagatgggaatgaa

SEQ ID NO: 461572 - DNA, 433 bp, Homo sapiens
cttctaatagctccattcccatatataaaggagtacatatcccaattaatacaactttttgccacattaattattctagcagaacactctaatttttgtgtttaaagaattcacaagcctctttaaaatatcaggaamgatattaatatttagtgaggaacagtatatatatatagagagagagagaaagggttacattaatcatttctcatatatatatatatatgagaaatgaaatgaaatatatatatatttcaaagcttacagagtttaaggaatcttcctgaggtcacaaaggtcacagctgagttttaaaaccaagtctgcacggtaccaaaatccttcttctttctaacacactaaattgccttaagaaaggcagctccccttactgaatcccacaccattcccatcccacgaatatattctttct

SEQ ID NO: 461573 - DNA, 634 bp, Homo sapiens
atatatatgagaaatgaaatgaaatatatatatatttcaaagcttacagagtttaaggaatcttcctgaggtcacaaaggtcacagctgagttttaaaaccaagtctgcacggtaccaaaatccttsttctttctaacacactaaattgccttaagaaaggcagctccccttactgaatcccacaccattcccatcccacgaatatattctttcttttttcataccacaaatttttatttaccacctatcagccaaacgtgataagtgttgaaaccattgtttaacattaatttcaagtaatgatctttatggctgccattgttcaataactcaataccaagattttaatatttgtatttataaaatgctctggcataatgaattattcatagacaactatgtcatcacccagatttaacataggcaaatattgtgccatatcagttttctcttattaaaaatcaaaatattttggctcccctacctccatctcttttccttttcttttctgtagagttggccactgtcgagaagttcgtatgtatgatttgcatgccatcatgttacatacttttattacatacataactttaaaggtccagttttctctgtttttcatgacatagacattat

SEQ ID NO: 461574 - DNA, 634 bp, Homo sapiens
atatatatgagaaatgaaatgaaatatatatatatttcaaagcttacagagtttaaggaatcttcctgaggtcacaaaggtcacagctgagttttaaaaccaagtctgcacggtaccaaaatccttcttctttctaacacactaaattgccttaagaaaggcagctccccttactgaatcccacaccattcccatcccacraatatattctttcttttttcataccacaaatttttatttaccacctatcagccaaacgtgataagtgttgaaaccattgtttaacattaatttcaagtaatgatctttatggctgccattgttcaataactcaataccaagattttaatatttgtatttataaaatgctctggcataatgaattattcatagacaactatgtcatcacccagatttaacataggcaaatattgtgccatatcagttttctcttattaaaaatcaaaatattttggctcccctacctccatctcttttccttttcttttctgtagagttggccactgtcgagaagttcgtatgtatgatttgcatgccatcatgttacatacttttattacatacataactttaaaggtccagttttctctgtttttcatgacatagacattat

SEQ ID NO: 461575 - DNA, 566 bp, Homo sapiens
caggcaagagtgacttgcctagaccaaagtaagggaatctgtagcactgaagagagagagagactgaagacggaccagaaataggattaaatgaaagagcaacatctttaaaagatgagggagaggagaatgtgaagcacaaratgatggtagagcttttatagaaggactatggttcctagtgatgggcaggaagcgaggccagccatcagtggaggtgagtagtacatgcagttcatattcgatagcctctgtttttctatctgaagtaggaagcaagatcaatgagtgggtatgagagagttagggtcagggttagagtaagagtgcagcaaaattagatgaaattttctaattattactctagcaaatgggagaaaagcaactcaagtattgactgcggaatttctggttaatagcttgattctaggagtttccaataggaatgtttaaaattgcactaatctgatgggtgtctaattttctccagaaatgagagagaaggaagagtaacctaggatggttggattattcaacgtttgaggatattcagggcaatgtaacag

SEQ ID NO: 461576 - DNA, 581 bp, Homo sapiens
tatcgtttgtaagtcaccagatataaagtattttatatagcagcctgaatggactaaggcagtcatcacatccctgagtctcaatttccttatttgcaaaatgagcatcataatatgcatataaggatatttgtgagcatcagatgaggaaaggtaccaggcagattttggtagctgtggaggattatacggatgctagttgctttattctacttttctagaagttcacctcttatactggctctttgcttttacaaagcacacactgccagggtgttcaggagagagtgagtgcatatggagagtaagggagtgagactattctgctggatccagtaaaatgcytttctctgagcacagagatcaacaaatgtgctcatgtctatctcttggcattaagcagtcaataaccatgtgaactatacttttacttacaataatatgtagcataaaacaggacctccacaactcctttcttatattttacaggagtagctcttcagctcctcagcttttttcattggtttaccaaggaacaaatgtgccttggttgagattcaataaaatcaattaattaggca

SEQ ID NO: 461577 - DNA, 641 bp, Homo sapiens
ttgctcctgtactaaaagcacagccacacgggtcattattgtgtttgctgaaagactgcctggttatttcactgaatggatgctgcagctcttgtgtcaggttttatatagctaatttaattgttgccaatggcaacagcagggggtcatgtcagcgactgatgccatttatactgctgaagtaaagtctgtatcagcatttccattagaaatctgtttaaaataatactgattgagcaaagaaacaaagggaaagaaagagggtcgaagagttttgaagataatgtagatgtgaccactcctgttcatatggatacagatggtacataagtttgttcattcattcattcaacaactatttactgaatacttcttagtcycagttactatgcatgatataaatgtttagcaaataatagtcctagatcttcatggagcttacagtctagagtggaagacaaatgataagtaaataatacataaataaataggtaattactaattgtgattaagaactgtgagagaaataaacagctgctgaaaaaactttaactgaatggggagatgcaagcagtgaaacatctcaggtggtgacgtctaaactgacttgaagggtgaaaagcagttgtgaatggtaggca

SEQ ID NO: 461578 - DNA, 641 bp, Homo sapiens
ttgctcctgtactaaaagcacagccacacgggtcattattgtgtttgctgaaagactgcctggttatttcactgaatggatgctgcagctcttgtgtcaggttttatatagctaatttaattgttgccaatggcaacagcagggggtcatgtcagcgactgatgccatttatactgctgaagtaaagtctgtatcagcatttccattagaaatctgtttaaaataatactgattgagcaaagaaacaaagggaaagaaagagggtcgaagagttttgaagataatgtagatgtgaccactcctgttcatatggatacagatggtacataagtttgttcattcattcattcaacaactatttactgaatacttcttagtcccagttactatgcatgatataaatgtttagcaaataatagtcctagatcttcatggagcttacagtctagagtggaagacaaatgataagtaaataatacataaataaataggtaattactaaytgtgattaagaactgtgagagaaataaacagctgctgaaaaaactttaactgaatggggagatgcaagcagtgaaacatctcaggtggtgacgtctaaactgacttgaagggtgaaaagcagttgtgaatggtaggca

SEQ ID NO: 461579 - DNA, 552 bp, Homo sapiens
tgttggggctactggtcacccctcattccccattccatatgaatctgtcctttcttgccctaaaatcctcttggaaaaatccattctcattaaaatttacttgtttatttgccccattccctggatccctaccagctgatatgttagttaacaagagaaacaaattcagttaaatattaatttgggatgatagtttaatwtgttattccagataacacatttgcattttagcagaggcttttaataacaaatagaaaagaacatctaatgtagaaatttaagccagagagagaaatattttggtgcagaacatttttttctctcactgtcaaatcctggggatcatcacttaatttacttatatgtagggtcaaacctgaagaccagatataaaagttattgttttaaagctgtaacaaaattggaaacatactagaaacttaatcccattctgacttttcatggtaaggaaagtaagccttgaaaacaaaatgagttcttcacctagttaataacgcgggtggacagcttcttaaaccccagtgtatacca

SEQ ID NO: 461580 - DNA, 535 bp, Homo sapiens
cttgcccaaagggttgagccttcaagtgaarttgcagccctggctgacaacttagctggaactgcaacctcatgagacaccttgagccagaggtaccaagtcaagttgtgcccctattcccaacccacagacacagtgagataacaaatgtttattgttttaagctggtttggtagcatacttttgtgttagtcctagcctttctgtgccacagtttcttcacttgtatgtgtttgacagttgaaccagatgattttatttctgaataacaagggaatttattgatgcataagtggaatgtctagaggtagaaagggaggtttgacccagcagcttaaagatgtcaccaaaacatgtattttccccagttctgaattagatgatctttgaggtgacttatctatacacaattacctaaattcctcatgtgttattgtaagccaattctactaattctatcttcaataatgatgaagaatattcagccacagttcttccaaaaataactctttattaaataatatgaaattttaaa

SEQ ID NO: 461581 - DNA, 535 bp, Homo sapiens
cttgcccaaagggttgagccttcaagtgaagttgcagccctggctgacaacttagctggaactgcaacctcatgagacaccttgagccagaggtaccaagtcaagttgtgcccctattcccaacccacagacacagtgagataacaaatgtttattgttttaagctggtttggtagcatacttttgtgttagtcctagcctttctgtgccacagtttcttcacttgtatgtgtttgacagttgaaccaratgattttatttctgaataacaagggaatttattgatgcataagtggaatgtctagaggtagaaagggaggtttgacccagcagcttaaagatgtcaccaaaacatgtattttccccagttctgaattagatgatctttgaggtgacttatctatacacaattacctaaattcctcatgtgttattgtaagccaattctactaattctatcttcaataatgatgaagaatattcagccacagttcttccaaaaataactctttattaaataatatgaaattttaaa

SEQ ID NO: 461582 - DNA, 535 bp, Homo sapiens
cttgcccaaagggttgagccttcaagtgaagttgcagccctggctgacaacttagctggaactgcaacctcatgagacaccttgagccagaggtaccaagtcaagttgtgcccctattcccaacccacagacacagtgagataacaaatgtttattgttttaagctggtttggtagcatacttttgtgttagtcctagcctttctgtgccacagtttcttcacttgtatgtgtttgacagttgaaccagatgattttatttctgaataacaagggaatttattgatgcataagtggaatgtctagaggtagaaagggaggtttgacccagcagcttaaagatgtcaccaaaacatgtattttccccagttctgaattagatgatctttgaggtgacttatctatacacaattacctaaattcctcatgtgttattgtaagccaattctactaattctatcttcaataatgatgaakaatattcagccacagttcttccaaaaataactctttattaaataatatgaaattttaaa

SEQ ID NO: 461583 - DNA, 631 bp, Homo sapiens
ttacctaaattcctcatgtgttattgtaagccaattctactaattctatcttcaataatgatgaagaatattcagccacagttcttccaaaaataactctttattaaataatatgaaattttaaagatttggttttatcttattattctccagtgctaaatttacttatttctttaaaccatagyattacattcaaatgctgtgtcacataaatcttattacacataaaattctgcaagaaaaaaacacatagatgcatttttgtccatatgatgtgacaatggttttacaaagcttttatttcaaagatataaacatcttgattggttcttaatttgacaaaacaatctcagagattcagactattgaccctagataagttgagccccctgaagatgatttcagaagtttgttttcagtatctatttggacaaagtgagtgtgacatggagatgaccatgttctcagaaaagatttcccctaaacatgcagcagaggtcttccttctggacacccattaggtggccaatattttctcaattcattgatccagatcccagcatatgttttccaaacagaacagaaagtactctgttggcatgctggaggaatgaagccaattagtcctcag

SEQ ID NO: 461584 - DNA, 590 bp, Homo sapiens
aatatcacactctggggactgtggtggggtggggggagcagggagggatagcattgggagatatacctaaggctagatgacgagttagtgggtgcagcrcaccagcatggcacatgtatacatatgtaactaacctgcacaatgtgcacatgtaccctaaaacttaaagtataataaaaaaaaaaaaagaaaaagaaagaagtatcaatatttttaaaaataaaaaggaaatatgagtcataatgtagtcatttttgagggaaggcactggtatccagatatcataaaactatgaaatatagaaagcattcgtcttcaacattctcaagtttcttaccaccaactttattttgtataatagttggaaaataatcggatagtttaagttgaagttagaagaacccaacttttctattcatgttttggtacctgtcttgcctaaggggaaacagtatgaatcttccattatttaaaaaacgaatcttttttgtgacgatggcgactgccatatattaattgcctcctggccatgcttaggtaaaatttacctagaagtccaaccaggggatggaattctgggaatttaccaa

SEQ ID NO: 461585 - DNA, 590 bp, Homo sapiens
aatatcacactctggggactgtggtggggtggggggagcagggagggatagcattgggagatatacctaaggctagatgacgagttagtgggtgcagcacaccagcatggcacatgtatacatatgtaactaacctgcacaatgtgcacatgtaccctaaaacttaaagtataataaaaaaaaaaaaagaaaaagaaagaagtatcaatatttttaaaaataaaaaggaaatatgagtcataatgtagtcatttttgagggaaggcactggtatccagatatcataaaactatgaaatatagaaagcattcrtcttcaacattctcaagtttcttaccaccaactttattttgtataatagttggaaaataatcggatagtttaagttgaagttagaagaacccaacttttctattcatgttttggtacctgtcttgcctaaggggaaacagtatgaatcttccattatttaaaaaacgaatcttttttgtgacgatggcgactgccatatattaattgcctcctggccatgcttaggtaaaatttacctagaagtccaaccaggggatggaattctgggaatttaccaa

SEQ ID NO: 461586 - DNA, 545 bp, Homo sapiens
ttgctgctgtgtgactcctagtgtttcctataatttggtagcagaaaccatatgtctttgtgcctactgtgtgcagtcccctgtggcgggctgctgccatcctagctatgtgactgccctgtgataggaagtaagcctcaaagcacgctcctctaggaggcagggagaggatgagtgagaaatttcttactagrtagacaagtagctgagctcattatatggctttgtccactgtgtctcttttgaaaggagattgctcattcttttaagcaaaagaacaattttactagtaaatgagattttctctgcaaagctggtctcaagaaatgacatatacgtagccctgtaatagattctgataacttaattaaagctaatgcaatatgcaattccagtgcattgtcaatcttggtcaaatgtgtgcttcattttaactggcagtgcaaatcacttgtgagggtacaggaataacatgcaatccaaaagaatccatatagcagcatctttttattgatttgaagggaagtacagcatattatggtggg

SEQ ID NO: 461587 - DNA, 508 bp, Homo sapiens
caattttatttattcttacttcccatctccactcccaccttaatactgatgcatgtgaagaagcagaaatgggaggaaaacacagttaaggacaaaactagaatggaagcaatgtgtagatgcttggtgcactaggaagattgtgaggagtctagtgtgagcaaaaratgaatttggtttttaaaaaaatcaccttatttgactataaaacatttgaattttttatttggatgttaagattttcctggatcttacatatttgggtgacctcatcttattgataatttatactctaaacatctttagaggtattataacaagtccttgaatttactcatagtaaccgtaacaaaaggtatacagtactttacctctttaagtttattcattcataaaacatggtaagtagcagatactgtgctagaccctcacaaaagtgagtatgacaaaaatgactttttccaatttctttaagctcagagttccctaaaacaaagcaccccaaaaa

SEQ ID NO: 461588 - DNA, 581 bp, Homo sapiens
agagaacaaaaaacactcaaatcacagaagtcttctttaaagatatgtccattcaggtcctttgcccattttacaactaagttactgttttcttgctattgagttgtttgaatttyttatttattttagatatgaatctcttatcagatatatggttggcaaatactttttcccattatataggttgtctcctcactgttgattgtttccttaactgtgcagaagctttttagtttgatgcaatcccatttgtatattttcacttttgttgtctgtgcttttggggtgatagccaaaatttcattgcacagaccaatgtcaaatctttttctttgttttaaggtagtgacagctccaggctttacattcacatctttagtcaattttgaatagatatttgtatatagtatgaggcacaaatccaattttactctcttgtatgtgaatgtccagttttcccaacatcatttattgaagagattttccttatcctactgtgtgttcttggcctctttgccaaagatagatttactgtaaatgtgtaaattaatttatgggctctctattctgttccattggcc

SEQ ID NO: 461589 - DNA, 572 bp, Homo sapiens
cacagcatctgtcagagatgctactcaaacaggagttggacaggatcagggaggcattttttctttttyccaccctccaatctcctatcaatgtctcccactggccaaacctggcaggaatgcaggaaagtgtagttttggggaacagtcttgtaaagtgcagaacaaaacagcaaaggtaggaaatgaatctgagaacaaactggcaaattactgacatggttacacaccctatcagaataaactcttacaaatgagtaggatagcaataatttgatttgtaattctctttccctaaaactgcctcccagtatagaaaatttaatctgtggtgagagactgtggcatagagttaagggatacagagttgatctaccttccaatgacaactttgttattcatgagttcctggacttgtgtaaatgtaatcccacctatcagacaaattttggctaaaggcttatggtgtgctggggtaaggggaggtaggtgttttaatattatcttaaaaataaaatgctgaactaggttaagactttacaaaattaagcactccattttattgtacaaac

SEQ ID NO: 461590 - DNA, 644 bp, Homo sapiens
atgttttcaaacttcttgatctcagaatagctagcacaggattatattcttacacacttatggaaactataaggattttgctcttaaagttaattttttgaattgtttttttctcactwtgataatgcttcacaatttacaatctccaggcactttgcatacattatcttggctcatgctctccggaccctgtgagtgagatagtgctatcttccttttagagaaaggaaactcaagctaagcatattgcctaaggtcactggacaaagaggtgacagaggcaagaaaacccctcaggtcttctgaccccagtgcactgctctttctgttaggccaagctatggtctcagtaatgagactaaaatttaaaccttggataccctttgagaatgtacctctgaaaaagatgtggacatacttttcaactatctaaagacaataatgtttgattagtaaatctcctcccctccttgactttatctcattggaggttttatttaagaagcaggttgtcccaattcttgtgcatatcagagactgaagatgtactgattaccttcctgccctcttactgcctgccatgtgccctcacctcccccttcaccttactcacatcttgccgtatttggttccaattctatcct

SEQ ID NO: 461591 - DNA, 644 bp, Homo sapiens
atgttttcaaacttcttgatctcagaatagctagcacaggattatattcttacacacttatggaaactataaggattttgctcttaaagttaattttttgaattgtttttttctcactatgataatgcttcacaatttacaatctccaggcactttgcatacattatcttggctcatgctctcyggaccctgtgagtgagatagtgctatcttccttttagagaaaggaaactcaagctaagcatattgcctaaggtcactggacaaagaggtgacagaggcaagaaaacccctcaggtcttctgaccccagtgcactgctctttctgttaggccaagctatggtctcagtaatgagactaaaatttaaaccttggataccctttgagaatgtacctctgaaaaagatgtggacatacttttcaactatctaaagacaataatgtttgattagtaaatctcctcccctccttgactttatctcattggaggttttatttaagaagcaggttgtcccaattcttgtgcatatcagagactgaagatgtactgattaccttcctgccctcttactgcctgccatgtgccctcacctcccccttcaccttactcacatcttgccgtatttggttccaattctatcct

SEQ ID NO: 461592 - DNA, 538 bp, Homo sapiens
ttacaatctccaggcactttgcatacattatcttggctcatgctctccggaccctgtgagtgagatagtgctatcttccttttagagaaaggaaactcaagctaagcatattgcctaaggtcactggacaaagaggtgacagaggcaagaaaacccctcaggtcttctgaccccagtgcactgctctttctgttaggccaagctatggtctcagtaatgagactaaaatttaaaccttggataccctttgagaatgtacctctgaaaaagatgtggacatacttttcaactatctaaagacaataatgtttgattagtaaatctcctcccctccttgactttatctcattggaggttttatttaagaagcaggttgtcccaattcttgtgcatatcagagactgaagatgtactgattaccttcctgcccycttactgcctgccatgtgccctcacctcccccttcaccttactcacatcttgccgtatttggttccaattctatcctcacagaccttatgaaaatgcaatggcagcg

SEQ ID NO: 461593 - DNA, 538 bp, Homo sapiens
ttacaatctccaggcactttgcatacattatcttggctcatgctctccggaccctgtgagtgagatagtgctatcttccttttagagaaaggaaactcaagctaagcatattgcctaaggtcactggacaaagaggtgacagaggcaagaaaacccctcaggtcttctgaccccagtgcactgctctttctgttaggccaagctatggtctcagtaatgagactaaaatttaaaccttggataccctttgagaatgtacctctgaaaaagatgtggacatacttttcaactatctaaagacaataatgtttgattagtaaatctcctcccctccttgactttatctcattggaggttttatttaagaagcaggttgtcccaattcttgtgcatatcagagactgaagatgtactgattaccttcctgccctcttactgcctgccatgtgccctcacctcccccttcacyttactcacatcttgccgtatttggttccaattctatcctcacagaccttatgaaaatgcaatggcagcg

SEQ ID NO: 461594 - DNA, 647 bp, Homo sapiens
cacttcttagactattttttatccatgatattattcactatatggtaatgtggtaatggcagtccactgtgtttagatgtttctattaaatatttcaatttatcccatgaacatgagttacatttttagagtagaaagtattcattttactacagtagaagaataggcccagtaagcctaaaatgaaaatggcatattttataaataggtaataatatccaaagacagttttactgcctagcaacctccagatttaatgttatatarataaaatatccattttatatcaatgctgtaccatctgcagtcatgtgaactgagttttgcaactgactatccatgcattgattttaaaacatggactgattattaagcaaaatattagaagtcagttattcagctggacagaaaggagaacaaatattgagaagtctaatctcaccaaacatcaaacatgagtattcatttttaccttttttttaatggttttacttttatttttatcgagaagtaaatatttctattttttatttatttaagctattcattctggcaatgatttggcaacagtgcaggtggtcctcgagctttatttttactgtctggtatttaaactgaaacataacgtttctaagcaatacgaggcc

SEQ ID NO: 461595 - DNA, 549 bp, Homo sapiens
catgagtaatcttggaagtggatcctccccactagtcaaatcttcatatgggamagcagctcagactatcaactcaactgacctctggagcaacatacaggcagaggcacccaggtgacctgcacctagatttctggctcatggaagtgtaaaataacaaatgttagtttcagctgctaagtttggggataattctttatgtagaaatagataactaatatcaagacaattgaatcgaaaaagctggctttccagtgttaccaggagataaatcagggtttggcaaaccattccttgtgggccaaatctaccccatatcctctttagtacagctttcaaactaagaattattttcaccgttttaaaaggttgtaaaaaacaaaatgaaacaaaacaagaatatttaacagagactacgtttggacagcaaaacctaaagtatttactatctggccttttgtagaaaagtttgctgacccttgagagaaaccattgcacttcccagaggacagccaatccttccaaagtcattggaaggaactgcagcct

SEQ ID NO: 461596 - DNA, 576 bp, Homo sapiens
gtaccttcctgcagagtgtgatcagcttcttataaaagtggcagaaggaaaaggaatgataaacaatatgtgataaacattgtcactgaaaaaaatcatttgtaattcctaatgagtatatttcattataagaagtatttatgtctctccattatctgtgcttgggacctgagttcatcaaacagccctgtgcttgagcctgcatgagctagaagaataagggcagttatgacctatgatcatgtcaccttcagaatagtcagtcccaagcatgttttaacctagattatctgtaattttttccctcactttgggacattagtgttggctcaagtgggaagtaaatattaacaaaatagctttgagcttaacaaaatagatgagatcatttagctcacgtgagaccacaagatgatctgaaatcacaagaactgactacttcttcctctgtgcgctgctctgccatatgaccttaagcaagaatggccacatggcacttgatttttgacagtccctcaarattcttgagtgcagggacattgttttatcattctagacctagagatcagcatagag

SEQ ID NO: 461597 - DNA, 610 bp, Homo sapiens
agcgtatcaagtggtgatgagctgagtttgctggggcgatagcagtacgaagaagagttgtgagagcctaagtgaggaatctgagctggagacaactattagaagacctgggatgtcaggtctggactttgtctttgtataatggggaactggttgaacatttttcaatagggaaggacaccacctgagctgtggaaaaagactggtggtaggatgtgaggaaaccattattgtctggtctgagatcacactagcattcaatagaggccgtgggtggcagggggtggcggggacacaagggtggtagatggagaagatctgccgcatatagaaccaacaggacatcgcaactgagtgaatttagggctcacagaaggaarataatgaatgaaaacaggttttccaccttagctggagaatattgtgttcattattaagtgaaagaaatgtacatgtgtaaggtaagactaaggtgtctactttgactatgttgggtctagaatgcccaactttacacagccaacaaatgtcccaaccagtcctcaaattcagatcttcgacttccaactaagtgctattttggggacacaatagccctcttatttttaat

SEQ ID NO: 461598 - DNA, 577 bp, Homo sapiens
ggactcatcctaatactctcctgattgaagagtcccctataacctattcatcaagccagaaggatatggtttctattggagtktaagctttatagcactgcccacaatatggacaccactggaagtatcatttccactcttatcaagccatgagagaaaaaaataaaggatgattcccctcatgttctcttgctcatagaggcctatatcttagccttctagagataaagacagaattatctcaacatgttagatgcccatagtgatgttgtgtcaggttcactggaagcctgtcttggctcaagtccatgatagaaaaaagagaaaataaaagggaaattaacttacatataaatcatttttaaatgccttgacatccttccccaatgtacctgcttttgtttatttttcagagtcctcaagtagttgctttttgtactttgaataaagactttagtcatagtaggagagatagactgtaatggacttacttcacgatggctgcaccagaggttccaagaacgagtaagttttggggtactaggagaaaccccaagtgaaatgtaaagcctgaaaa

SEQ ID NO: 461599 - DNA, 604 bp, Homo sapiens
tgtttctatctcttgtatttcagttcctcacccctaaaacacaaagacaaatggcagtttggaggtaaaatgtttgctgagcaacacaaagctttagagtgaatgcccaaagatctttgccatcaccttctcttctgcagataatgcagtgactgggagaggagaagggggaaatgtgagctgtcacttatgatttgcatgcatctgaatacacattgtatacacactaactcaaagtggttcacgagatattcccattaactcgcggtgatggcatctgcattttataatgtcaaaggagctcactggaaataatagacttgagaataacgtaagtgtagaagaataaaataaaaataaaaaataagaagtagtgtggccagcttgtctacagcccctacctttttgtgctttytctcctgaggcatcctgggtcatgcttccttcatggtccctggatctggaaatcttcacactgttccacatgtaagcctctattgagccatttagttctagtttcagctcagaaaacttttccctgaaatttatgctaattatgatatcataattattcaaatctgtaactgagtctgcgacagtgact

SEQ ID NO: 461600 - DNA, 553 bp, Homo sapiens
gcttccttcatggtccctggatctggaaatcttcacactgttccacatgtaagcctctattgagccatttagttctagtttcagctcagaaaacttttccctgaaatttatgctaattatgatatcataattattcaaatctgtaactgagtctgcgacagtgactctcttatcttcacgcataaattcaacttgcattcattaagcagttatgtgtcaggccatattccaagtacaggaagtacacggataaagggagaaaatagtaaacaagtaaacaagaaatgatcatttcaartatcaagtgctgtgatagagtaattagggactaagaggtgaaacagaggcagaagaggcttcagaggaaattgagtactgcccattaggtaggagtattccagaaaagaaagtgtgtgaagaagaaaagagtgctcagtttcatcatctgcagtctgcttgtgaacttgggcaagggggaagccaacagagaccttaataagaatatttggatggaatggtgggaacaaaggcttttcctggggggagaatgcag

SEQ ID NO: 461601 - DNA, 626 bp, Homo sapiens
tttcctagaaactgcgctggaggagactggcacaacagtcagtgacagaagcataattaatgaacaaatcccagtgcagcctggcttctgcccttatcactctatggaaactactctggtgaaggtcaccgctgaccttctaattactcaatgcaatagatgcttttcagtcaatgcttttactaggcatctctgctggacgcagcaggacagctgagtgacaggcagaacatcacacactcactaacttacaaagcaggaatttaaaacaggtaggtttaagcccaagttcaggatatttctgttaaaccaagttacctctcgacagttcacagatataatttaaaagaagaatgaaatgatggggaaatgatggattgactaaacacttattttttcttctttgtagaacagatctaacgtgacagtaatggtattttaagaaggtatatagccaccaggaccaagagaatggcagacaacacagtaaagaaaagagattttttaaaagacagaaagaggcaagaacctaaagtgcatgcagggattraacggaaacctaaaaatctgtgattagcatcttaagagaggtaaaatctgtgcagacatatgttgtttattgtgct

SEQ ID NO: 461602 - DNA, 626 bp, Homo sapiens
tttcctagaaactgcgctggaggagactggcacaacagtcagtgacagaagcataattaatgaacaaatcccagtgcagcctggcttctgcccttatcactctatggaaactactctggtgaaggtcaccgctgaccttctaattactcaatgcaatagatgcttttcagtcaatgcttttactaggcatctctgctggacgcagcaggacagctgagtgacaggcagaacatcacacactcactaacttacaaagcaggaatttaaaacaggtaggtttaagcccaagttcaggatatttctgttaaaccaagttacctctcgacagttcacagatataatttaaaagaagaatgaaatgatggggaaatgatggattgactaaacacttattttttcttctttgtagaacagatctaacgtgacagtaatggtattttaagaaggtatatagccaccaggaccaagagaatggcagacaacacagtaaagaaaagagattttttaaaagacagaaagaggcaagaacctaaagtgcatgcagggattaaacggaaacctaaaaatctgtgattagcatcttaagagaggtaaaatctgtrcagacatatgttgtttattgtgct

SEQ ID NO: 461603 - DNA, 604 bp, Homo sapiens
gttgaaggctgagacaggttgaaagcgagkgttgttgctccaaacagttagccaagctgtgaatgcaaaggaaaactgaaagaaattaaaagtccttctcctgcaaatacatacatgaatgattaaaaaaaaaagtaaaatagccttattgctaataaggagaaaatttgagtgatctggatagaagatcaaaccagccacaacattttcttaagtcaaagcctaagccagagcaaggccctaactcttctcaatcctatgaaggctgcaagaggtaaggaagctgcagaagaaaagtttgatagcagaggtttgttcaagaggtttaaggaaaggagtcatctctataacataaaagtgcaaggtgaataagcaagtgctgatggaaaagtgcagcaagttatctggaagatctaactcagatcattgatgaaagtggctacactaaacatgttcaatgtagacaaaacagccttctactggaggaagatgccatctaggacttacatagctagagaggaaaagtcaacatctgacttcaaagcttcaaaggacatgttgactcttcttaggctaatacaactggtgactttaagttagccag

SEQ ID NO: 461604 - DNA, 477 bp, Homo sapiens
atatattcctctctgattattttttataacaagctggggcatttagataaaagaaatataaagacaacttggagggagttcagaataaaaccataaaaatgagtggttagaggaaagagggaatcagttatgtgctggctaaacaagaatgaaagaatgacccatgataaatgaaaggtgtatgtatcagagcaaattgcttagctgttgacaggctgttgagtcagacwgctactatctctggagccatatattttgagattaactgagcaattttcccccctctctgcagttaaattcctttgccccaatgctaatttaattgctccacaaggagtcatctatcacaaggagttggtaggagtcaaagcattatccaagacttagtgagaatgtatcttttctattctccaaagacttgagatcattcaaaatctgctaaaaataaaatatttctaataataaaagttcttccat

SEQ ID NO: 461605 - DNA, 406 bp, Homo sapiens
ctgctcagatttttactcttaatgtgtatctttttttcctttttctaagaaggtcttgctctgttacccaggctggagtgcagtggcacactgttcacygtgacctcaaattcccgggctcaagagagcctcctgctttgcctttcaactagctaggattacaggcatatgccaccacacccagctaatttttaaaatttctgttgagaccaggcctctccatgttggccacgctggtctcaaacttctggcctcaagcggtcctttcacctttgcctcccaaagtattggggttacagacaggagccactgaattgagccttaatttgtacttcattgttggtgtttctaaacctctcaaccactgcaatttaagaactggcagatatgttgaggaaaaaagtag

SEQ ID NO: 461606 - DNA, 646 bp, Homo sapiens
agaattgggaagactttttcttgattgactgttgagtgggcaaatgtggagtatcatcaagcactgtgtctagggagggtgttgtcaaaccatggattaggttagctcaagagccactccacttgtcaagaaaaagctaggaaagcaatctttcttgaatgtgtgtagaacttactatccccatgttgtgtaaaactgaaccttgatcaggttatgcaagagaacctgagaaaagtgcacaaaaacatagttataattatggcctaggctttgatgattaattaaatcactcttgtgaaataattatcttccaacatttgagaagctgtgttcagtcacttcaaagtgtattaagaackgtcctggggcacttaagccgaaagttaccttgctgtgtctcctcttcacttttgtttccaatctactggacaggattaggttgtctaatttgaattttgtcaaaataggagaaactttctgctgagaagcaatgagaaggaacaatctacagttgatgtaggctgatggccaacatcacaaaagcatgactcccaactgtgtctcctctaatgagcagctatcagcagcttcacaatcacccatttcttcactaagaatagtccaaggcatagaaaaccttcatcaa

SEQ ID NO: 461607 - DNA, 609 bp, Homo sapiens
atttgcttcactcttccataaaatggggcttaatcctctgctcttcatacagttgtttaaaggatcaaatgagattgtaggtaataaagatccctgaaaactgcaaagtactatacacttgtaaagtagtcacatgggattaagagaaacagaacatgaatgactagctcctcttggattatgctccaatatccaaagaaaattgcccaatattttcaaagtatttttaaaacaatgttaaagaaggaaaccaacatgaattgctttatgatagaagccatggtgggggttggggaaaggaggaaatgaaacttcaagtgtggtaggatatgggctgatgatagaagtggctctgattcatacctatgtcctggtccatcagcaaagtttcattcaagcccaaactaaaagtatcagaagaaaaagactagtccaattaccattttggtctgtttttggtgtttcatgctcactggaaaatctgaagatgggtaatgkcaaagtgtctttgtcgtgcctcgtgctgagtgtgcctggcatatcagaacaccttggccatcctctgttcgtaggacagcactttccagaatggtgcatggaatgctattc

SEQ ID NO: 461608 - DNA, 598 bp, Homo sapiens
gagtgaattgaaggtaatttggaggtgcgggagactgaaggcaggattccagagagcatgtacccaggtgaaaagtgatcacaacctgaaccgaaacaggagcagttgaaatcatgtttggtggagacattaaagggaaatgtcaaatgtaggattagggggatttggttgattggatctaggcatagtcaagacatggatgcatctctgtttctcatttgggtggccgaatgatgctatttaccaagcaaaagggacagagttaaaggtaagatgaatatcttaatctgttaacaaacctaatttttagatacctattagtaaagacattccaaaatacctatgygtagagcccacgagagggagatctggaatgacgaactgggtttggaaactatcagtgacaggtgatggctaaatcccagggcatagctcattttgcccaggaggagtaaagagcatagaaaagccaaggccaaaagacagaaccacaagaagcaccctcatttaaaaaacagcaaaggctgggaagcataaattaatgagctacaaggaaagatggaagagaaggggttgtgggctcccaaagagggaagag

SEQ ID NO: 461609 - DNA, 524 bp, Homo sapiens
catatttagttccctttccactgactcagaggttttcaaactgttgcctggaggtattgtggagaagcggacagccaggaggaagcccagtcaaataggcagactgctttcttaacagtcaaccatggtaattccctttcatctgacacacacatatacacacatacacacacacacttacacacacatgcatgcacacaaacacacacatggcttttgcataatattacatttgaaggaattttctgytactaaaactaagttttaaaaaaacaccgttgccatacttaacgttttatgtacaacaagacctcaggccttactctataaactaattgtcaaatacacagccttgttttcaatatgagtgtgatttatgactgatgagggacctgagtgaataaaaagagtgagaattaattcaggaagatactatatgacaagcggaccatcactaggaagtgtatgacaatagttgcatacacttttgcaagcactgaaatcacccaaagagcttgttaaaa

SEQ ID NO: 461610 - DNA, 498 bp, Homo sapiens
gttcaactctttttcctgaggtgcctcaaatttctacttgttcattaagagaattctccagagacagatgtattacagcactttgagaactatattcacacccattgctgaagagtgaaaagagatagctcaaggttccactctgtgaaacaatttagtggctaaatgtgttacttaggaactaaatccaagcaggtacttaaaaagaagcaattgaacatagtgacaaatacttcccagagtatatgggtatttagacttctgcttaagtcttccattcctgcatctgtgcacatattacacttcaagtacacatctctttatatactctattacctcrtggccattacttgtgggtgatgaatgctagtgttcacagaacagcgtgctgatgcattttttcctgccattgtatgtaacatgttttctaattcttttgctctattcagcatttgaccccaacgatgggggattatggtattaactctctacccagca

SEQ ID NO: 461611 - DNA, 588 bp, Homo sapiens
gtcaggatatttctgataggtagcaaatgaccagagatggagatgaatcagcattactcagatgagaaggtagctctttataccattaattccaatccaaagtaattccaccatccttctcccaaaagagagggcactgtaaatgtgggggaggggaagagcagaaagctaaagctccaaggatttactgatggtttggacgggctgcaatgtcatccaagtttctaggctgagttttgttgagtctgagcttctcagatgcatcaccagtaactttcagttaagtaatgtcgtataggcttagttaggttacaaagataacgctctacacctcagtcagaatctttaagatctcaatagataaaaatgaaacggtttatcagatctcaaaatactaggagcattcactctttaatgaggtagatttaggatctcaaagatgtgaaagtactattttacaaagcagytgactatgagggccttgtgtccttgcaaggttatatattatgaccatctaaataggcttaagcaggttttaggagatgcatggataacagctccatgatggatcgctgtgacaaaatggga

SEQ ID NO: 461612 - DNA, 610 bp, Homo sapiens
catacacacacacattcacacatgcactcacacactcagtgaaaaatcacagtcaaactgctctgtggcctrctgactgtacaactgacaaaatccctaattttttggcgggaggccttgtaacatattagtaaaagctaagaataaaacatgggtaattattctatataccccattaccagccactctcatgtggccattctgatcacttgaatgaacaattggctaaaatgatatcatcgaaagctaagtctatatgacatctaatgaggttatttcatgacaaagttgccaaggacaatgagaaaagaagtggagccatagacccagagccatacagccaccctaagaaaaggatctgggctgtggtcatctggtcagctccttctttaatcttcagcctccttgaaaatggtgcacatagctagtttctaaagagaattgtaaattagcaataatcacttttgtcacttgctgaatcctgggctatatataaataactgacagtcatttgtgttgtgtgttcttttttccattaaaagatgggttcttcaaagcattatgctttttaaggcctcaaacatttccagcatttgcacagggttgtgtg

SEQ ID NO: 461613 - DNA, 610 bp, Homo sapiens
catacacacacacattcacacatgcactcacacactcagtgaaaaatcacagtcaaactgctctgtggcctactgactgtacaactgacaaaatccctaattttttggcgggaggccttgtaacatattagtaaaagctaagaataaaacatgggtaattattctatataccccattaccagccactctcatgtggccattctgatcacttgaatgaacaattggctaaaatgatatcatcgaaagcyaagtctatatgacatctaatgaggttatttcatgacaaagttgccaaggacaatgagaaaagaagtggagccatagacccagagccatacagccaccctaagaaaaggatctgggctgtggtcatctggtcagctccttctttaatcttcagcctccttgaaaatggtgcacatagctagtttctaaagagaattgtaaattagcaataatcacttttgtcacttgctgaatcctgggctatatataaataactgacagtcatttgtgttgtgtgttcttttttccattaaaagatgggttcttcaaagcattatgctttttaaggcctcaaacatttccagcatttgcacagggttgtgtg

SEQ ID NO: 461614 - DNA, 525 bp, Homo sapiens
atatttagctatattttcacttcaaaaaaatactgaggttctattctcaaggaaaaatataggtgtgactattgaataggtcactaactgtgcaagctgtagcctgatttttttttcatgaagaaacacatcacactttaaagttttcatgataaaaattacacacaaaattcatttatactaggaaactagtgacttctcttttaatgggagcgagagagtagaggttcctgtcatttgtacaaatggtgctgaagagacaaaggtgtaaagaaaatgatagtaaaacgtgaaagataaattactgacaattcattgggttttccatgcaattttgactgagtgcacataaattcatctagtaggatatgatattttctggaacaatgagcctatatgcagctttgtttaaaaaaaaaggtttgtctcaagtgtaagtggcatagcttgtttaacaaaatatattcacttgattattcagaaaactgatktgttgaagcaaaattgaatttaacagatacataa

SEQ ID NO: 461615 - DNA, 515 bp, Homo sapiens
tcttacgtggcaggaacaggactgagagagagaggtggaaggtgctacacacttttaaaacaaccagatctcttgagaactcactcactatcaaaagaacacataaaccacttgtgagaactctgcccccatgattcagtcacctcccmccaggccccacctccaacaatgaggattacaattaaacaattaaacatgagatttggtgggtacacagatccaaaccatatcaagggcctttgagagggaatttaagttagattatgccatgagggtgggaccctccttaacggattagtggccttataggaagaagaagagtgagattgctcttgctgccctgtgaggacgtagagagaagacggccatccacaagccctcaccagaactcaaccatgctggcatatggatctcagacttccagccttctggactatgagcaaatgtattgtttaagccacctggtctatgatgttttgtttccgcagcctgagctgacaaatacagccaccagg

SEQ ID NO: 461616 - DNA, 559 bp, Homo sapiens
tattgtaattgttttggggcagcatgaactgcaccaacatatgacagcaaacttaataaataaacgtgtgtgttctgcctgccccactgactttctgttttcccgtctctctctctctgggcctccctgttccctgagacacaataatattgaattaggccagttaataaccctacaatagcttccaagtgttcaagtgaaaggaagggtcacacattttccacgttaaatccaaggctagagatgattaagctcagtgaggaaggcaagtcaaaagcttagataggccaaaagctaggcaggcctcttgtgccaaacagttagccaagttatgaatgcaaaggaaaagttcttgaaggaaattaaaagtgctactccagtgaacacaggaatgataagaaagcaaaacagcctcattgctgatagggagaaagtgttagcggtctggataaaacatcaaaccagccacaacattcccttaagccgaagcctaatccaaaaaattcgtgtgacccrttttattgcggtattagctttattgcggtggtctggaaccaaa

SEQ ID NO: 461617 - DNA, 452 bp, Homo sapiens
ctcccacataacctagtttttaaattttaattaaagcccatgaactgaaaacaatcaaaatgtgtacttcgggaaggggctaattgtatattaatttcattattacccagatatatccaccatcactcattagatcaatgacagatgatcgtcttattggtcatcttcaaaatgatttactaagtaatgactagttgccaaggactatgrtgggaactttagggaatgcagaaaactaatgttatattgtctccatctttaggagaaaaaaatgacaaatctatattttaaaaatctagaaactaatacaggaaatttagaatcataatagaatttttttaagtttaagactgactactgttcatttcaatgttgacaagtacagatgtccaggtaatgctaaacttttgaagcacaaatgaaaatatacaatattattatcactaaattat

SEQ ID NO: 461618 - DNA, 609 bp, Homo sapiens
ttcactgctgccagatacatgcaaatggatgggatcaatattccacgttaaccgtgcacctggggggctcaccccatcaaagaggctgtgatgggtcagcagcaggctgagcacagcatggacctggacccaccccgggtcccagttgrcccgcttcccttggcaggagggcccggacactcacatcttgtcacaaccagtgctgatgggttttctccccacttgagtgcttttggcatgggatgatgaagcccctaaggtcaggtatttcatttcttcttgtccctggtggcaaaggacatgcagactgggtgaggttgatactgttttcttggtctgaggacatcctcttaataagtacacctgtggatttttgcctaagggtgcattttctaaatgcttacctgcccagctcagttgacactcagacggaccaggtgggtgagctggtgactttgtcattcacgtgctcatggctgcctgtggctgagtttccctccctccaacctggagctctgaagctgaagcatctctgcctggcaatttcctgtctgggcattgtgtaggaggcgcttcctagaacagggtgggcagaagggcttggaaaca

SEQ ID NO: 461619 - DNA, 551 bp, Homo sapiens
ctgaagaaggcgtgtgtggaaaatggcaatttaaatcatgatcttacttcctactttcatgctgaattggggggtttggttggggatagacagttaaatctggaatagttcccctcaggttttgaaggtgtggtcctcattgttgaggctccagggtggggcgatgtcacgccattgtgactcctggtcctttgtgatggactcttcctctccccacttcccttggaagcttttgaaaagggttttcttttgctctcagtacctagaagctgtaaaactctggtctttcttatttctattatttatatgtgggtgaacctttgcagcctaggcactcacattcttcagtctggaaaattttcctgaattcttctataaattcctcatygacattttctttattccttctctctgaaacttgtactaatcaaatagtatctctcttgtatagatcatttaatgtttaaaattttatctctgttttgcatcttgttgacttttgctctaatttctgtataataggataataatttttctattaaaattttaat

SEQ ID NO: 461620 - DNA, 551 bp, Homo sapiens
ctaataataataatggcctcatgtcttcatttgcaagaagaaaaaaaaaaaaagcgctgcagcccctgaggctggaccagacaggacagcatacggagggtgtcctatgggctctaaagtgctgcgtaaacacacgcggtcaccataaccacctgactttcatctgttattttgctttttatcttatttaatattttaagctcgtttcatgttgaaaataatgtatgagggctagagatatgaggaattattacatgcaatccctatttttaaggtacttattattcatatttatttgaggagatagaaaataaatatgagaacattaacraaaagaaggcccatcatataccctggggtagggtgctgctgatggaaagagtgacacagacttgggggccaggagctcagtggggacagtcaggagctgtcccacagggcagccaagaacagccttggttgcacatcagttctagaaagcagagttttcttgcccacttcagacaagtctgtggttttattttgtatgtgaaaagaaacctgtgttggat

SEQ ID NO: 461621 - DNA, 593 bp, Homo sapiens
cttgtacacccccagctcaagcctgcccctggggataagggaggggaccagatggtattgattgtctggggccacactgggatgttttatgtgctggactggcagtgccctgcttggagactttggggaacaagtgggtcctacataaagctaccgcccaaggcctggtcatctacagcagcacctgcaggggctcagaacccatcccccacaggctagcccagaggcaggcatacctgactctcccaaaagcagtcttctagccttgcctctccaacactgaggcagcagaaggccagggaracaaaagaaatagcgcacatacttacatgcgtgtgcccccacacaaacacttgtgcatacacacacacacacacacaaacacatacacttacacacaaatatagttctacatgcatagacatacaaacacatgcacacacacagaaacacatatactcacacacacacatgctcacacacatatacacacatgcacacacacagaaacacatatactcacacacacaaatgcacacacacatacacacacatacacacatgcacacacacagaaacatacgctcacacac

SEQ ID NO: 461622 - DNA, 275 bp, Homo sapiens
tagtcccacacaaaattggctcaggtccccaaggacttttcagcttacttgaagggacagaggaattaatctacaaattacaaaaggttttggttatctcttgctgtgcggtgaacctctcagggttctgcaggttgactgggctcagtgggcggttcttcygcaggtcttgctcagagtatctcatgtggctgcaatcataaggtgcctagtgctggatttatctgcaggctggacttggatgctggcatgagggagcctcagtggtcactctt

SEQ ID NO: 461623 - DNA, 275 bp, Homo sapiens
tagtcccacacaaaattggctcaggtccccaaggacttttcagcttacttgaagggacagaggaattaatctacaaattacaaaaggttttggttatctcttgctgtgcggtgaacctctcagggttctgcaggttgactgggctcagtgggcggttcttccgcaggtcttgctcagagtatctcatgtggctgcaatcataaggtgcctrgtgctggatttatctgcaggctggacttggatgctggcatgagggagcctcagtggtcactctt

SEQ ID NO: 461624 - DNA, 461 bp, Homo sapiens
cagtattttgatttcttgtccattttgtgattcatcgaatctttctgtaatttactaaggatgtttaaatgatcaggccagtaatgcttgacaagcatcttaattacttattgtatttatgggcctgcactaaacatcatggaaaatacaaaattgttcaatggctagaatgcatagaccctcttcttgaaataaaaataatctacatgagtagaataatatagacactgcagtcaaatggaaacaattataaataagtagaaaatacaaaatatcctaccacaaactgaagatgratatcaatattgcacatagattatgtgacaatggaaaagaatggcttatcataaatgggcttcctgtatgccctgcacattgacatagcccttaatatattttcagtgtggaacagaagaaaggtttcagatggaatgagtagtttgtggagaggtgagtggtgg

SEQ ID NO: 461625 - DNA, 531 bp, Homo sapiens
attatagccaatatttgtaattttctgttttttgtgtcagtgcaaagtggtatttcattgtggttttgacttgacctatgatattaattagctttttaccatttttacatgttctttagagaaatgttattcaaggcccttgttcatttttattttattttatttatttattttggagacaaggcctctctgtgttgctcaggttggagtacagtgctgtcatcttggctcactgcaacctctgactcttggkctcaagtgattctcctacctcagcctcccaagtagctaggagcacaggcacaaacccccacacccagctaatttttgtattttttttgtacaaacttggtttcaccatgtttcctaggctggtctcaaactcctgagctcaagcagtccacccatgttggccctcccaaagcactgggattgcagttgtgaggcaccacacctggccctttgcttatttctatactgggttgcttgtcatttgttgttgaactgtaggtaattgtttatggattctgg

SEQ ID NO: 461626 - DNA, 531 bp, Homo sapiens
attatagccaatatttgtaattttctgttttttgtgtcagtgcaaagtggtatttcattgtggttttgacttgacctatgatattaattagctttttaccatttttacatgttctttagagaaatgttattcaaggcccttgttcatttttattttattttatttatttattttggagacaaggcctctctgtgttgctcaggttggagtacagtgctgtcatcttggctcactgcaacctctgactcttggtctcaagtgattctcctacctcagcctcccaagtagctaggagcacaggcacaaayccccacacccagctaatttttgtattttttttgtacaaacttggtttcaccatgtttcctaggctggtctcaaactcctgagctcaagcagtccacccatgttggccctcccaaagcactgggattgcagttgtgaggcaccacacctggccctttgcttatttctatactgggttgcttgtcatttgttgttgaactgtaggtaattgtttatggattctgg

SEQ ID NO: 461627 - DNA, 531 bp, Homo sapiens
attatagccaatatttgtaattttctgttttttgtgtcagtgcaaagtggtatttcattgtggttttgacttgacctatgatattaattagctttttaccatttttacatgttctttagagaaatgttattcaaggcccttgttcatttttattttattttatttatttattttggagacaaggcctctctgtgttgctcaggttggagtacagtgctgtcatcttggctcactgcaacctctgactcttggtctcaagtgattctcctacctcagcctcccaagtagctaggagcacaggcacaaacccccacacccagctaatttttgtattttttttgtacaaacttggtttcaccatgtttcctaggctggtctcaaactcctgagctcaagcagtccaccsatgttggccctcccaaagcactgggattgcagttgtgaggcaccacacctggccctttgcttatttctatactgggttgcttgtcatttgttgttgaactgtaggtaattgtttatggattctgg

SEQ ID NO: 461628 - DNA, 531 bp, Homo sapiens
attatagccaatatttgtaattttctgttttttgtgtcagtgcaaagtggtatttcattgtggttttgacttgacctatgatattaattagctttttaccatttttacatgttctttagagaaatgttattcaaggcccttgttcatttttattttattttatttatttattttggagacaaggcctctctgtgttgctcaggttggagtacagtgctgtcatcttggctcactgcaacctctgactcttggtctcaagtgattctcctacctcagcctcccaagtagctaggagcacaggcacaaacccccacacccagctaatttttgtattttttttgtacaaacttggtttcaccatgtttcctaggctggtctcaaactcctgagctcaagcagtccacccatgttggccctcccaaagcactgggattgcagttgtgaggcaccacacctggccctttgcttatttctatactgggttgcttgwcatttgttgttgaactgtaggtaattgtttatggattctgg

SEQ ID NO: 461629 - DNA, 649 bp, Homo sapiens
tcctttggctttgtttctgggtgctttcagtggcaaagtgtttgtaaaagttccttggttataaataggctttgtataatggctttcccaaatgctggttgaaatagtgctgtacagggtatgtgagcaggttcatttcctcctctggggctatagtgtggaggtctcagaaagcatatcttgttccccagtgctgtgaggttgtgtcatcagattttctattgtgttatgcatttctaactctggaacagctggtggtacttataggtaagagctggctaaggttaatgcatawgtgtatatacttgatccttgtttacttgtagaagctctctgttacctcaagcaatgggctgatcactggcaagcacacttgtgtgagctcccagcttagccctcaaatggaggaccaagacaggtggagctagatgagacaggcctgcctacaggtctcctagtgtcaggaacaagtatcagctttgaaagcaggtctagtgggccatagtcaggtatctggaggtgtgctaactcatattgtcaggaaatcctggctgccccaagtcctctgcatgggtggagtggcctaaacttctaatttagaatagtgggtgcttcaagtgcctggagatatttctggccatcaagcaga

SEQ ID NO: 461630 - DNA, 586 bp, Homo sapiens
gtcatttcaatgggggatactgacataggagaaaaaaagaatattttttatctgcagcataaccaaaagtccttaaaagtaaatttctaaagtaaagttgttcataaaagataaaattattgacttcctcaaaaaaatcttattttgcccaacaacagtttcatggaaactgtctcaggtacatattctgcctaaatggaacattctttatatacctcttctagtaaacagaatcacctttcttatgaatctaactttttagagtacttattggactaggaattttctcaggcagatcactacatttttaggattaccatttatccttcaataaggagagtttcmagtttccctactccagcattcgaacctgaaattttgagaatgagaaaagttatcttgaagaatatacttgctatttaaaatggccttctcataataaaaccaacatgcaatcccaggccaatttatcttgtctcttcctgccataaatccagacacattggaccagagttctactgcttttgctactgccatgctgtcttcatttctctcagttatcttcctctactgtgcaaagatgccc

SEQ ID NO: 461631 - DNA, 554 bp, Homo sapiens
atcggtgtcactggactgggcagtcctgtctacaggtcccctaatggcaggcactagcaccagcactgagagacaactgatttttgcattgatcttgtaccctgaaattatgctgaaatcatttattagctctayttattttctatctgtattgcatgagatttttctatatagagagaatcatgtttcagtcaaaaacacatgatttgaatttttcctttcctatttgaatgtgttttccttcatgtcttgcctaattgctctggctagaacttccaatactatgtttaatagtagtaaaaatggacatccttgttttttttcttttctttctgattttaagtgacaagatttagtctttcacaatttagtatgctttagctttgcagttttcataaatatgctttattatgataaaggagttttatttcatttatagttttctgagtgtttttgttatgatgggtattaaaagttgtcaatttttttttctgcatctaatgagatgaacatgattttctcttttattctgatatggtgtagtgcactgattg

SEQ ID NO: 461632 - DNA, 584 bp, Homo sapiens
ctcaaaacaactatcttatattctctggctgaaagatcacacatctctgtttctccaggattggtccctggtgccttatttagttcgtgtggtgaggtcatgttttcctggattttctttatacttgtagatattcatcgggggctgggcattctagagttaggtatttttgttgtctttgtagtctggggttttttttgtacacatccttcttgttagrctttccagatattaaaaaggacttaacctattttcgatttgcccctagaatactgcaccagcagtgaactgcactttttttaataaatgggaaatgagttaagtgttgtgatctaagctgtatctgctttaggggcactccaagcccaataatgcagtggttcttgaagacttgtagaggtactgccttgatggtcttggacaagatccaagagaattctctggattaccagaaactcttgttcccttcccttaatttctcccaaataaacaaagtctctctctctgttctgagtcaattgaaactggggatggaatgacacaagcactcatgtatccaccaccactgtgactgcactgggtga

SEQ ID NO: 461633 - DNA, 584 bp, Homo sapiens
ctcaaaacaactatcttatattctctggctgaaagatcacacatctctgtttctccaggattggtccctggtgccttatttagttcgtgtggtgaggtcatgttttcctggattttctttatacttgtagatattcatcgggggctgggcattctagagttaggtatttttgttgtctttgtagtctggggttttttttgtacacatccttcttgttaggctttccagatattaaaaaggacttaacctattttcgatttgcccctagaatactgcaccrgcagtgaactgcactttttttaataaatgggaaatgagttaagtgttgtgatctaagctgtatctgctttaggggcactccaagcccaataatgcagtggttcttgaagacttgtagaggtactgccttgatggtcttggacaagatccaagagaattctctggattaccagaaactcttgttcccttcccttaatttctcccaaataaacaaagtctctctctctgttctgagtcaattgaaactggggatggaatgacacaagcactcatgtatccaccaccactgtgactgcactgggtga

SEQ ID NO: 461634 - DNA, 561 bp, Homo sapiens
gaaactggggatggaatgacacaagcactcatgtatccaccaccactgtgactgcactgggtgagacttaaaacaagcagagcactgggtcttgcccaaagcttgctgcaaccattccctggctactgcctatgtttccaaggatctggggccctacaatcagttggtggtgaatccagccaggcctgtgtccttcccttcagtgaagcaaattcttccagtacccaggcatgtccagaggtaccacccagaagccagggactagagtcaaaaaccttagaagtctatttggtgttctattgtactgcagctgagctgacactcaaaccacaaaatgcagtccttctcactcttccctttcctttccaaaggcagtggaatctcaccccctgagcagtgctaccacaggcccatgcagaatacagaccctgtacaagagccaagtcctggttttggagagtccaggagtgcacttggtrctctaccctcctgtgatcaagctcgtacctagttgcaagacaaagtcgactttatatttcactctgatttctcaagtagaag

SEQ ID NO: 461635 - DNA, 478 bp, Homo sapiens
  misc_feature (1)...(478): n = A,T,C or G
atctcagcttcattcttctgcatttcgctgtcctgttgtctcatcaccatttgttgaagagactctttcctcagattgaatggtctaggctcccttgatgaaagtaaatttgccatagatctttaggtttatttcgtgatttcagttttattccatttgtcttgatrtctatctttatgctagtaccacactgttttgattattacagtttgtagtaagtttgaagttggaaactgagtactcactgatacagaaattaagttgaaattacttacgcaaatagtaagcatttgggagtcctcagtaaggtttttctttatactggaaagcagccccaaatcattttctaacaaagagcagcttgtnaaatcgagctgcagacatacacaaggaagctggaaacttgcacgagtgaaagctggtagtaaagaactacctgtgaccaggcaagttcaaaatggcggctccttccccaccc

SEQ ID NO: 461636 - DNA, 542 bp, Homo sapiens
agcagtcacacgaagaaaagtggaaggaagggaaagcaataaaaacagacccacattagggaacgtttctcacctagttttatgcagccagcattatcttgttatcaaagctctgaaaagaaaattttgaggaagaaaaattgcagaccaaaatatcttatgaatacagaagtcctgaacaataagtaacagaacaaatccagctgtttgtgtatacttatgtatatttagtgagggatgtgaggccagtatatacaatcatataaayagatgcagagaatcaatttgataaaattgcacacacattcatgacacaaatttatataaaaatgagagaagagaaaaaacttccctaatctgataaaggatatctactaaaatcttaaagatttctgataaagaatatctactaaaatacttaaaacagcagcaattttttgggatcttaaagtgcataattgggctgcagatgacactgttaatttctattacagactttaaaatcatgagggagatcgtgtttgcctcactgccttactgtt

SEQ ID NO: 461637 - DNA, 544 bp, Homo sapiens
aaatgttaatcgaggaagcaaacctattaaaataagggttctggtcatggatcaaccacttactagctgagagtccctgggcaaattaataaatctctgtgccccaattttctcaattataagagaagaaataatagcaataataatacctgtatttttaggggtagagaataagagagttgattgaaaagatatcaagggggtgaaaacaaccagaatcaaatttgttaaccatataaatgaggaatgaggaagagagagaagcttagaaaggtctctagggatctgatctagggctagttataaaaacagggaacacagcaaggaaggactgaggacacatttattaggactctgttataggtaaggcatgccaggagagaagcagatgctcttgtagctgaggcaagacttttatatctgtgtcatttaggagagaacatacaaggatatgatattgctaaaatgagtactaggagaaaaaaaaagaattcaccaaagaaaaagctcagggaargttgctacaatcatgacaggcagtaga

SEQ ID NO: 461638 - DNA, 580 bp, Homo sapiens
cctactacataaactggtggctgtgtacctctcttcattcctccagccctgatggaccatgtgacatacagtcctactctccctccatatgtgatcttcccctactcttcacctggctaaaaccaacctatcctgcaaatttcagtttcagtttatctgatgtgcccagcttggttaggtacctgttttggcctatcacaacctctrggcttccctctgtcacagcacaaattatactgtgtggtcaccattcacatttcagtctctcttattatactaaagccttgagagcagggatctaataggtcagtctacagatatttattgaatgtttactaagtgctgggcattattctaggtgctgggaatatagcaataaacaaaacaaatgccttgccccaaaggagtttctcattatagcaggagaagattgtcttaaattagtaaacaaaaattaaatgaaataagttcagctactaatacgttatgaagaaaattaaatggcataatttggtaatgactggggtagtgtggtatatttcaactagaatgatcaggaaaatttctctgaggaggagac

SEQ ID NO: 461639 - DNA, 575 bp, Homo sapiens
gtaagatcaaatggggtctaaaatacaggcagttggacttagagaggaataaggacatgttccattctaacaaaaggaaaggcagggtgtgtgggtaagcatacaagtaggttgatgaattttcaggtagttgttatcatatggcttcttttttctcttttaagaatgagataaagtcactagctaagatgacccatttgattccatattcttaatgtttagaaaaacacgcagcatacartaggcactctggaaacgtttgctgagtgatccaattatcaaacaaaattgcacatgatctggcctcatgaactgaatcttcttaactcaagaggaagagctctataaatacaaagtcttagactgaaatcctgggtctgtcagttaccagttgtaagactctcactaaagtacttaagctttctgagtctaaaatttcttacccataatatgaggatgaaatgcctacttcataggaatattataaaaaatcaaccagacactatatataagcacttgtcatagagcttggcacataagtgcttgataaatggatattgccaccagtggtgtat

SEQ ID NO: 461640 - DNA, 575 bp, Homo sapiens
gtaagatcaaatggggtctaaaatacaggcagttggacttagagaggaataaggacatgttccattctaacaaaaggaaaggcagggtgtgtgggtaagcatacaagtaggttgatgaattttcaggtagttgttatcatatggcttcttttttctcttttaagaatgagataaagtcactagctaagatgacccatttgattccatattcttaatgtttagaaaaacacgcagcatacaataggcactctggaaacgtttgctgagtgatccaattatcaaacaaaattgcacatgatctggcctcatgaactgaatcttcttaactcaagaggaagagctctataartacaaagtcttagactgaaatcctgggtctgtcagttaccagttgtaagactctcactaaagtacttaagctttctgagtctaaaatttcttacccataatatgaggatgaaatgcctacttcataggaatattataaaaaatcaaccagacactatatataagcacttgtcatagagcttggcacataagtgcttgataaatggatattgccaccagtggtgtat

SEQ ID NO: 461641 - DNA, 609 bp, Homo sapiens
aagcacttgtcatagagcttggcacataagtgcttgataaatggatattgccaccagtggtgtatattgtcatcattactgctacttctactaatattggtcaccatcaaactcttccatttgtttcctcaaatagattgcaaatgcctataaagtaaaagaatctgtcttataagcctttcacagtaagtttctttttaagatgatggtgaatacaacttctttgggtattccaaaaacagaaagaaccctttaggttgggtagtcagagaaagattgaatccactagtttgaagactgaagccaaactatttcatctttattggcattttaaaaaatgcaatttcatcgattatccctttctgccttcaaaagagttcatgggatgaacattttcctcctgatttaataaacaaataaagacttaagaaaagtgaaatgatttaagggctcagtttataaatgtggagctggrgtgtctgcatccaaatgctctgtgctctctactacattcattttttgaaacatgccacaaaaagagccaaatgaaagatattgaaactggcaatagaagtgtgaggcccctctgagctatagcctgcccatctg

SEQ ID NO: 461642 - DNA, 612 bp, Homo sapiens
ctatttgtttaggtgcaatgggaaggcactggaaggttttaagcaagtgtgtgaaaagatctgatattaccttaaaaaaatcctttctttaaacaatatgcaaaatccttgctccatcttcccatgcttttctctctgcttagaaattcctttatcatctcatcattctttggtgagctcttaatcatctattcctcgaggcccaactcaaatgggtctgctaacacccgaccctcctgcccaatgcataatttctctgtggacacacttctatcacagcacttagaatacttcttaccgtggtcaggatgcctgtatttcttgcaagattgaatttctcttggtgaggyaggaggggtgggactgtgttttgttcatctcagaatctccgctacttagaaagatgttggtgcggagaagatgctgaatgtgttgccgaatttagcattatccatatacagctttgagtcagaaaatagaaaattaactgaatttggaaattggagatagccaggtgaggcatactactctcataggcagggctccaggtctcttctccaggctgcatctctgggctgctgtgcattcaaaggcacttttgatcaactaagg

SEQ ID NO: 461643 - DNA, 501 bp, Homo sapiens
aatgagtaaattaactcatctaccagcctcctgaaatttggaaatcagaagtataggaggcaaggaatttttttttcatataagaaaagcataattgttacttgaaagactttctttgcaatctatttgggaagtctattaaccctttatgctgacacatctgcacacttttatagagatagagaactttaaggatcaccctgtgcagtgtctttcaaccattttttagctacaaaatgctttctttataagaaagctaggagagaagcacaacacgtaaaaccaaataaacaggtaaatagaatttggatggcaaaaaacatggcaaagaggtcgggggtttaggcttgatctggctcaatgttttttattttataactgaagcctatagagataaatgattgggctgaagccacactggagtttagaagcagagyttaagaactgtgcctccaattatattagttttgttcattcatcaaacaaatatttatcaagtcc

SEQ ID NO: 461644 - DNA, 469 bp, Homo sapiens
tacctcctcactttgcttgtatctcgttagcaaaagggagtagaatatgctcaccttctggaagtcaggacaaagagtcagaaaggagtcagtagaagaaaaaaagcattttaaatctgtaatgcaggatgactcagagtcagactgtcctccttccttaatgggaaaagctggcacatgcctgagcataaaaagagaaagggatttttgactttgaatatgtttaagaatatctgaaaaatttctcagtaaaatccttaaatgcagatttttctycaacttaggttttctgtttttttttaaaatttgattcttgggagacataaaagaaaaatatctgtaattttgacttggccttttatttaccttattcttggtcctgccccagttttcttcttttctgaaagcatattacagagagtatgatggaattacctaatcacaaactaccaggttgacatttgtggta

SEQ ID NO: 461645 - DNA, 469 bp, Homo sapiens
tacctcctcactttgcttgtatctcgttagcaaaagggagtagaatatgctcaccttctggaagtcaggacaaagagtcagaaaggagtcagtagaagaaaaaaagcattttaaatctgtaatgcaggatgactcagagtcagactgtcctccttccttaatgggaaaagctggcacatgcctgagcataaaaagagaaagggatttttgactttgaatatgtttaagaatatctgaaaaatttctcagtaaaatccttaaatgcagatttttcttcaacttaggttttctgtttttttttwaaatttgattcttgggagacataaaagaaaaatatctgtaattttgacttggccttttatttaccttattcttggtcctgccccagttttcttcttttctgaaagcatattacagagagtatgatggaattacctaatcacaaactaccaggttgacatttgtggta

SEQ ID NO: 461646 - DNA, 575 bp, Homo sapiens
atgtggccatggttttaaaatgacagacaccaacacaaggacacaaagattatgtagaatcagtaaaatatgacactaccaaaagaaactaataaaggtccaataatagattgtttaaaaattaagatctatgaactaagaatggaatcccttaaagaagttcactgagtgattaaaaaaaagagaaaagaaaactaaatggaattaggaaaatatgacacaaagaaaargagaagattgaaaaaataaatagaaacaataaaacaaatagaaatcctagaaaggaagaataagatgacagaagtaaaaaattcaatagaaacctccaatagcagacttgattaaacaaaagaaataatccatgagcttgaagaaagaacatttgaatttatctaatgagagaatcaaaaagcaaaaagaataaaaatgaatgaagaaaacctacaggatctatagtatactatcaagagagctaatacttgcataataggagttcagaaggaaaagagaaagagagaaataaacaaaaagcttacttttaaaaattatgggccagacagggtggttcatgccta

SEQ ID NO: 461647 - DNA, 620 bp, Homo sapiens
ttataaggtttccactaaaaagtctgctgccagacatattgaagctctattgtgtgttgtttcttttctctcgcttcttttaggatcctttctttattgttgacttttgggagtttgattattaaatgccttgaggtagtcttctttgggttaaatctgcttgatgttctaatgtgtaaccttctttagttggatattggtatgtttctctaggtttggggagttctgtgttgtttttctgtatgatctttctacctctatctttctctacctctttatagccaacaattctcagatttgcccttttgaggctattttctagatcttatagatgtgtctcattcttttttattcttttccttttgcttgtttctttgtgcaaacagtgctgttatcggctgaaaatmatgagttataagatagtatttgcaagccttatggtaacctcacaccaaaaaacatacaacgaacacaccaaaaataaaaagcaagaaactaaattttatcaccagagaaaaccaccataactaaaaggaagacagaaagaaaaagaaagaaggaagagaagaagagaagcccacaaatcaaccagaaaacaaataacaaaatagcaggagtaa

SEQ ID NO: 461648 - DNA, 538 bp, Homo sapiens
tattcagctaaataagacttcctagacactaaaaattttcaaaggcatgattattaatctcaaatgaataagtataaactaaacaaaaataaaattatttttatgtagcacaaaatacttctaaaatagagtaaatattagtcataaagaaatccttaattgtttaaaaatatcaatattataaaattggttttttgagaaaaaaaggaaaacttgcaaacttaaaaaaaattttaccttttattgatatgtaatagatgtgwgtatttttggggtagatgtcataattggatacatttatataatcaaattccaaatatgttttatgaagtaaatagaacgttggtaccaaatactaacaaagatggtatcaaaagaaaaaaaacagcagatcattcatatttattaacatcaatgaaaaaaccttctataaaatgttataaatgtaaaccattagcttattaaaaataatagactttccagtgaaagagattaaccaatctagaaaaaggaaaatagatccacttgaaaaacgaat

SEQ ID NO: 461649 - DNA, 359 bp, Homo sapiens
tttatgaagtaaatagaacgttggtaccaaatactaacaaagatggtatcaaaagaaaaaaaacagcagatcattcatatttattaacatsaatgaaaaaaccttctataaaatgttataaatgtaaaccattagcttattaaaaataatagactttccagtgaaagagattaaccaatctagaaaaaggaaaatagatccacttgaaaaacgaataaatgtatggtgatatctaaagcaatgggggaagacatattaagacaagtcatgtgggaataactagatagtaatatggataagaataaagcttaaatcatattataaaccataaaagtaaatgcatgcaaatagcaaagttt

SEQ ID NO: 461650 - DNA, 592 bp, Homo sapiens
acagatgtattaataaaatattacagctggtttacagacaatgaagcatcatcaatttttgtgtacagttaaaaaatgatatacaacatctgtagaccarcaatgagttttactatttttccattctctgcacagtattgttcaaaataataattcaatgtacattttgttaatgaaagcttctaactcattaaaataaaatttctgattttcaaaatgttgcattcacttttattaatctgttttatttatctcagttttcagaatataattaatctatgttgatctgcttgatacacaaaatgctctcttttgggagctgtcattatctagctggtattgccaacttcctattgaaaccctgtttttgattaaactttttcaaaaaaacaaaatcttacaaaccaagaagacttgaataataaaatgtaaattaataattccaatagaaaatacactctgggatacttccgccccaaaaaaattattcacatgaaaatatatgactttattgtgataatttaaatatatattttttctgtataacgttttaataactcctttgtctaacttactttgttgtatgactata

SEQ ID NO: 461651 - DNA, 592 bp, Homo sapiens
acagatgtattaataaaatattacagctggtttacagacaatgaagcatcatcaatttttgtgtacagttaaaaaatgatatacaacatctgtagaccaacaatgagttttactatttttccattctctgcacagtattgttcaaaataataattcaatgtacattttgttaatgaaagcttctaactcattaaaataaamtttctgattttcaaaatgttgcattcacttttattaatctgttttatttatctcagttttcagaatataattaatctatgttgatctgcttgatacacaaaatgctctcttttgggagctgtcattatctagctggtattgccaacttcctattgaaaccctgtttttgattaaactttttcaaaaaaacaaaatcttacaaaccaagaagacttgaataataaaatgtaaattaataattccaatagaaaatacactctgggatacttccgccccaaaaaaattattcacatgaaaatatatgactttattgtgataatttaaatatatattttttctgtataacgttttaataactcctttgtctaacttactttgttgtatgactata

SEQ ID NO: 461652 - DNA, 592 bp, Homo sapiens
acagatgtattaataaaatattacagctggtttacagacaatgaagcatcatcaatttttgtgtacagttaaaaaatgatatacaacatctgtagaccaacaatgagttttactatttttccattctctgcacagtattgttcaaaataataattcaatgtacattttgttaatgaaagcttctaactcattaaaataaaatttctgattttcaaaatgttgcattcacttttattaatctgttttatttatctcagttttcagaatataattaatctatgttgatctgcttgatacacaaaatgctctcttttgggagctgtcattatctagctggtattgccaacttcctattgaaaccctgtttttgattaaactttttcaaaaaaacaaaatcttacaaaccaagaagacttgaataataaaatgtaaattaataattccaatagaaaatacactctgggatacttccgcccmaaaaaaattattcacatgaaaatatatgactttattgtgataatttaaatatatattttttctgtataacgttttaataactcctttgtctaacttactttgttgtatgactata

SEQ ID NO: 461653 - DNA, 625 bp, Homo sapiens
ggtttcaacaaacaagaaaagtctaatttgcagtcccaggatggagtgggttgtaaaacctctactttctaaacctatctctgccactctaattcctctctcccagtgcatctcctgtagcctaaaatggratcatcatcttttctgcataccgggaaactttgcttaggtaattttctatactctgtgtagtttagaggaccacaaacatttattctttcaaaattctggcttctgcaaaataaagtcactttcaagactacttttgtttctgctccaggtattaaaaattatatttgaaagccaaaactgcttgtaaataatttgttccttttctctggctgtatctccctgtcccaaatcaaagattaccttaactttaataagcagacagctgaagagcaatatacattactgaggttttttaatataatatttaaaaagtattatttcactattatactaaaaaagagatggagactgacacacgttttttaatttgtttcttatattttgatatcatgttggatgatctgatacaagcttgttgtctactatgtatataatatgtatttttcatggatttgtagagaggaaatgtagttatcatgaattaggaatattt

SEQ ID NO: 461654 - DNA, 625 bp, Homo sapiens
ggtttcaacaaacaagaaaagtctaatttgcagtcccaggatggagtgggttgtaaaacctctactttctaaacctatctctgccactctaattcctctctcccagtgcatctcctgtagcctaaaatgggatcatcatcttttctgcataccrggaaactttgcttaggtaattttctatactctgtgtagtttagaggaccacaaacatttattctttcaaaattctggcttctgcaaaataaagtcactttcaagactacttttgtttctgctccaggtattaaaaattatatttgaaagccaaaactgcttgtaaataatttgttccttttctctggctgtatctccctgtcccaaatcaaagattaccttaactttaataagcagacagctgaagagcaatatacattactgaggttttttaatataatatttaaaaagtattatttcactattatactaaaaaagagatggagactgacacacgttttttaatttgtttcttatattttgatatcatgttggatgatctgatacaagcttgttgtctactatgtatataatatgtatttttcatggatttgtagagaggaaatgtagttatcatgaattaggaatattt

SEQ ID NO: 461655 - DNA, 571 bp, Homo sapiens
taattttctatactctgtgtagtttagaggaccacaaacatttattctttcaaaattctggcttctgcaaaataaagtcactttcaagactacttttgtttctgctccaggtattaaaaattatatttgaaagccaaaactgcttgtaaataatttgttccttttctctggctgtatctccctgtcccaaatcaaagattaccttaactttaataagcagacagctgaagagcaatatacattactgaggttttttaatataatatttwaaaagtattatttcactattatactaaaaaagagatggagactgacacacgttttttaatttgtttcttatattttgatatcatgttggatgatctgatacaagcttgttgtctactatgtatataatatgtatttttcatggatttgtagagaggaaatgtagttatcatgaattaggaatatttgtagtatatagctgcttcttctatctaattattatcaaaaaacagtgttgcagatatattattgaccaaattgttgattaattatgaccaaagctattttagcaaacatcttaaaa

SEQ ID NO: 461656 - DNA, 571 bp, Homo sapiens
taattttctatactctgtgtagtttagaggaccacaaacatttattctttcaaaattctggcttctgcaaaataaagtcactttcaagactacttttgtttctgctccaggtattaaaaattatatttgaaagccaaaactgcttgtaaataatttgttccttttctctggctgtatctccctgtcccaaatcaaagattaccttaactttaataagcagacagctgaagagcaatatacattactgaggttttttaatataatatttaaaaagtattatttcactattatactaaaaaagagatggagactgacacaygttttttaatttgtttcttatattttgatatcatgttggatgatctgatacaagcttgttgtctactatgtatataatatgtatttttcatggatttgtagagaggaaatgtagttatcatgaattaggaatatttgtagtatatagctgcttcttctatctaattattatcaaaaaacagtgttgcagatatattattgaccaaattgttgattaattatgaccaaagctattttagcaaacatcttaaaa

SEQ ID NO: 461657 - DNA, 546 bp, Homo sapiens
aaaatacacagctgtgcacttattttataaagaatacaaatattccagccacctgtcaaagagtataacttcaaaagctctgtcactwaatagaaagttttcaaaagcccagtaaagagaaaaggagttaatagatattgaatttgctattccagtaatataacaggaagcataggcaatttattcatcttttagataattcaaaatttatccttgaaataagctagatcatcagagagccacacacttgagtctcattacttttgttcttctctcctgctgtgtgtttttgtgctttggtatcatgacatcaatctatattaagaacatgttactaggtttatggttaaacttaaattttattatcaagggtaattttgtctctctttagaaaatagtttgtttttatcttataaattctaaaatgtaggcatataatatctccccctttctctgacacacacacacacatacacacacacaaaaatcgctgccggaagtttagtattacatttgtgtcccacttctggcaagcataatatgtac

SEQ ID NO: 461658 - DNA, 427 bp, Homo sapiens
agaaaaggagttaatagatattgaatttgctattccagtaatataacaggaagcataggcaatttattcatcttttagataattcaaaatttatccttgaaataagctagatcatcagagagccacacacttgagtctcattacttttgttcttctctcctgctgtgtgtttttgtgctttggtatcatgacatcaatctatattaagaacatgttactaggtttatggttaaacttaaattttattatcaagggtaattttgtctctctttagaaaatagtttgtttttatcttataaattctaaaatgtaggcatataatatctccccctttctctgacacacacacacacatacacacacacaaaaatcrctgccggaagtttagtattacatttgtgtcccacttctggcaagcataatatgt

SEQ ID NO: 461659 - DNA, 546 bp, Homo sapiens
aaaatacacagctgtgcacttattttataaagaatacaaatattccagccacctgtcaaagagtataacttcaaaagctctgtcactaaatagaaagttttcaaaagcccagtaaagagaaaaggagttaatagatattgaatttgctattccagtaatataacaggaagcataggcaatttattcatcttttagataattcaaaatttatccttgaaataagctagatcatcagagagccacacacttgagtctcattacttttgttcttctctcctgctgtgtgtttttgtgctttggtatcatgacatcaatctatattaagaacatgttactaggtttatggttaaacttaaattttattatcaagggtaattttgtctctctttagaaaatagtttgtttttatcttataaattctaaaatgtaggcatataatatctccccctttctctgacacacacacacacatacacacacacaaaaatcgctgccrgaagtttagtattacatttgtgtcccacttctggcaagcataatatgtac

SEQ ID NO: 461660 - DNA, 627 bp, Homo sapiens
ctgggctacagaatggatgctatgttatcaggcatggaaacaacattaatctccttgtacatctacatcagggctcttgggwtaccagggcattgtcaatgagtagtaatattttgaaaggaatctgtttttctgttcagttgatctcaacagtgggcttaaaatattcagtaaaccatgctgtaaacagatgtactatcatacagaatttgttgttccatttatagcttttgatttttctttttttgagatggagtcttgctctgttgcccaggctggagtgcagtaggagatctcagctcactgcaacatctgcctcctgggttcaagcgattctcctgcctcagcctcctgagtatctgggattacaggcacccaccaccacacttggctaatttttgtatatttagtagaaacagggtttcaccgtgttggccaggctggtcttgaactcctgacttcatgattcacctgccttggcctcccaaagtgctgggatcacaggcgtgagccaccctgcccgggtatagatttcaatttaaagtgagaaatgtatgactctttgttccatttgtacagttagagggcatcttagggttattaattggcctaatttaaatattattg

SEQ ID NO: 461661 - DNA, 627 bp, Homo sapiens
ctgggctacagaatggatgctatgttatcaggcatggaaacaacattaatctccttgtacatctacatcagggctcttgggataccagggcattgtcaatgagtagtaatattttgaaaggaatctgtttttctgttcagttgatctcaacagtgggcttaaaatattcagtaaaccatgctgtaaacagatgtactatcatacagaatttgttgttccatttatagcttttgatttttctttttttgagatggagtcttgctctgttgcccaggctggagtgcagtaggagatctcagctcactgcaacatctgcctcctgggttcaagcrattctcctgcctcagcctcctgagtatctgggattacaggcacccaccaccacacttggctaatttttgtatatttagtagaaacagggtttcaccgtgttggccaggctggtcttgaactcctgacttcatgattcacctgccttggcctcccaaagtgctgggatcacaggcgtgagccaccctgcccgggtatagatttcaatttaaagtgagaaatgtatgactctttgttccatttgtacagttagagggcatcttagggttattaattggcctaatttaaatattattg

SEQ ID NO: 461662 - DNA, 627 bp, Homo sapiens
ctgggctacagaatggatgctatgttatcaggcatggaaacaacattaatctccttgtacatctacatcagggctcttgggataccagggcattgtcaatgagtagtaatattttgaaaggaatctgtttttctgttcagttgatctcaacagtgggcttaaaatattcagtaaaccatgctgtaaacagatgtactatcatacagaatttgttgttccatttatagcttttgatttttctttttttgagatggagtcttgctctgttgcccaggctggagtgcagtaggagatctcagctcactgcaacatctgcctcctgggttcaagcgattctcctgcctcagcctcctgagtatctgggattacaggcacccaccaccacacttggctaatttttgtatatttagtagaaacagggtttcaccgtgttggccaggctggtcttgaactcctgacttcatgattcacctgccttggcctcccaaagtgctgggatcacaggcgtgagccaccctgcccgggtatagatttcaatttaaagtgagaaatrtatgactctttgttccatttgtacagttagagggcatcttagggttattaattggcctaatttaaatattattg

SEQ ID NO: 461663 - DNA, 627 bp, Homo sapiens
ctgggctacagaatggatgctatgttatcaggcatggaaacaacattaatctccttgtacatctacatcagggctcttgggataccagggcattgtcaatgagtagtaatattttgaaaggaatctgtttttctgttcagttgatctcaacagtgggcttaaaatattcagtaaaccatgctgtaaacagatgtactatcatacagaatttgttgttccatttatagcttttgatttttctttttttgagatggagtcttgctctgttgcccaggctggagtgcagtaggagatctcagctcactgcaacatctgcctcctgggttcaagcgattctcctgcctcagcctcctgagtatctgggattacaggcacccaccaccacacttggctaatttttgtatatttagtagaaacagggtttcaccgtgttggccaggctggtcttgaactcctgacttcatgattcacctgccttggcctcccaaagtgctgggatcacaggcgtgagccaccctgcccgggtatagatttcaatttaaagtgagaaatgtatgactctttgttccatttgwacagttagagggcatcttagggttattaattggcctaatttaaatattattg

SEQ ID NO: 461664 - DNA, 590 bp, Homo sapiens
ttgagagtagactagctttgctctcaggagggctgttaggaaagctatgcaatgaaattgaggacagtaaaaggaccctgtcatgccatttgtaaaattctttatagcagcacttgaaattaaatgcattctttatagctatrcttagattgtagttttattcaagtacttattttgagatctttggggaagagtgttcttacaggcatagagaaagttgtaaaagtgaggtaaaagtagaaataaataaaaggtagcacttaaattgtatttctccagtttaggatgctccaacagagacaatataaaccaataattaataatttgtcagttagaaaactatttcctttatgtgtagagtcaaactctcttttcatctcagaaggaaaacaaagatgagcatgctcaaattctgactattgaaggaaaccacctgcatgtaaaatatatttcagtggttttcaactctgaccacaagaactttatcacttactgaaaaattataatacagtatgaatcataacgaacaggttaggtagtttttattattttaatccaaatggccatgtaataaaataaaagttctaaac

SEQ ID NO: 461665 - DNA, 590 bp, Homo sapiens
ttgagagtagactagctttgctctcaggagggctgttaggaaagctatgcaatgaaattgaggacagtaaaaggaccctgtcatgccatttgtaaaattctttatagcagcacttgaaattaaatgcattctttatagctatgcttagattgtagttttattcaagtacttattttgagatctttggggaagagtgttcttacaggcatagagaaagttgtaaaagtgaggtaaaagtagaaataaataaaaggtagcacttaaattgtatttctccagtttaggatgctccaacagagacaatataaaccaataattaataatttgtcagttagaaaactatttcctttatgtgtagagtcaaactctcttttcatctcagaaggaaaacaaagatgagcatgctcaaattctgactattgaaggaaaccacctgcatgtaaaatatatttcagtggttttcaactctgaccacaagaactttatcacttactgaaaaattataatacagtatgaatcataacraacaggttaggtagtttttattattttaatccaaatggccatgtaataaaataaaagttctaaac

SEQ ID NO: 461666 - DNA, 508 bp, Homo sapiens
gatcaacatttgacttctgagtcttgtagatgggacaagtactatagtttgtagttttctggtccatttgttgtttcactatatatggtctttcttgtcccaaagctaagcattcgacctttaattttaattactctggcatatcagattctaaatttgttcacacataagataaaaattccaaagcttaggatagtgagtatgtcagcaacatttcatagctggttagtagtagaacttctgacccctccctaacaggtgttaygttgttatgtacttgctccccactcttattatatgcaaaggcataaaacagaagaatatcagctaattctcatttattcacagatgtttcttccaccagagtattttactgtttaattataaaactttctgaaggtattaatcataaatctttttgctaagtttttattagtcatctcttgcttggctaaagttcatcttgtactagtttcctcaagactcttgtaaacaatgttttctaact

SEQ ID NO: 461667 - DNA, 573 bp, Homo sapiens
gctgacccctcatccatgtccactataccgaggcaatcactggaaggcacactgccccagaggtcaaaggttctctgggccagaagccccaaccagatgatccaacaacagaactgagggtgcctggggcaagcaccaactcatgtcctcaccctcactgagccctggtacatttaaccaatgagggccaggaaattgacttcttcctggacactggcatggctttctcagtgttagtctcctgttcctgacagctgtcctstaggtccattaccatccacggaatcctgggacagcctgtaaccaggtatttctcccacctccttagttgtaactgggagactttgctcttttcacatgcctttcttgttatgcttgaaagtcccacacccttattagggagggacatattagccaaagctggagctattatctgcatgaatatggggaacaagttacccatttgttgtctcctgcttgaggagggaatcaaccctgaagtctgggcactggaaggacaattcagaagggaaaaaaagtgtccacccagtccaaatcagaataaaagacccc

SEQ ID NO: 461668 - DNA, 554 bp, Homo sapiens
aaattttaatattatatattaatcatatatatataaactcatggtgtaatgtttgcagcaatttccatctgctttgtgtctgagggtgttttatgtcttcttctataaaaacttactcatattttatcggtgttatgttgtttcttttgtatttcttatggtgggaaagttggattttcttggaagaccatttttcaggacatttttttggctggggagaaaaatgtagcttccagacattgtaatcatgagttctgtcttctgttgctacagattcttctcacatatggtactttgctgtattcccctgagccagttgaactcctctgtttccccaaagcaaacaacatctagaaggatctctgctkccagccatgttttccccattcccctgctgactactgcagttaaagaacatgggctctgttccaaggtaggctcctcattttcgacaagtaaataattgatagtgaattctgagacctgctgctggcatctctcttcctgtaacccccaagctctcagccctgcttagactcagttctctctgagct

SEQ ID NO: 461669 - DNA, 555 bp, Homo sapiens
ttctagggtcccactcactgctggcccctctccacactactacagctgaagctttctggaaagtgccacctcctggtaggaggccaaccagcacaaaaatagagcattaaaccaccaaagctaaggmccctcatggggtccattgcactctctgccacctccataggaacaggcgctggtatccatggctgagggaccatagatagttcacatcacaggactttgtgcagtaccagcatggagccgggtagactcgctaagtggctagacccagaagaacaacaacagtcactgcaattcagctcacagaaagccacaatcataggaaaagggggagagtactacctcaagggaacactccatgggacaaaagaatctgaacaacagccttcagccccaaaccttccctgtgacagagcctaccaaaatgagaaggaaacagaaaaccatccctggtaatatgacaaaacaagtctcttcaacacctctaaaaatcacactagttcactagcaatggatcaaaggcagaaaaaatccctgatttacctgaaaaat

SEQ ID NO: 461670 - DNA, 520 bp, Homo sapiens
gacttactcttactcttgcaagaatggccataataaaaataaaaataaaaaacagcaaatgttggcatggatgcggtgatcagggagcacttctacaatatttgtgggaatgtaaactagtagagacattatggaaaacagtatggagatttcttaaagaacgaaaagtagaactaccatttgatccagcaatcccactactgggtatctatccagaaaaaaagaagtcattattcgaaaaagatacttgcacatggatgtttatagcagcacaattcacaattgcaaaatcgtggaaccaatccaaaagccaacccatcaatcaacaagtggataaagaaactgtggtgtgtgtgtgtgtgtgtgtgtgtgtgtgtgtgtgtgtgtgtataaaatggaatactacacagccrtaaaaagaatgaattaacgacatttgcagtgacctggatgagattggagactattattctaagtgatgtaactcaggaatagaaaaccaaacatcataaacatcata

SEQ ID NO: 461671 - DNA, 537 bp, Homo sapiens
attcacctatgagcatgtgacttgaagaatgctgaaatttctccccctgctggcctacatgaatgtcaaatattagtgtcaaccrctcattcattcaacactcacttctctttgttgacaacctgctacatgtcaagcgcatctttttcagttttcttaaactagaaagttcctcattctagttagagagtccctactttaagagtccctactcttaaatagggccaaaacattctaacatgttgacagcagtgagaatttctgattgtctattacaaggtgtcagctagtaggaaactttctgtcaggtttactagaaatcatttgctaagtaaaagaaatatacatttgatttatattgagaaaaaataatgtaacagcatgaataaattatgaaaatatgcaagtataacacaggcagtacattagaataacagatgcaaacttgttttgtgaattatgaggttattctcaaattatgtgtgattttattctcaagctgttcattatatcttttctcctatttcattttatttg

SEQ ID NO: 461672 - DNA, 574 bp, Homo sapiens
aaccgctcattcattcaacactcacttctctttgttgacaacctgctacatgtcaagcgcatctttttcagttttcttaaactagaaagttcctcattctagttagagagtccctactttaagagtccctactcttaaatagggccaaaacattctaacatgttgacagcagtgagaatttctgattgtctattacaaggtgtcagctagtaggaaactttctgtcaggtttactagaaawcatttgctaagtaaaagaaatatacatttgatttatattgagaaaaaataatgtaacagcatgaataaattatgaaaatatgcaagtataacacaggcagtacattagaataacagatgcaaacttgttttgtgaattatgaggttattctcaaattatgtgtgattttattctcaagctgttcattatatcttttctcctatttcattttatttgaaagcatgtttttctaagtgggaactggtttatgctctaaaattagaggcagcagggtgaaatgagaacatgagttttagtgtaaaaaagatttggggctgaattcatttaccattt

SEQ ID NO: 461673 - DNA, 574 bp, Homo sapiens
aaccgctcattcattcaacactcacttctctttgttgacaacctgctacatgtcaagcgcatctttttcagttttcttaaactagaaagttcctcattctagttagagagtccctactttaagagtccctactcttaaatagggccaaaacattctaacatgttgacagcagtgagaatttctgattgtctattacaaggtgtcagctagtaggaaactttctgtcaggtttactagaaatcatttgctaagtaaaagaaatatacatttgatttatattgagaaaaaataatgtaacagcatgaataaattatgaaaatatgcaagtataacacaggcagtacattagaataacagatgcaaacttgttttgtgaattatgaggttattctcaaattatgtgtgattttattctcaagctgttcattatatcttttctcctatttcattttatttgaaagcatgtttttctaartgggaactggtttatgctctaaaattagaggcagcagggtgaaatgagaacatgagttttagtgtaaaaaagatttggggctgaattcatttaccattt

SEQ ID NO: 461674 - DNA, 556 bp, Homo sapiens
agaatttttcattttacctgggtcacatttgtaatagttrccaaagaagaaaaaaagtctttataatatgtgtgtacatgcggttatggctttaatttccaacctttggatgactattacaattctggttaggctacagcaaagtagcagaatcatcatggagaggatatcccactctacactttggggggtgtcataaggcaggtgagggacctggaaaatgccatggttcttgttatgggggagcctgtgtcataaaatgacagtgagagccacaacaggaatcccatgtgagtacagctaatatagaatttgtctacttgtggcaatggcttcctttagtaaggtcaaattcacagaaaagaaaagcaaatgtgaatcttgcatctttgttataagtgttatagctagttagctgtgctcctttaggcaagtcactttaagtattcatgactgctctaccaagggcgggggcataatatagttagaaggacgttgaaaaacataaagtgccacataaacctaagttattgccatttataatttaattcatttt

SEQ ID NO: 461675 - DNA, 556 bp, Homo sapiens
agaatttttcattttacctgggtcacatttgtaatagttgccaaagaagaaaaaaagtctttataatatgtgtgtacatgcggttatggctttaatttccaacctttggatgactattacaattctggttaggctacagcaaagtagcagaatcatcatggagaggatatcccactctacactttggggggtgtcataaggyaggtgagggacctggaaaatgccatggttcttgttatgggggagcctgtgtcataaaatgacagtgagagccacaacaggaatcccatgtgagtacagctaatatagaatttgtctacttgtggcaatggcttcctttagtaaggtcaaattcacagaaaagaaaagcaaatgtgaatcttgcatctttgttataagtgttatagctagttagctgtgctcctttaggcaagtcactttaagtattcatgactgctctaccaagggcgggggcataatatagttagaaggacgttgaaaaacataaagtgccacataaacctaagttattgccatttataatttaattcatttt

SEQ ID NO: 461676 - DNA, 556 bp, Homo sapiens
agaatttttcattttacctgggtcacatttgtaatagttgccaaagaagaaaaaaagtctttataatatgtgtgtacatgcggttatggctttaatttccaacctttggatgactattacaattctggttaggctacagcaaagtagcagaatcatcatggagaggatatcccactctacactttggggggtgtcataaggcaggtgagggacctggaaaatgccatggttcttgttatgggggagcctgtgtsataaaatgacagtgagagccacaacaggaatcccatgtgagtacagctaatatagaatttgtctacttgtggcaatggcttcctttagtaaggtcaaattcacagaaaagaaaagcaaatgtgaatcttgcatctttgttataagtgttatagctagttagctgtgctcctttaggcaagtcactttaagtattcatgactgctctaccaagggcgggggcataatatagttagaaggacgttgaaaaacataaagtgccacataaacctaagttattgccatttataatttaattcatttt

SEQ ID NO: 461677 - DNA, 620 bp, Homo sapiens
aataaataagtttaattgactcatagctcagcatggctggggagtcctcaggaaactttcaatcatggtggaaggggtagcaaacacatccttcttcatatgatgcaagaaggagaagtgctgagcaaaaggggtaaaagctccttataaaaccatcagatctcgtgggaactcactcagtatcatgagagcaccaggatgagggtaactgctccyatgactcagttacctcccacttggttcctcctgtgacatgttggcattatgtgtactacaattcaagacaagatttgggtggggactcagcaaaaccatatcaccagacatattatttctgaggaattatttgacaagcaattatttgcattcaaaggagacaggcagttgatgatgctgatatattttgctgaagcttggataactgagagaatgaatggtgaaggcgtttgcagaatggcatttctcctaggtgaagcctagaagacagaggttgaaaataatgagtgtttcagagacctcgggtattatactgaaaatagatgatttaaataaagatgtatatattaaacattgacactttgttattttctcctactttgctctaagtatgatgaacccag

SEQ ID NO: 461678 - DNA, 554 bp, Homo sapiens
acattttcaggtatctttacagcagctccccactacttgctaccaatttatgtataagtccactcacatgctgctaataaaaacacatctgagactgggtaatttataaaataaataagtttaattgactcatagctcagcatggctggggagtcctcaggaaactttcaatcatggtggaaggggtagcaaacacatccttcttcatatgatgcaagaaggagaagtgctgagcaaaaggggtaaaagctccttataaaaccatcagatctcgtgggaactcactcagtatcatgagagcaccaggatgagggtaactgctcctatgactcagttacctcccacttggttcctcctgtgacatgttggcattatgtgtactacaattcaagacaagatttgggtggggactcagcaaaaccatatcaccagacatattatttctgaggaattatttgacaagcaattatttgcattcaaargagacaggcagttgatgatgctgatatattttgctgaagcttggataactgagagaatgaatggtgaaggcg

SEQ ID NO: 461679 - DNA, 620 bp, Homo sapiens
aataaataagtttaattgactcatagctcagcatggctggggagtcctcaggaaactttcaatcatggtggaaggggtagcaaacacatccttcttcatatgatgcaagaaggagaagtgctgagcaaaaggggtaaaagctccttataaaaccatcagatctcgtgggaactcactcagtatcatgagagcaccaggatgagggtaactgctcctatgactcagttacctcccacttggttcctcctgtgacatgttggcattatgtgtactacaattcaagacaagatttgggtggggactcagcaaaaccatatcaccagacatattatttctgaggaattatttgacaagcaattatttgcattcaaaggagacaggcagttgatgatgctgatatattttgctgaagcttggataactgagagaatgaatggtgaaggsgtttgcagaatggcatttctcctaggtgaagcctagaagacagaggttgaaaataatgagtgtttcagagacctcgggtattatactgaaaatagatgatttaaataaagatgtatatattaaacattgacactttgttattttctcctactttgctctaagtatgatgaacccag

SEQ ID NO: 461680 - DNA, 500 bp, Homo sapiens
ctttcttaatgaaactgatgagatctacggatatgactattttgaggatgccccaacaaaggacaaggtttcttactgatctctccaatatgtagtgtaccacagcccatttaattagatattgcttctagtaagcttgaacaagaatttactcttaaatatcacaggatgacaaaatattactttatattttgggcaaytgtcgaacaataacaacaataataaaatcagacaaaacaaacaaatgacaaaagaaattcagagaagacagtttgaatacaagcaccagaagaaaaatgcaaagacacctgtaactaatatccttggaatgaaaagagaatatgtggaatataaaaacgtggaagaggatactattaaaataaattgtcaacaaaaattttttttaggaataaaatgtttggaaatgttaaatctaacagcaaaaatacaatagaaaacattttccagaaaataaaaagaaaaggcaagaaggttcaaaa

SEQ ID NO: 461681 - DNA, 577 bp, Homo sapiens
ctgtaactaatatccttggaatgaaaagagaatatgtggaatataaaaacgtggaagaggatactattaaaataaattgtcaacaaaaattttttttaggaataaaatgtttggaaatgttaaatctaacagcaaaaatacaatagaaaacattttccagaaaataaaaagaaaaggcaagaaggttcaaaatccaaatggtaagatttccagaaaktggttgagaaaattattaaagaaaaaatccaagattttaaataaatttccccaaacagtaagcagaacagtaagttgtggactgaaggcccagtgaatatccagttaaatcaatggaaacaaggcaatggcaaatagattcctattatgaaagtattgtctgccacacagtgatcttttagttattgtccactatagcagagaatgatcagacatttgtcccattattttagttcttttttgttgttgttagaatgtagcaatgaggacatgagataattaaaggcagtgcaatagtagttaaaaacttagtcttggatttttatatatctgaattaaaatactcagtctagagagtgaa

SEQ ID NO: 461682 - DNA, 598 bp, Homo sapiens
gctaaaaatattaaatacatatttacatattatattggtgttggttttgatgctgctttgttaatattccttaatcagatgttattttagtttattttctgagcttataataagaataatacactacaattgagcacatttgtcctcaccactcatatttgtgattgaacttctagtacattttccatttcattaatgtgtatcacaattgatttaccacctctaggaaaaaaattgcatatgatcatattgtgtttggaaatttaacacatctttctctcctggcattggaatgcttggaacatgtataacaataggacaatatctatgtcaaaaagagaatcagttgaagccccttgatgttaccagttctggactgtttaacttctagactttttaaatgggaaaaccaagacaaagcaaacacataaaaaccatttagtggatttaaacctttgttaggttttttattatgcttgcagcataattcttttcctaatacaactagtcttaatttatagtaatatctgaattactgtaytcacgacatagttttattgtcttacactagtcaataaaacttattgtttcctaaggg

SEQ ID NO: 461683 - DNA, 556 bp, Homo sapiens
tgtatcacaattgatttaccacctctaggaaaaaaattgcatatgatcatattgtgtttggaaatttaacacatctttctctcctggcattggaatgcttggaacatgtataacaataggacaatatctatgtcaaaaagagaatcagttgaagccccttgatgttaccagttctggactgtttaacttctagactttttaaatgggaaaaccaagacaaagcaaacacataaaaaccatttagtggatttaaacctttgttaggttttttattatgcttgcagcataattcttttcctaatacaactagtcttaatttatagtaatatctgaattactgtattcacgacatagttttattgtcttacactagtcaataaaayttattgtttcctaagggatccatactatggaaaacaaatagtgagtaaattggaaaatgtctttgatttagaaaaggtcattaaactcatttctctgctttggatcttagcccagctactggaccttgagtctaagttcagtagctaaacctctgtcaccttgaataataata

SEQ ID NO: 461684 - DNA, 623 bp, Homo sapiens
gagaaagttccacaataggtagttcaaggacgtctaactccttccagatttctggtttcctgtaattagcacataattttcaacccactgtttaacccaaaatagtttctggaaacccagacactcttcacaattgagttcaaggcagaaagcgaaaacaagagggaatgtaaaaagggaagctccaggcaatacatcccccttacatttcattggcctccaccattttcaagkgtagctgggaaatgtagtttagtaactgggcatattgctcaagttgttagtaaagaaggggaggatggcaattgggtaggcagttctcagtgtctgccacactaagacaaataaacaaataaataaataaataaataagcaaacaaacaaataaaattgtgcataccacctagtccaagttatgggaagatctattgggaagaatgcttgaagtaatttattactggttccttagctttcaaagataaaattaagattgttcaagtgcaattaacaaaattttacactgctaaacatcattaagtattgcagcagaattgcagtgacagttgtagtttagaaaccaaaatttgttatgttcatttcttttttggcctataataagcatt

SEQ ID NO: 461685 - DNA, 623 bp, Homo sapiens
gagaaagttccacaataggtagttcaaggacgtctaactccttccagatttctggtttcctgtaattagcacataattttcaacccactgtttaacccaaaatagtttctggaaacccagacactcttcacaattgagttcaaggcagaaagcgaaaacaagagggaatgtaaaaagggaagctccaggcaatacatcccccttacatttcattggcctccaccattttcaagtgtagctgggaaatgtagtttagtaactgggcatattgctcaagttgttagtaaagaaggggaggatgrcaattgggtaggcagttctcagtgtctgccacactaagacaaataaacaaataaataaataaataaataagcaaacaaacaaataaaattgtgcataccacctagtccaagttatgggaagatctattgggaagaatgcttgaagtaatttattactggttccttagctttcaaagataaaattaagattgttcaagtgcaattaacaaaattttacactgctaaacatcattaagtattgcagcagaattgcagtgacagttgtagtttagaaaccaaaatttgttatgttcatttcttttttggcctataataagcatt

SEQ ID NO: 461686 - DNA, 681 bp, Homo sapiens
cttctgcacagcaaaagaaactattaacagagtaaacagcctacacaatgaaagaaaatttctgcaaactatgcatctgacaaaggtctaatatctagcatctataaagaacgtaagcaatttacaagaaaaaaaaacataaaaaaccattaaaaagtggccaagagatatgaacagaaacttttcaaaagaaaattctttatgtttggtggcatttcaaatgtattataaattgctatttgtttttatctttatgactaaagtttagtgataraatttcttatattagctttttatgtgtatggtgattccatttctgtcacctaataattatcaatctctaagtgacctttgtggttctgctaccacatttctaaagtaagtatattatggtacctaacattttagtttcttatgagaaagagataataagccaacactttcagaaaaatgtctggcttatagtaataatttttttttacaattatatccaatattaatatcatgatcatcatcatcacaagtattgattcacttattaatttgtgacagtatataggtcattaaacttgggtttaattattttggtcctccactaattagatatataacatagggaaaggcacttaaatcttctgggccttatttcttcatctgtaaagtgaaactaactataagggt

SEQ ID NO: 461687 - DNA, 681 bp, Homo sapiens
cttctgcacagcaaaagaaactattaacagagtaaacagcctacacaatgaaagaaaatttctgcaaactatgcatctgacaaaggtctaatatctagcatctataaagaacgtaagcaatttacaagaaaaaaaaacataaaaaaccattaaaaagtggccaagagatatgaacagaaacttttcaaaagaaaattctttatgtttggtggcatttcaaatgtattataaattgctatttgtttttatctttatgactaaagtttagtgatagaatttcttatattagctttttatgtgtatggtgattccatttctgtcacctaataattatcaatctctaagtgacctttgtggttctgctaccacatttctaaagtaagtatattatggtacctaacattttagtttcttatgagaaagagataataagccaacactttcagaaaaatgtctggcttatagtaataatttttttttacaattatrtccaatattaatatcatgatcatcatcatcacaagtattgattcacttattaatttgtgacagtatataggtcattaaacttgggtttaattattttggtcctccactaattagatatataacatagggaaaggcacttaaatcttctgggccttatttcttcatctgtaaagtgaaactaactataagggt

SEQ ID NO: 461688 - DNA, 489 bp, Homo sapiens
tctgaatgtctcacaagcaatatgtcttggagagaatatgatttgctgggtttcttactaacatcagacactcatattgtataggattcccagactatctctcttcataagccatttctctcctatatgttcagtgtatggatggctgcctttgttagaatgcttatctatgggtctcaacaaaaaasgaatggatactcatgaaccaattcctggtttagacagcttccctcacaagagggctatggacctgtcaggcactgatgtcttcacagcctttatagctcgcatcaagtactgaagtcctatgagcaagtctgtctttctgaggtgctttgtaaccctttcctctgatcaattatgtattgattttaaaattaaaatctcagagagcaatcttattttctttataagttcttgggggaatgtccctttaatactgcaacagagattaaattcatccaagttattttaaacagtattgataga

SEQ ID NO: 461689 - DNA, 575 bp, Homo sapiens
ctttacctacccaaatcctataaaatggcctacccctaactccctttgctaactcttttttcggactcagcccgcctgcaaccaggtgaaataaacagcctttttgctcacacaaaatctgtttggtggtctcttcagatgcatrctagtgaaatttggtgccgtctctgatcgggggacctctcttgggagatcaataccctgtcctcctgctctttgctccatgagaaagatccatctacgacctctggtcctcagaccaaccagcccaaggaacacctcaccaatcttaaatggggtaaacgccctctttttactctcttctccaaactctctcactatccctcaacctctttctcctttcaatcttgacaccacacttcaatctctcccttctcttaatttcagttcctttccttttctggtagagacaaaggagatgtgttttatccgtggatccaaaactccggcgccggcgatggactggggaagacagccttcccttggtgtttaatcaagtggggatgcctgcctgattattcacccacattcattggtgtctgatcaacatgggg

SEQ ID NO: 461690 - DNA, 553 bp, Homo sapiens
caacagtgtcatcctccctcagctctcagctagcctaatattttaaacagcaaggagtaccatttggtaaggctgattgtaaggagttctagttcctgtagaaatagcaagtgcctcaattttaatgaacattagctattcaagaatcatggtgtgccttgtaaatcttttgagatttataaatacaaattcaacacagtgggtattataaatacccacttcaattgtattctaaagaaaaaagttttttaagtgtttacaaaaatactcaagataatagkttaaatgtagatatttactttagagaattaggagttctctctttgaatgtaaaaattcagccttaggccaacaaaaaagaaaatgttaatttttaaagtagtgataaatgggatttatatttataaaattaaaaataggtacaagaaatattttgataaatacatgaaaacagaattaaccttttatttttcatacagctatagtacttttggtgatgactttaagtctctaataataaaatttatatataattttagtagtgcattcatga

SEQ ID NO: 461691 - DNA, 602 bp, Homo sapiens
agaagttccctggtagggcccctcaacatctggctgactcaaatgcctgtgttctccagggaacccaggaaacaggtccacactcagagagaaacttcatctatgacatgattccagtcagctggcatttacacctctgtagggaaagaaaatgaaacattcaaatacaaaggggtccctggagaaactcccaccggcctgagcactgggagaacaggttgagccatggaagtttctgccggttttagggggtaggagtctgtcctttctttttccggggtggtaactgggaattctatctgtgagatggggatctgttaacaggaagctctcttgctttgctgagtttttttccttttcacccaataaattccatttttctcacccttcaaagtgtctgcaagcctaatctttcatggtcgtgtgacaaggacccgtttttagctgaactaaggagaaagtcctacaacagaagagtttttaatagattgtcctagaacagttatctctatagaaaaaacacattggacacctttaaaccattcacagggamaaaactataaacattttagaagacaatctagaagtttgtgtttatgaac

SEQ ID NO: 461692 - DNA, 606 bp, Homo sapiens
ctgacctggtttcctgctactcttccccagctcactaatggcctccttgctcttcttcaaatgcaccaagcacatgtgtccactagatatagcatttgttcttgctggtccctctgcttggaaggctcttctcccggatacccccaagctttctttctcattttctcaggtgtctgcttaaatacttatttgcaagtgacactttctctgaccattgcatatgaaatagtaataccccctttcctgaatttttctatatagcccttgaattaattgaagtagccatttgctattgcaacaacttcaaaatttcagtagtttaatacaacaaaagcttatttcttactcatgcaacagtccaataggatgttttttatcraacaacatttctaagtagttcatcttttagcaatgattcaggtctcaggctccattcgtccatgactcttccatcactttggtcctctgagtccactgatactatttgttgcatctgctatcagataggtgaagaggaggcaatagaggataacagggaagttcattttatgggccaaacttaggagtggcacacatctcttctgcccatattccactggctacagt

SEQ ID NO: 461693 - DNA, 511 bp, Homo sapiens
ggagtagctaggactataggcatgcatcaccatgcctggctaatttttrtattttctgtagagacagggtttctccatgttgctcaggatagtcttgaactcctgagtttaagcaatctgacctcctcagcctcctataatgttgggattacagatgtgagctaccatgcctggccccacccagatgcttttgagagacttttattgctttttggtatgtggaagggattgtatatgtaatctactcatatactttttcatgggatgtaataactaatgatatggatttcttaataaaaataatagtatttatttcttatttattttgttccgagcattatgttaagcactttatacacattccaggaatacatgctgaccatagcactgcacaggctactattgttctcattttgctgatgaggaaatttagacactgaggagttaaaaatgctaagaaacttgtcctaaaacacatgactagtaaatggccaatccatgctttaagcac

SEQ ID NO: 461694 - DNA, 511 bp, Homo sapiens
ggagtagctaggactataggcatgcatcaccatgcctggctaatttttgtattttctgtagagacagggtttctccatgttgctcaggatagtcttgaactcctgagtttaagcaatctgacctcctcagcctcctataatgttgggattacagatgtgagctaccatgcctggccccacccagatgcttttgagagacttttattgctttttggtatgtggaagggattgtatatgtaatctactcatatactttttcatgggatgtaataactaatgatatggatttcttaataaaaataatagtatttatttcttatttattttgttccragcattatgttaagcactttatacacattccaggaatacatgctgaccatagcactgcacaggctactattgttctcattttgctgatgaggaaatttagacactgaggagttaaaaatgctaagaaacttgtcctaaaacacatgactagtaaatggccaatccatgctttaagcac

SEQ ID NO: 461695 - DNA, 563 bp, Homo sapiens
caccaaaagccaattttttgtagtgattaataatatataggtaaagtaattagattggctaagataaaccgggaaaaatccccagaaatttctaaattctagaataatgagactttattacatattctatcaacattaaaacaataacgaggaaatattataaacaattctatgccaataaatcagataaattgaagggtatgaattctaaaaagtagaaaaatacatgtaaaagaggaggacatgtgtatcttttagaccagcagaaaatgaaagggaaagactgatagctcaggaccaactaaggagtgtcagttgaatgacttctcaataaattaaacagtgcatcactggcctacaggaaagtggaaaggaactttcccttataaaaggaaaatagaaattatttttccaagagttaagactaaatttccttctttaatagagaagcaactaattattgagatacattttttaaatgccaaatacrggtattagattattttttaaaaatactagaaagtttgttattatgttcaagttcaaaagtgggtcagactggt

SEQ ID NO: 461696 - DNA, 616 bp, Homo sapiens
tattttgaggttctgggagggtattcagtgggaacacaaaagctgtggcttctcaatctgttctttggagcaagtttacatgcttatacttctctaaaagagcatcagaaaactaagttgtagaggtaggacccagaggtagggatcacactgactttagagctatctgaatgcagctgtcttctctgggcaagatgacaatcccaaggaagttacagccctaaagcctcacattgtcatcatctgattctgttccacattaaatgaatccackggccacagcccaaagggggcctggagagtccactttgggtagggaaaataatttcaaagaagttcctctagtcttcagctggttcttcttaaaaggtgacatgagggcatgacctaaaatctcaaagcatctcaactgtctgtattttgggcaaaggccctccttatccatcatactattttggtgaatgaagatgaagtgccttggcctggagccacctggactgacaggattttgggttaattgtctccacctgggacttgtccatccttactattagcttctaaagtccccttatgttttagccctagttggtgcagaaaagcaaagagttgtggaaat

SEQ ID NO: 461697 - DNA, 501 bp, Homo sapiens
  misc_feature (1)...(501): n = A,T,C or G
cctgggagcccctgctgaatgcctggcccttccctccttgtggtcaagaactgaggctccctgccccagtgtgcttcccaagtggctgggtcaaactccagggcagacatacttttccctgttcatcttttctagctctcttctgcaactctgggtgcctgaagctgggcttctntcgtgattcctttctggtgcaaactcttgtgtcgaggtagagcctaaatgagctcctggagcacttccagagccctgtgggaaagccggagcagaccagtgccaaatgggcccgtgtgcaacttggatgggatccagagatctaaagatgtctgaattcctctaagcgcatcctttagtrgacatttcccaaagcaaggctggcccctaaggatgacaatgcattagaactcagtttcttggcagtgttctctgtaaatctataaggaagtttacttcaaaagcaaaaatctgggatatatctctgatcataaaattggacttgca

SEQ ID NO: 461698 - DNA, 545 bp, Homo sapiens
aatgaattattccttcttactatctagaaaagtgtaagttactgtcaatcctgaaatgattcttcaaaaatttgtgtttgcacatacatgctcacttatagacaacttttttttttttttttaccatgcttctttgtcatcaatataattaactttcagattcaggattgctctcattttgtagattttcctttgtkttttaaccccacaaagtatttaatcaacacacttttgcttatcattttgcattttacatgataataccctggctatatttatctaaacaattaagggtagatggtgaagacaggctatttcaccatcaagatcctagaaatataacatttaataaatagatcactgttaaaatttcatggtgatatttatcactaacaacaaatcacatgaggtgttattacatggataaagtgaagtggtgaaggtgtaatcatgaaaagacccattgtgacaggtaatacacaaacaagtcaaagaagctgacagcaaaggtccttacattcagctgtaaggaagctgcaaagaac

SEQ ID NO: 461699 - DNA, 545 bp, Homo sapiens
aatgaattattccttcttactatctagaaaagtgtaagttactgtcaatcctgaaatgattcttcaaaaatttgtgtttgcacatacatgctcacttatagacaacttttttttttttttttaccatgcttctttgtcatcaatataattaactttcagattcaggattgctctcattttgtagattttcctttgttttttaacccyacaaagtatttaatcaacacacttttgcttatcattttgcattttacatgataataccctggctatatttatctaaacaattaagggtagatggtgaagacaggctatttcaccatcaagatcctagaaatataacatttaataaatagatcactgttaaaatttcatggtgatatttatcactaacaacaaatcacatgaggtgttattacatggataaagtgaagtggtgaaggtgtaatcatgaaaagacccattgtgacaggtaatacacaaacaagtcaaagaagctgacagcaaaggtccttacattcagctgtaaggaagctgcaaagaac

SEQ ID NO: 461700 - DNA, 587 bp, Homo sapiens
aagatggcatgtgcagggaactctcctttatacaatcagcagaactcatgagacttattctctatcataagaacagcatgggaaaaatctaacctgatgattcaattacctcccactgggtccctcccatgacacatgcagattattacaattcaaggtgagatttgggtggggacacagaaccaaaccacatcatagttgtttgaattaattatctgagaccaatctatctgtgttttggaagtcatttaacctttrtaagtctcattttactcatctctaaattaacatggtattactgacacttactgtaccatgttatagtgagagttaaatatagtgtatgagaaagtacgttgcaaactataaatttccattcagatatcattatttaagcaattatacatattaaacttgttatctaagattagtttttgtatatgccaaccaactccagctaatgccaaattttaaaattcttttcctttaaaatcagctcctttaaggacaaaaatttacatttcccctggtatccacaaataggtcatatattatctacctattgtacaactcattaatttaaaact

SEQ ID NO: 461701 - DNA, 546 bp, Homo sapiens
caggctcctgggtagaaaggggctgatccctggtgaagctccaccttcagaccagggaaggcttgaaactagaggctgggctgtcagttccaggtggagtctgtggctgtagtgagaacttaccatgcwtttttagggccagcccatgactgcccatagaacattcagcacatacatcctcccttctgagcccataaagaccacagactcatacgagacttgggcagatgtcgggatgacctgcctgccgatagtagctacccactccgggtttcctctctgctgagggctgcagactcgacaggatgacctgcctggggaaaggagctccctacctcaggtcttctctccattgaggactgcagacacgatgggacaacctgcctgtggaaaggagctacccactctggatctcgtgaaagctgttctgttgctcaataaagtacctctctgccttgctcaccctccattgtccatgtacctcattcttcctggatgcaggacaagaacctgggacccatcaaatggcagggctgaaagagctgt

SEQ ID NO: 461702 - DNA, 616 bp, Homo sapiens
gtagttgttcataataatctttaatgatggtttctatgcctgtagcaccagttataatgtcttctttttaatctctgatttaatctatttgtcatctctctttggcttagttactytagctaaaggtttgtcaattttgttcatcttttgaaaaaatatttgtttcattgatttttttttagtttctatttgatttatttctgctgcaatctttattatttcttttctactaactttgggttgaaatcattctcatttttctagttgcttgtgctaggttgtctatttgagatatttctgcttttttcatgtaggtgtttattactataaattgttcttgtaaacctacttttgctgtgtcccatacctttgtatattttgtagttttatttctattttctcataattttgtaaaaatgtatttattgacctatttgttgttcaaaaacttgtttaatttctatgtatttgtgcagtttccaatattccttctgttattgatttttagtttttattccattatggtcagaaaagatacttaatatgattttgactttttaaatttgttaagacttattttgtggcttaatatatgatctgtcatgcagaatgtccc

SEQ ID NO: 461703 - DNA, 637 bp, Homo sapiens
ctgatatatataaatatatggctagtatattttgatatatttctattaatcctcatattctatagtagacttttagtcttaayatttgatatgttgtaggcaaaattttaaggctcccaacaacttcagagtgtgggcagaatttgtgaataacaggagatagcattcccattatatgctacattatgaagtacaattgatccttaagttaaatacattatctaggttgcttgaatctaagcatttgagccctttaggaaacaaaggttttcctcaactgatagtggttaggaaggctgaaaaaagataagactgatttaactatgaggactccatgaaatatttcaggtttgaagatgtagggggatgtatttgagaaggaacttaggcagtttctaagcacagaaagcagctcatagctgacagcaaggaagaaaacagagatatcagaattactgccacaaggacttaaattccaccagctgaaatgtgcttaggcactgattctttctttgagtctccaggtaagacacagttcagctgacaatttgatttcagtcttgtgagaccctaagcagaggacctagttaaacctgcctaagcttttgaattataaaattatgagataaaaattgag

SEQ ID NO: 461704 - DNA, 597 bp, Homo sapiens
ttatgcattgatttaacaaaagttacaggaatgaaagggaatttaggattacagctgatcctcacagataaatgtttagacttaccttttttccatatcagtcaataaattacaattacatgaaaaaaataaaacaaatattttattaaagtgtaaaatcaattgattacttttaaaactcctagctagatttagtcagtaataagtgaaagtaaatattaatcttagaattttagagaacataaaaacacaagtgactccttttgttttacccctttaattccaagtgctcttggcttctttatgatgtcacctttcaacatcaccagtttgaacttacaatacttaagtcctggcaagtcataagtggggaaaatgtctctcccaagattgtaagtcaaattttatgttttaaaataactgaaatactcgttagctttacatttaacttctttagtatgaagagatrtttattatattattatgatgccattcataagcaaaagataatgtgtttaagcagacaaagattctcaagcaacataatagatttttttgatttaagacatagctagtgcatgcatttcagtaaaatag

SEQ ID NO: 461705 - DNA, 526 bp, Homo sapiens
ttccttatatattttgtatatttcttattatatacatggtttgcaaatacttctttaatttcatatgttaagttttcactgtactgattgtttctttgccgtacagaagctttcttagtttgctgtattttcttgtctatttttttattttggtggcatatctaagaaattattgcctagcccaatgtcaataagattttctcctgtacttccttacagcagttttacagttttaggtcttacatttaaatctttaatctattttaatttgatatttgaktatggtataagggtccaatttaacaattcttttttttccccaaaatatattttaaactttccgtctttggtgtttttaccaaactgtttacttgacctggaatatcactttcttttattgaatttgtcaaacatctgtatattttccaatgtccctatttagacagtagcttcacaggaaatttccagatcatcttctataatctgtgcctaattctctagatgggtatctgataaggagattgac

SEQ ID NO: 461706 - DNA, 522 bp, Homo sapiens
ttagtagttatatggtaatggtatacagtaaccctcattaaaatatccaccatactcttaaaagtaataagtaggcaaagctttaagctgtaagtttgtacagaatgactgatgtgtgccatggtggagttccatggtaactaatgagcgtggcatagtttatcaactggataaattcatcaggagtaggaactcagtccaaatctgtaagctccctgtacttgtacttctttgctggagaaaatgaaataagaactagcactaaaaaataggaaatgcctagatcatattaaatatataacagatactattatatatgacaagaaactacactgaaacagattctatcaacatacaaatagagaacctgaggcacagagargtgcttttcccactatcccacagattataaggggtaaaagcaagatttgaaccatgactcttcatctctagaccccatgctcttaatcactacatcatagaacctctctgcactgattcttagtttgtgatatggtttgg

SEQ ID NO: 461707 - DNA, 446 bp, Homo sapiens
tgtgactcagtttcagctcctctcagctgtagcctggggctagttctgcccacccagagacccaccaaatgactcacaagatgcattcccagggatggtgttgagtatctgtttggatggaacatttttcaggatatatcatacrataagatacaaacaaatctcaacaaatttagggagattaataatcttgtcacccatattgatatgaaactagaaaacaataataggagaaaaattggaaaattcacaaatatgtggatattacacaacacaaacctgaacaataaatgggtcggccaataaggaaatcaaagtaatatcaaaaggtatcttgagacaaaagtaaacaaaaatctccacacatgccaaaatgtatggtatgcagcaaaaagcagttctaaaagggaggtttacagcaataattgtctacattaagcaaaaag

SEQ ID NO: 461708 - DNA, 446 bp, Homo sapiens
tgtgactcagtttcagctcctctcagctgtagcctggggctagttctgcccacccagagacccaccaaatgactcacaagatgcattcccagggatggtgttgagtatctgtttggatggaacatttttcaggatatatcatacgataagatacaaacaaatctcaacaaatttagggagattaataatcttgtcacccatattgatatgaaactagaaaacaataataggagaaaaattggaaaattcacaaatatgtggatattacacaacacaaacctgaacaataaatgggtcggccaataaggaaatcaaagtaatatcaaaaggtatcttgagacaaaagtaaacaaaaatctccacacatgccaaaatgtatggtatgcagcaaaaagcagttctaaaagggagstttacagcaataattgtctacattaagcaaaaag

SEQ ID NO: 461709 - DNA, 446 bp, Homo sapiens
tgtgactcagtttcagctcctctcagctgtagcctggggctagttctgcccacccagagacccaccaaatgactcacaagatgcattcccagggatggtgttgagtatctgtttggatggaacatttttcaggatatatcatacgataagatacaaacaaatctcaacaaatttagggagattaataatcttgtcacccatattgatatgaaactagaaaacaataataggagaaaaattggaaaattcacaaatatgtggatattacacaacacaaacctgaacaataaatgggtcggccaataaggaaatcaaagtaatatcaaaaggtatcttgagacaaaagtaaacaaaaatctccacacatgccaaaatgtatggtatgcagcaaaaagcagttctaaaagggaggtttacagyaataattgtctacattaagcaaaaag

SEQ ID NO: 461710 - DNA, 475 bp, Homo sapiens
tacaacaaaaaaccaacatagtattggattacatagccaagtttaaaatatatgagtccctactaatataaattattaagtaattaagtaagtgggggagaagagacaaatcctccatacagaaaaaaatctcaaatactatacgtatgtatacatgacttccctctcaatgtgatggaatttaaacccttcatgaatgtgagcagaacttagtgaataatgtccaaataataaaatatcacaaaggtgaaaacagtaactttgtagtgatgaaggctttcagatactaaaccaaatgataaaagttaattctaccagtcatgttgtgtggatataccatagcccctgataggatataacgcaaaaaggactttgcttgtgtgataatcttctccaaaacccatcrccaagtctaatcattagaaaaatttcagaccaacctaaatggaggaatgttctacaaaatattaaccaa

SEQ ID NO: 461711 - DNA, 553 bp, Homo sapiens
gagtcatacgtggactgtcaaaatagccttcacttttatgcctctactcaattcccttacaatctactcttcccaatggtaggcagaaaggaagtggtatttttagtacaaatctaacagtaatcttcccgattaaattacataattgtgaccgtttttctaagatagtggagtagaggcattgctagtgtacctctcccacttggaaggacaaaatagtgtgtagagattcacagtgtgaactkttttcaagaagcaatgcaggaactgaacaggaaatccaatggaatccacagaatcttttaaggaagtgggaggctgcagctacactgtgagacaggcgaagggctgtgagtcccaagtgtgagaaggagagagtttgtctctgggatacacacccccaccagggtccctaaaagtcaaggctactgaggaaggccctaaccctacccagtgcaggaaacaacttggggatagccatggcatataaaagtaggagcaactgcaggaagataattgcatgcactcccagtttgcagcatggactgaggga

SEQ ID NO: 461712 - DNA, 553 bp, Homo sapiens
gagtcatacgtggactgtcaaaatagccttcacttttatgcctctactcaattcccttacaatctactcttcccaatggtaggcagaaaggaagtggtatttttagtacaaatctaacagtaatcttcccgattaaattacataattgtgaccgtttttctaagatagtggagtagaggcattgctagtgtacctctcccacttggaaggacaaaatagtgtgtagagattcacagtgtgaactgttttcaagaagcaatgcaggaactgaacaggaaatccaatggaatccacagaatcttttaaggaagtgggaggctgcagctacactgtgagacaggcgaagggctgtgagtcccaagtgtgagaaggagagagtttgtctctgggatacacacccccaccagggtccctaaaagtcaaggctactgaggaaggccctaaccctacccagtgcaggaaacaacttggggatagccatggmatataaaagtaggagcaactgcaggaagataattgcatgcactcccagtttgcagcatggactgaggga

SEQ ID NO: 461713 - DNA, 608 bp, Homo sapiens
ggtcgcaggttgaaagaagcacccagctagatttcatgatataacctcaggtggggatgaactcccttgaaatgggggagtgaaaagtgggctgcagctgcaagtgcaggagtcacaagtgcaggagccacargcctagaagccaggcacccagctttgcagcagataaggagggacaaggcctgcaagctgcatatgctatctcagtgggaaagcttatgactcagcgcagttgccagttctcagtgtaggctgactggaacttagcctgctgctaagtggaacactgccagagtggatctgcctcatcgtgtgtgttggatctgtgtggggcttacctcagcctgctattccccactccctgtgtgagctcttctgtccatcagaggcagcaactctcccctctggaacatcaagccagtggcctgagaactgcccctgtcccccaacacccacaggggctgcagtttgccctgcaggaagagactcagagtgcaaacccacaagacccagcccccacccggctttgtcctgccattcaccctggtagcttaccacaaaggactgaaattcttggaagcatatggccctcctcatcacctgaaaaa

SEQ ID NO: 461714 - DNA, 608 bp, Homo sapiens
ggtcgcaggttgaaagaagcacccagctagatttcatgatataacctcaggtggggatgaactcccttgaaatgggggagtgaaaagtgggctgcagctgcaagtgcaggagtcacaagtgcaggagccacaagcctagaagccaggcacccagctttgcagcagataaggagggacaaggcctgcaagctgcatatgctatctcartgggaaagcttatgactcagcgcagttgccagttctcagtgtaggctgactggaacttagcctgctgctaagtggaacactgccagagtggatctgcctcatcgtgtgtgttggatctgtgtggggcttacctcagcctgctattccccactccctgtgtgagctcttctgtccatcagaggcagcaactctcccctctggaacatcaagccagtggcctgagaactgcccctgtcccccaacacccacaggggctgcagtttgccctgcaggaagagactcagagtgcaaacccacaagacccagcccccacccggctttgtcctgccattcaccctggtagcttaccacaaaggactgaaattcttggaagcatatggccctcctcatcacctgaaaaa

SEQ ID NO: 461715 - DNA, 546 bp, Homo sapiens
ctgcaagctgcatatgctatctcagtgggaaagcttatgactcagcgcagttgccagttctcagtgtaggctgactggaacttagcctgctgctaagtggaacactgccagagtggatctgcctcatcgtgtgtgttggatctgtgtggggcttacctcagcctgctattccccactccctgtgtgagctcttctgtccatcagaggcagcaactctcccctctggaacatcaagccagtggcctgagaactgcccctgtcccccaacacccacaggggctgcagtttgccctgcaggaagagactcagagtgcaaacccacaagacccagcccccacccggctttgtcctgccattcaccctggtagcttaccacaaaggactgaaattcttggaagcatatggccctcctcatcacctgaaaaaccagagtgcccctcctgggcmacataaggcaagcaaaaattccactactactgctgcagctagtgttctttttcaaataccaccttctgtctggaggctaaccaaaacagtccactacag

SEQ ID NO: 461716 - DNA, 607 bp, Homo sapiens
aacagcaggcttctcagcagaaacctaacaggccagaaaggattggggtcctatcttcaacttccttaaatagaatcctaaatagaataattattagtcaaaaattttgtatccagcaaaactaagtttcataaatgaaagagaaataatgtcatattcagaaaaatgctgagagaatttgtcactaccaaaccagcactacaagaaatgctaaaaggagttctaaactctgaaacagaagkctgatctgcatcaaaatagaaactcttgaaagcttaaaactcacagagcccataaatagataaattaaaaaaggaaataaaaactatctaggtaacacttaatatgatgaagagaacagtacctcacatctcaatattaacattgaatgtaaatggcctaaacttttcacttaaaatatacagaattgcagaatggatgaaaaattataaaccaaatatgtactgtcttcaagagactcatctaacatggaaggattcatataaagtcaagttaaaaaggtagaaatatatattccatgcaaatgaaaaacaaaaacaagcagtagtaactattcttatattagacaaaacagacttcatagcaa

SEQ ID NO: 461717 - DNA, 607 bp, Homo sapiens
aacagcaggcttctcagcagaaacctaacaggccagaaaggattggggtcctatcttcaacttccttaaatagaatcctaaatagaataattattagtcaaaaattttgtatccagcaaaactaagtttcataaatgaaagagaaataatgtcatattcagaaaaatgctgagagaatttgtcactaccaaaccagcactacaagaaatgctaaaaggagttctaaactctgaaacagaaggctgatctgcatcaaaatagaaactcttgaaagcttaaaactcacagagcccataaatagataaattaaaaaaggaaataaaaactatctaggtaacacttaatatgatgaagagaacagtacctcacatctcaatattaacattgaatgtaaatggcctaaacttttcacttaaaatatacagaatkgcagaatggatgaaaaattataaaccaaatatgtactgtcttcaagagactcatctaacatggaaggattcatataaagtcaagttaaaaaggtagaaatatatattccatgcaaatgaaaaacaaaaacaagcagtagtaactattcttatattagacaaaacagacttcatagcaa

SEQ ID NO: 461718 - DNA, 569 bp, Homo sapiens
aagaactgcagaatatattattcttatcagcacatggaacattctccaagataggccatatgctaggcctatcttggagagatacatttttaaaaaatcaaaataacatccagtgtcttctcagaccagaggaataaaactagaaatcatctccaaaaagaaccctcaaaactatacaaatacatgaaaactaaataatctgctgctwatgatacctgggttaacaatgaaatcagatgtaaattaaaaagttatttgaattgaataataatgaccctagttatcaaaacctctagaatacaccaaaagcagtgctaagaggaaagtttatagtactaaatgccatggcataaaatttcataaatatttatatttgctgtacattttaattatatatctagcatttttttctgtttaaatgtagacaatgctaaaacttgcctattgatttagatattctcaagaaggtgacatttgttaccatcagctgttaaaacattaattattttatgatattgcattgtttttgttaattctgaataaaccagtatgtcctaaaaaaaaaaaaa

SEQ ID NO: 461719 - DNA, 569 bp, Homo sapiens
aagaactgcagaatatattattcttatcagcacatggaacattctccaagataggccatatgctaggcctatcttggagagatacatttttaaaaaatcaaaataacatccagtgtcttctcagaccagaggaataaaactagaaatcatctccaaaaagaaccctcaaaactatacaaatacatgaaaactaaataatctgctgcttatgatacctgggttaacaatgaaatcagatgtaaattaaaaagttatttgaattgaataataatgaccctagttatcaaaacctctagaatacaccaaaagcagtgctaagaggaaagtttatagtactaaatgccatggcataaaatttcataaatatttatatttgctgtacattttaattatatatctagcatttttttctgtttaaatgtagacaatgctaaaacttgcctattgatttagatattctcaagaaggtgacatttgttaccatcagctgttaaaayattaattattttatgatattgcattgtttttgttaattctgaataaaccagtatgtcctaaaaaaaaaaaaa

SEQ ID NO: 461720 - DNA, 512 bp, Homo sapiens
tgaagcaatgtattttgttctatcattgccatttatatcacagctttcctgtgcttggcatggcagaatttgcacatatgctatgttcttttatacattctaacagttcttttcactgagagtttaattactatcacttaagcagaaaaactttgtagaaaaagagagtgaagctaattaaatttgcagctaagcacaaaggaaggaaagcaaccttctagctatgcagtttcaattattttgtggccaaaattatgtaataattctattatttatagatacaagtcatcaagagtgaaatgtttatccaatcacctttatattctttggattttaacagatatataaaatgtagtatgaaatgtattcagggcataataacaattccctgtattttattttcctagatttcaccttataaaatagtacttcaaaattatgagtgaattttgaatgtggatgttttytgtggtgcagaatatgaaaaacattatcagttttcttaaaacaaa

SEQ ID NO: 461721 - DNA, 582 bp, Homo sapiens
tctgccctaaatttatttgcaaaattaccaaacaaaagaaataaattttttaaaacctttgtagaygtaaacatataaatgattgtacttacctgccagagttctgccgaggcccaccagctggtctttggtaaagttaagctgggctgccacacagagggcttgcttccagttgccacatgtcagaaaggctgagagagctttctcgtgggcaccgcaacgggcaaacatgagccccgctggctcatacatgtgctcctgcatcaggtgctccccataagcaatgctgatatcctgtgacaagaggagatttaggactgaggaggaaatatgacaatcatttctctaaagctccagtgtagctgccttagttcctatacttggaactcccttgaaagaattacctgggaaaatcttacagttgatcagttagtacagtcattttttcattcaaaaccttactgaggatgtgccatttattcactcaacaaataattactcttaactacatatgcaccattctgggcagtatggatactacagcaaggcaaaaaataaaaccaaacaaatgaaaaaccatat

SEQ ID NO: 461722 - DNA, 611 bp, Homo sapiens
caggtatgtgaatccatacccaatgtgtgtttgtgagtgtgtatgacttaaatatatgtttccattgtaaaaagttggcccccttttctctacaaaccctagctgttctgggactcctgcctctaccatgggagctttcaccagatctcagagttggaggaatcccctctgtgggctatcatctccagagaacttcggaatatatttttcaaagaaatgttgctattggtggtggtgtgatttgtcctggtactctattcttcaagtatacaggcatcagtggactagcctggtctaactaggatggaatattttctccccttctagggaaaatacactctgagttccagatagtttacatgaaaacaaactttctctttcaaaaatagggaaccattgaacattggttcacatattaaattcagaatcctaagtataatctctttataacttgggatatgagattagcagttgtgatatctatgaagctagagagttgaaatttagccttccaagagcaaattagttaaaggaattgaattctggagtcataacataaggaatgtatagaraactacatatagtggctaattttaatatatcatttcata

SEQ ID NO: 461723 - DNA, 608 bp, Homo sapiens
gcagggttttgaggtaaacaagtaggactggcactatacggtttaaagtagacagtttctattctggtatcatctagcttcttctgactctccaagtgaaaagtcctgggttactggccttattctaagaatgcaagattttatcaatattagaaaaatgtgtatagttttttttgcattcacagattataaaagatgtattttcmtaacaatgatgcagaaaaagcattcaactaaattcagcttctaataatgataagaagcacttagggaactagtgttaggaaaaagtgtccttaacctgatagagtatctacagaaaacttttacttaacatcatagcaacagtcaaatttaaaataaacatttcctttaaagccagaaaccagagtggggtgcctgctatgcttctactcagcactgcactggaaattctagccagtgtaatatgacaaggagaagaaataaaaggaataaatataggaaaggaaaaaccaaaagtctcagtgtgatataataacctatgcagaaaactcaaaacagtctacaagtaaattataaaaattaggagtgttggcaagttcactgagtgtaggatactaaaatca

SEQ ID NO: 461724 - DNA, 579 bp, Homo sapiens
tctaaaatcagcacacttttagcagaatcttgttgttctctatatttatcttgactttcaagaaaagtttcrctttgagccttatggtcacagcctgtatcaacactcctttgaataaagctaacagaaaactatcaaggaaaggtttacaataaacgatacaaagaataagaaagcctaaaatacaacctgcaagaattatgcttggtacttggctgaatgacaatcagactatctatcttgtctgaaaaaccagcttacctgtaatacaagctttgtgtcctggggcacaacagtgacaatccgtgaacccctctccactttccgcagaacttccccatgggacacatgattgctgctcaggccggcctgtaatgctaaacacaccattaactaataagccttaattatcacaacaagccactctccattaactgcaattgaaaccgcacacattatgtgaaatagaagagaacaaataacaaccatgtgccttagctctcccactgaacctcaagactatcagccctgctgatgaacacgctcatccctggaacttgccctctctcttacagagcc

SEQ ID NO: 461725 - DNA, 579 bp, Homo sapiens
tctaaaatcagcacacttttagcagaatcttgttgttctctatatttatcttgactttcaagaaaagtttcgctttgagccttatggtcacagcctgtatcaacactcctttgaataaagctaacagaaaactatcaaggaaaggtttacaataaacgatacaaagaataagaaagcctaaaatacaacctgcaagaattatgcttggtacttggctgaatgacaatcagactatctatcttgtctgaaaaaccagcttacctgtaatacaagctttgtgtcctggggcacaacagtgacaatccgtgaacccctctccactttccgcagaacttccccatgggacacatgattgctgctcaggccggcctgtaatgctaaacacaccattaactaataagccttaattatcacaacaagccactctccattaactgcaattgaaacygcacacattatgtgaaatagaagagaacaaataacaaccatgtgccttagctctcccactgaacctcaagactatcagccctgctgatgaacacgctcatccctggaacttgccctctctcttacagagcc

SEQ ID NO: 461726 - DNA, 579 bp, Homo sapiens
tctaaaatcagcacacttttagcagaatcttgttgttctctatatttatcttgactttcaagaaaagtttcgctttgagccttatggtcacagcctgtatcaacactcctttgaataaagctaacagaaaactatcaaggaaaggtttacaataaacgatacaaagaataagaaagcctaaaatacaacctgcaagaattatgcttggtacttggctgaatgacaatcagactatctatcttgtctgaaaaaccagcttacctgtaatacaagctttgtgtcctggggcacaacagtgacaatccgtgaacccctctccactttccgcagaacttccccatgggacacatgattgctgctcaggccggcctgtaatgctaaacacaccattaactaataagccttaattatcacaacaagccactctccattaactgcaattgaaaccrcacacattatgtgaaatagaagagaacaaataacaaccatgtgccttagctctcccactgaacctcaagactatcagccctgctgatgaacacgctcatccctggaacttgccctctctcttacagagcc

SEQ ID NO: 461727 - DNA, 601 bp, Homo sapiens
atgaaacataaagagtttacaaaatatgtccggaacataaaaccccaagatgagaactgggaataaaattctgattgcaagctctcactggtgatagaggggctgcaggtcacaaaacagctcctcacatagacttagagattgagaccctccctaatggtggagccaaaagttagaacacaggtcttctgccttccaggctgactggggttctttctagatcgtaacacttctcttatataaactattaggcagagttgctgaaacaacacaacccttctgttcctggaggtaggatccatttgcaagaagcacaataaagatggtcctgaaaacatcacctaatccaggacccaatactttcctcctgccattgattctgattctgatgaagcagggctgtttgcaattcctataaattatgggtccatatgaycatttcctgtctgctcacatccaagtgctacagtacctcaattgctgctgcgtacaaatggtagtgactatcctggtgcaaacccccaggcttctatctgcaagtttgcacagaaagattaaggaccaaggaatgaagaaagagaacttttccaatggaagacaa

SEQ ID NO: 461728 - DNA, 551 bp, Homo sapiens
aatttttgagactcctcatgaagcagcatttttagaacttttctgtttcagccatgaagaaatgcagttatgtgacatgaagttttttttagctttctctttatactttaatttataagcagtaaaattcactttttgttgtacaattttgtgaattttgacaaattcatagttgtttaaccaccaccamcaacaactaaaaacaaaactgttgttctgatatttcataaagaaatacctaaagtaaagccttgattgtgaagtgaagggtggggtaggcctgctttcagaaagaggatgtgtatggaatgcttcactaaccgttgcttgcattacaagttctgagcttgtctttgctcagtgccaataaattctttgttgcatgaatcgttaaagttacctgctagcttttaaggaaccaacatcatagaaatattatgggaaactacaggagaaagaagaattactaaataataagtggagaaatagcatcatatagagccatgtcactgaaaaaattaaaataaaaaattaaattaaattaaatgtac

SEQ ID NO: 461729 - DNA, 623 bp, Homo sapiens
acactccttgttctttttgtcattcctcatgtgtgatagtaccaggcttccttaccattctcttcgaattagctgcagtttatgaaagttctcaaataatggagtcctggctgaacacaactctataggtatttcttgaccagagcggaaaayacaaactcttacaactcacattctgaatgctctgatactattatgcaatcaaattgcttatttatttgtcagtcacatcacacatgacagcagtgattttgtttccaatttattaaattaaatctgaaataattaccctgcctttaagcccctgcctaatctacttgtaatttatccaccagtactctcctatatgaatgaattcattgtgtattttctttcttacacatctttgtcatgttcttctctcttagaacaacccagaatgtctcatggtggcctgttttacaggtaaatgttttaaaaggatcatctttgatgactttttgttcctgaaacatcctcagtttctctctgtcatgtggtaggtgtggaggaatgtctgtcaaattagttggaagtgtgctgtgaatcagatatggctagatattgaatagcatatgttgtattaggatataactcagagttca

SEQ ID NO: 461730 - DNA, 590 bp, Homo sapiens
ctcaagggtccttaaagcatgtgagttttgtggtgcaaggaaggatcattttctgcccaccttggggtgggtgatactatttgagtcagtwttcaggatgcttctttcttttggtcctcattattggaacattttaaaagcactgactggaagtagtctgggaccaaacaaaaagttaagtttcaggtctcagtagaactactgtgattatcttatttaagtcaatttaatttaacaactatcagttgtcatgtaatgcataggctttgcaggatatgaaaaagagaaagatgtgtaaaacaaaatacttgtgtattagtcaggagtccttttattgcaaagctcagagacataatctcaactagtttatgccaaagcgtttctcagcaattaaaggaaaggtaaagttaactaatcatgggatggacagagacacaactggatcatctaagattcaagaacaagtagaagcaacaaattgccaggacactttgtcactacttcttatttctgcttcattctatacctaggtcttattcttcctttcaaaagattggtttaatccacaaaaagcaaaaatgggcaccaat

SEQ ID NO: 461731 - DNA, 575 bp, Homo sapiens
tatccaataaatggaaacaacccaaatatccaagtgatgagcagataaacaaaagtggtgtatccatacaatgaaatattatttagccataacaaggaatgaaatgctgatatatgctctgacatggatgaaccttaaaaaattatgctaagcaaaataagccagtcacaaaaggccacatatatattaatctatttatataaaaatccagaataagcaaattcattgagatagattagtggttgccaggggctatagggagtgattgctaacagttgcatgatttcttttcaggtaatgaaactttctggaattagatagtggtggygatttcacaattctgggaatatattaaaaccactgaattgtctactttttttaaaaggtgaatttaaaggcgggtggattatatctcaataaagctgttaaaaagagcaacaacaaaaaagagagaggagcggagagttcagactgaggttttctgattgacagtgaccgacagatacaactggctattaacatatgtggcagtgccaaggaatgtgtaattccagtgcctgctgtttgtgagctgc

SEQ ID NO: 461732 - DNA, 622 bp, Homo sapiens
ttaatattgcttaattatttcctttcacattyatatatcttgaatgtaaggccagatcaagtgttccaccatgacttatgtctcctatatctatatcatctatatatatttaggtacacacacaaacttatatgtgaatctacgtataaatatatacgtttgtgtggtatgtatataagtacgtatatatatatatatatatatatttaactcttcattgcctttgtgtttataacatagtaaaaataacaaagaaagcaatctcaattttttttattgctgtggttctaagatggagacacagtttccagagtatcttctggaaactttcttaaataatacatattcagtgtggaaaaggtaagatatgtgagtttaagcaaactttcctagatgattctgctattcagtctcagatgtaggaatgtagttctaaggaaattatgttttctctttgaaataacagattttttatcaacttgttccgttgagtttaaaaaaaacatatcctaggaattattattatgtaacagttatgatgagacatactgaaaacactaaacatgggtgctgcctttgagtgactcacaatctagcagaagggatagagagaaagccatta

SEQ ID NO: 461733 - DNA, 437 bp, Homo sapiens
tatctatatcatctatatatatttaggkacacacacaaacttatatgtgaatctacgtataaatatatacgtttgtgtggtatgtatataagtacgtatatatatatatatatatatatttaactcttcattgcctttgtgtttataacatagtaaaaataacaaagaaagcaatctcaattttttttattgctgtggttctaagatggagacacagtttccagagtatcttctggaaactttcttaaataatacatattcagtgtggaaaaggtaagatatgtgagtttaagcaaactttcctagatgattctgctattcagtctcagatgtaggaatgtagttctaaggaaattatgttttctctttgaaataacagattttttatcaacttgttccgttgagtttaaaaaaaacatatcctaggaattattatt

SEQ ID NO: 461734 - DNA, 622 bp, Homo sapiens
ttaatattgcttaattatttcctttcacatttatatatcttgaatgtaaggccagatcaagtgttccaccatgacttatgtctcctatatctatatcatctatatatatttaggtacacacacaaacttatatgtgaatctacgtataaatatatacgttygtgtggtatgtatataagtacgtatatatatatatatatatatatttaactcttcattgcctttgtgtttataacatagtaaaaataacaaagaaagcaatctcaattttttttattgctgtggttctaagatggagacacagtttccagagtatcttctggaaactttcttaaataatacatattcagtgtggaaaaggtaagatatgtgagtttaagcaaactttcctagatgattctgctattcagtctcagatgtaggaatgtagttctaaggaaattatgttttctctttgaaataacagattttttatcaacttgttccgttgagtttaaaaaaaacatatcctaggaattattattatgtaacagttatgatgagacatactgaaaacactaaacatgggtgctgcctttgagtgactcacaatctagcagaagggatagagagaaagccatta

SEQ ID NO: 461735 - DNA, 551 bp, Homo sapiens
actgttctttgccaatattcggtgacttcaaaactgttgtttcatgtattttgtctgttgttgttattgttgttgttgatttagttaggagcataaatcttgtccttatttcatgttggtcagaagtggaagtcttgttttgttttaattaaatagttggatttccctggtttgccctaattgtaagtcagctgccattatgatccattttttattgttgtgtttgaaatgatttaggggttgagattcacttttttttttcatagatattcagttgttccagcaccattcattaaaaagacatctattttcctgttgatttatttgctaccttggttgaaaatcaattgagcataaatatgtgggtctagctttgtcattattctgttccattgacctattatctctttatttagatattctttaatttctttcagtattattttraagtgtttaaagtagaaggcttgcatatattttgttagatttattattagaaatttgaggggtttggtactatagtaaatagtatttaaaaattgtattttaca

SEQ ID NO: 461736 - DNA, 545 bp, Homo sapiens
ccatgtaatcacactttcacctgctcatgtgcttcacatgtggatctcactggcaaagaatgcattcataaactttggggcattaaccaaaaccatgtaaatctgttttcactgatgtcaccaaagaacttgtaatctgccatttcttctccaatgtcataaattttaatgagtgaaatctgcttgttttttatcagaaaataaaatcatatctcttctagaacttatttgctctctctgaaatgaaaattttgtgaaataaacacccctaactcagtattctacrcctatgtaatctctgaaaaatacaaaattgtagctagagaggagaaacaagttctcgtgttccataccactataggatgactatagttaataataaaatatagtttaaaataactagaaggaagatattgaatgttcccaacacaaagaaatgataaatgtttgagataatggttatgctaatcaccctaatctgatcactatacattatatgtatatccaaacaccactatgtactgtatgaatatatacaattatta

SEQ ID NO: 461737 - DNA, 605 bp, Homo sapiens
gatttggtggagttggaaatactgggtgattagtgatggggcatggtaggaagagcaaactgagcttagttttgtatttgttggggttgacagtccggtaaaacactcagagaaggtatttaatgtggaagtatttaggcaatatcctgtgtgtgctttttaaaaatcgttgtgtagagcccagtagattttctttagttctcagtgtatatttcttaaatgaatgaacaactatgaatgagggaataaataagtgaaggattgcactgagataggcaaagagcagagagggkttttttaatttaattttatttatttatttatttatttttacatctatttcattctctagatggctcaggagcacctcagggacagcaaggccctatgacagctccttagcagtataccctgtattataactgttatcaagtagccataagcctcatttcatttatttgagacatgcaaagggctagcaaaaatgagattttcactgatgaacttcagttgtcaatatatgtacaagatcatgctaagagaggcaaaaaaaggattctttgtaagctgcccctgatgttccatgagcttagaaatctgccctt

SEQ ID NO: 461738 - DNA, 605 bp, Homo sapiens
gatttggtggagttggaaatactgggtgattagtgatggggcatggtaggaagagcaaactgagcttagttttgtatttgttggggttgacagtccggtaaaacactcagagaaggtatttaatgtggaagtatttaggcaatatcctgtgtgtgctttttaaaaatcgttgtgtagagcccagtagattttctttagttctcagtgtatatttcttaaatgaatgaacaactatgaatgagggaataaataagtgaaggattgcactgagataggcaaagagcagagaggggttttttaatttaattttatttatttatttatttatttttacatctatttcattctctagatggctcaggagcacctcagggacagcaaggccctatgacagctccttagcagtrtaccctgtattataactgttatcaagtagccataagcctcatttcatttatttgagacatgcaaagggctagcaaaaatgagattttcactgatgaacttcagttgtcaatatatgtacaagatcatgctaagagaggcaaaaaaaggattctttgtaagctgcccctgatgttccatgagcttagaaatctgccctt

SEQ ID NO: 461739 - DNA, 565 bp, Homo sapiens
ctatatgtttttgtagaatttgaagtactcacatgaaagtacctgtaatatgttgtagttctccaatacccttgagatgaacatgtgagcaggttttttatcatccaagtgtagcctcttctctaggagccaagcaaggcagagaagtgcccagtgtgarctcaaggctctgcagatgaagtccatgaaccaggtgaagggggtacttaaagcaagggaaagtccaaagcatcaagtccaaagggaagtagatggaagacaactatcagattaaagccaaagggactctggacctcagtttccttatctgtgacatgaagatgataagagatttagtgattaaaagaaagactgtatgtaaaacacataaaataatgacctgatcaataattcttagctattacattgacacagaacaggcaaggtttaataaatggaattcagaagtcaaggctagaaaatctcagaaacaggatttgtgtaaaggcacaagactgaaaaggcagttcaagatgacagagaaaaagaaaaacagcattactttgcaatgtcagtgcaaaagatg

SEQ ID NO: 461740 - DNA, 393 bp, Homo sapiens
agcttctcttctatctccagctaagccactttatcttcagaaacatacatttctgaatcctaatttgatgaaaaccattctaaaaatgtgaaatcacaacgaaggttttctctgttggctcggctacctcatgagagtgtttctcatgcaattacatatggtgattcaggctgacgcttgagttggaccacacttttcatcaggattttcaatattcttgaaggttagataaatcttaggaaacctgtagttgacatatccaattacttccttgctatagtttgtagtgatcaaggctgatgttagtctttcctcwcagggaagggggaatttaacaatgattagatatacaaataggatgtaaaatttaatgtttggtttagttcctatgaa

SEQ ID NO: 461741 - DNA, 372 bp, Homo sapiens
agttgcaagggtatatatatatatatatatatataccctttcaccagcatttccactcccagatttatacccaatagaaatgcatacaaatgtgcactaaaggcatgcacaagaatcttcaaagcagcattatttacaagagcaccaaactggaaacaatccatgtgttcatcaagagtaaaattgattcatcttgatctatttctacagaggaatactacacaacagtgacaatgaataaactctagagttttyggcagcatggatgaatctcataaaaatagtattaggtaaaataaacaagtcacagggtacataatttatgaatctatttatataaaattcaaaaatcatgtgaaccaatctatggtg

SEQ ID NO: 461742 - DNA, 608 bp, Homo sapiens
gcttcccaacctcacctcagggatctacttatttttttccttttccccttgtgccttaattaaaccagcttatttccacttattctcttatgatttttattcataatataaccctttttgaatttgaagataacaatttcttctacttttcttgttagtatcttgaacttaatttatatcccaaacatctattttctttctctctgactgccctctggactctgaaaaattttcatctgttaaaagtaatgtttgctattacacatacttcaattattatacgtgttttcccacacacttgtgtgtgtattactcaaattctaacacatgtccccaacacatgtaaatacaagaagctctttctcgtcaagaccattttgaattgtagttcaagaattaacagtctaacctagtttagtaacacttgtaaatttgagagcattttcctcattcattttctggattatcaaataggaagactgaaaaagctyggcctcatggctgacacttctgagtcttcaggtgatattatatggtgtggaactcttttttagatatgatcttgaaactagacattgactgtatcaatattagaatggtcaagatta

SEQ ID NO: 461743 - DNA, 589 bp, Homo sapiens
aaaatgaatttttacaggaaaaaatgcaaaatagattaataattggagaaataataatcccaaactcaaatattttatgagcagaagactactgtattgccaaaagagacatagatgaaaccagagggcaaatgattttgccatgtgtggtgtcaataaattaagactgatgtaactgtcgcctgctaaggaaggatcctcatagacagggtggagatggttttacactttcaacagttcaattgtcagctttgagcwactgaattctagaaataaatgacagaaaagtgagaaggtttaaggaggcctgaagatagagacaaaggaacaatagagaaattgtatacttcaataggttatatttaaagtaacttttttagatgaaaactcatgggttgggcaacaactaaaattaattcccatcctttagaggagaaataggaaaataaacattcataccaagtcaataattgcttaaataaattacatatctcataaattctaatatacattacatgtgaatggaagaaaactataaataatatcttaaaactatgcatgcaaaataggacaaaatttaaatgactag

SEQ ID NO: 461744 - DNA, 633 bp, Homo sapiens
tgaactttgaaaatatttctaaaatgtattggtgtaaaattgtgtatagttacattgcataatttttgcatgtgcagaactttgcctattctcttgcctgagkccaaatatattcactttttgtgataacattctggtcattaaatccaactaaacttcctaatatagaagacttttttacaggagatatatttccaaattgtcaatgaatatcatacttttccatgttggtttagcaataaacaggcagggattaaataggatttcaatataaattcttcactgaaataatcattattttgagttaatcacattaaaaatgcagctttcaaacaccaaaagatcagatcactattagaatgcaaaataaataaaagtacatcactcctggcatctataattataattctcctaaatccacatcgccccattaccagccaaccttagattaaaacccttaagtgcttatttgataccagttgagattatattaatagctatttgccagcgagtcaagatttctccctctgcattgggactctaatgaggtttggacccagatgactttgggaaagttgagccctataggtccactcctttatttgcgtggggaaatatcctcaaactttgact

SEQ ID NO: 461745 - DNA, 587 bp, Homo sapiens
attgtttagatcctagttattagtgagaacacatggtatttggttttctgtttcctgcattaatttgctttggataatggcctccaggtacacccatgtccctgcaaaggacattatttcattccttattatggctgcatagtattccatggtgtatatgcacaacattttcttcatccaatccaccatcgatgggcacttaggttgattccatgtctttgctgttgtgaatactgctgccataaacatgcaagtgcatgcatctcctttcctcctttcttcctttctttctttctttttctttctttctttctctttctttctttctttctttctttctttctttctttctttctttctttctttctttctttctttctttctctttctttctttctctctttctctctctctcttttctttyctttcctttcctttccttttcttttcatttttgagagggtctcactttattaccccaggctggaatgcagtgatacaatcacggctcactgcagccttgacttcttaggttcaagcaatcctcctacctcagcctcccaagtagctgagactacaggcgtgtg

SEQ ID NO: 461746 - DNA, 560 bp, Homo sapiens
attcaaaattatgatctcaagaggaataaaacataatacaaataatattgaactatggatattgaactatatactaactctagttatgaacagtttaagtttatctggtagaaatacatttattgtataaggtattagtaacaaaagaaaatgttgaagaaacagaatacgagcacactttgcattattgctgtttgctttattgtgcttcacagatactgtgtttcaaatgaattgagkgtttgtggcaactctgcttacagtaagtctgttgacaccatttttccaacagcatgtggtcacttcatgtctgttacatattggtaattcttacaatatttctaattgtattattattattatattgttgtagtgatctgtgatcagtaatctttgctgtttgtgttataattgcttgggggagacttgatccatgcccatggaggcaagtccctctaccagcaaaaagattacaaccttctgaatccttctttttagtaataaagtatttttaaattaaggcatgcatttttttgatttttaaattttgtgggtacata

SEQ ID NO: 461747 - DNA, 492 bp, Homo sapiens
gggtattcatcacctcaagcatttttttttgttacaaacaacccaattacactcttttagttatttaaaaatgtacaattaaattaatgtttactatagtcacctgttgtsctatcaaatagtaggtcttattcttcctattttttttttgtgcccattaaccatctctacttttctgccaactcccactacccttcccagcctttggtagctatccttcttctgtctatctccatgagtgcaattgttttaatttttagttcccacaaataagtgagaacacttgaagtttgtctttctgtgcctagcttattttacttaacataatgacctccagttccattcatattgttgcaaatgacaggatctcattctttttttctggcggaatagtactctattgtcatatgtaccacattttcttcattcgttatctgttggacacttaggttgcttccaaatcttgggtattgtgaatagttgttcaataaa

SEQ ID NO: 461748 - DNA, 492 bp, Homo sapiens
gggtattcatcacctcaagcatttttttttgttacaaacaacccaattacactcttttagttatttaaaaatgtacaattaaattaatgtttactatagtcacctgttgtcctatcaaatartaggtcttattcttcctattttttttttgtgcccattaaccatctctacttttctgccaactcccactacccttcccagcctttggtagctatccttcttctgtctatctccatgagtgcaattgttttaatttttagttcccacaaataagtgagaacacttgaagtttgtctttctgtgcctagcttattttacttaacataatgacctccagttccattcatattgttgcaaatgacaggatctcattctttttttctggcggaatagtactctattgtcatatgtaccacattttcttcattcgttatctgttggacacttaggttgcttccaaatcttgggtattgtgaatagttgttcaataaa

SEQ ID NO: 461749 - DNA, 492 bp, Homo sapiens
gggtattcatcacctcaagcatttttttttgttacaaacaacccaattacactcttttagttatttaaaaatgtacaattaaattaatgtttactatagtcacctgttgtcctatcaaatagtaggtcttattcttcctattttttttttgtgcccattaaccatctctacttttctgccaactcccactacccttcccagcctttggtagctatccttcttctgtctatctccatgagtgcaattgttttaatttttagttcccacaaataagtgagaacacttgaagtttgtctttctgtgcctagcttattttacttaacataatgacctccagttccattcatattgttgcaaatgacaggatctcattctttttttctggcggaatagtactctattgtcatatgtaccacattttcttcattcgttatctgttggacacttargttgcttccaaatcttgggtattgtgaatagttgttcaataaa

SEQ ID NO: 461750 - DNA, 597 bp, Homo sapiens
ttttctgctttgttgatagagcacaacatattaagaaacaaaatggaaaaatcttttgagaaaatcagtaaggatggatttagttctcaaatgtataatcagaaaatttgtggagcactttgataacaatgttacaataattatggatatatgcatgttactaatagcatttaatttactccactatccaccacctggaaccacctgatctatttaacctctgagggggtgtgtaggtgggtattttatgctgtagtgatgtactatcaggaaaaaaatgggaaagacaaaaagggtcacttgggataggactcgagtagaatgagctggaaaatctttaaggaaagttgataggcaactttgatgggagraaagtagattgcttagagaaggactttatgtagtgttcaggcttatacattccttgtatgctatttggaagattgcacatttaaaatttgagtaattttgaaattatttgtttctggattgagttccctcaattatagcaccattccaagaggctagaggattacattaataacagcttgactgagtcatctatctgaagataacatggcttagttttttagttta

SEQ ID NO: 461751 - DNA, 582 bp, Homo sapiens
  misc_feature (1)...(582): n = A,T,C or G
tttgtaaaccctgcccttgatggatcagctggcaccacccagattgacaaactggcatatgtgatttagcacaagaagacagccacgattgtaaaatggcggagactaaaataaagtattgccacgcggttacagattatgtttccaaagacatgaaacaagatggagacctgnaggcaagttttccagcgaccgctttcttgggctggcttgaacagcaggcttaatggctcctgggcctgcatcctaacctaagacaccstttctccgacagaaccatatagaaagacatgcaaagtacacaagattgtctgcagcttaagaccaaccttacaaatcctttttcattaattatacatttacagagaacatcaacggtgatccttattatcccttttaccagtttgcacagggagagagaagccaaaagcccacctggtaagaaatgtttacccttttgccggccaggcttctgggttccctcgtccctagctcaactctacaccaagcattttaagatttggaaaattaacttttcccaggcaggttgtaagaacattatacaagagatagaagccattt

SEQ ID NO: 461752 - DNA, 590 bp, Homo sapiens
tgcatcactgtctttcctctcacatcatgggtctctgccttcaccctctcagatggtggctcagaggcatgtcttatctcttccaaacatgcatcatgccatgttatatttcttaaatgaatgaaaaccttgtttaaacaggggagcaatataatgatcacctcacctgtttaaatgactgtatgagtatgctttgtttatcatcattaaaagagtgtttacttggcaagttctactgctttatgaattactctacaataattctcccataatagktattagtcaatgaaaatgtagtttagtgactatttcatgtattttaaaattcaaggcaacagtttaataaaatgaaaaaggaatgggttttggagttagagcttagttctgattctaggttttctatttacttcttgtgtgaccttgggcaagatatatgacctcagatatgaagaactcagatgcctcatttatgaaatgagaataaaacctactttgttgggtcacaatgagaaaaaggcactaggttaaaatacctggcagggttctggcacagagtagacgacataaaaataattttttgcttcttttag

SEQ ID NO: 461753 - DNA, 590 bp, Homo sapiens
tgcatcactgtctttcctctcacatcatgggtctctgccttcaccctctcagatggtggctcagaggcatgtcttatctcttccaaacatgcatcatgccatgttatatttcttaaatgaatgaaaaccttgtttaaacaggggagcaatataatgatcacctcacctgtttaaatgactgtatgagtatgctttgtttatcatcattaaaagagtgtttacttggcaagttctactgctttatgaattactctacaataattctcccataatagttattagtcaatgaaaatgtagtttagtgactatttcatgtattttaaaattcaaggcaacagtttaataaaatgaaaaaggaatgggtttyggagttagagcttagttctgattctaggttttctatttacttcttgtgtgaccttgggcaagatatatgacctcagatatgaagaactcagatgcctcatttatgaaatgagaataaaacctactttgttgggtcacaatgagaaaaaggcactaggttaaaatacctggcagggttctggcacagagtagacgacataaaaataattttttgcttcttttag

SEQ ID NO: 461754 - DNA, 565 bp, Homo sapiens
cagggttctggcacagagtagacgacataaaaataattttttgcttcttttagacttttcgttttcctattttaaatcttctacttcagaattcrccggagatgttttattttattagatttaaagttgactttgttcgcattttgcaagaataagtcaaatttgcgttttcttaagatacaagataccagacattgagaatgcaaccatggagctggtgagtcagggcaagttttggctctggtgatatttctcttggctttttggtcatttaagatctttgcattttaatttcaaattctccaaatgttagcaaaactagcactttccagttctttacaaaaccgtttagaatttatattctagagaggactaaatgggtggcaacattttgaatacttgcaaaaacagtttgacaagttcagtttaaagaaaagggacacgagtaatgggcatgcaaacaaacttatgggtacaaattcaagctgcttgcctttttttccagaatgactggtttgcagttttaaaagacccaaacaaagaaccctttctatagagaataata

SEQ ID NO: 461755 - DNA, 565 bp, Homo sapiens
cagggttctggcacagagtagacgacataaaaataattttttgcttcttttagacttttcgttttcctattttaaatcttctacttcagaattcgccgsagatgttttattttattagatttaaagttgactttgttcgcattttgcaagaataagtcaaatttgcgttttcttaagatacaagataccagacattgagaatgcaaccatggagctggtgagtcagggcaagttttggctctggtgatatttctcttggctttttggtcatttaagatctttgcattttaatttcaaattctccaaatgttagcaaaactagcactttccagttctttacaaaaccgtttagaatttatattctagagaggactaaatgggtggcaacattttgaatacttgcaaaaacagtttgacaagttcagtttaaagaaaagggacacgagtaatgggcatgcaaacaaacttatgggtacaaattcaagctgcttgcctttttttccagaatgactggtttgcagttttaaaagacccaaacaaagaaccctttctatagagaataata

SEQ ID NO: 461756 - DNA, 418 bp, Homo sapiens
ggcttattatgaatatcaaaagacatttctctttctcctattactcagacagttacaagggtttcagaagctcttgcaccaggaactgggaacaaagaccaaatatatatgtyttcttctattacaatgtcacaggtgtgacagagtaggtaaatggagtctcagagagtccccagagtattccatggagccacaaaatgaagaataaatggatggttctccccatgatcaaaagtggcctgaaaatacttgagaatgagtcataacttaaaaggctgtatagtagaaaagaatgcacagaggaccgaatgtaaaagaaggcaccccagtctcagctagtgtggatgcatgccagtgtagaaagatgctagtgtggctacattggtgcactgaagaccaaactcctgcatggccccac

SEQ ID NO: 461757 - DNA, 418 bp, Homo sapiens
ggcttattatgaatatcaaaagacatttctctttctcctattactcagacagttacaagggtttcagaagctcttgcaccaggaactgggaacaaagaccaaatatatatgtcttcttctattacaatgtcacaggtgtgayagagtaggtaaatggagtctcagagagtccccagagtattccatggagccacaaaatgaagaataaatggatggttctccccatgatcaaaagtggcctgaaaatacttgagaatgagtcataacttaaaaggctgtatagtagaaaagaatgcacagaggaccgaatgtaaaagaaggcaccccagtctcagctagtgtggatgcatgccagtgtagaaagatgctagtgtggctacattggtgcactgaagaccaaactcctgcatggccccac

SEQ ID NO: 461758 - DNA, 438 bp, Homo sapiens
ctccttgccccggatcccagaaaatgtagcatcagtatatgcgcttcttctagcaggcttccagatccctaggcatcctgtatattcacttcaatcttgacttcaaccattttcttccattgtcattttttcttgattccattgatcatatttttagttttttttctatcttttcttagtatattgcacggatttttaaaagctattttcaataatttatgaatgtgagcatgagaatctcgagagcagtcaaggctttgacctttcaatgttacatgtcctctgagtctaggggcccctgtgttctgtaagctgccgccatatacagttaatttgctcactcaaaatttgctcactgttctcgctacaggcattttctgtgcggacaaaatagtattttaccaccytccccagggaggacgtgaaacatggttgctc

SEQ ID NO: 461759 - DNA, 610 bp, Homo sapiens
aattaacaagtgttgatgtagatgtggaaatattggaatgcttgttcattgttagtatgaatgtaaaatggtacaaccactatggaaaacatatggtagttcttcaaaaatttagaagtagaactaccgcatgatccaggtattccacttctgggtatacacacaaaagaattaaargcagggggaagccgaggcaggcggatcacaaggtcaggagatcgagaccatcctggctaacacggtgaaaccccatctctactaaaaatacaaaaaattagccgggcgtggtggcgggtgcctgtagtcccagctactctggaggctgaggccggagaatggtgtgaacccgggaggcagagcttgcagtgagccgagatcgctccaggtgaagcgagactccgccccaaccccccccccaaaaaagaattaaaagcagagtctcagaaaggtgtttgtacactcatgttcatagcagcgttattcccaataggcaagaggtggaagcaacctaagtgtccatccatggataaatgaaacatggtacgtttcattgtacaatgaatgtacaatggaaaattatttagccttaaaaaggagggcaatactgaca

SEQ ID NO: 461760 - DNA, 610 bp, Homo sapiens
aattaacaagtgttgatgtagatgtggaaatattggaatgcttgttcattgttagtatgaatgtaaaatggtacaaccactatggaaaacatatggtagttcttcaaaaatttagaagtagaactaccgcatgatccaggtattccacttctgggtatacacacaaaagaattaaaagcagggggaagccgaggcaggcggatcacaaggtcaggagatcgagaccatcctggctaacacggtgaaaccccatctctactaaaaatacaaaaaattagccgggcgtggtggcgggtgcctgtagtcccagctactctggaggctgaggccggagaatggtgtgaacccgggaggcagagcttgcagtgagccgagatcgctccaggtgaagcgagactccgccccaaccccccccccaaaaaagaattaaaagcagrgtctcagaaaggtgtttgtacactcatgttcatagcagcgttattcccaataggcaagaggtggaagcaacctaagtgtccatccatggataaatgaaacatggtacgtttcattgtacaatgaatgtacaatggaaaattatttagccttaaaaaggagggcaatactgaca

SEQ ID NO: 461761 - DNA, 610 bp, Homo sapiens
aattaacaagtgttgatgtagatgtggaaatattggaatgcttgttcattgttagtatgaatgtaaaatggtacaaccactatggaaaacatatggtagttcttcaaaaatttagaagtagaactaccgcatgatccaggtattccacttctgggtatacacacaaaagaattaaaagcagggggaagccgaggcaggcggatcacaaggtcaggagatcgagaccatcctggctaacacggtgaaaccccatctctactaaaaatacaaaaaattagccgggcgtggtggcgggtgcctgtagtcccagctactctggaggctgaggccggagaatggtgtgaacccgggaggcagagcttgcagtgagccgagatcgctccaggtgaagcgagactccgccccaaccccccccccaaaaaagaattaaaagcagagtctcagaaaggtgtttgtacactcatgttcayagcagcgttattcccaataggcaagaggtggaagcaacctaagtgtccatccatggataaatgaaacatggtacgtttcattgtacaatgaatgtacaatggaaaattatttagccttaaaaaggagggcaatactgaca

SEQ ID NO: 461762 - DNA, 507 bp, Homo sapiens
agttaggattctaccacttgccactaaacaaattctgactaatatacctgaaacacctaatgtatacctgtggggaatgtattttttaaacaatattaataataatcatttagtaccatgtaattacatagtgcattgctgtttaaaaagttctttcctatgttactttatgtgattgtaatgagaaagccatgagaggaagggcaaggctgattcgactgcagatggctatggctttctatatctttgaataatattttacttttcttttatgtcaatgtgaaatataagatgaactaaggtaagaacatctggttgttcgtagtagtggaagatgctcgcattctttcattgcctttaattgaaacttgctcctgtaacctcaggagaamtgaagagataaagacctgtcctctgacttcctcagagaccctttctgcagcatgtgctgtcactaagatgacacaatccatccacaaagcatacgaaagtgttcaatgacaatgt

SEQ ID NO: 461763 - DNA, 507 bp, Homo sapiens
agttaggattctaccacttgccactaaacaaattctgactaatatacctgaaacacctaatgtatacctgtggggaatgtattttttaaacaatattaataataatcatttagtaccatgtaattacatagtgcattgctgtttaaaaagttctttcctatgttactttatgtgattgtaatgagaaagccatgagaggaagggcaaggctgattcgactgcagatggctatggctttctatatctttgaataatattttacttttcttttatgtcaatgtgaaatataagatgaactaaggtaagaacatctggttgttcgtagtagtggaagatgctcgcattctttcattgcctttaattgaaacttgctcctgtaacctcaggagaaatgaagagataaagacctgtcctctgacttcctcagagaccytttctgcagcatgtgctgtcactaagatgacacaatccatccacaaagcatacgaaagtgttcaatgacaatgt

SEQ ID NO: 461764 - DNA, 571 bp, Homo sapiens
ccactgttgcaaatgagtacttggcctgtctgatttcataataccttggcaggattgggtatcactggaagttgctagctatagctagtttatgaagcttcatgaccaaaaggaaatgtggaggcatcaggaattttcacaaagcatgacaaatcgtatccatcaaatttggtaataaagtaactattttgtcatgtaggtactgatggagtaagccagaactggagcaaataatttaattcaaaacttctttccccttattcaataatgtatacatgagtctatataactcgttaacamacaataatgtaaaatttgttcttaaaaataagcatattgcttcatttaacatcttggagtttgctttcatacaaccctttctacaaagacaaggcttaagacataaatttgtaatttggggttgtaatgaaagtaaaacagttgtaatgtcatctttatgaactgccctaaaatatgtctgtccaaaggcaaaatatatataataaaatctttcataacagtacaaaacaatatttttgatttcatgtctgggatgatataaagtttctta

SEQ ID NO: 461765 - DNA, 429 bp, Homo sapiens
atttaattcaaaacttctttccccttattcaataatgtatacatgagtctatataactcgttaacaaacaataatgtaaaatttgttcttaaaaataagcatattgcttcatttaacatcttggagtttgctttcatacaaccctttctacaaagacaaggcttaagacataaatttgtaatttggggttgtaatgaaagtaaaacagttgtaatgtcatctttatgaactgccctaaaatatgtctgtccaaaggcaaaatatayataataaaatctttcataacagtacaaaacaatatttttgatttcatgtctgggatgatataaagtttcttatgcttgaaatgacattgaagtaaactgccagaaaagacttctgaggttttatttatttattttttttgacaaggacaaacccatgacattt

SEQ ID NO: 461766 - DNA, 504 bp, Homo sapiens
tcacatctttatttcctcaccaagacttaccatcagctgcataagaagctcagtgggcacataaaaaggcatacagaagtgggcagacagaaggcaagaagaaatattaccagtatggcaggagaaagaattggagttccagtgccagttctttcagtaattaaatatgtttacatcattttctttatttctgtaatgtgatatttggttagaattagtccatgtttcctctacctctgcaatactatgatttagacaaattagagattgtccagaagttgagcctcaggatggttaatcttaatggatgaacagattgaaattgaattgaacataggcaggagaaaatggaggagaagctattgtaatatgcaggtcaagataacctggagaaaggaggaaagakaattttatggagttagagagacagaataattgccacctgccaactggttgagtgtgatgcaagggaaacaaaagaaaaggaaataaactcaactctga

SEQ ID NO: 461767 - DNA, 504 bp, Homo sapiens
tcacatctttatttcctcaccaagacttaccatcagctgcataagaagctcagtgggcacataaaaaggcatacagaagtgggcagacagaaggcaagaagaaatattaccagtatggcaggagaaagaattggagttccagtgccagttctttcagtaattaaatatgtttacatcattttctttatttctgtaatgtgatatttggttagaattagtccatgtttcctctacctctgcaatactatgatttagacaaattagagattgtccagaagttgagcctcaggatggttaatcttaatggatgaacagattgaaattgaattgaacataggcaggagaaaatggaggagaagctattgtaatatgcaggtcaagataacctggagaaaggaggaaagataattttatggagttagagagacagaataattgccacctgccaacyggttgagtgtgatgcaagggaaacaaaagaaaaggaaataaactcaactctga

SEQ ID NO: 461768 - DNA, 394 bp, Homo sapiens
actccagcttagatgacagagcaagactccatctcaaaaaaaaaaaaaaaaaaaaaaagtgagggtaaggcagaggagagaatggagctgtataggaccagaattttatttgtgtctttaaagacagagtgtctctgtttcccaggctggagtgcattggtgtgatcatagctcactgcatcctcgaactcctggcctcaggcagtcctcccgcctcagcctctcaagtagctaggtctacaggtatgcaccaccacagccaactaattttattttctgtagagacaaggtctcactatgttgccctgacctcaagcaatcctcscatcttggcttccatattcctgggattacaggcgtgagccaccacgcctggccaggagcacagttttgt

SEQ ID NO: 461769 - DNA, 610 bp, Homo sapiens
ccgcacatttataaaatgtgactataccctaaaaactaacaaggttttgaaattctctgattttcctaataagatagtcacaaaatattagatatgttattttcatgctgtcagctgccatttactatataagactgccactggtacaacttaacattatagttactaaaagttattgaaagattagttgaccaaaatgtaacaaataatgttttcaacagtaagagcattttttctatgatgctctaattcccattaaaattcattatagaaatattttatacattaaacaagtacayttgaagtcaaatcaagcaagtcctagaacattggtgtatgtatccattttcataggcttaagaggcccagatgataagtattttcaaatctacctactataacatgtatattacatatataaggaaagcaaaaatgtttatggaccatttatggaccacatgaaaatgaacagtataaacaccattataggttcagtaattgtttactacttctattttgcaacaaagtcaaaaatttaaaaatcctaatgagtggcagaattgtataacagaaagaatgctgaacttatacaacctggttttgataccaa

SEQ ID NO: 461770 - DNA, 605 bp, Homo sapiens
caacagtgaatatcacattcaatcttgagaggctgaaaccatttctctacaataaggaacaagacaaggatgcgtgctcttaccatttctaccacttctattcaatatagcagcagttctcaacctttctggcaccagggaccggttttgtggaagacaatttttttaggacttgggggtgggatgaggggaatgatttcaggatgaaactgttccacctcagatcatcaggtgttagattctcataaggagtgcacaacctagatccctcacatgtgcagttcacaataaggttcaagctcctatgagaatctaatgctgctgctgatctgacaggaagcggagctcargcattaggtactgctcacttgcccatcactcacctcctcctgtgcagcctggttcctaacaggccacagactggtactggtccgtggcccagggtttggggatccctgcaatatagtagtggaagtcctagccaaagcacttaggcaagaaaaagaaataaaaggcatccagattcaaaacaaagaaataaaatctgtttgcaaataacatgctcttatatgtagaaaaccctaaagattccaccaaaaaacaat

SEQ ID NO: 461771 - DNA, 627 bp, Homo sapiens
ttatttgacaaagagaaatgattttttttctccaaatataagaagccattaatgacattccccctctctgttgctgttttgggaacacctgcaaatcctcctagcatcacgagatatccttttgtttcatggtaagactttttaaaaagactccgataacttgagagctgtgtcccattgactctactctcctgaaacctggctgcaaaagtcatccatgagccttgcatctcaggcccaggtcaggagagaccgtgttacaagaaggtcttcttcaaaccctgagtcatagcagatcctgttatggccaggacgccggatgcctcctcaaggtggaaaggtggaaaggatatctctggctggatgattcagtccactcaagagccaggacaagagtaagmagaagacataacagagagcaataagtgctccctggagaagtctgctccccgccattctagaatgcagaaaacctaagtggtcaacagtctggtcaagcagatttagaatgttgatgcaggctgcctttccagatcctttaccaattcttccaagccccaactgccccctctcctaagatcttcatgcactcatcaggccctgaccctgcctctcgcctcaggattc

SEQ ID NO: 461772 - DNA, 603 bp, Homo sapiens
cctgacttattttactgagcataatatcctctatattcatccatgttgctgcaaaagacataatttcccctttttaaaggctgaatagtattcttgtgtgtgtgtgtgtgtgtgtggatacacacactatttttttaatccactcgtccactgatgggcacttagkttgtttccatgtcctggctattgtgaataatgcaatgaacacgaagtcacaagataccttttcgacatttcaattcttttggctatatatccagaagtgggattgctggatcatatggtagttctatttttagttaccagctgagttcttgaaccatgcttataaaggtttaggcttttttttaatggaatgtattctttgtaactgaaaacttttagaaaccattatggcacctctagtaggtttagctagagctcagtaatggacattgggcctccagggacagggaacattggcattcttttatctattgtcacttcctatttcaagcaggcaagtgagtggaaagagaggggaaagattaaagaaaatgtgtgtaccgtgctctccagtatactttggatcaatgcatgaagccatttgtggctgggaaactc

SEQ ID NO: 461773 - DNA, 603 bp, Homo sapiens
cctgacttattttactgagcataatatcctctatattcatccatgttgctgcaaaagacataatttcccctttttaaaggctgaatagtattcttgtgtgtgtgtgtgtgtgtgtggatacacacactatttttttaatccactcgtccactgatgggcacttaggttgtttccatgtcctggctattgtgaataatgcaatgaacaygaagtcacaagataccttttcgacatttcaattcttttggctatatatccagaagtgggattgctggatcatatggtagttctatttttagttaccagctgagttcttgaaccatgcttataaaggtttaggcttttttttaatggaatgtattctttgtaactgaaaacttttagaaaccattatggcacctctagtaggtttagctagagctcagtaatggacattgggcctccagggacagggaacattggcattcttttatctattgtcacttcctatttcaagcaggcaagtgagtggaaagagaggggaaagattaaagaaaatgtgtgtaccgtgctctccagtatactttggatcaatgcatgaagccatttgtggctgggaaactc

SEQ ID NO: 461774 - DNA, 557 bp, Homo sapiens
aggcaaattggctgagctcaggagttcaagatgagcctgggcaatgtggcaaaactctcatctctacaaaaagtacaaaagttagccaggtgtggtggcacactcctgtagtcccagctacttggagggctgaggtgggaggatcacttgagctcaggaggttgaggctgaagtgagcagtgttcaccccactgtactccaatgggtggcaaagcgagatcttctctcaaaaaatatatataaaagaaaaactgacaggaataaaaggagagacagaaaaatccatagtaataattggagattttaacaaacctttcttagtaactgacagaataagcacacacacacacaaaaatcaataaagctatagatgtttttgacaacaattaacaatttgacctaattaacatatgtagaacatgctacagtaattgtaagrtatgtcccactttcaagtgctcataaaatttttattaaaatagaacatactctgggcaatagataagtttaaacaaatttcagatggtcaacggatttaaatcatacaatgtatgtct

SEQ ID NO: 461775 - DNA, 449 bp, Homo sapiens
ttctcccattctatagataatctgtttactctgttcatagtttcttttcaactctgtttactctagtcactgttttatctccagcacctggaacagtgcctgacacataatggtcacccaataaatatttatcctatgaataaatgaatgtataagaaagtccctctgtttttctaggtataacaaatttcatctcaggctgataaacaggtaatataaattacatttcttaagtgaaattcatgttgttttgcaaactgcatgttgaatccattattcattttggatatatctcttctaaaaagaagcaaataaggacaattaaatttagaaaaytggttttcgagtaaaacataagaagcataaggagagatcagtcacccaacaggtatatctgaatgccttccatttgtctagctctatgatatgcactatggggagcaggcaca

SEQ ID NO: 461776 - DNA, 547 bp, Homo sapiens
ctaacaataagttctttctaaattgttttttayggtgaaaaaaaaaagctgggaaaaagtcactttctatgctgccaccttaccctattgtcatggtcagactatgttgccttggtaacaacatcagataaaatatgctgctttacccacctgtgatgtcatagcagatggcattatcttggcagcagaataaaatagcctctctctgaacttgctatttggactgtctcagaaacctcattcatagaagaatatcacacaatgtctatttcaaatgtggtaccatttcaggccctaaatttctccagagcacatctctctcccttcatgccaatcaacacaggactggaatatagccggttgggaggaacaggggtccctgggttcctgtagttgatatatttgttgcttacacagtgtccattctctctatacttccttctttctaattctgtttagagattcagccctcttgcagtcatatttgtgactcagaaaaactgaaggcatatgcactctggaaacagatcataactaagccaatcac

SEQ ID NO: 461777 - DNA, 619 bp, Homo sapiens
caccacaatcatgtcgattcttcatttcatgcctttcttcctcccactgatgcattcaccacaaactcctcatgtgcctcacctactaatcaaaaacattggctggtccagcacctaccacaaggggagcagtgtttcttaagctctgtggtgcataagaatagaactttaaaaatatgtatatttwactgctgtgtgtttgtggagaaagttgaagcaggaagagggaagagtgaagctttattatgggaagcacaagtagaatttccattctactccatctaatttcgctggctgagtactaggctgaatactagatcttggtgagcttaaaagagatctagaaacccaaagctacaaatatggaagagtttgaaaagcaggctattttatctataaaaatagaagtgatttcagatgctagaagggagtgtgcagtggtttctaaattctagtggacatgagaatttcaccaagaacttatttgacttacttatacaagtaattataaatcagttgatctggatcaaagcccacagatctgtgttttaacaagcattctgagattatctgattgagaattgctgaaataggaataagaccttatagctttaatgca

SEQ ID NO: 461778 - DNA, 609 bp, Homo sapiens
actttaaaaatatgtatatttaactgctgtgtgtttgtggagaaagttgaagcaggaagagggaagagtgaagctttattatgggaagcacaagtagaatttccattctactccatctaatttcgctggctgagtactaggctgaatactagatcttggtgagcttaaaagagatctagaaacccaaagctacaaatatggaagagtttgaaaagcaggctattttatctataaaaatagaagtgatttcagatgctagaagggagtgtgcagtggtttctaaattctagtggacatgagaatttcaccaagaacttatttracttacttatacaagtaattataaatcagttgatctggatcaaagcccacagatctgtgttttaacaagcattctgagattatctgattgagaattgctgaaataggaataagaccttatagctttaatgcaccgtataatgtggacattgcaagaagctaagaggaaaataaattttttaattaaaaaattctaatttctctagggcaattcctagaatataaatattgtaaattatttcctaaaaccaaaccaaaaaaaaaaacaaaatttctctctgctcttct

SEQ ID NO: 461779 - DNA, 609 bp, Homo sapiens
acctaacacataaggactcacataaacttaaggaaaagggatggaaaaagatattccatgcaaatggacaccaaaagtgaggaggaatagctattcttatatcagataaaaacaaactttaaagcaacagcagttagaaaaaacaaagaagggcattatatataatgataaatgaacttgcccaacaggaaaatatcgcaatcctaaatatacatrcacctaatactggagctgccacatttataaaacaattaccactagacctaagaaataagatagacagcaacacaataatagtgggggactttaatactctgacaacactagataggtaatcaagacagaagtcaacacaaagaaacaatgaatttaaatataccctagaacaaatggacttaacagatatttacagaacattctacccaacaactgcagaatacacattctattcatcagcacatggaacattctccaagatagaccatatggtaggccacaaaacaagtctcaatacatttaagaaaattgaaattatatcaagtcctcactcagatcacagtggaatacaactggaaatgaactccaaaaagaaacctcaaaaccatgcaa

SEQ ID NO: 461780 - DNA, 572 bp, Homo sapiens
tttatggttaaaaccctcagcaaaacctacatcaaaggtacataccttaaggtaataaaagccatctatgacaaacccacagccaaaattacactgaatggggaaaagttgaaaccatttcccctgagaactggaaccaaagatgcccactctcaccatttctattcaacatagtrctggaaatcctagccagagtaataagacaagagaaagaaataagggcatctgagttgataaagaggaagttaaactgtcgctgtttgctgatgatatgatcatattcctagaaaactctaaagactactcccaacagctcctagagctgattaatgaattcagcaaagtttcagaatacaaaattaatgtatacaaatcagtagctctgctatacaccaacagcaaccaagctgagaatcaaataaactcaaacacttttataatagtttaaaaaaataaaatacctaggaatctatctaaccaaggaggtgaaagacatatgttggtgaaagaccactatgttggttactgatgaggggcttgtataggtcaaggatactgacctaaaccatttc

SEQ ID NO: 461781 - DNA, 574 bp, Homo sapiens
gaaaactctaaagactactcccaacagctcctagagctgattaatgaattcagcaaagtttcagaatacaaaattaatgtatacaaatcagtagctctgctatacaccaacagcaaccaagctgagaatcaaataaactcaaacacttttataatagtttaaaaaaataaaatacctaggaatctatctaaccaaggaggtgaaagacatatgttggtgaaagaccactatgttggttactgatgaggggcttgtataggtcaaggatactgacctaaaccatttcatagctcagatgatccatatgtcacctgtgttcttagctgaaaacacagaatccacmcttactaggttaaacagaaaagaaatttaataaggatcttaggaagtgcatggaattccaaggacggccaaagattcaggctcaaaatccccttgtggaggaggtgtccacaccactgccactgctggaaacaaatacctcagctcataccaatgatgctagaccagggaagcctgaatctcagccaatactataccccaaaactggaaatctcctttgttaaaattggag

SEQ ID NO: 461782 - DNA, 591 bp, Homo sapiens
gctttgttactgagttattgagactcaagctgttttggcctggagagatactaattacagaatctttttagatagasttgaatatttagatacactcctgacagcttccataaacactagagtaaatttcccggtaatgcaaaagaaaccctatgaaatctgtcactgttggaaacaagtaagttgtgtactggagaagggatatgtatttccagtcattgatcagtcatttgtgaaaatgtattaagaactaattacaagcttgcaccctgcttggggcagatctatttatagaaaaaatgtggttgtcatggaaaacacagatcactatagtccccccacacccaaacgaggagctaaaagccctctgaccaaattattttctctaggcaaaaagcctaggagctttgagactgttctaaaactaggcttgtggttttatgtattaccttctcattccaattctgaaatgtgcttgctatttaatcaaggcccttctgatgaagagaaagataatggtgtaagcagagacagcatacccttcaaggtccatgctgccttcctagagggtgcaaatccacccttgtcttt

SEQ ID NO: 461783 - DNA, 591 bp, Homo sapiens
gctttgttactgagttattgagactcaagctgttttggcctggagagatactaattacagaatctttttagatagagttgaatatttagatacactcctgacagcttccataaacactagagtaaatttcccggtaatgcaaaagaaaccctatgaaatctgtcactgttggaaacaagtaagttgtgtactggagaagggatatgtatttccagtcattgatcagtcatttgtgaaaatgtattaagaactaattacaagcttgcaccctgcttggggcagatctatttatagaaaaaatgtggttgtcatggaaaacacagatcactatagtccccccacacccaaacgaggagctaaaagccctctgaccaaattattttctctaggcaaaaagcctaggagctttgagactgttctraaactaggcttgtggttttatgtattaccttctcattccaattctgaaatgtgcttgctatttaatcaaggcccttctgatgaagagaaagataatggtgtaagcagagacagcatacccttcaaggtccatgctgccttcctagagggtgcaaatccacccttgtcttt

SEQ ID NO: 461784 - DNA, 538 bp, Homo sapiens
tgtgctgtatcttgcggtgtgtgtgtgtgtagtgtttaatatttttgtgcttggggttctctcaaatttttggatctgttgtttgtcatatttcattattttgggaaaaatattggctgttatctcttaaagtactttttctgtttaattttctatcttcttccagggttctaattacatgtatattagaccacttgatagtattccagagttcctgtattctctgtctcttttcctttttcactctttttttctcttygtgttttactttgggtgatttcttcaagttcagtgattctttcctcagctatattgattcttctgataatttcattaaagtaatttttcatttctgttgcaatgatttttactttaagcttttctatttgtctttctctttattttcgattctctagacagacatttcccatctattcatacatgttgtccctattctctcctagagtgtttaataaattaatcatagttaatttaaattcctgcctgatagttccaatatctgggtagggtctgagtt

SEQ ID NO: 461785 - DNA, 538 bp, Homo sapiens
tgtgctgtatcttgcggtgtgtgtgtgtgtagtgtttaatatttttgtgcttggggttctctcaaatttttggatctgttgtttgtcatatttcattattttgggaaaaatattggctgttatctcttaaagtactttttctgtttaattttctatcttcttccagggttctaattacatgtatattagaccacttgatagtattccagagttcctgtattctctgtctcttttcctttttcactctttttttctcttcgtgttttactttgggtgatttcttcaagttcagtgattctttcctcagctatattgattcttctgataatttcattaaagtaatttttcatttctgttgcaatgatttttactttaagcttttctatttgtctttctctttattttcgattctctagacagacatttmccatctattcatacatgttgtccctattctctcctagagtgtttaataaattaatcatagttaatttaaattcctgcctgatagttccaatatctgggtagggtctgagtt

SEQ ID NO: 461786 - DNA, 585 bp, Homo sapiens
gtaattttaggaagtgacagggtccaaggtgaccaagtgattatgtcctcaggagaaatggcagcaatgagacacctgtggttgtcctcaacctccaaaccattctccacatacccatgacctgaccctaatctcaaaacccaacctggcaagctctggggaaggtagtgcttagagacaatttgagatgaaggttgaagagagacaaagaatctgggcccagggagacaaagtcatytgggcccagggagaatgtggattttggggaaccaataggtggacatgggtcaacagggagaagagtgcactgttccattttttcctggatatgacaatcaactggaaatgatcagagggaggggttgttgatgttgaccaggccattgaacaagaggcatgtgcacaaattgaaaagtcagtccaccttactctttctgcgagtgggaacgcttaggtccagagggcaagagaacagaactgggatcacaggggcctggagcaggtgtctcctgtccagagctttgaagttggtccacttctacaaaagtatgtctgtgtttgggagtgttacttattcttctgtcc

SEQ ID NO: 461787 - DNA, 448 bp, Homo sapiens
caacagagaggagacagcctactctattacagctgcccacccagcacctgccttctcaagcaactgcctctgtcgaagctgtaagttcaarctatatgttcctattgctgctaattaaagaacttctgcacttagtctaagcacttcctctgtagcctgtctcctcacacaactccagtggctttctctctattccggtgcagtgaatagagtcagcagcaaacatattgtgtacaacacacccagagtgcattgatgagtcatagagtgctttgctcttccattcaacaacccaaagttgaagacctccaacaatgttcaaaaccaaaaggcaaatacatggaattcagtctggctagtttggtggagggtgtttgagcttggaaatgaatggataaataaagtggcagacagattgcttttattcactgtgaggaagatgcaggtg

SEQ ID NO: 461788 - DNA, 648 bp, Homo sapiens
ctctctctttcatggagagcaatctttctgagtttaatttgctaaaagcgatgacatataagatgagagacagttggttccaagatggccaaataggaacagctccggtctgcagctcctagcgtgaccaatgcagaagacgggtgatttctgcattgccaactgaggtacctggttcatctcactgggactgtttggaaagtgggtgcagccaacagagggtgagccgaagcaggacayggcaacgcctcactcaggaagtacaaggggtcaggggatttccctttcctagccaagggaagctgtgacaggctataccagaaaaattgggacactgccacctaaacactgtgcttttccaatggtcttagcaaacggcacaccaggagattatatcctgcgcctggctcagtgggtcccacgaccataaagccttgctcactgctggtctgagatcgaactgcaaggtggcaagcctggctgggggaggggtgtccaccattgctgaggcttgagtaagtaaacaaagcagccaggaagctcgaactgggtggaacccaccatagctcaacaaggcccacctgcctctgtagaccccacctccgggggcagggcatagctgaacaaaaggcagcagcaacttctgca

SEQ ID NO: 461789 - DNA, 563 bp, Homo sapiens
ctgtggaaaaaatcattcccttttaatatccttatggaaataaacttgtgcattcgcacaacatctccttactgtctatagtacccattgctttaaaaagaagagaatgaataaatatattctcttttattttctaaacaatttttggaggacagaaagggttttgagtgcttttcatgggatgttcatttaatctgcacgtgcctatgaggtaggtcctatcactgttctcattttggaaatgagttaaccaaggctcacagaaattagtgagttgmtcaaagtcatacataactagcaattggcaaaacctggatgtgaactccgggctatctgacttcagaacctggctcaaagttgtgacataattctgcctttctctaggaaagcttcctggattctcctccagaaaggttggacttggtgcctctgctctttggtccaacaatacttgtacctccttcagtcacagcacttgttgcacggtactgtagttttccacatatatatctctatcttatttactcttctctgagctccttgtgggcaaggacagtgttctg

SEQ ID NO: 461790 - DNA, 524 bp, Homo sapiens
tgattaatttctttgttgactaagaaaagattctcatttcccacttccagagttgctacttcatttacttcagttggcagtagaaaaggtgattaaattgttgaccactcatgttctcttttgtagcatatttgagtttgtctacttcaaaaagtagaacaggagcataatcttggtgacagagtttctgggatctgtagctacgcatctcctcaggtcattgcttattgtatctgcctgactcagggaaagttccaccacactgaatgttgccaagccacaaactgatagaacaccaccattttcgtcgatagagcaatttgctaaaaagtctttcagcaaatgatttgttataactgagcctaaatgtacagaacaccctgggcttctatttgtttttaccttatgcaattgtgttgtcaaataatagttagataaattaatatcagttcttaaaaattgcctcaaataagacraaacaaagaccttacagcagtttacagcagtttgttctctactcttaa

SEQ ID NO: 461791 - DNA, 577 bp, Homo sapiens
tcatcctgtgtaactgaaactttgtaccccttgaccaacataccctatttccctttctcactggctccaacactattcacaatagccaagatgtggaaacaacctaaatgtccattgtattagtgtgttttcacactactataaagaactacctgagacttggtaatttatggagaaaagatgtttaattgacccacagttgtgcaggcttaacaggaaacatgactgggaggcctcaagaaacttacagtcatggcagaaggtgaaggggaggcaagcatgttttaccatggaggaacaggagagagagagagaaagggagamgtgccacacactttcagacagccagatgtaatgagatctcactcactatcatgcaaacagcaagggggaaatctgcccccatgatccaaccacctcccaccacatccctcccccaacactgagacacacacgtgcgcgcacacacacacatacacacacaggcatactatttagccttataaaagaatgaaattttgtcattttcaacaatatgaacatgaacttgtaggccattatgctaagtgaaataagc

SEQ ID NO: 461792 - DNA, 577 bp, Homo sapiens
tcatcctgtgtaactgaaactttgtaccccttgaccaacataccctatttccctttctcactggctccaacactattcacaatagccaagatgtggaaacaacctaaatgtccattgtattagtgtgttttcacactactataaagaactacctgagacttggtaatttatggagaaaagatgtttaattgacccacagttgtgcaggcttaacaggaaacatgactgggaggcctcaagaaacttacagtcatggcagaaggtgaaggggaggcaagcatgttttaccatggaggaacaggagagagagagagaaagggagaagtgccacacactttcagacagccagatgtaatgagawctcactcactatcatgcaaacagcaagggggaaatctgcccccatgatccaaccacctcccaccacatccctcccccaacactgagacacacacgtgcgcgcacacacacacatacacacacaggcatactatttagccttataaaagaatgaaattttgtcattttcaacaatatgaacatgaacttgtaggccattatgctaagtgaaataagc

SEQ ID NO: 461793 - DNA, 619 bp, Homo sapiens
tgcagcatacacaaggccgcttgacttgatgaaggtctcaacaaatttaaaataatcaaaaccatatagtgtcttctcaggccacaatakaataaaactagaaattaacaagaggaagtttggaaaccatacgaatatgtggaaattaaacaatatggtactgaatgaccattgggtcaaaagggaaattaaggaggaaatttttttgtaaaaaaaaaatgaaaatggaaatacaacataccaacacctatggaatacagcaaaaacagtactgagaggatagttttagcaataaacacctacatcaaaaagtagaaaggtttaaaacaatctgtcaatgcacctcaaagaagtagaaaagtaagaatgagccaaaccccaaattagtagaaggaaagaactattaaacatcagagcagaagtaaataaaatacagactaaaaaaacacaaaaacaaacaaaatcaaagtttgactttcttaaggataacaaaattaataaattgctagctagactaaccaagaaaaaaagagagacaacccaaataaaatcaaatattaaaaaggagacactacaactgataccatagaaatataaaagactattagagatcattatg

SEQ ID NO: 461794 - DNA, 583 bp, Homo sapiens
ttttctttgctttatttattttcctcattctccttatccagtcattcttcagatcttgttaagtttcccttcacagtgactctaaaaaatactccattcttttatcttcatcttcactgcccctgccatataacagcctctcgtaattgctcatatttactgttggcacctctgcctctagtcttatccacctttattttatcctccacacaagkatcagtgccttctttcctaaataccactttcatcataccactgccctactttaatccaaccatccaaccaaccaaccaactaacacctactgtggttctcagtacctttagtaaagtaaaagtcaattacttattttggcagtcaaggtccttcacaatcttgtccctgacttcctttaaaactttgtattgtgttcatctccaaaggacctccttcactccaccaatttgaaatggccaaaatgctccatttgccatctctgtactcatgctgtcatctaaattgaaatgtagttgctttgcactcattgcttaccatttattgatattgctttccatccattgcagcctaatataacccccacttg

SEQ ID NO: 461795 - DNA, 467 bp, Homo sapiens
aaggagagggattatatagcaattggtagaaatattggagaccatcttcgagttttgccaaccatagtcttccctctggccaccaatgactcacatcccttctaagtgcaaaatgcattcaccatgttcctacgagtttcatcccatcrtagcatcagcctggtgtctcatcatctaaatctaagttttatccacttgtcagctgaaaatccaaaatctcatctaaatctcgtcagctaagagatcaaaatctcatcatctaaattatgtatattaggtacagatggggcttcctttccatctgttgagttctttacacacattattatatttaattctcaagacaatcctctgaataaattttcatcatcttcatcttatagataaggaaactggagcattgagaagttaactaacttacctacagtcatttagagattaagtttcaaagctaaatcttgaaccca

SEQ ID NO: 461796 - DNA, 467 bp, Homo sapiens
aaggagagggattatatagcaattggtagaaatattggagaccatcttcgagttttgccaaccatagtcttccctctggccaccaatgactcacatcccttctaagtgcaaaatgcattcaccatgttcctacgagtttcatcccatcgtagcatcagcctggtgtctcatcatctaaatctaagttttatccacttgtcagctgaaaatccaaaatctcatctaaatctcgtcagctaagagatcaaaatctcatcatctaaattatgtatattaggtacagatggggcttcctttccatctgttgagttctttacacacattattatatttaattctcaagacaatcctctgaataaattttcatcatcttcatcttatagataaggaaactggagcattgagaarttaactaacttacctacagtcatttagagattaagtttcaaagctaaatcttgaaccca

SEQ ID NO: 461797 - DNA, 542 bp, Homo sapiens
ttggttttggtgctatcaagcgggttcccaggataccctcataaattgttcttttccatttttatccacacagaagcctgagagatacttttacaatgtaaataagatgatgttactgctttgctcacaaccctcccatggctccccatttggttctgagtaaaagccaaagctctaataatggctttcattctacaggatctgtcccctggctattttttctgatcttattccmgtctcccccttaccccttccattctatccacagaggcctcctttctatttcacaaatgcaccagatacacctccatcttagggtatttgtattttctttcctactgcctggaatgtttttctgccaaatatcaacataaataccttcagtctctgctccaatgtcaacttgcctaagaggccctccctgataaccctaaatgaatcttgcataaatgtgccaaattcagtgccttcctcttatccctgccatacgtacacacacaggcacaaacacacggattcagtcatttctctctgaaagcaga

SEQ ID NO: 461798 - DNA, 561 bp, Homo sapiens
tttatagaaacctttatgtagtttaaggaataatattgttgattaaatcttagtcattttcattatggcttctgaagttgtaataccagaaattacttaaaaatgtcaatgacaagatttcctttggatattataatatgtcttaaaccatccccctcctttgatagctaagtccagagatggtgtctgtctctctgtggttacactatcccaagcttaactgaattactatttaatctctttgatttgtgcttttgtgatttatagtcttcagtaatttcacaagaaagttgaattgaatttatttatctaacactctaaacaccaaaatttagttctttaatgagaaattggggggagggggtgtaaagtttattatattactatgaagttaatatatatccattaaagaaattaccaagaaactggagcccttccaccaaaacgcaaccactgttagcatttggatggatttccttgtcttctcatgagaaaggtgtgttcyaaaaattgatctgcctttcctgcttttaggactgccttaaggaagtactggagatt

SEQ ID NO: 461799 - DNA, 635 bp, Homo sapiens
tccatttaaaccacagctaactggtctgtaaaatgaaggttctaacacctacttttaaaagttattgaggggaaaacgagttaacggtctcaaggacgtggcacaatgactggcactttgtaggcaacagtcaagtggctttggaggcttccaatgccaggagtcgggggcgggcagctaaagtcgccgagccctgtttcccgccatccaggggcactaagcctccccgcagagtagctgcgcggacagggggtctgacgaccgcacgtggcccgctcagcactgccgcggccaagggcgcgactcaccygccagtgtctttcccgaggacacgcgaatcctggggggctcactccggcaaagaggacgagacactgcaccaaggacagggcctgacctctctggccgccttccccggggcctcagtttcccccgatggtgagagtggagccgaccatgcgccctgctgtggactcacccggcgccctggcgtcgagtggcggcggagacctgacagacagcgtgggaaaaatcaagatgtctgcagatttcgagagatggggtgcggtggcgtgcgatggcgaaggacggcgagggacggcgaaggactgaggccacacgacaaggaagctacg

SEQ ID NO: 461800 - DNA, 577 bp, Homo sapiens
tatttcatagaaacaggactctaagttgtccaggcttgtctagaactcctgacctcaagttatcctcccgccttggcctcccaaactgctggtgttacaggcttgagccactgcgcccagccctattgtatgtattttaacaacaagaaagttgcaactggggctggaatgaaaggggaatggtaattgaaaatctgaaagacagagagagagagagagagagagagagagagagaggagaattaaaaagcaaaactggaaacggmgcccaaacagatcaaacttcaaaaatacttaattcagcactgtttctgtcaaacttacttgctcaatatttctgaatatacctctgaaactgacttttactcaagattttttattcacatagaaaacatctttcccctccacctaataaacttcagaataaacttgatagtttaaaaaccacctgtgccataaagccaaccttactgcctcaaactgaaaaataacctctccctctccagattcttactgccattatctgttgtcatttgtacagtagttgctattgggttatcttgagtcctcttcaatt

SEQ ID NO: 461801 - DNA, 583 bp, Homo sapiens
cctctactgacttcctcttaaagctgttaatacatgggcggatcctaatgcttggcatgatttgggggcagggattataggccatggagaactacaaaagattcctacttgcatgttttctgtgtggttatttcaccaggcatcagattataaaagtaaaacaaggaaaaactactgatcttttttacataattgcccagtgaaagtgtaagcagaatattgtggggttttttgtttttttttttcagacasacaggtcaacatcaacacttcctgttctcaatatcagaacatcaattttgataaaaaccagtcagcttgctactgatttatcatctaaggaaggtagcaacaataatagaaaattctctaatttaaaaaatagaaaatcttgagcagcattgaaaaaaagaagagtcttccccccaaaaaatgagagaaaaaaaatctgaagagtgaaaacggataccaaaagggccacttaaatatgtgaactaatattcagatttaatttacaccaataatgacaacaataagcatttactgagagtttccatgtatgaagctttattaagcactgtaa

SEQ ID NO: 461802 - DNA, 672 bp, Homo sapiens
ggggagatattactttctaaccttacttttcaggggaccataaccatggtaaatcaaaccttgaagaacgaatccatatattgtgasaagaaaacaaaagaacttttgtagtttcttagactagagagtattaaaaaggcatgacttcactaattttggttggcaaggtctaggaaaaaatgacgtctcactagttagtattggacattgttgaacttgagaactttacaagaaaaggtagtaggaaagtctgtttttaggtaataatggtctgaaagtccccttttagcctgtttaataggggcagagaaataactgctgaaatctatagaatttttttaaacttcaatgttcagttcacctttaaggtattagttaatgtatgaaatgtaataattggtatgttgcccaggacatacatcgcagttggaaaagaatagctttttttttttcctttggcagaaagagactacttcaggaatatgactaggctaatgatcattttgatcccactagacgagtacaaatagtaataaataaggagtgtttcaaattaataaaagcatgccattagcaagttatgtgtatatggagtaaatttcagcatgaccttaatttctgaccagtgtcattttcagtatgtctcaaatgagcttctctgttcagataaga

SEQ ID NO: 461803 - DNA, 432 bp, Homo sapiens
ctttcctttgtaatgtctatttcctttggtagtgaaaacaaatggtgaacattaaaaacaaggcaaactacttatcaatgaaaattatatgccatctcccccaccaaaaaaatatttaaattgtcaatttattattatatatgtatcactggaattgtcataagacagatgggttacatatttatacatttctcttatctaaagtctgtatttccaaccaaatatrtgtgtgtgtgtgtgtgtgtgtgtgtgtgtgtgtatatataaaatgtgtatatatatataatgtgtatatatataatgtgtatatataatgtgtatatatataatgtgtatatataatgtatatatatatataatgaatatatatatattctttaaaaaacaaatatgaagagagaaataagtattacttgcaaagcaattactatg

SEQ ID NO: 461804 - DNA, 521 bp, Homo sapiens
ttcagtaaatctctaaaggtgcaaaatgtagtgaaaagaagatttttcaacatttagatgacaaaattggactacttagggaaaaattaatgtgttgtagaagmacttcagctgccattttcaatcactgggttactatgtgttggcaacagaaaacgaatttagaaatggagatagctctgggagcaggtagttggggaaatcagaatattgaatcatgtggggtagaacaaaccaattacttcaagttttgacttgagaatttccaataagtataattttttccaggcttttgactgtctgctttattaatggactaacatcaaagcaggcaacaaaacttccaaatgttataaaaactaatgtaaatatacagatctcacatgcagtaatacaagtctaaatttaagacaaacagttggggtttttactgctgcaattttcacaatcagcagaaacattaacaccaggcttctgggtgtttccttttttgaaatgagctagaagagagctttaaaact

SEQ ID NO: 461805 - DNA, 521 bp, Homo sapiens
ttcagtaaatctctaaaggtgcaaaatgtagtgaaaagaagatttttcaacatttagatgacaaaattggactacttagggaaaaattaatgtgttgtagaagaacttcagctgccattttcaatcactgggttactatgtgttggcaacagaaaacgaatttagaartggagatagctctgggagcaggtagttggggaaatcagaatattgaatcatgtggggtagaacaaaccaattacttcaagttttgacttgagaatttccaataagtataattttttccaggcttttgactgtctgctttattaatggactaacatcaaagcaggcaacaaaacttccaaatgttataaaaactaatgtaaatatacagatctcacatgcagtaatacaagtctaaatttaagacaaacagttggggtttttactgctgcaattttcacaatcagcagaaacattaacaccaggcttctgggtgtttccttttttgaaatgagctagaagagagctttaaaact

SEQ ID NO: 461806 - DNA, 600 bp, Homo sapiens
ctgcctcctgggttcaagtgattctcctgcttcagcctctctagtagctgtgattataggcacacaccactgtgcccggctaatttttgcatttttattagagattggggtctcaccacattggccaggctggtctcaaacttctggtcttaggtgatccacccacctcagcctcccaatgtgctgggattactggtatgagccatcgaacctgaccttcttttttaagttttaatttgcttgtgctgccagaggaaaaatggctggattgcctgtgtyttaaactcttaacttctataggctgcacactctttctccccaaaatccctgcagcaagtgaccttgtcaaacaaaagtgtggaataatgggaggcagcccagtgatggtgggtcgtttataagtagctgtttgctactgtcagaacaaaggcaaatcagagttgcattaaagggatatgacagagtgaacaactgctggcccacttccctaataatacttgtcttctagtgttggattgaaaactgagtggctggagtagttattcgtatgggtttgggatgaaaaatatataggaaaataaagatctatttctgtcattt

SEQ ID NO: 461807 - DNA, 441 bp, Homo sapiens
ttggctccatgaatatgcagagatgagtgaaaaagttggactatcagtgacaacttatcttttaggtttacttttaacactgttttcatctaagttaagatgaaattgaaataagctttctggatgcttctaaatttcacttcagcctggttgaaatcatgtcccctcctccttaagtatttttctcatttccattttaggaagaaattttgctaacatatataaacaggagtaataaagagatttcatatgccagcactggtaatagactatggcttgagttaatgtttcagcacggcgtagagtcacagccycactctcatagaggtccctgataatcaaaaagcatggtgcttcctgggaccctcaaacagcatgagcagtagcaaacatgacagtatttagttcaaagtaattaagaaaaacagtacaagaaaagtt

SEQ ID NO: 461808 - DNA, 594 bp, Homo sapiens
cccctgcttaatcagcagaacaagactattgattaaaacacctctcacaatagattacacatggaatctcatctccatactttgcacttggtaaagtgtaataatgagcataagataatcaaaagaagagtaaaagcaatttgttgggcattgtacaattcaagattagagttggaatggaaacaaatttgcatgaatagttgagcctgtttttaaagctgtacacagtaaagagtacgcacagtgcagggactactgtggaagagtaaaagatgttctgcttctttaagatttgcaaatctgttcatcttacataggggacattgttattattggtatttttggtggcggtggtggtaatttatatttcttgatgtttgttatccaggtattgtgcagagagttgcctgcactatcccatttaaccttaacaaacttctaaagaagatactacgttttacagatgataatgctaaggttgaaaggtttaatacattgcttatggactcacaattaagtaagcagmtgacctggaacttacacaccaatttttttctgattctacagcttctgcttttaaacactaatcttccc

SEQ ID NO: 461809 - DNA, 307 bp, Homo sapiens
agaccacctgctgttaacatgctttaaggaaaatggagagatgtaaaagagttttggtgatttctctgctttgagtataaatgaaactgaaaatcttctgtcctgtactcttaatagtgaactattagagtgtttaaatctttgtgtgaaagtgaagactgtcataaaggattatcattagcctctttttatttttttgctatgtgagtacttgttagcactggataatctgaatatagtttagttacaatacttatttctgtrtgtctctaaatttggtattttgtaaatgtgctttgacagtaaa

SEQ ID NO: 461810 - DNA, 569 bp, Homo sapiens
agttgtcactgtgccagtgttaccaacccagatggcactgaagtcctaagctaaaatttccaggttgcaccatgttctatcagaaccccacagacaggcatcctggcaggggaaataacagtactgacagtcagaaagtctgggttcccatcctgaccatttaataatctcttgtcttgattcatgaaacttctttgagcaraacaatttgcttatgaaagacagggaagtttggcactgttaaaaagataaaattaggtatcatttataagctatgagtacagcataggttttttctgagtacaatttttagcaatctacaaatgcaattatagcttaactttctggcctcaggggattggtggtgataaaattactggtatataaaatcataaaacatagtaaaggaataaaaccatggcatgttatgatactataaaaggtttctaactccaatatataatgccagctgtttattttacacatacattttattattgccaaaataatattcttaagaataaaattggtatacatttaagtaatatgttttcttaaaaggaatgtta

SEQ ID NO: 461811 - DNA, 640 bp, Homo sapiens
catagtaattttgggatatatccatatatccacatattatatataatgtatatataaatgtgttaactaatatgttcaccatcaaggataaatataactataatggagtcaatacatgtaactgtgaggttttctaagaaataattacttttattatttattttcttttaaaaattattacttttgtcttttgaaacaattatttttttttttttgagatggagtcttgctctgttgtgcccaggctggagtgcagtggtgcgatctcagctcactgcaacctctgcctcctgggttcaagtgattctyctgcctcagcctccccagtggctgggattacaggcgcctgacaccatgcccggctaattttttgtatttttagtagagatggggtttcaccatgttggtcaggctgatctcgaactcctgacctcaggtgatctgcccgcctcggcctcccaaagtgctggattacaggtgtgagccactgcacctggccctgaaagaatttttttttattgatgcttaatagatatacagagtcttggggcacatatgataatatattcataaatttgtaaagatcaaatcaatgtacttgggacaaccattaccttaaatattcatcctctctccttca

SEQ ID NO: 461812 - DNA, 589 bp, Homo sapiens
  misc_feature (1)...(589): n = A,T,C or G
aacatgcatgaacgaacctaggactagaacactaccaatatgattgcgtttatcatttttcttcccataaatctgctatggtgatctatgatcagtgataagttgaaatcactgttgtaattgttttgaggcaccacaaaccacacccatagaagacagcaatcaatcaataaatgtgtatgttctgactgccccactgacaggctactctgccatctctctccctctcctggggcctatctgttcccttaaacrcaataatattgaaattaggccaattaagaactctgcaatggttttctaggtgttcaagtgaaaggaaaagttgcgtatctctcactttaaatcaaaagctagaaatgattcatcttagtgcagaaggcatgttgaaagctgagataggcccccttgcaccaaacagccaagttgtgaatgcaaatgagaagtttttgaaggaaattaaaagtgctactccagtaaaaaaatgaatgataagaaagtgaaacagncttnctgaaagaaaagaagaacgtttgagtggtctggatagaaggtcaaaccagccacaagatttccttaagccaaagct

SEQ ID NO: 461813 - DNA, 511 bp, Homo sapiens
atgccaatgaacgaatgctatttcatggtaagattcctccccaccractctaccactgtcttccacattaggatagtttttttgttcagatatgaaataataataagcctgtatattctttatgtcagtattttaagataaacctactatttctgtaactttcacatttatattttcaacttcttttgaatttgtgtattttataatggattgtttttaaataagattaccacaataaaaatagaaatgagagtgttgactatcttttccttttttctttaaatagtaaattttgcttatggtcactctaggaaattttgtgttttccatttaactagttgattgaattaaaaataagacctgggaatcacctcagaagaaggtgtacatcctattctgattttgattctaagtatcaaacccacacaatttgaaaagagccattgttattgaacctgtagaggtttctgatgactgtagaattgaaaccatagaattgaattgaaagcac

SEQ ID NO: 461814 - DNA, 609 bp, Homo sapiens
caactttgagactttgctggaccagacttcttgagaaaatgatttactaaaatcaagttgttaagattaccattgaacttcaaaatagtgttgctattttgcagtgctgttacagcatggagctgagccaaccatccgaaatacagatggaaggacagcattggatttagcagatccatctgccaaagcagtgcttactggtaagtctgtatactctggttattccaggaagcctgtaaagaacaaccttgccaggtaggaaatttgcctcctatgattaatgacttcagctagatttttaaaatagtgtcagttcwgtagctatccttttctacgtctagatagctgacattttattctcctctaagaaaaataaagctttctttttattttctaattgctgtttaagtatgtcattgttgccttattgggggtgagggtgatagataattgtatgttgctttagtatattcaggacattttttaaatacccctgagtttttcagataacttatgcctgccctttacatgcaggttgagtatttctaacccaaacttcaaaacacttctggtcttaagcatttcagataagggatattcaagctgtac

SEQ ID NO: 461815 - DNA, 601 bp, Homo sapiens
gcccttcttcatgtactttctgttttaattcatgacacactctctgtggtaggcagaattctaagatgccccccagggacccacactttcgagtataagcaggaccatgaatgtgatgagagagcgctccagtgataccccgtgtggcaaaagtgaagggatcgtgcagatgtaattcaagtccctccccagctggccttgagttaatcaaaagagagataagcctgagtgggcctgatctaatcaggtgagccctttaaagaaggtctagaagtaaactaaactctagaagtcagagagattctcctgctgcccctgaagaagtaaactgctgtgctgagagaggacctgggagagggccacatagcaaggaactgggagcagcctctagatgctaagagtggccgtggctgacagccagtaagagaacagggactgaattctgctaacaaccacataggcttggaagaacattatgggctgcagaaaagaacacagccactctgacacctttgttgaagctttrtaagacccagggaagaggacccagctcacttgagcccaggagttcaagagcagcctaggcaacatagtgagacct

SEQ ID NO: 461816 - DNA, 550 bp, Homo sapiens
tgctttcctctggcaatgactattggaagagagactcctttcctctgagaagcagtaactgctacttccctatccagtatcacatttgaagggacttctctttgggcaacagtcatgaaacttccagcattccctaaagggaagtaactcttttttggctggatgtttgaactggctccccgggtattcacatgagcagacatttttctctgagaacaagttgctgttttctgctgagtgaggaggttggaatgagctacctcgtgtcactacttgcatcagtaaagctgagattgacaaatgatttgcccccgtcactaggatagcacgttgatgmtgttggcgagacttttccggcatggggcatgctgcagaaatcagcgttgagtgtatgtgtatttgtgtctgttttataatttggctcttttgggacataccattatatcaatagaaaggctcatagtgtggggaaataatctgctaagggatttgttgcaccttcttcctcaccaaacatctttatcaaatgctgagcaatgctgtgtcaggt

SEQ ID NO: 461817 - DNA, 634 bp, Homo sapiens
ccatctctacaagtatatatatacacactcgtagactagtatagtctatactagtatacactagtgatatactgtatcactagtctataacttagttattggattttaagtccaatatgaattttgcttctatgccttgtgcctagttagttatgcccccatcttatgtggaacaactttgtttgtcagctcccttcatagctgtgattacaatgccatctttaaaaaaatatttttgggtaaagtttacctagagtaaaatgcatggatcttaagtatacatcttggtgaattctgatagatgtatacatccatgtaaccaacatcatatatatatctgggcatggtggtaagcrcctgggttccagctactcgggaggctgaggtgggaggatcacttgagcccaggagttagagctgctgtgagctatgatatcaccctactgcactccagcctaagcaacagagcaagaccatgattctattttttttttaagtaaatgaaggggaagtgtgtgatatggaggacatagctcttttatatttcacagataacagaattatatgcaataattcaaaactatggtaaaagcaatttaggttagacttttagaaagaacttagtgattgggca

SEQ ID NO: 461818 - DNA, 634 bp, Homo sapiens
ccatctctacaagtatatatatacacactcgtagactagtatagtctatactagtatacactagtgatatactgtatcactagtctataacttagttattggattttaagtccaatatgaattttgcttctatgccttgtgcctagttagttatgcccccatcttatgtggaacaactttgtttgtcagctcccttcatagctgtgattacaatgccatctttaaaaaaatatttttgggtaaagtttacctagagtaaaatgcatggatcttaagtatacatcttggtgaattctgatagatgtatacatccatgtaaccaacatcatatatatatctgggcatggtggtaagcgcctgggttccagctactcgggaggctgaggtgggaggatcacttgagcccaggagttagagctgctgtgagctatgatatcaccctactgcactccagcctaagcaacagagcaagaccatgattctattttttttttaagtaaatgaaggggaagtgtrtgatatggaggacatagctcttttatatttcacagataacagaattatatgcaataattcaaaactatggtaaaagcaatttaggttagacttttagaaagaacttagtgattgggca

SEQ ID NO: 461819 - DNA, 610 bp, Homo sapiens
atgtcccaataatgttttgaactacttagatataaaatattataatttaaaattttctttaggaaaataatcctatgtttatgataattttttaagggagtttaattagaactgtgacaaaaactgaaacatcgccaaytaaatttattaattagtaaaaatgatcaactactaaagcaagttttttaaactaaatattaaatgttttgagaaccaccattcttaacaaggaaaaagaaacttaccaataaaagacggccaagacagagtaaaaccctgtagctctgaatttaaactagaagtattgctgtgaactctacacatagtttatttttaatatgtatactttcctagtgccgtccactgcaaaaaccaagaaacaatggtgagccccataacagtgagcacctctagcacctaggatgccagctgcatgtatcacaggtttggagcaggaaatttataagatgatgccagaacatcttgtcaaaccagaaagaaaggacataatcaaagattactgggatcttgtctaatggacttaggggtcagtttgaaaaggctcccaataaccaaaaatgcgggaacttcagcatcagtaaaaatagta

SEQ ID NO: 461820 - DNA, 519 bp, Homo sapiens
ttctctcggggtttcatgacaggcatgattaattgactcaatctctatataaagctgaactccatctctaacccctctctccacctcagaggttgggctaatatcatatgactcaaaactccaaccctctaatccaatggttggtcttctggtgtggctagcccctatttgagtcatctkgttagcgtaactatcagagctcactatgaataacaaagatacttccatcacctagaaaatcccaaggatctagacctggaacctggagtggaggcattttgggaggagggaaggaagtcttggcaaattcttgattactgtcttaatttcagccttgtctgtattagcaagactgaaaaccaacaacgtgcagtaacagaactgattctttgaaaaaatcaaaatacatccatataatggagttctatgcaattggtgaaaaaaatgggacaattctaggtaaggctacagaataaattgctgaatgtgcaaaagtctgtatgttatgctataatttgt

SEQ ID NO: 461821 - DNA, 625 bp, Homo sapiens
tttgaaattgtgctcacaactttctcagtgtataagagaccattttgcatttcttctacaaaaaccaatgaaaatgtaaaagatgttaagtataaattcattttaaatgtaaagcctcaaattattttctttgtgtgtcactttctctcccttccattcatcaatctatctttgcattgtagcttcttcctcatgatcacatagaagcaattccaaaaagtcttctstgcaaatatcatatgctactccattttttttttaattgttgttgttcaaattctactttggagcagaggctctttatttttttaaaaaaactggtttaatgtaatttgtcgtaagagacatttcaatggataatgttgttttggcctaatccttctacgttcttctggttcttaaatatcatttggtaataaaattttcaggctggatctgatttcagattatttaatctaaattcagtagcttataaatgtgacgctgaggtctaaacaggtggcatgcctgcctgacggttgtttaaatccttctcactgttgtcagttttctgtcccatgggataatattttcgtatttgtcctcataaccttgtcctttatgacatttcactttgttccgctaa

SEQ ID NO: 461822 - DNA, 553 bp, Homo sapiens
tcctttggggctgcctggcctgaaaacattcctgttgaacagtcacttttcctgtgaattgtgtctctgggtctcatttcctcatcgttaaatgagaggaagacagtgatgtctgttccccctttatacaggctttccaggaatcagctgagtgtatctgatctctctcactttgccacatttattagtgatgtccgggggtggattcctagaatcgccagatagaaagatgtcttygtagggcgcccatccagcccatcttcaaggaggattgcaaccaaacagggaaggctgccagcgctgattcttcctcagcttccttgcatcacttatttatggacctaaaacccagtaatgccttctattccactctaaatctttccactcttaaacagaatccctcttgggacttctttcagaaaaatcagttccttagtcttctctggactgtctccagttacttcgtattgtcttgaattgaagttgaggagctctgaactcagtgtttcctccaatagatactaagcagtcttgagcagaggaaaaggcaact

SEQ ID NO: 461823 - DNA, 523 bp, Homo sapiens
ggagagaagtggccctaaggacgtcagtatattcaaatgttaaattatcctttagctgctcctgggtgtaaaactcttgagttaatccactttataccacatagaaaaacaaatatctaccagacaaaggagaagtcataaaaattcatctgaacagctcaaaaacagtatgtatggactacttcttacttggggctttaaaaaaaatcttcccagtatggctggttattgaactccattggaattcattccaaaaatctcttttgtttcttgagctgcacagagaaatcaatttaaattacaaactggaatgttaaataccaacctcaaatttaactgcaataattccatatccctgtgaaatataatattcactcttttattttgtcttgaagatggaagggcaaaggaaggagaaataaaaagttctctctcaagtttctcttatctcattaggagcaaaggctgartgcagtggctcacacttgtgatcctagctctttgggaagccaaggagggagga

SEQ ID NO: 461824 - DNA, 616 bp, Homo sapiens
agattcttatgtacactgcaaatcagactgtttgtggagcctgatggaacctcagtggtagagaggtgcattagatgaagtcatgtagaccrgggtcctcaacccctgggccatggagcggtatccatctgtgacctgttatgaattgggccacacagcaggaggtgagcagctggcaagtgagcattaccacctgagctctgcctcctgccagataagtggtagcattagattcttttaggagcacaaaccctattgtgaactgcgcatgcaagggatctaggttgcgtgcttcttatgagaatctaatgcctgatgatctgaggtggaacagtttcatcttgaaaccatcctgccaccccaccccgccccatccatggaaaaactgtcttccataaaactggtccctgatgccaaaaagtttggggaccactgatgcagactgctggggcttggaccagatgctgtgcacatcagataaataaagtagagcaaaacgtacttcaactctcctgccctgataaacaccgaatcagaataaatttcacattgttcaagttaaataagaaggggggaaaaccacatgaagtctttgaaaaatactttactacagggg

SEQ ID NO: 461825 - DNA, 616 bp, Homo sapiens
agattcttatgtacactgcaaatcagactgtttgtggagcctgatggaacctcagtggtagagaggtgcattagatgaagtcatgtagaccggggtcctcaacccctgggccatggagcggtatccatctgtgacctgttatgaattgggccacacagcaggaggtgagcagctggcaagtgagcattaccacctgagctctgcctcctgccagataagtggtagcattagattcttttaggagcacaaaccctattgtgaactgcgcatgcaagggatctaggttgcgtgcttcttatgagaatctaatgcctgatgatctgaggtggaacagtttcatcytgaaaccatcctgccaccccaccccgccccatccatggaaaaactgtcttccataaaactggtccctgatgccaaaaagtttggggaccactgatgcagactgctggggcttggaccagatgctgtgcacatcagataaataaagtagagcaaaacgtacttcaactctcctgccctgataaacaccgaatcagaataaatttcacattgttcaagttaaataagaaggggggaaaaccacatgaagtctttgaaaaatactttactacagggg

SEQ ID NO: 461826 - DNA, 615 bp, Homo sapiens
tgtgtttgttttacacacagagtagtttctgctgcagcgcgcgtgtgcatgatggatgtgcacttcgctgggttataacgtgtccagttaagaaacccacgccgtacgtgtaaagaaatcaaaccttatccccggaaccatctgcatccctgtgtgaaacacgcacccagtaaatgatgcggggaggggggattagcctgggcgcagaggaccggagcaacgtaaacagctttagaacctatgcaagaggaaagtgcagctgcacctcagggcgtcttcgggctggtgccagacgcmttctgcaccggctgccaggtcactggagctggtcagaagctggctggcggagccttccctttcggaagagctgtcctctcccttacccccctcgccctggctccgtgcctcggggcagcctcggaggcgcgccagcagcactcctccaactctactccacccgagcctgacagctgggcggtcccgcctgacccgtgggcaggccgctgcaccctcccgcagacgcacgccctggcgagcggttccgctgcaaaaagagaagcccccaggccggggccggccgtgcggcggagtttccattgtgcggccgtgcgactg

SEQ ID NO: 461827 - DNA, 523 bp, Homo sapiens
ataatttttgcttggagattgaatcaacttttatagatgataaattccttaaagataaagatcattttcacttagttatctataggtccctgaatgcctggaacagtccctggcggagtaaatacttcatatttggtaagtaaatgcctaacaattggtgattattagaagggctsataatccatgctaagggcacaaatgaagaacagtaaacctgcagtgtttcattcattattgggatatgaaccattcgtgatacagtgatgatttagtaacttgctgtttcattgctttaaactcaccctcataacattgcactcagcaccctgtccaattgctttcacctacccacatgtggcatacgcttctaaaggccatgaacaggtcaatttgtctgtaattagcaaagtgagcattgtccctgtgactgcacaatgagcatgaatgaaatcatcattcattctcactaaaaacatacatattataagaaggaattacgtagccctctaacaaataatacctg

SEQ ID NO: 461828 - DNA, 591 bp, Homo sapiens
ttttttttcatttgaagcttggaaaacagaaaagaggcaaaaaaggtacatatagcaatgtcaaggggagtcttctaagagtttctctgtaaggatgtaaagttctcaggccaggataacagaagggcttctcatgctctatttcttccttctcagtgtggcctccagggctgctttagggcactctctgcctgtgacttgctcttaagcagaccttgtgttttattatgattaaaaggcctcttccctaagaaaccctcatgtgttactccatcatgttaattgattccaggtcttatctagagggtggctttgggaggcaggataatcaaggaagaaaaaacctcagcacaacacctcaccttgtgctcagcaggygtctcacggacatagtggtgagcgcccaggccctgcaaggtgcccagacctccttttgccatatttacccaggaactatcttccatggtggggaccagtttccctgaaaccaaggtaaggcccaaagtattgattgtcagggttcgctcaacagatctgaaataattcagaattcctaagcagatgtgctgaaacaaagaaaagaacagaatc

SEQ ID NO: 461829 - DNA, 577 bp, Homo sapiens
agacaacaaaagcaaaaatagacaagtgggattatttcaaactaaacacacacacacacacacacacacacacacacacacacacacacacaaataatctgatctagaaatgggaaaattatcctgaatggatatttctcaaaagaaagtatgcaaatgaccaacaagtatatgaaaaaatgctcaacatcactaatcatcaaatgcaaatcaaaaaccacaatgtgatataatctcattccagttagaatggctattaacaaaaagacaaaaaaaatcaaattctggcaaagatgcagagaaaagacaactcttatacactgttggacttataaattaccatagccattattgaaaaaagtatggaggtycctctaaaacctataactagaactaccacatgatccagcaatctcactatggtgtataaatttttaaaaaaggaaatcagtatattgaacaggtatctgtactcccatgtttattgcagccctattcacaataaccaagataaaagtatccgttaacagatgaatggataaagaaaatgtgttatatatacccagtggaatactat

SEQ ID NO: 461830 - DNA, 577 bp, Homo sapiens
agacaacaaaagcaaaaatagacaagtgggattatttcaaactaaacacacacacacacacacacacacacacacacacacacacacacacaaataatctgatctagaaatgggaaaattatcctgaatggatatttctcaaaagaaagtatgcaaatgaccaacaagtatatgaaaaaatgctcaacatcactaatcatcaaatgcaaatcaaaaaccacaatgtgatataatctcattccagttagaatggctattaacaaaaagacaaaaaaaatcaaattctggcaaagatgcagagaaaagacaactcttatacactgttggacttataaattaccatagccattattgaaaaaagtatggaggttcctctaaaacctataactagaactaccacatgatccagcaatctcactatggtgtataaatttttaaaaaaggaaatcagtatattgaacaggtatctgtactcccatgtttattgcagccctattcacaataaccaagataaaagtatccrttaacagatgaatggataaagaaaatgtgttatatatacccagtggaatactat

SEQ ID NO: 461831 - DNA, 566 bp, Homo sapiens
ttctgtcacttctcctgccctctatttgaagtatcctaaacatttggtgctatttcatgtctctctgcttctactcatatttctcagaaaattttaaccttactttaccacatcccaccctcccattttatttttttgcctccaagattcaactcagtcattgtatcttctaggatgtgttyatgactcttgactaaaatgcattttgtgactacttcattataaaatggtatactgtaatacacacacacattgcttctcttacaagtgtgaaacaacaagaggactgatgacatcataaggggaaataaatgatggagacaatgaaagagtgcaggggaagaaagggaagggagtaagaaaggaaagagatggagaacaaattgtgcactgccaccaaagccaaaggaagagaacatttcaagaaggaaaaagtcaccaaagatgtacagatgacaaataagcagaaaagatgttcaacactgttagtcgttagcaaaatgcaaactgaaaccctattgagaaacctctacatgccctttagaatggttaaaatgtaaaagact

SEQ ID NO: 461832 - DNA, 596 bp, Homo sapiens
atgcaccaaccagccacaggggaatatcctcagattctctgacatttgttttaagagcaattaggtttaaataggcatattgcctcatttcgtaggctcttcttctttaaaatccctggctactatagtattttgctattaatttatatttacatgaccagtgacattatttggatggtagtcacattattaaggcaagattactttccctgattctgataawtgtagcttagtaaacattttagtgtctttaattcacctcatgtgtttatcttataatataacctgtgctgatgagcactgggcgtataaaactacagcctcaatcattcttaccacaaagacttttaggtcattgatagctaaccaagggctgtttacaagcttcttaatagggagtgattggctctgaccttgccatgtgagtttatgaaggccaggaaggaaacgggaacgaaagaaaactaatatttaatgggggcttatatatcctagaatttttacataaatttcaatccacagaacatttttatgagacagatactatcaccccattttatagatggacaagcagagacccagagagtaaagtaccc

SEQ ID NO: 461833 - DNA, 436 bp, Homo sapiens
ttctatccagaccactaaaactttttccatatcaataataaggctattttcctttcttatcgttcttgtatgcattagagtaacgcttttaatttccttcaaaaacttttcctttgcrttcacaacttggctgttttgcaccagaggcttagcttttggcctattccagcttttgacatgccttccttgctaagcttaatcatatttagcttttgattgcaagtgagagtcgtgtgactctgcttctcacttaaacacttagaggccactgtagagttattaattggcctaatttcaatagggtgtctcagggaatagggagatccaaggagaggtagggagacaggggaatggccagtcggtgaagcagtgagaacacacacgtttattaagttcatcttcttatttggtgtggttcatggcaccccaaaacatt

SEQ ID NO: 461834 - DNA, 567 bp, Homo sapiens
agtgacatttaggttattattgttcatatggcctatgagttcccagataagttttaagggaagawaaaaatacactgttagtttgtacacttgccagcaatttcccccactgcaggcagtggttctgtgaaaagaaccccaggctgacagtcaagaaatccatcagtcaagtgagcctaagcaacccatttagacacattgtgtcaaatttccacacctgaagttggagataatgcccctcttatctcctaatatcttcgctttaatggaaaaagaaaaagaggtgagctctgaaagggatttgagaataaaaccggtaataaacctgaggtataatttctgtcattctgaatcctggctgcagccttgtggcggtggggaatgagtaaccaaccagaaaagggatcagctattactaggcagctagagaaacacaagaaactttcccctgccctcttgtcttcttatctttggcatactgggagatggggagggtcatgggcttagctacccagccctctctcactcagatcttgtctttcctctcagttagcctcaaagtgcctg

SEQ ID NO: 461835 - DNA, 567 bp, Homo sapiens
agtgacatttaggttattattgttcatatggcctatgagttcccagataagttttaagggaagaaaaaaatacactgttagtttgtacacttgccagcaatttcccccactgcaggcagtggttctgtgaaaagaaccccaggctgacagtcaagaaatccatcagtcaagtgagcctaagcaacccatttagacacattgtgtcaaatttccacmcctgaagttggagataatgcccctcttatctcctaatatcttcgctttaatggaaaaagaaaaagaggtgagctctgaaagggatttgagaataaaaccggtaataaacctgaggtataatttctgtcattctgaatcctggctgcagccttgtggcggtggggaatgagtaaccaaccagaaaagggatcagctattactaggcagctagagaaacacaagaaactttcccctgccctcttgtcttcttatctttggcatactgggagatggggagggtcatgggcttagctacccagccctctctcactcagatcttgtctttcctctcagttagcctcaaagtgcctg

SEQ ID NO: 461836 - DNA, 567 bp, Homo sapiens
agtgacatttaggttattattgttcatatggcctatgagttcccagataagttttaagggaagaaaaaaatacactgttagtttgtacacttgccagcaatttcccccactgcaggcagtggttctgtgaaaagaaccccaggctgacagtcaagaaatccatcagtcaagtgagcctaagcaacccatttagacacattgtgtcaaatttccacacctgaagttggagataatgcccctcttatctcctaatatcttcgctttaatggaaaaagaaaaagaggtgagctctgaaagggatttgagaataaaaccggtaataaacctgaggtataatttctgtcattctgaatcctggctgcagccttgtggcrgtggggaatgagtaaccaaccagaaaagggatcagctattactaggcagctagagaaacacaagaaactttcccctgccctcttgtcttcttatctttggcatactgggagatggggagggtcatgggcttagctacccagccctctctcactcagatcttgtctttcctctcagttagcctcaaagtgcctg

SEQ ID NO: 461837 - DNA, 570 bp, Homo sapiens
cagtgcttggcaatgcctacgagttgcacaataaatgtttgttaaaatgtcatactctagagtacaatttttaaaatttaatcatagtaactttttttcattttaagcacacaggttcttagccctacactaacacctagcatcacattaagtgacgctgactttttaaaaaatgtttaacagggctgggtgtgttggctcacgcctgtaatcccaacactttgggaggctgaggcaggtggatctcctaaggtcaggagttggagaccagcctggccaacatggtgaaaccctatctctactgaaaatacaaaacttagctgagtgtggtggtgtgcrcctgtagttccagctactcagaaggctgaagcatgagaattgcttgaaaccgggaggcagaggttgcaatgatctgagatggcaccattgcactccagcctgggcaacaaagcgagactctgtctcaaaagaggaaataaaataaaatgtttagcaggtaatgcacacacctgaacaaaattcaagtggttaaagggggtgtacagtaaaaaagaagtgtccttcccactc

SEQ ID NO: 461838 - DNA, 570 bp, Homo sapiens
cagtgcttggcaatgcctacgagttgcacaataaatgtttgttaaaatgtcatactctagagtacaatttttaaaatttaatcatagtaactttttttcattttaagcacacaggttcttagccctacactaacacctagcatcacattaagtgacgctgactttttaaaaaatgtttaacagggctgggtgtgttggctcacgcctgtaatcccaacactttgggaggctgaggcaggtggatctcctaaggtcaggagttggagaccagcctggccaacatggtgaaaccctatctctactgaaaatacaaaacttagctgagtgtggtggtgtgcgcctgtagttccagctactcagaaggctgaagcatgagaattgcttgaaaccgggaggcagaggttgcaatgatctgagatggcaccattgcactccagcctgggcaacaaagcgagactctgtctcaaaagaggaaataaaataaaatgtttagcaggtaatgcacrcacctgaacaaaattcaagtggttaaagggggtgtacagtaaaaaagaagtgtccttcccactc

SEQ ID NO: 461839 - DNA, 592 bp, Homo sapiens
gagagggttagtgatacacaaaaaaataagaaatcaaaccaaaaaaatactttgggagcagaaaggaggctggagtagctggagtgcagtagggagaaggaggaaaggacaggctggcgggcacaatgcagggcctcctacaccaaagaaagaaggctaagtttcagcctaagcataattagactccactgcagatttttataaacatcaccccagctgccacatggagaagagactgcagaaagcaagaatggaagcaaggagmccaaaaaggaggctggtgagttaaccaagtcagagatggtggtagcttttcctgggggatgactgaggaaaaaaagaaaagtgggtgaagcctagatacatgtttgcagtagaagctggaacttgctgaaagaagtttgtggctagtaagcgaaggagacctggaacagtcaggtggacagtgatgctgtctactgggacagagaacatttgcacttgctgtggatccatagttcagtcttggacattacatctgagatgcctatgagacctccagatagaggtgccattcatgcaggcaggctggggctccatgaagtcagggcta

SEQ ID NO: 461840 - DNA, 576 bp, Homo sapiens
caaagctggtttcaaacatacatacatacatacatacaacttattctgtgaccttgagctagttacttcatctcagtgtctatgtgattcttcatctagaaaacaaggataataataatacttatctatctatatagatatatgtatgtatatatatgtgtgtatatatatatacacatacgtgtgwgtgtgtgtgtgtgtgtgtgtgtgtatgtgtgtttgaagccagcttggttcggccatatttattttcagacgtaagtatcacctaatagttagccatgttgattttcattattataggtttctaattgaggagctattatggtctacgtataaagggataaatatgcacaatatgggttaacacaactgaactgcaaaattacaaatttactaccattttgtatttttatgcattcattagggaattaatgtaatataggtgactaaatattagagttagaaacagtaaaatagagttttcttcacgtaagtacaaattaagtcaaatctcacctgccttacaagttcaagggcaagaacttttacctcctgcctctgaaattttctgaa

SEQ ID NO: 461841 - DNA, 591 bp, Homo sapiens
ctttcagtattttgagtaagtgaattgaccaggttcccacgagaatatatctccactctagaaagcccatgtttaaaatgtatgtatacatgtagaaatctgttacaaaaaagtggatggggagaggagaatagaaagaggaacaattttatgctagagaagaaaaagtctctaggcgctcttgtttggaatctgcccgccgtgcacatcgtgcctcttctcagaggctcctccagttactgaccacacaactgagcctctctgggctgctctggactcttttatttaaaatatccatctcactgttgtctgtacaatatatacagcccttctactttagtgtkttgaatttctaaagcttattgtatttacatttattttattgctaaaattagattttgtgaaatactttgggaagtattactgttcactaagggagggaatatgtggtttatttattgaatatcataatattattaccagtcttataaagatatattctatgtactgagattagtttatttccattgaagagaagacaaaaaagatctattttgaaatataatgttagctgaaatgtgaagaaaaaat

SEQ ID NO: 461842 - DNA, 430 bp, Homo sapiens
taattagtcttcaaacttaaaaacaggttgcaaaattgggacagtaacaagttttaggagaaatcttaatgtagctctaatctttcaaattctaaaagaatatgttttctgtttcgtgagacaaaagaattgtctggttgctttagccaggattgatttctgtcttcagaacaccatttggtggtgttagactgctagatgaagaattttgtgggaaaaaaaaaaaaaaaaaagargaagaaaaattgaatgctttgtatgatcatcaaaagccacttttcaggagtattttacatttcttggtgccaagcaaatcagaaatcctaccttacagagagcgatttgttcatgagatgacccagtgctgcaagtcgcttatgtttatcattatgcttccacattctaaggaaattccactttcaaacgttgc

SEQ ID NO: 461843 - DNA, 588 bp, Homo sapiens
aaggacatgaatagacagttctcaaaaaaagatatacacatgaccaacaaacatatgaaaaaatgctcaacctcactaatgatcaggtaaatgcatatcaaaatgacaatgtgataccaccttactcctgcaagaatggccataatcaaaaaatcaaaaaataatagaagttggcatggatgtggtraaaagggaacacttttacattgttggtgggaatgtaaactagtacaaccactatggaaaatagtgtggggattccttaaagaactaaaagcagatataccatttgatccagcaatcccactcctgggtatctacccagaggaaaagaagtcattatatgaaaaagatatttgagcatgcatgtttatagcagcacaatttgcaattgcaaaaatatggaaccagcccaaatccccatcaatcaatgagtggataaagaaaatatgatctatatatatacacacacacaaacacacacacacacacacacatatatatatacacacacacacacgctatatatacacacacacgctatatatacacaccccatggaacactactcagccataaaaaggaatg

SEQ ID NO: 461844 - DNA, 636 bp, Homo sapiens
ttataaaggtgaatgaaatgtacaaagagaagatgatgacagaactacacatgacacttattagatggactggatgacacagaaaccagtgagagtccagggccagtgacatgggtgtgtggcctatgcaatctcacacagcgtcactctcagaagggctccaagttcagtgtaatgctattgccacagtcttataattttttaaaaaaatgtatctttgaactgtgttttgtaagcaaagttggatggggcaatggaccacatgcatgaggagaagcactatgtgcaatgtgcatgccccaccattcctggccttcccactcacatatgatgtctcatgatcacagaattccagtggactcacaatgcatgggagttcagcaagactcaatatgagtaccaggtacatgtttcaycttagagtaagcatgtgcaggggaaggctgataagccttgagaggctatgctttctgttcaaaccagaacttgttggtgtgaaagaaatcaatgatgttcaaataaactccatcacatattttcttacttgtgttaatttcttacttgtgttagtcaagcacttatactgaaaatgatgacatacaagtaaactgaccatagagagtgttgatagaatgt

SEQ ID NO: 461845 - DNA, 562 bp, Homo sapiens
ctacaccctggtctcctgcagtaccctcaggcttactagggtggggaaaaactctgccctggtaaatttgtggtcagactggttctctgctctcaaaccctgttttctgttgtttaagatgtttatcaagacaatacatgcaccactgaacatagacccttatcagtagttctgctcttgccctttgccttgtgatctttgttggacccttatcagtagttctgmttttgccttttgtcctgttccctcagaagcatgtgatctttgttagacccttattagtagttctgctttttgccctttgaagcatgtgatcttcatacctactccctgttcttataccccctccccttttgaaacccttaataaaaacttactggttttgaggctcaggcgggcatcacgggtgtactgatatgtgatgtcacccccagtagcccagctgtaaaattcttctctttatactgtctctctttatttctcagctggccaacacttacggaaaatataaagaacctccgttgaaatattgggggtgggttcccccagtacccaactttgc

SEQ ID NO: 461846 - DNA, 617 bp, Homo sapiens
ttttgtaatttcatgaaaattattttattcagtaaaaaagtttttaaggagtaatactaaaatgcccatttctcagaaacttagaaamattaaaataggggattttagaattgaaagaagttagtcactgtagtttgtaagtaattggaatcctttcttggctactattcaagtattttttctcttctagtaatctaatatatttattaccatatctagtgccttaaagatatcaatttgccatttactcacactactggtttccactccctatttcttacctctttcagtattttttaaatgattatgtattgtaaagaaaaaggctcaaaattgagcaacctagcaacatgcacaaagattgtatttttataaatgttgtctattgtatctttggcaaggagtaggaatctaccgtggagagaaacagattttcatctgctttatctaggggcagtaaaggaaaacctttctccctcattgacattctctctgtgttttcagtcactaaggctgattaaaatacagcaaattctgagctagtaccataataattttgctacctagcaacttggggtaattgcaagttagtctaaaaatgaaggcaaaataaaatt

SEQ ID NO: 461847 - DNA, 667 bp, Homo sapiens
tctttggcaaggagtaggaatctaccgtggagagaaacagattttcatctgctttatctaggggcagtaaaggaaaacctttctccctcattgacattctctctgtgttttcagtcactaaggctgattaaaatacagcaaattctgagctagtaccataataattttgctacctagcaacttggggtaattgcaagttagtctaaraatgaaggcaaaataaaattagaaagttttctgtatacccaattatacaacgttcaggagggtatatttgttttcccttagattccgatttatgagatttctgattgtttgaaaattctactatgtcgcctctagatatgcactgatctcttataaagtataagttaattccaatcagctaactttttatgttgtgaaaaatgttccctttgggaaaaactaaagaatgacaaaacatctcaacttctttgggtttagggctaatattgtattagaaaggagacgagagtccttgtcctgaatctgttatcaactaggtgagtgacaagacagtgtagctctcccttttccactcaatcagccacactgccagtgtacactgatcagcatgataataaagaaaatcaaactccagtagctaaaagagtaaatgtccttcctgaatccttttaatagaata

SEQ ID NO: 461848 - DNA, 585 bp, Homo sapiens
gggctaacttcatagtagcgagatcacaaagtacataaaagctggccatattggtataatattaccaccataaacaaaatgggtggggaaagacatcctgaaagagaagtatgagaattcctcaaatacgaggtacagagagggcagagaaaacactatttattttgtaataaaaacctaaaaagttggacgaactctttcatggtgaaatgcaaaagactgcaagtttcctgagaccttcccagccttgtgggattgtgagtcaattaaacctctttcctttataaattacccagtctcaggtatgttgttataacattgtgagaatgaactaatacagtccccaaattaagaaatgttcaacttaaaawttttttgattttacaatggtgcaaaagcaaaatgtattcagtagaaaccgtactttactcatacaaccattctgtttttcacttccagtattcaataaattacatgaaatattcaacacttcattataaaataggctttgtgttagatgattttgcccaactgtaggctaatgaccacacttaaagcatacaaggctaagttacaggttaggtg

SEQ ID NO: 461849 - DNA, 613 bp, Homo sapiens
atggtggtcagagatggtcccaaaaattttccctttgcaaacatttattcattggtgtaacccaccaccaaccacgaccattgtcactcattgattacttattttccaaagttgggtaaaaatcgtactcattttgattaatttttcatatatacatacatatatacctcatatttatttcatgtggttaatagtagaagtgttttgggtctctatttacaagtttggtgacatttttatgaccagaaatataacggaggaactttactcttattagcctgtgggaaaattgctttcattaygcatcatttcactgaaagttgtagtttctgagaacccatctgacattcagtggggacttaccatacctgtaaagcactaactgctcttggagttaccgtgtctttgatgcaacaagggctgaatcaggacttgattaacttcaccaacttgctgcctgccttagcttctgggttcatgctcagccagcttgagtcgggacactctgaaatttatatgtatatattcactacatcctacaaatattggaacagccatttcagagaaattaggcagatccaggtttccaggacagactttaaaaagtgaaaac

SEQ ID NO: 461850 - DNA, 613 bp, Homo sapiens
atggtggtcagagatggtcccaaaaattttccctttgcaaacatttattcattggtgtaacccaccaccaaccacgaccattgtcactcattgattacttattttccaaagttgggtaaaaatcgtactcattttgattaatttttcatatatacatacatatatacctcatatttatttcatgtggttaatagtagaagtgttttgggtctctatttacaagtttggtgacatttttatgaccagaaatataacggaggaactttactcttattagcctgtgggaaaattgctttcattatgcatcatttcactgaaagttgtagtttctgagaacccatctgacattcagtggggacttaccatacctgtaaagcactaactgctcttggagttaccgtgtctttgatgcaacaagggctgaatcaggacttgattaacttcaccaacttgctgcctgccttagcttctgggttcatgctcagccagcttgagtcgggacactctgaaatttatatgtatatrttcactacatcctacaaatattggaacagccatttcagagaaattaggcagatccaggtttccaggacagactttaaaaagtgaaaac

SEQ ID NO: 461851 - DNA, 505 bp, Homo sapiens
taggggccggggggttagcacaacctgtccccattcccaggaaaaaacccagcacacagctcacactcaatgatgtcagcttcctacaggaaggacaggtacagcatcactaattaaaaagaggtcacaaccacgaagttcattcatccaggcctcttgggaacaaatcatatcaacaaccaccaaacaaayggattcatgttaatttggaggtattcttatctgagagcaatagaatatagttcaccaaagcagaaacctgggcaagcgtcaactaaatgttggtgggtccaggaagaaatccactgattcaggctaggtgcctgtcacaacttggttagcctttctgaacctgtttccttgtctgaaagatgaaagtagcaatagttgctgtgaggcgtgattaaggcatgatgcattcagaggcatagtacagtgtctggcaaagattcaagaaactttagactctttcccctttctgcaccaataagcaaatctgaaaaga

SEQ ID NO: 461852 - DNA, 641 bp, Homo sapiens
tcccgtccccacccctgcacccacaccaaggaaaggccatgtgagaacacagcaagaaggcagctgtctgcaacccaggaagagagccttcaccagaacccagccgtgctggcaccttgatcatgaacttccagcctccagaactrtgacaaaatttaatttccatcgtttaagtcatccaacatggtattttgttaaggcagcccaagctgacggagacagtatcccacataggctcgagctcctgagggccgggactgtactgtgttcttatttctagtcttagcacctaaggcagcccttgaacatagttaagcgctcaataaattattgttgaacaaatgtaagagtggatgaagataagaagccggaaagacttcctccctttcccacccttaggactgactgcaaagccatgtttggaccctcatcactgtcagtgaaaaactcaatactccaggtgctgtcactcccaagagaggggcaaggcgcaagtcaaggccagacatcaatcctctcacggtcctccctgcccatcactgcagctgtcgttgctgcctgactcagatgtcagaagcaaagaggaaaggacagagcatttagaaataataaaacccttggctcaatgatgtcctttattc

SEQ ID NO: 461853 - DNA, 610 bp, Homo sapiens
atatttaatattcattgagtacttattgtgtgcccttcactgtgctaaccaccctaatagaaaatctcatttaatcctatgcaggtgttagtagtcccattttagagtcgagggtattgaagctaagagaggcaaagcaatttatcaagcctcctttgagagagtgaaggagcaactaaatttaccattaaacagggaagccaagtataaataaccacatgaaatatgaaatagcaatgaaagagccatcttagaaaaggctatcttcatggacttttcatcagtgacctcatccaatctcaagactccaaacatctcctccatcaggggatccttagatctctagctcttggtccagcctctctcttgagctacataaacyccttatttttagctgtgggcctgacctttcctctaggcagttttttctggagctcacactcagcctggccaaaactgagctcatgtcatttctctcttcttccaaaatgaaccccacttccgatgtttctatttctggcccaatgacaccattgtcctgaggaataaggtttgaaatcttgagctttttcatccctgttccattatatgctgcctaatatactatttt

SEQ ID NO: 461854 - DNA, 587 bp, Homo sapiens
aggtggacctcagtgccaaataggtccaagaaatcaagatgagactgagaagagaccactggatttggcctctaggacatmgtcttgaccttctaaactctaaaacaacacttctagagaaacacaacttttttagaaaatgcaacctatggtaagaaatatattttacttcaacacctggtacatagttcacccatagaaacaaacatttcacgacttcatatctacctctactacatgaaaaccactcatatttcttattctaatgtaaagtatttctttttaaaaaatactagccaaagtccacgaaattaatgttgttgattattaatgcatcttgagctgaagtttgaaaaaacaatgtgaacatgtctgaataacaaagatgatgatgatgacgataactacaagaagcaaattttgagtgtttatgctaggagtatacactatctgctaaatgtaatgctacgaattatctcatccatgacaaacctatacttcagtactactatcacaactttagatgaagaagttgaatacttaaagaacttaagtaagttgcccaaggtcatatggttcagagatca

SEQ ID NO: 461855 - DNA, 587 bp, Homo sapiens
aggtggacctcagtgccaaataggtccaagaaatcaagatgagactgagaagagaccactggatttggcctctaggacatagtcttgaccttctaaactctaaaacaacacttctagagaaacacaacttttttagaaaatgcaacctatggtaagaaatatattttacttcaacacctggtacatagttcacccatagaaacaaacatttcacgacttcatatctacctctactacatgaaaaccactcatatttcttattctaatgtaaagtatttctttttaaaaaatactagccaaagtccacgaaattaatgttgttgattattaatgcatcttgagctgaagtttgaaaaaacaatgtgaacatgtctgaataacaaagatgatgatgatgacgataactacaagaagcaaattttgrgtgtttatgctaggagtatacactatctgctaaatgtaatgctacgaattatctcatccatgacaaacctatacttcagtactactatcacaactttagatgaagaagttgaatacttaaagaacttaagtaagttgcccaaggtcatatggttcagagatca

SEQ ID NO: 461856 - DNA, 580 bp, Homo sapiens
ttttgactttttagtaatggccattcttgctggagtaaggtggtatctcattgtgattttaatttgcatttccctgatgattggtgatgtttagcattttttcatgtttgttggccatttgtatatcttcttttgagaaatatctattcatttcctttgcccactttttaataggattgtttgtttttttcttgcggatttgtttgagtttcttgtagattctggctactagtcctttgtcagatgcgtagtttgcaaatattttctttcattctgtggattgtctgtttactctggttattatttcttttgctgtacagaagctctttagtttaattaagtcccatttatttatttttgtttttgttgcatttgcttttggggtcttagtcatgaattctttgcctargctgatgtttagaaaagtttttccaatgttgttttctagaatttttatggtttcaggtctttaaatctttcatccatcttgagttggtttttgtataaggtaagaggtaagtatccagtttcatttttccacatgtggcttgccagtttttccagcatcatttactaaata

SEQ ID NO: 461857 - DNA, 505 bp, Homo sapiens
tttatggtttcaggtctttaaatctttcatccatcttgagttggtttttgtataaggtaagaggtaagtatccagtttcatttttccacatgtggcttgccagtttttccagcatcatttactaaatatggtgtccattccccagtttatgtttttgtatgccttgttgaagatcagttggctgtacgtatttggctttatttctggtttctctattctgttccattggtctatgtgcctatttttataccagtaccatgctgttttggtaactacacccttgtagtataatttgargtctggtaatgttatgcctccagatttgttctttatgctgggctcttttttggtaccatatgaattttaggattgttttttctaattctgtgaaaaatgattttggtattttgatgggcattgcatagaatctgtagattgctttgggcagtgtagtcattttcacagtattgattcctcccatccatgagcatgggatatgtttctg

SEQ ID NO: 461858 - DNA, 608 bp, Homo sapiens
aactgcattgtggagtgggtatcagagagaaacacaagtaaagtaccccttcctggagtacggtgcattgatcttaggtaggaggtgggggaaatgtgagtacgtgtttacaaataaagaccctgctagtgagaacagcagatgcagttagagttaggctctgcctgctgcttgtacccatcagtgtccattgcctcctctttcctcattcatgaagggacctgattcagcctttaccctcccaagtgctgttgtgggtggtatctcgtccatctaaaggaagtctgcaggcccctctaagaaagtttgctgccctactagataaagctgggtatccatgaagggtcacatggaaatagatcctggaaagggagataactgcatttccagactgatcttgagagaggagaagcaaagtgcatttgtgtcttactgatccagcatctttggaggagtggtargttctgtggaaattaatattattatgagctatgttttaagcttttaagatacctttttaaagtaaccattttggatgggaatctttgtaaatatgtattttcctgcctccttaaatattggtgtcttgggtcttcattgtgaacagt

SEQ ID NO: 461859 - DNA, 608 bp, Homo sapiens
aactgcattgtggagtgggtatcagagagaaacacaagtaaagtaccccttcctggagtacggtgcattgatcttaggtaggaggtgggggaaatgtgagtacgtgtttacaaataaagaccctgctagtgagaacagcagatgcagttagagttaggctctgcctgctgcttgtacccatcagtgtccattgcctcctctttcctcattcatgaagggacctgattcagcctttaccctcccaagtgctgttgtgggtggtatctcgtccatctaaaggaagtctgcaggcccctctaagaaagtttgctgccctactagataaagctgggtatccatgaagggtcacatggaaatagatcctggaaagggagataactgcatttccagactgatcttgagagaggagaagcaaagtgcatttgtgtcttactgatccagcatctttggaggagtggtaagttcygtggaaattaatattattatgagctatgttttaagcttttaagatacctttttaaagtaaccattttggatgggaatctttgtaaatatgtattttcctgcctccttaaatattggtgtcttgggtcttcattgtgaacagt

SEQ ID NO: 461860 - DNA, 568 bp, Homo sapiens
gagccttgtctgttttgtagcacctggcacaatgtcctaaattcattaattgaaaaatcgatgtgttaggtctttcctgtgtaccatgctctatgcttgacactgaagttagataaataggacacgaactcttagaaactcacagtctgcctcaaggttctcaacagaattcaagaggtctgtgagcttagatgagaaaacaatttaccttttaattttactaatctctaaccaaagtttaacatttccttttcytctggaggtaggaaattgactagagtaagctgagcagtacctgtgactctgtcacctgtaggagtcacagatattttcgtatcgcccacagttgttataaatatctcacaatctcatatcatcaattagtgttattacaggctaagcatctccaatccggaaatccgaaatccaaaatgctctgaaacccaaaactttttgagtgctgacctgatgctcaaaggaaatgctcattggagtgttctgggttttggattttgggatttgggatgctcaatcggtaactatactgtaaatattccaaaatctgaaa

SEQ ID NO: 461861 - DNA, 568 bp, Homo sapiens
gagccttgtctgttttgtagcacctggcacaatgtcctaaattcattaattgaaaaatcgatgtgttaggtctttcctgtgtaccatgctctatgcttgacactgaagttagataaataggacacgaactcttagaaactcacagtctgcctcaaggttctcaacagaattcaagaggtctgtgagcttagatgagaaaacaatttaccttttaattttactaatctctaaccaaagtttaacatttccttttcttctggaggtaggaaattgactagagtaagctgagcagtacctgtgactctgtcacctgtaggagtcacagatattttcgtatcrcccacagttgttataaatatctcacaatctcatatcatcaattagtgttattacaggctaagcatctccaatccggaaatccgaaatccaaaatgctctgaaacccaaaactttttgagtgctgacctgatgctcaaaggaaatgctcattggagtgttctgggttttggattttgggatttgggatgctcaatcggtaactatactgtaaatattccaaaatctgaaa

SEQ ID NO: 461862 - DNA, 568 bp, Homo sapiens
gagccttgtctgttttgtagcacctggcacaatgtcctaaattcattaattgaaaaatcgatgtgttaggtctttcctgtgtaccatgctctatgcttgacactgaagttagataaataggacacgaactcttagaaactcacagtctgcctcaaggttctcaacagaattcaagaggtctgtgagcttagatgagaaaacaatttaccttttaattttactaatctctaaccaaagtttaacatttccttttcttctggaggtaggaaattgactagagtaagctgagcagtacctgtgactctgtcacctgtaggagtcacagatattttcgtatcgcccacagttgttataaatatctcacaatctcatatcatcaattagtgttattacaggctaagcatctccaatccggaaatccgaaatccaaaatgctctgaaacccaaaactttttgagtgctgacctgatgctcaaaggaaatgctcattggagtgttytgggttttggattttgggatttgggatgctcaatcggtaactatactgtaaatattccaaaatctgaaa

SEQ ID NO: 461863 - DNA, 588 bp, Homo sapiens
agaacagggcaaatactgcactgctgtctcttttagatgtgcgatatttattgagatgttggggacagagagagaggaggtaaaagttgctttttctacattcacctactttttttttaaaggacaaaagtgtaactcccagaagaaatcatttaacaaagaaatctctcctggatgagcaagaacaaagggaagcttcgggagggcttaggaggcgtccctgcatcaggcattgtgccagctcttaggagcacttctaatcctyatcacaatgccgtgggtgttcacctggcttcgctgatgagaaaatggagtcataggaggaaagtaacttgtccagccaagaccaccttcctaataagtggtacgactggatttgaacccagatctgattggcttcgagcccttgccttttccaccatccacccctcctaccaatagttctgcagtgaaaaaggtaagggaggggaagcatgctcctaagcattactttctttgctagttggaagtgtcagtgtgaaacttttgatttcattgacaaacataaagaaaccgtggattaaaattcagcaagaagaaacatgcccc

SEQ ID NO: 461864 - DNA, 536 bp, Homo sapiens
ttttatccagcaataacattctgtaattttgttattcctgaacagtttcagcttatatatgcttatatattatttcttaatgtattaggccattctcacattgttataaagaaatacctgagactgggtaatttataaggaaagaggttttattagcttacgggtctgcaggctgtgtaggaagcatgatgctagcctctgctgggcttctggggaggcgtcagggaccttacaatcatggtggaaggtgaaggggaagcaggtgtctcacatggtaagagcaggaacaagagggtgggggaggtgccacacactttaaaacaaccacatctcaagagaactcactcactatcacaagaacagcaccaaggggatgtgctgaaccattcatgagaaatccaaccccatgatccaatcacctcccaccaggccccacctccaayactgaggattacagttcaacatgagacttgggtggggacacagatccaaaccatatcacatagttttcagaatattcttataaaaatcccatt

SEQ ID NO: 461865 - DNA, 543 bp, Homo sapiens
tatgagtgatccagtttctctgygttcctgtcagcaattggtgttgtcactatttcttattttagccattctgacaggtgaatagtgatatctcactgtggttttaatttgcattttcccactctgcagcttgtcattttattcttaagagtctttcatggagtaaacatttatgattctgataaattccaatttatcaggtttttttaatcgattgaactttccgtgtcaagtttaagaactttttgcctaaccctggatcctaaagatgttctcatatttttttctaaaagttttgtagtactacaatttacatttaagtccatgatccattttgagttaatttttatataagatgtgtgacttcccccgtgcttccccccacctcggagatatcctcttgttccagcatcatttgttgaacaggttatctttctccatcaaattgcttttgcgtctttgttgaaaattaatcagacatatttatatgggtctatttctgttttctcttttatgttcctctgatgtatgtgtccctttacc

SEQ ID NO: 461866 - DNA, 543 bp, Homo sapiens
tatgagtgatccagtttctctgcgttcctgtcagcaattggtgttgtcactatttcttattttagccattctgacaggtgaatagtgatatctcactgtggttttaatttgcattttcccactctgcagcttgtcattttattcttaagagtctttcatggagtaaacatttatgattctgataaattccaatttatcaggtttttttaatcgattgaactttccgtgtcaagtttaagaactttttgcctaaccctggatcctraagatgttctcatatttttttctaaaagttttgtagtactacaatttacatttaagtccatgatccattttgagttaatttttatataagatgtgtgacttcccccgtgcttccccccacctcggagatatcctcttgttccagcatcatttgttgaacaggttatctttctccatcaaattgcttttgcgtctttgttgaaaattaatcagacatatttatatgggtctatttctgttttctcttttatgttcctctgatgtatgtgtccctttacc

SEQ ID NO: 461867 - DNA, 543 bp, Homo sapiens
tatgagtgatccagtttctctgcgttcctgtcagcaattggtgttgtcactatttcttattttagccattctgacaggtgaatagtgatatctcactgtggttttaatttgcattttcccactctgcagcttgtcattttattcttaagagtctttcatggagtaaacatttatgattctgataaattccaatttatcaggtttttttaatcgattgaactttccgtgtcaagtttaagaactttttgcctaaccctggatcctaaagatgttctcatatttttttctaaaagttttgtagtactacaatttacatttaagtccatgatccattttgagttaatttttatataagatgtgtgacttcccccgtgcttccccccacctcggagatatcctcttgttccagcatcatttgttgaacaggttatctttctccatcaaattgcttttgcgtctttgttgaaaattaatcagacatatttatatgggtctatttctgktttctcttttatgttcctctgatgtatgtgtccctttacc

SEQ ID NO: 461868 - DNA, 572 bp, Homo sapiens
ttactgtctcctaggtctgggttgagacttccccatcatatcttgatggtgtccagcctgtcctggcaccagcaggctgtgctgggggtggggatggatgggcacaccagtacaccagtccccatctacatagagttatgtatatttgttgttggtacccattcagtaaggatttgtctattgattttgtgagtaagagaatggagtagaatgcctctgtagggctcaggagtttcttgttctggagtttgcattgttccctttgaggacacggttaaagcattatgcacacagcagagcctccyttatccctggccctcgctgtggcttatgacatcagtgtttgtttcagggatctgccttcatccaagctgtctgggcacaaaaatctcttagatctctcactcaccccaacatctagtcagttgaaaaggggggcctggaactcaagtgtcccaagtttggagcatttagagtaaggacatattaggagcattatgtacacagcagaccctcccttatccttggccctagctgtggctcatgatgtccatttttgcttgtccgcattc

SEQ ID NO: 461869 - DNA, 585 bp, Homo sapiens
gaaactaatttcaaatgaactcaatgaaatataagttctgtgcttcatggaaatttgggaccagaattaattcttgattcatgcctattccaacttcagccctgctggtcttctgagatatatcatcaacaatttgacattctaattggttaaactccatgcatttttaaaaagtctgaatgtatctacataaagtaaaaacaaaaaaaagtatataaagttgtttcaaccaacagatgtggggtaattgctagaagtgaatgaatatcttgtcacyaccaatacatttagggataattgctagaaataaatgtctacctcgttaatctgtcactgcttgtcacagttctttcttttcctaaatgcatcacatctaacacagaactgataagtagtaattgatttaatcctctgagtaatgcacatcttctgtaggactaaatacagtttttgcacagtatatttactgcacattttattgagtaacatgaaaatgagtgctgagttggcagcctaataataaatacccgtaatgttatctgagttgctctcctgcattgacaaaaatggtgataaattagattg

SEQ ID NO: 461870 - DNA, 588 bp, Homo sapiens
gtatttactttattccaataagtatatggaaaggggatatagcataacattatagtggaaaaacctgacaatcagtacctcaggcaggtgaacaagatagcagacctcattcctgctatcaggaatatcagtttatcacatatgatatgtactgagaatggtattttatctccrtgttctattgctccgaaaccatgacataaatctaaaaatgaaaaacaaatcagacaaaattaaatggagaaaaactgtacaaaatatctaaccagtacgtctcaaaactgtctaggtcataaaagccaagaaaagactgagaaactgatgcagaaaagtggagcttaagaagatatggcaacagaatgtaatgtggcatcctaaataggattctcaaagagtaaaacgccattggggtaaaacaaaaaaatccaaatggagtatagactctggctaacaataatatattaatatagttgtattagttgtgtcaaatctgctatgccaatgtaaaatgtaccatatagaaaagtgttcatgagtgatataggaaatctctgtactattgtcatttttgtaaatgcaaagttgttc

SEQ ID NO: 461871 - DNA, 588 bp, Homo sapiens
gtatttactttattccaataagtatatggaaaggggatatagcataacattatagtggaaaaacctgacaatcagtacctcaggcaggtgaacaagatagcagacctcattcctgctatcaggaatatcagtttatcacatatgatatgtactgagaatggtattttatctccatgttctattgctccgaaaccatgacataaatctaaaaatgaaaaacaaatcagacaaaattaaatggagaaaaactgtacaaaatatctaaccagtacrtctcaaaactgtctaggtcataaaagccaagaaaagactgagaaactgatgcagaaaagtggagcttaagaagatatggcaacagaatgtaatgtggcatcctaaataggattctcaaagagtaaaacgccattggggtaaaacaaaaaaatccaaatggagtatagactctggctaacaataatatattaatatagttgtattagttgtgtcaaatctgctatgccaatgtaaaatgtaccatatagaaaagtgttcatgagtgatataggaaatctctgtactattgtcatttttgtaaatgcaaagttgttc

SEQ ID NO: 461872 - DNA, 564 bp, Homo sapiens
gagttcttaatttgattctcagcttggtcactgttggtgtatagcagaaatactgatttgtgtacatcaattttgtaacctgaaacattgctgaattcatttaccakttctaggagctctttggatgagtctttagagttttcaaggtatacaatcatattatcagcaaacagtgacagtttgacttcctctttaccaatttggatgccctttatttctttctcttgtctgattgctctggctagaacttccagaactatgttgagtagaagtggtgaaagtgggcatccttgtcttttttcagttctcaggaaaaatgctttcaacttttccccattcagtataatgttggctgtgagtttgttgtagatggcctttattaccttagggtatgtcctttccacgccgatttttctgagggttttaatcataaagggatgtaggaatttgtcaaatgctttttatgcatctattgagatgatcatgtgatttttgtttttaattccatttatttggtgtatcacatttattgacttacatatgttaaaccacccctgcatcact

SEQ ID NO: 461873 - DNA, 564 bp, Homo sapiens
gagttcttaatttgattctcagcttggtcactgttggtgtatagcagaaatactgatttgtgtacatcaattttgtaacctgaaacattgctgaattcatttaccagttctaggagctctttggatgagtctttagagttttcaaggtatacaatcatattatcagcaaacagtgacagtttgacttcctctttaccaatttggatgccctttatttctttctcttgtctgattgctctggctagaacttccagaactatgttgagtagaagtggtgaaagtgggcatccttgtcttttttcagttctcaggaaaaatgctttcaacttttccccattcagtataatgttggctgtgagtttgttgtagatggcctttattaccttagggtatgtcctttccacgccgatttttctgagggttttaatcataaagggatgtaggawtttgtcaaatgctttttatgcatctattgagatgatcatgtgatttttgtttttaattccatttatttggtgtatcacatttattgacttacatatgttaaaccacccctgcatcact

SEQ ID NO: 461874 - DNA, 585 bp, Homo sapiens
gttatactttcctattgttaacctgccttttgttatatgagcgttgaccctgatccttatgctcaagaaggaaaagtatcacatctttctccacctacagtcaacatgctattatkaggtctctagaacttacccactttataactgcaagtttctatactttgaccaacatcttccccgttccctctcccacagcccctagccaccaccttactactcactgcttctataaatatgactactttacattccaagtataaatgaaatcatacatgtttgcctgtggacagacagattgtttccaacataccatctcttattaatgttgaaagaaacttagtgaccataccaccataggaaatgttaaagtattatccaatgtagattactgctttttccattttctctttcttcccactgttctcttcttatgttaacaggcaaatgcctagaagtgatggccagatgattatacatccctttaaaaataactctcttaacatgatatgggtatatagggattttggacttcatttgtctcccaccctctcctagctcatttcattagaaagcctggaaggatga

SEQ ID NO: 461875 - DNA, 593 bp, Homo sapiens
aacttacccactttataactgcaagtttctatactttgaccaacatcttccccgttccctctcccacagcccctagccaccaccttactactcactgcttctataaatatgactactttacattccaagtataaatgaaatcatacatgtttgcctgtggacagacagattgtttccaacataccatctcttattaatgttgaaagaaacttagtgaccataccaccataggaaatgttaaagtattatccaatgtagattactgctttttccattttctctttcttcccactgttctcttcttatgttaacaggcaaatgcctagaagtgatggccagatgattatacatccctttaaaaataactctcttaacatgatatgggtatatagggattttggacttcatttgtctcccaccctctcctagctcatttcattagaaagcctggaaggatgatgccaaaagtttcactgaaatctaatttgtattttgctagcttgctcccatcaccagtgttgtttattgcatagttgtaaaagcataaaaaacaatcaggtgctactwgtctttcaaaacaagttttggttgct

SEQ ID NO: 461876 - DNA, 520 bp, Homo sapiens
ctcccaaaaggtctctgcacaggtagaattggtccccaacttcagcaagagaggctttagttgagactgggacctctcaggatctgctgtgagaaggaggcttgtggacctttctcattggctcagatgagcttgcatcacccatcaggtctttgcacaagtggggtagttcttcaactgcagcaggttgagccagagctgagacttgtgctcttcagaatctactgtaggaaagaggttggtgtgcctatcactttggctaagatgggtgcatgtctcccagcaggtcccygaacaaatgagatagttctttgactgcagcaagagaggccaatcctaagactaccctcccttgggatcttctgtagggcagaatctggagagccctatctcattggttaagaggggcatgcatctcccaacgtgtccttgagcagaagggatagtttgctgattgcagcaggaagggctagagctagtgtctctcaggatctgctgtgggttggaggttagaagagcc

SEQ ID NO: 461877 - DNA, 621 bp, Homo sapiens
tatttccactttttggctattgtgaataagctgctatgaatatttatgtacaggtttttgcatgaaatgtttttaactatcttgtgtatgtgtgtgtgtgtrtatatatatatatatgtatacttacataagtagttgtagggtactctatttcttcatgtggatttggattacagcttatggtttggattacaggatttcttcatatggattagaatttgacctttcattcaagactgaattacttttctttagtaatttttgtagggcatgtctgttagtgacaaattctctcaactggtgtttatcaggtaatgtcttaatttcttcttcattttcttttcagtcatcccactgccttctggcatccatggtctcagatgaggaatttgctgctaatattattgaggatcccttgtatatcatgggacacatttttcttgttgctttcaattttctgtctttggtttctgataaattaaatatacgtgtctaggtgtaggtatttttgagtttatcttatttgaaattcattgagcttcttaggtgtttacatgaatgtacttcataaaatgttggaagcttttgaccattattccttcaagtattattctgtttcag

SEQ ID NO: 461878 - DNA, 609 bp, Homo sapiens
acttttaaacaaccagatcttgcaagaactcactcactaccatgacaacagcaccaagggaatggggctaaaccattcctgagaaatccacctccatgatccaatcacctcccaccaggcccctcctccaacattagagattacaatttaacatgagatttgggcaargacacagatcaaaaacatatcagctagtgaggcaaagaatcttcaccttggaaaggaatggaattggcaacaccaggcttcagccttgtcagaacatgtttggaactaagaaataaaattaggcctcaattcatacataaggtacaaaatggtatgttgttccctgaaaccagggagaagcctggtcactagggctagaatacaaggcaagggatgactagaagccaatctgatctgatgagaggcacctgaactgctaatgtgagttctaccaaagctgtttttctagatgaatgacagctatgatccaggcttctgtgctgcctttaagacaagggaccttgaagagacttttgtaatgatcagactattggtaactgggctttggaacaatgagtctttccaaaactctttcttccacatttgtggaaaggaggaggt

SEQ ID NO: 461879 - DNA, 565 bp, Homo sapiens
tacgtcccaagtgagccacaaaaaggcaggcaaattcagtagattcagttttactaactttcaaacacatacaatggattatctctgaattcaagattgttcacaattccccaagaggtcagaagcacgaggactgagaatgatgtctacatattgcttagaagcactaagaactaggaagtgactgaataattgaaaattagatgacttttctgaaactggaatgtaaactccaggtttgacttaatacggaggcattcagaagtagttagcattattctcattttgtagatgaaatcactgaagatcaaaaagtatagtggctttccttaacttacatatttagtaagtggcagaattgaggtttaaaatctggtcctacgactccagaccacagaaaagggacagaatayacagcggtttaagcagttctagactaataggctggagtggggggcagggagaagaaatgagaagatgcaagaaaatggagaaaataaattcaaatttatgtctatctctaaaccatataaaccccaaagagcctcttcatcctccttgtgtc

SEQ ID NO: 461880 - DNA, 531 bp, Homo sapiens
aatcaaacgatgcttatgtttattaattcatttatttatccagacagcaaatatctgcagtgctagtaactgtaagtatcaattaaaccttccataggccaggtatagtggctcatgcctgtaatcccagcactttgagaggctgagaccagaggatcacatgagcccaggagtttgagaccagcctggccaacatagtgagaccatgtatctacaaaaattaaaatacaaaaactgaaaagatttttttaaaaaaaccctccacagcccctacttgtattctgagaatacaagagaatgtgcagaaggactttttttctctccccaatgcctcacagagattgaacaatattaactrtaaggaaaatataaatgcacataataatttttatatcagatatgtatatacaaataaaatattaattttctatcagccaagttctattatgtctgtgtatgtgtattatattgaatgtatagtgaaatatttaaatgttataaggaaacaagataaatcctgtgatccaggct

SEQ ID NO: 461881 - DNA, 628 bp, Homo sapiens
ggatacattcattatcttgattatcgtgatagttgcctaggtaaatacttatgtcaaaacttacaaagttgttcactttaaatatatgctgtgtgttgtattctatgttttgtatagtatacctcaaataaagctgtaaaagtaacaaatttatttggagaaatgtgattctagagagatttctgaactagtgctgtgtgtttcactgcaacaggcttcctagatcactcactgccccctttttttagggggcaagttgtataggttcagtgatacatcatggaagcaaactggagggagtcccctaggactcagggaggtatcagactgctcctctttctctctctgactcaatcctgctgggtgccataattctttctcatctctgctgtgcagctgcttccatcttgtctctctaaggattgacttttaggcaggagtcttagatcttactcccataacatcaacctcctcttggtccttggtttctacgacaccattagcattcacaatgctttacaatcgtacattttccacatccagcagcaactgactsactgcagtcctcttgctttgtttgggttctcaagagataaaaacctattagtctctggtcaggcagttccat

SEQ ID NO: 461882 - DNA, 570 bp, Homo sapiens
tataatctaggtatataatagactatcccatgcagcctaggtgaggagtaggctaaactatatagcctaggtgtgtagtagtctacaccacataatctaggtatacagtaagctaaaccatatagtctaggtgtgtagtaggttaaagcatatagcctagatgtgtagttgtttataccatataacctaactgtgtagtaggctatactatataggattgtgtaagtacactctatatttacacaatgaaaaaatcacctaatgacacatttctcagaatctatcttcaatgttaagtgawgcgtgactgtattgagttattgctactggctaggcattcgtctgagcccttaggatacactagtgaatcaaaaagactaagatttcttttattattggactctcattttagggggagttggggaaacaggaaataaataataaacaaaacaagtaacatatataggatattcgatggtaataaatgctcttaaaggagatggtaccaagtcaatgggcttataaataggaatgtttatggagagcatgacatgtgggcaaagactaaga

SEQ ID NO: 461883 - DNA, 625 bp, Homo sapiens
tttgactcattaatcccattactgggtgtatacccaaaggaaaataaatcactctgtcgaaaggacacatgcacttgtatgtttatcacagcactattcataatagcaaagacatggaatcaacctaggtgcccccaaatggttgattggataagaaaatttgctacatatacaccatggaatactatgcagcataaaaaagaacaaaatcatgtcctttgcagcagcatgggtgcagctggaagccattatcctaagtgaattgctcaggaacagaaaaccaaatactgcatgttctcacttataagtgagagctaaacaatgagtataaatcaacataaagatgagaataatggacattgcagactactagacaggggtgagagggaaaggagaattggttgaaaaactacctatttggtaatatactcacttgctgggtgacaggatctgtaccccaaacctcaccatcatgcaatatacccatgtatcaaacatgtacatataccccctaaatctaaaataaaatttgaaatgattaaataatgaattaactaattttacaaaagaacatggctagagtagtaaaccatgytctataagaacagtaagagtgctaaagcac

SEQ ID NO: 461884 - DNA, 431 bp, Homo sapiens
gcaatccactctaggagtattaaagtgccagtgtggactgaggcaccaaagaatcacattatkatgtcatataacttgccttatttgtagtgacccatgggcttggaaacagaaccatttgcagctgtcagggaagtgcacagtgcctgacctttcccgcagcctcctccccactggccttccatgagaggatcaccccttggagtgtccagggattcctgttaaatgctaaagaccacaggagaatttgggagggggaagatgtttggggagcaacttagttgtcctgaggtgcccatcacccttcaccatttcagcaatatggatcttccaaggatctgggaatgggaaccaggcataagacagatacatgtagatgagaagaggccagagtctttctctgtgcaggcaccatccaacccaagatgagc

SEQ ID NO: 461885 - DNA, 431 bp, Homo sapiens
gcaatccactctaggagtattaaagtgccagtgtggactgaggcaccaaagaatcacattattatgtcatataacttgccttatttgtagtgacccatgggcttggaaacagaaccatttgcagctgtcagggaagtgcacagtgcctgacctttcccgcagcctcctccccactggycttccatgagaggatcaccccttggagtgtccagggattcctgttaaatgctaaagaccacaggagaatttgggagggggaagatgtttggggagcaacttagttgtcctgaggtgcccatcacccttcaccatttcagcaatatggatcttccaaggatctgggaatgggaaccaggcataagacagatacatgtagatgagaagaggccagagtctttctctgtgcaggcaccatccaacccaagatgagc

SEQ ID NO: 461886 - DNA, 431 bp, Homo sapiens
gcaatccactctaggagtattaaagtgccagtgtggactgaggcaccaaagaatcacattattatgtcatataacttgccttatttgtagtgacccatgggcttggaaacagaaccatttgcagctgtcagggaagtgcacagtgcctgacctttcccgcagcctcctccccactggccttccatgagaggatcaccccttggagtgtccagggattcctgttaaatgctaaagaccacaggagartttgggagggggaagatgtttggggagcaacttagttgtcctgaggtgcccatcacccttcaccatttcagcaatatggatcttccaaggatctgggaatgggaaccaggcataagacagatacatgtagatgagaagaggccagagtctttctctgtgcaggcaccatccaacccaagatgagc

SEQ ID NO: 461887 - DNA, 431 bp, Homo sapiens
gcaatccactctaggagtattaaagtgccagtgtggactgaggcaccaaagaatcacattattatgtcatataacttgccttatttgtagtgacccatgggcttggaaacagaaccatttgcagctgtcagggaagtgcacagtgcctgacctttcccgcagcctcctccccactggccttccatgagaggatcaccccttggagtgtccagggattcctgttaaatgctaaagaccacaggagaatttgggagggggaagatgtttggggagcaacttagttgtcctgaggtgcccatcacccttcaccrtttcagcaatatggatcttccaaggatctgggaatgggaaccaggcataagacagatacatgtagatgagaagaggccagagtctttctctgtgcaggcaccatccaacccaagatgagc

SEQ ID NO: 461888 - DNA, 617 bp, Homo sapiens
ttgcaaactgtcaatctgacaaggaattagtaaccagagtatatgagatgcttaaacagtccaatagaaaagaaatctgattaagractgggcaaaagattaaatagacatttctcaccaggaaacatgcaaatggcaaataggtgtatgaaaaaggtttaacatgactgatcatcagaaaaatgcagatcaaaacaatgagatattctctaaccctagttagagaattttttttttcaaaaagaaaaaataagagatactgctgaggatgtagataaagaaggatgctcatttactgttcgtgggactataaattagtacagccacttacagttcttaccaaacttccaccttttttgtttgttttttgaataaacactttgtggattcctcaaagcatttggctaatttttcaagttctaaaaatgttgaccctgattatttttgccaatttttaaaattgcctttatggaggaaataatttgctgatgccctcactccaccattttcattgataccattcctttatcttttgcattggagtagaatttaatatcacctgaaatgaaaatattttcatcagcacttgataataagtgccaattataagataaaaa

SEQ ID NO: 461889 - DNA, 403 bp, Homo sapiens
aagaaccagcaatttcactgctgactatgtatctaaaataaaggaaatcaatacatcagagaaatatctgtgctctcatgtctattgcagtactatttgcaatagtcaagataggaaatcaatctaatcacccataaaaagatgaaagaatgaagacaatgtggtatatacactcaataaaatattattcaatcttaaaaaagaataaaatcctgccatttgcagcacatggacagaaatggaggtcattacgttaagtgaaatcagccagacacagagacaaatgtcatatgttcgcactcataartgggagctaaaaaagtggatctcatgaagatagagagtagattggtggtttaccagaggccaggaaagatagagggtgaagagtaacaaagagagg

SEQ ID NO: 461890 - DNA, 527 bp, Homo sapiens
ataaatgtaaatgactgagatcatacaatgtatgttctttggcccaaatgggatgaaatttgaaatcaattacagaaggaaatttggaaaaatcccaaatatgtgaaaattaataaactccctaaataacaaatgaatcgaagaataagttaaagaaaaatgggaaaatattgtgagattaaaaaaaatagaaacaaaacataccaaaacttagaggataaagataaaatagtacttagaggaaaaagtataactgccaatgtccatatttttaaaaatccaaatcaataatatgactatcttcagaaactagaaaaagagcaaattctagtcaaaaaagcagaaggaaggagataataaaaattagagtagaaataaataaaataaagattagaaaagttatagagaaaaccagtgaaataaaagawgtgtaattctttaagtaggtcaacaaataatgacaaaactttagatagatgaaataggaaaacaaagaacaaagactcaaattaccaaaatcagaatga

SEQ ID NO: 461891 - DNA, 596 bp, Homo sapiens
aaatgtaaatgactgagatcatacaatgtatgttctttggcccaaatgggatgaaatttgaaatcaattacagaaggaaatttggaaaaatcccaaatatgtgaaaattaataaactccctaaataacaaatgaatcgaagaataagttaaagaaaaatgggaaaatattgtgagattaaaaaaaatagaaacaaaacataccaaaacttagaggataaagataaaatagtacttagaggaaaaagtataactgccaatgtccatatttttaaaaatccaaatcaataatatgactatcttcagaaactagaaaaagagcaaattctagtcaaaaaagcagaaggaaggagataataaaaattagagtagaaataaataaaataaagattagaaaagttatagagaaaaccagtgaaataaaagatgtgtaattctttaagtaggtcaacaaataatgacaaaactttagatagatgaaataggaaaacaaagaacaaagactcaaattrccaaaatcagaatgaagaggaatagcagcactaacgaattttcaggtacctaaaaatggtgtatgtccacaaattatataacctag

SEQ ID NO: 461892 - DNA, 428 bp, Homo sapiens
gaaattaactcctcaaagacataatctaatttaaatgactcaagaataaatacaaaatctaaataaaccaataacaattaaagaaattgtatttgtaataaaattattttcacaagggtagtccaagcccagaaggcttcattggtgarttctaccaaatgtttatgaaattgtaatatcaatccttcacaaactgttcaaaaataaaattaaattaaaaggtagaacaagcacttcccaacttattctgtgaggccaaaattaccttaataccaaaaccaaacaaagccatcataggaaaataaactacacactaaaataccttatgaatataaatgcaagatttctaaacaaaatattaacaaactacatccagcaatatatagaaaagaactgattattttccatgaacaaggatttgtcccggg

SEQ ID NO: 461893 - DNA, 551 bp, Homo sapiens
ttgtaccagtatgccttggatgtcggacacgaaatcaaaagagattattttggagctttaagttttaatgactgccttgctgggattcmaacttgcttggggcctgtatcttctttcttttggtcaatttctccctttttgaacaggaatgcttacccaattcctatacctccattgtatcttggaagtaaataacctgttttttattttacaggatcatagatggaagggacttgccttgtctcagacaggacttgggacttttgagtcaatgctggaaacagttaagaatttatgggactgttgggaaggcatgataccattttgaaatgtcaaaagggcatgagatttgcgagggccagagcagaatgatgtacttttcataatgatatcccccaaatatcatgttgaattgtaatccccaatgctgtggtgaggtcttgtgggaggtgtttggatcatggaggcagatctctcatgacttggtacttacttcatgatagtgagttctcatgggatctagtccttcaaaagtgtgtgttacctcctct

SEQ ID NO: 461894 - DNA, 551 bp, Homo sapiens
ttgtaccagtatgccttggatgtcggacacgaaatcaaaagagattattttggagctttaagttttaatgactgccttgctgggattcaaacttgcttggggcctgtatcttctttcttttggtcaatttctccctttttgaacaggaatgcttacccaattcctatacctccattgtatcttggaagtaaataacctgttttttattttacaggatcatagatggaagggacttgccttgtctcagacaggacttgggacttttgagtcaatgctggaawcagttaagaatttatgggactgttgggaaggcatgataccattttgaaatgtcaaaagggcatgagatttgcgagggccagagcagaatgatgtacttttcataatgatatcccccaaatatcatgttgaattgtaatccccaatgctgtggtgaggtcttgtgggaggtgtttggatcatggaggcagatctctcatgacttggtacttacttcatgatagtgagttctcatgggatctagtccttcaaaagtgtgtgttacctcctct

SEQ ID NO: 461895 - DNA, 551 bp, Homo sapiens
ttgtaccagtatgccttggatgtcggacacgaaatcaaaagagattattttggagctttaagttttaatgactgccttgctgggattcaaacttgcttggggcctgtatcttctttcttttggtcaatttctccctttttgaacaggaatgcttacccaattcctatacctccattgtatcttggaagtaaataacctgttttttattttacaggatcatagatggaagggacttgccttgtctcagacaggacttgggacttttgagtcaatgctggaaacagttaagaatttatgggactgttgggaaggcatgataccattttgaaatgtcaaaagggcatgagatttgcgagggccagagcagaatgatrtacttttcataatgatatcccccaaatatcatgttgaattgtaatccccaatgctgtggtgaggtcttgtgggaggtgtttggatcatggaggcagatctctcatgacttggtacttacttcatgatagtgagttctcatgggatctagtccttcaaaagtgtgtgttacctcctct

SEQ ID NO: 461896 - DNA, 551 bp, Homo sapiens
ttgtaccagtatgccttggatgtcggacacgaaatcaaaagagattattttggagctttaagttttaatgactgccttgctgggattcaaacttgcttggggcctgtatcttctttcttttggtcaatttctccctttttgaacaggaatgcttacccaattcctatacctccattgtatcttggaagtaaataacctgttttttattttacaggatcatagatggaagggacttgccttgtctcagacaggacttgggacttttgagtcaatgctggaaacagttaagaatttatgggactgttgggaaggcatgataccattttgaaatgtcaaaagggcatgagatttgcgagggccagagcagaatgatgtacttttcataatgatatcccccaaatatcatgttgaattgtaatccccaatgctgkggtgaggtcttgtgggaggtgtttggatcatggaggcagatctctcatgacttggtacttacttcatgatagtgagttctcatgggatctagtccttcaaaagtgtgtgttacctcctct

SEQ ID NO: 461897 - DNA, 628 bp, Homo sapiens
gattcatttggaagtggttgagtgggtgactgaagaatctcagtggaatttttaagcctaccaaaaaaaacagctttactgggtcaaaaattactcagggtaagtcagagatatgactctaaacttatttaaagatcycactgtaatttccagccacccactacaaaatcagccagtgaagcagaaatcatcaaaactatttgagtaagtgccattctgcattctcttttcaattttcttttctagttcattttctagttcaatgaatgagtgaaataatttacgaatccttatcttttacactagttcattggtatttaaaaccaataggattaagtgatgcccctttgttggtggccaaagatgaaatctggaattaaagatatttttacctttcctccaccattcagggaccaatgaaaattatagataatctgggataaatctctcataaccttagtatttgattatgcattacaagcttcccctgcttttctctctctctgtctctctgacacacacacacacaaacacacacacacacacacgcattctttcctaaccagcaatcagtgtcttaacacaataaaaactgttcttcttttcacggtctttagttctaatgcag

SEQ ID NO: 461898 - DNA, 587 bp, Homo sapiens
ccactaagtgaaaaatactgaactggatgatgactcagattttctctcaatcttaagtctctatcatttaaaataagtctgggtgtctagggttatgagatcaaattgtgtttctttgtcactggaaatccccacttcaaaccttaagaacaagccattcaaaagcttgcactgaggcaacacacttaataggaaagcatgacttcattttggcatgattcgtcttcaaatcaggtcagtgatttagatttgaatgagtggattgttcatgggcaccggatcaaattagactttcatttattttaagaaattcattagaccaattatgacaaccacagagggatgtcttatgactgagaagtgcaaattataagaacaataatatccattgttaagtgtgagatgaaaatttctgtgtagcttgctcattaaaatctgcttccttttacagaaatgatttttatgtaatgtagatggcaggtaaaaaacactgaaccaaaacataattactgagtttataacattytggtaaatgcaaatcgtttataaaataaaatcagttcagaaaatttaaaggaaactgaaaa

SEQ ID NO: 461899 - DNA, 578 bp, Homo sapiens
attctctttaaacagttaatttaatatcatataacataattaggcacaattttagagaaaaataattgacattctttttcattttttttttttggcaaaccttttgaaatacagcaatgcaaaggtacactactcacaacttttcatttgttgtggttcaccattcccttgtaacttaactctctccctccatgaaaagcaaagaatacaaaaggattttaacaaacaatactagtattagcttccttagagtttatattttgttatgactgaaatgttccattccagcagaaatatttaatcattttttttcagactgaaaaacaaccyactaacaaatctgcagccctctcaggagtgttatatagtttcagaaatttttttaaaatttggtttagcaattcatgttttttcatgcttatcacatcgaagctactgagacaactagaaaaagagagttttgagtggcctcattatttttccttagctagtatgtcagattatggaaacggcttgatacggctggaattaaactatctaataaaaaatatacattactatacatatttctcacttct

SEQ ID NO: 461900 - DNA, 578 bp, Homo sapiens
attctctttaaacagttaatttaatatcatataacataattaggcacaattttagagaaaaataattgacattctttttcattttttttttttggcaaaccttttgaaatacagcaatgcaaaggtacactactcacaacttttcatttgttgtggttcaccattcccttgtaacttaactctctccctccatgaaaagcaaagaatacaaaaggattttaacaaacaatactagtattagcttccttagagtttatattttgttatgactgaaatgttccattccagcagaaatatttaatcattttttttcagactgaaaaacaacccactaacaaatctgcagccctctcaggagtgttatatagtttcagaaatttttttaaaatttggtttagcaattcatgttttttcatgcttatcacatcgaagctactgagacaactagaaaaagagasttttgagtggcctcattatttttccttagctagtatgtcagattatggaaacggcttgatacggctggaattaaactatctaataaaaaatatacattactatacatatttctcacttct

SEQ ID NO: 461901 - DNA, 578 bp, Homo sapiens
attctctttaaacagttaatttaatatcatataacataattaggcacaattttagagaaaaataattgacattctttttcattttttttttttggcaaaccttttgaaatacagcaatgcaaaggtacactactcacaacttttcatttgttgtggttcaccattcccttgtaacttaactctctccctccatgaaaagcaaagaatacaaaaggattttaacaaacaatactagtattagcttccttagagtttatattttgttatgactgaaatgttccattccagcagaaatatttaatcattttttttcagactgaaaaacaacccactaacaaatctgcagccctctcaggagtgttatatagtttcagaaatttttttaaaatttggtttagcaattcatgttttttcatgcttatcacatcgaagctactgagacaactagaaaaagagagttttgagtggcctcattatttttccttagctagtatgtcagattatggaaayggcttgatacggctggaattaaactatctaataaaaaatatacattactatacatatttctcacttct

SEQ ID NO: 461902 - DNA, 532 bp, Homo sapiens
ggcaaggtatgatttctttattagatcttggtgttacttctgtccaaaacagtctcctctgagatatcctcccttaaatatttgtttaaatgtccttatatttgtaagggatgcatcagaaaacagatttcatcccagacrttcaaatggatataatttaatccgtaagattagagaaagatgtaaaaaatggcacaagagcaggaagcaaggcttagaggtagagtcacagtactctgggataagagaccaaggggagagtcacagtagttgagtgcagattaagagtggaatagacagtggtgaaggggtagaaaggtgtgagatatctttcttcacacatcataggtcatggctgacattcctgtaacaaaagacagagattaacaagagaaaaggatagcaatttatttaatcaattttttacatgacacaggagccttcagaaatgaagacccaatgacccagggggaactgtctattttgatgcttaggctcatgaagaatgggtatccacgtagaaagttgactg

SEQ ID NO: 461903 - DNA, 532 bp, Homo sapiens
ggcaaggtatgatttctttattagatcttggtgttacttctgtccaaaacagtctcctctgagatatcctcccttaaatatttgtttaaatgtccttatatttgtaagggatgcatcagaaaacagatttcatcccagacgttcaaatggatataatttaatccgtaagattagagaaagatgtaaaaartggcacaagagcaggaagcaaggcttagaggtagagtcacagtactctgggataagagaccaaggggagagtcacagtagttgagtgcagattaagagtggaatagacagtggtgaaggggtagaaaggtgtgagatatctttcttcacacatcataggtcatggctgacattcctgtaacaaaagacagagattaacaagagaaaaggatagcaatttatttaatcaattttttacatgacacaggagccttcagaaatgaagacccaatgacccagggggaactgtctattttgatgcttaggctcatgaagaatgggtatccacgtagaaagttgactg

SEQ ID NO: 461904 - DNA, 532 bp, Homo sapiens
ggcaaggtatgatttctttattagatcttggtgttacttctgtccaaaacagtctcctctgagatatcctcccttaaatatttgtttaaatgtccttatatttgtaagggatgcatcagaaaacagatttcatcccagacgttcaaatggatataatttaatccgtaagattagagaaagatgtaaaaaatggcacaagagcaggaagcaaggcttagaggtagagtcacagtactctgggataagagaccaaggggagagtcacagtagttgagtgcagattaagagtggaatagacagtggtgaaggggtagaaaggtgtgagatatctttcttcacacatcataggtcatggctgacaytcctgtaacaaaagacagagattaacaagagaaaaggatagcaatttatttaatcaattttttacatgacacaggagccttcagaaatgaagacccaatgacccagggggaactgtctattttgatgcttaggctcatgaagaatgggtatccacgtagaaagttgactg

SEQ ID NO: 461905 - DNA, 573 bp, Homo sapiens
tatcatttcttttgccagcaaattttatttagcattagataataaaatattcatttgccacaaaggaaagcagtgcttttgatctcttcacagtgaaaagtttctattctgtaatggagtaaagctctaactagattccacaaaggtattatgaaagtttgttcatgtccattttaaattaaaaaaagaaataragaaccgctattgtggcttgatgacatatttttaaattttttttataattagcaattattattttacagtctttttcttgttttataacatttattcagcattctctaagaataaaaagactaaaagaaatgggccttcatcattttaatatttatattcaaatgtgaaaaaataaggctgaaacttttgatgataacacacaatattttaattctgctgctatgcattatagtacaggtcaaaatagatttctagagccaaatatttattgcagaaaatagttttgtcctaattccaacgacagaagttctaatgatatacagactcatctaattgctataaaatgctaaaacttacacacattgaaaaaaacaggta

SEQ ID NO: 461906 - DNA, 547 bp, Homo sapiens
aattattattttacagtctttttcttgttttataacatttattcagcattctctaagaataaaaagactaaaagaaatgggccttcatcattttaatatttatattcaaatgtgaaaaaataaggctgaaacttttgatgataacacacaatattttaattctgctgctatgcattatagtacaggtcaaaatagatttytagagccaaatatttattgcagaaaatagttttgtcctaattccaacgacagaagttctaatgatatacagactcatctaattgctataaaatgctaaaacttacacacattgaaaaaaacaggtaggtttcttaagagaacaggattgctggcatgttgaatagttttgtgtttttttgttcttttatttttattacttttgaaattaattgtttctttctcccaggtattcacctggtatctaagctagtgagtgtaataagaataaatacaagcttgaggcaaaaaacgaactctgggaaactataaatgctggcatgcctttacttcttatgaaagccaacca

SEQ ID NO: 461907 - DNA, 547 bp, Homo sapiens
aattattattttacagtctttttcttgttttataacatttattcagcattctctaagaataaaaagactaaaagaaatgggccttcatcattttaatatttatattcaaatgtgaaaaaataaggctgaaacttttgatgataacacacaatattttaattctgctgctatgcattatagtacaggtcaaaatagatttctagagccaaatatttattgcagaaaatagttttgtcctaattccarcgacagaagttctaatgatatacagactcatctaattgctataaaatgctaaaacttacacacattgaaaaaaacaggtaggtttcttaagagaacaggattgctggcatgttgaatagttttgtgtttttttgttcttttatttttattacttttgaaattaattgtttctttctcccaggtattcacctggtatctaagctagtgagtgtaataagaataaatacaagcttgaggcaaaaaacgaactctgggaaactataaatgctggcatgcctttacttcttatgaaagccaacca

SEQ ID NO: 461908 - DNA, 547 bp, Homo sapiens
aattattattttacagtctttttcttgttttataacatttattcagcattctctaagaataaaaagactaaaagaaatgggccttcatcattttaatatttatattcaaatgtgaaaaaataaggctgaaacttttgatgataacacacaatattttaattctgctgctatgcattatagtacaggtcaaaatagatttctagagccaaatatttattgcagaaaatagttttgtcctaattccaacgacagaagttctartgatatacagactcatctaattgctataaaatgctaaaacttacacacattgaaaaaaacaggtaggtttcttaagagaacaggattgctggcatgttgaatagttttgtgtttttttgttcttttatttttattacttttgaaattaattgtttctttctcccaggtattcacctggtatctaagctagtgagtgtaataagaataaatacaagcttgaggcaaaaaacgaactctgggaaactataaatgctggcatgcctttacttcttatgaaagccaacca

SEQ ID NO: 461909 - DNA, 555 bp, Homo sapiens
ttaaattatttgttaattgagcattaggtttctctcaaactttctcayaatgtatatgaattaactcaaattaaatatttcaaacttgtagtagttaccaatagtctaaaaaccagtcttctgatcgtcttgatcagcataagaaaattgaaagagacaaaaaaaatatattatatagatagatagatagatagatagatagacttagagctagagtgagtcaactaacaattgtattttgctgcattagcaaaatatattgcccaggatgctactactccatgagggtaattaattgtctactttatattttgactaggaagagtttccaaaatttttgcttgctatttccaaatatctattttagacagagttctccagagaaacagaatcaataactatataaaaatatatagaaagataattattatgaaggattgggtcatgtgattttggaggctgagaaatcctatcaactgctgtttgcaagccagaggcccaggaaggcaagtagtgtagtgccagtacaaacctcaaggtctgataaccagggga

SEQ ID NO: 461910 - DNA, 606 bp, Homo sapiens
aatatgtataaaacattgatatattgcccaggacttacatgggagatgttatcattatactcaatttatagatgatacgaagctcagggagattaagtaagcccaaagttcacacatctcattacatggatcagtcaaaattcaaactcagttttctaattctaaaaacaatcttgataatctatcaatttgttacactatttttctggtcattttaagaatttattatttgaaacttaaaacactactccttaactatctgatgtatwgagtactcttttgattataattgacaaaaacacacacattcaaacaagcttaatcaacaaagaaatgtattcactcatgtagtagaaaacctcagggggtgctttctgtacaagcctggctgctgtcatgccctgcaatggtaatgtaagaattttgcctctctcattccatatttgttctattattttctgtgttgactttgttttcagtctgacttttctacacatttggaaagatggctgttagcagctccaggccaatatagcatgcaattccagatctgagaaaagcaaaattctttcttttccaccattcatactaatcccttaaaagagt

SEQ ID NO: 461911 - DNA, 601 bp, Homo sapiens
atttatttaataaacaaaaaaccaaaagagaaagaaaggttaaattatggtaagaactgtaagctttgtgttattttaggctgcttattctcatcaccctctctcaagttatacagttaccttgaaaataaatatccctcaatcrctgactacaagcaatctggcagccttcagcttagttccctgagaattattgtttgacctggaacgtggcttactgcaagataccacttataaaactgtctttatttgacctcatttgtaactggcccatgaaagtctttttgactagcatacttattgaaaacattgaaaggcaacttttttaaatcatggtagactaaagtggtagataacagttagggcaaataatatggtagctggaaaacttaaaaagctaggaaatataaataggagttttgaagacttctgacatattactggcactataaaaggtcacacacgtatgattgtgcacattctaagcacaatgcttattctcaaggaaaatatgagaaggccctaagctttcacctccagatgaccatgaagctatgggaaagcagaatgtgaagactaaggcagagttgtcaaccaaccg

SEQ ID NO: 461912 - DNA, 601 bp, Homo sapiens
atttatttaataaacaaaaaaccaaaagagaaagaaaggttaaattatggtaagaactgtaagctttgtgttattttaggctgcttattctcatcaccctctctcaagttatacagttaccttgaaaataaatatccctcaatcactgactacaagcaatctggcagcyttcagcttagttccctgagaattattgtttgacctggaacgtggcttactgcaagataccacttataaaactgtctttatttgacctcatttgtaactggcccatgaaagtctttttgactagcatacttattgaaaacattgaaaggcaacttttttaaatcatggtagactaaagtggtagataacagttagggcaaataatatggtagctggaaaacttaaaaagctaggaaatataaataggagttttgaagacttctgacatattactggcactataaaaggtcacacacgtatgattgtgcacattctaagcacaatgcttattctcaaggaaaatatgagaaggccctaagctttcacctccagatgaccatgaagctatgggaaagcagaatgtgaagactaaggcagagttgtcaaccaaccg

SEQ ID NO: 461913 - DNA, 601 bp, Homo sapiens
atttatttaataaacaaaaaaccaaaagagaaagaaaggttaaattatggtaagaactgtaagctttgtgttattttaggctgcttattctcatcaccctctctcaagttatacagttaccttgaaaataaatatccctcaatcactgactacaagcaatctggcagccttcagcttagttccctgagaattattgtttgacctggaacgtggcttactgcaagataccacttataaaactgtctttatttgacctcatttgtaactggcccatgaaagtctttttractagcatacttattgaaaacattgaaaggcaacttttttaaatcatggtagactaaagtggtagataacagttagggcaaataatatggtagctggaaaacttaaaaagctaggaaatataaataggagttttgaagacttctgacatattactggcactataaaaggtcacacacgtatgattgtgcacattctaagcacaatgcttattctcaaggaaaatatgagaaggccctaagctttcacctccagatgaccatgaagctatgggaaagcagaatgtgaagactaaggcagagttgtcaaccaaccg

SEQ ID NO: 461914 - DNA, 181 bp, Homo sapiens
agcccatcaggcaaccctaagaaaataacttacaaaatataataaaatcagtgataaggggattaatacagtgcattaaaaatatctattsactaaagaaaaggcaatcttagaaaaatagagaaataaaaaagcagaagacatatagaaaacaactggtaaactggcaaacataaattct

SEQ ID NO: 461915 - DNA, 525 bp, Homo sapiens
aaaaactccatttaaaatagagtttgcagatgggtttagaaaaaaacataatccaactatctgttttagtcagcagacacactttatattcaaagacacaaacagtttgaatacaaatgactgaattaagataaatcattcaaacagtaatcaagagagacctggtcataataacacacaaaacaaacttcaagagataaattgtgattagcragaaagagcattttacaatgatagaaaggattaatacatcaagaaaacataacaataagcacatatgcacctgtcaagagaatcccaaaatacatgaaggaagaaataaagtaggcaatataaaattttccctccaccaatacacacataattccctagaatagatggctttactgatacattctaccaaatgtttagaagagtttacactaattcttcacaaacacactcaaaaaatagaaaaggagggattattttccaagtctttttataagactagtaaaaccagacaaatatgtgacaagtaaaaca

SEQ ID NO: 461916 - DNA, 565 bp, Homo sapiens
ttgtgcaggtattatttgagtttgtaaacaccgttattaattatttttcatctggattgattttgatttgcatgaggttttactaatgtgttcccatacaaaacacacaattactcttcacatcatatagttctgggcaccacgtcaaatatgtgagaaaaatttccccaaatgtattctatatatgggttcaactactaccacatgttgtttcagcwttatattgaattagtaaattctctgtgaaatgtcatctatttctacacatatgcccctcgggacatctgtcctatttgtcaataccacaatctgggcatctgtcaaaattacaggctataccgacgtttaggcccctacttgattggctctatcacagggtatgtaaaataaacaaagtttaaaacatcatcaaaatgggaccatatgtctaaacctatcttatgacccttagcagaaggaatgagtgttactacgaatagtcccatctttccgggaacctgaactagacacagtaaagaagtctcttgctaaataaatgggtccttctggctctacaataggtcaa

SEQ ID NO: 461917 - DNA, 565 bp, Homo sapiens
ttgtgcaggtattatttgagtttgtaaacaccgttattaattatttttcatctggattgattttgatttgcatgaggttttactaatgtgttcccatacaaaacacacaattactcttcacatcatatagttctgggcaccacgtcaaatatgtgagaaaaatttccccaaatgtattctatatatgggttcaactactaccacatgttgtttcagcattatattgaattagtaaattctctgtgaaatgtcatctatttctacacatatgcccctcgggacatctgtcctatttgtcaataccacaatctgggcatctgtcaaaattacaggctataccgacgtttaggcccctacttgattggctctatcacagggtatgtaaaataaacaaagtttaaaacatcatcaaaatgggaccatatgtctaaacctatctyatgacccttagcagaaggaatgagtgttactacgaatagtcccatctttccgggaacctgaactagacacagtaaagaagtctcttgctaaataaatgggtccttctggctctacaataggtcaa

SEQ ID NO: 461918 - DNA, 602 bp, Homo sapiens
aaactttgtttatgccattgccttgtgcaggtattatttgagtttgtaaacaccgttattaattatttttcatctggattgattttgatttgcatgaggttttactaatgtgttcccatacaaaacacacaattactcttcacatcatatagttctgggcaccacgtcaaatatgtgagaaaaatttccccaaatgtattctatatatgggttcaactactaccacatgttgtttcagcattatattgaattagtaaattctctgtgaaatgtcatctatttctacacatatgcccctcgggacatctgtcctatttgtcaataccacaatctgggcatctgtcaaaattacaggctataccgacgtttaggcccctacttgattggctctatcacagggtatgtaaaataaacaaagtttaaaacatcatcaaaatgggaccatatgtctaaacctatcttatgacccttagcagaaggaatgagtgttactacgaatwgtcccatctttccgggaacctgaactagacacagtaaagaagtctcttgctaaataaatgggtccttctggctctacaataggtcaatgtagatattagtct

SEQ ID NO: 461919 - DNA, 602 bp, Homo sapiens
aaactttgtttatgccattgccttgtgcaggtattatttgagtttgtaaacaccgttattaattatttttcatctggattgattttgatttgcatgaggttttactaatgtgttcccatacaaaacacacaattactcttcacatcatatagttctgggcaccacgtcaaatatgtgagaaaaatttccccaaatgtattctatatatgggttcaactactaccacatgttgtttcagcattatattgaattagtaaattctctgtgaaatgtcatctatttctacacatatgcccctcgggacatctgtcctatttgtcaataccacaatctgggcatctgtcaaaattacaggctataccgacgtttaggcccctacttgattggctctatcacagggtatgtaaaataaacaaagtttaaaacatcatcaaaatgggaccatatgtctaaacctatcttatgacccttagcagaaggaatgagtgttactacgaatagtcccatctttccgggaacctgaactagacacagtaaagaagtctcttgctaaataaatgggtccttctggctctacartaggtcaatgtagatattagtct

SEQ ID NO: 461920 - DNA, 440 bp, Homo sapiens
ctttccaccattatgaccatgaatacacaatagttagctcctgcttataagtgagaacatgcagtatttggttctgttcccatgttatcttgcttaggataatggcctccatatgcatccattttgctgcaaataacctaatttggttcttttttatggctgtgtagaattccagtggtatacatgagccactttttccttatctaccagaagatatttttaayaactactttagtggagaatgaaataacctttggtcagaaaggatggactctcagcaaaattttagaaagagatacagaaggagatttggagcatgtgaaaatgcataaaataagaacaccattgtcataatctaaattgcaggttaatcagattgccagcagatccaatttattttgatttacaagaagtaacataagttttccatcagattattg

SEQ ID NO: 461921 - DNA, 440 bp, Homo sapiens
ctttccaccattatgaccatgaatacacaatagttagctcctgcttataagtgagaacatgcagtatttggttctgttcccatgttatcttgcttaggataatggcctccatatgcatccattttgctgcaaataacctaatttggttcttttttatggctgtgtagaattccagtggtatacatgagccactttttccttatctaccagaagatatttttaataactactttagtggagaatgaaatmacctttggtcagaaaggatggactctcagcaaaattttagaaagagatacagaaggagatttggagcatgtgaaaatgcataaaataagaacaccattgtcataatctaaattgcaggttaatcagattgccagcagatccaatttattttgatttacaagaagtaacataagttttccatcagattattg

SEQ ID NO: 461922 - DNA, 510 bp, Homo sapiens
tttttccctagggcttttggaargaacatggtcctctgacactttgattccaaatttctggtttctacaactgtgagagaataaatatctgttgttttaagtcaccagcttggatgtaaattattatggcagccttacaaaactagaagactagatacgtgctcttattgttaaacctaaccaaccaaccaaccaacagacaaacagcatccaacatgatctaatgttttcttcatatccctcatgatgaaaggaaggtacatagaaagaactggaattgtcctgagttaatccactcactgacactctagcccaaacttgaggggagccatccaaatcatagtgagtaggtcacaggaggatgtcatgtgtcacaggaggatactaatcccaccattcacaatgtctttgcccagggaatggggtctgttatgaagcattataccacctgggcctacactaggcagggattggcctgaaagcacatccttcatatagcttctgctgcct

SEQ ID NO: 461923 - DNA, 510 bp, Homo sapiens
tttttccctagggcttttggaaggaacatggtcctctgacactttgattccaaatttctggtttctacaactgtgagagaataaatatctgttgttttaagtcaccagcttggatgtaaattattatggcagccttacaaaactagaagactagatacgtgctcttattgttaaaccyaaccaaccaaccaaccaacagacaaacagcatccaacatgatctaatgttttcttcatatccctcatgatgaaaggaaggtacatagaaagaactggaattgtcctgagttaatccactcactgacactctagcccaaacttgaggggagccatccaaatcatagtgagtaggtcacaggaggatgtcatgtgtcacaggaggatactaatcccaccattcacaatgtctttgcccagggaatggggtctgttatgaagcattataccacctgggcctacactaggcagggattggcctgaaagcacatccttcatatagcttctgctgcct

SEQ ID NO: 461924 - DNA, 510 bp, Homo sapiens
tttttccctagggcttttggaaggaacatggtcctctgacactttgattccaaatttctggtttctacaactgtgagagaataaatatctgttgttttaagtcaccagcttggatgtaaattattatggcagccttacaaaactagaagactagatacgtgctcttattgttaaacctaaccaaccaaccaaccaacagacaaacagcatccaacatgatctaatgttttcttcatatccctcatgatgaaaggaaggtacatagaaagaactggaattgtcctgagttaatccactcactgacactctagcccaaacttgaggggagccatccaaatcatagtgagtargtcacaggaggatgtcatgtgtcacaggaggatactaatcccaccattcacaatgtctttgcccagggaatggggtctgttatgaagcattataccacctgggcctacactaggcagggattggcctgaaagcacatccttcatatagcttctgctgcct

SEQ ID NO: 461925 - DNA, 521 bp, Homo sapiens
cctacttctgtgaaagaggatgcagctgtcctgatgctctggctatttctacagaggagacacaactaactgatggtcttatccttctttcatgtataatatgcataagaggagattttacatattttgtgtattaaagggctttgaccatgcayttcatttccaaggtgacagtagttaccttgtgaaatgataatgaaaccacaacaaaagtcagcagtgaggattagcaaagaaaaaactgggaccaggagtggaggtgctgattgatgtaatgtagtcaccatgtacatgttgctatggaaattatgcaaaaatgaaagaaaaaagaaactaagtagttgtattgagaagatagaaatgacatggcatgtctctggtaacattattgaagagatttcttccatttcctgagacaagcatctagaatagttaaaaatgggaaattaaggggttcagtcagaagattaagttagcattacaaatctctcacataataagaatcagcatctctccccagt

SEQ ID NO: 461926 - DNA, 454 bp, Homo sapiens
taaagggctttgaccatgcatttcatttccaaggtgacagtagttaccttgtgaaatgataatgamaccacaacaaaagtcagcagtgaggattagcaaagaaaaaactgggaccaggagtggaggtgctgattgatgtaatgtagtcaccatgtacatgttgctatggaaattatgcaaaaatgaaagaaaaaagaaactaagtagttgtattgagaagatagaaatgacatggcatgtctctggtaacattattgaagagatttcttccatttcctgagacaagcatctagaatagttaaaaatgggaaattaaggggttcagtcagaagattaagttagcattacaaatctctcacataataagaatcagcatctctccccagtctcctgatgaaactttttggcactgtgtttacatctcaagtacagaaagctcacttgcaatcctcat

SEQ ID NO: 461927 - DNA, 521 bp, Homo sapiens
cctacttctgtgaaagaggatgcagctgtcctgatgctctggctatttctacagaggagacacaactaactgatggtcttatccttctttcatgtataatatgcataagaggagattttacatattttgtgtattaaagggctttgaccatgcatttcatttccaaggtgacagtagttaccttgtgaaatgataatgaaaccacaacaaaagtcagcagtgaggattagcaaagaaaaaactgggaccaggagtggaggtgctgattgatgtaatgtagtcaccatgtacatgttgctatggaaattatgcaaaaatgaaagaaaaaagraactaagtagttgtattgagaagatagaaatgacatggcatgtctctggtaacattattgaagagatttcttccatttcctgagacaagcatctagaatagttaaaaatgggaaattaaggggttcagtcagaagattaagttagcattacaaatctctcacataataagaatcagcatctctccccagt

SEQ ID NO: 461928 - DNA, 454 bp, Homo sapiens
taaagggctttgaccatgcatttcatttccaaggtgacagtagttaccttgtgaaatgataatgaaaccacaacaaaagtcagcagtgaggattagcaaagaaaaaactgggaccaggagtggaggtgctgattgatgtaatgtagtcaccatgtacatgttgctatggaaattatgcaaaaatgaaagaaaaaagaaactaagtagttgtattgagaagatagaaatgacatggcatgtctctggtaacattattgaagagatttcttccatttcctgagacaagcatctagaatagttaaaaatgggaaattaaggggttyagtcagaagattaagttagcattacaaatctctcacataataagaatcagcatctctccccagtctcctgatgaaactttttggcactgtgtttacatctcaagtacagaaagctcacttgcaatcctcat

SEQ ID NO: 461929 - DNA, 454 bp, Homo sapiens
taaagggctttgaccatgcatttcatttccaaggtgacagtagttaccttgtgaaatgataatgaaaccacaacaaaagtcagcagtgaggattagcaaagaaaaaactgggaccaggagtggaggtgctgattgatgtaatgtagtcaccatgtacatgttgctatggaaattatgcaaaaatgaaagaaaaaagaaactaagtagttgtattgagaagatagaaatgacatggcatgtctctggtaacattattgaagagatttcttccatttcctgagacaagcatctagaatagttaaaaatgggaaattaaggggttcagtcagaagattaagttagcattacaaatctctcacataataagaatcagcatctctccccagtctcctgrtgaaactttttggcactgtgtttacatctcaagtacagaaagctcacttgcaatcctcat

SEQ ID NO: 461930 - DNA, 543 bp, Homo sapiens
gtggctacaatgctacttgccaatggagagaagtcctcatatcaacctcggcagtggatatgatttatttaaaaaagaaagaaaccaggagtcatctgggtaaaattaactgcctgtggtatgaactttgatcagcctaccagaaccacaatctagcaccaaaatccttgggtaaatcaaaaacattagaataaaaaataaagaaaatacaggcaaagagagagaaagcaaaactattctaaaactcatgtcagagttaayagtctttagcagtgaaaaaaacctttttttcattgagggttaattagttgcttcactttcccttgtctagaaaagattgctgtagtaattattattaacactcttaataataatggtaaccagtaataataattgagcctttttacatcccagggttagtattataattggtgccttatgtattaactcttctgatcctcaccagaggaagctcacaaaggtaactaactggctaagcctctcattggcagtaggtgatacagcctgaagaacccagatggt

SEQ ID NO: 461931 - DNA, 543 bp, Homo sapiens
gtggctacaatgctacttgccaatggagagaagtcctcatatcaacctcggcagtggatatgatttatttaaaaaagaaagaaaccaggagtcatctgggtaaaattaactgcctgtggtatgaactttgatcagcctaccagaaccacaatctagcaccaaaatccttgggtaaatcaaaaacattagaataaaaaataaagaaaatacaggcaaagagagagaaagcaaaactattctaaaactcatgtcagagttaatagtctttagcagtgaaaaaaacctttttttcattgagggttaattagttgcttcactttcccttgtctagaaaagattgctgtagtaattattattaacactcttaataataatggtaaccagtaataataattgagcctttttacatcccagggttagtattataattggtgccttatgtattaactcttctgatcctcaccagaggaagctcacaaaggtaactaactggctaarcctctcattggcagtaggtgatacagcctgaagaacccagatggt

SEQ ID NO: 461932 - DNA, 563 bp, Homo sapiens
tggctaagcctctcattggcagtaggtgatacagcctgaagaacccagatggttcagctcctgaatccttcttcttaccattatgttctgccacgtctcacataaccagtgggaatccacacagcagatgacccttaactttgttctgtaaaaattccatagtaggtaaaataagctatcacccaaggggtttctctactctccaatacagaaaatggacattagcctagtgataccaaaatgctactgttcttygtgggaaatcctagccagttgaaaccattaaaggggacaaatgtcactgagcatctactggatgccagacattatttcatgcatttcaatgtgatttatctcacttagtcaaaaaaatatatatatggtaaatttgaagaatggttaaagaagtgggtgaacagccttggcattttctcaacactataatttttttggttgtttactttgttttttcttgtaattaagtaataataaaaagttcaataacaacagctcactttttgaagaatggttaaagaagtgggtgagcagcctggcattttctc

SEQ ID NO: 461933 - DNA, 563 bp, Homo sapiens
tggctaagcctctcattggcagtaggtgatacagcctgaagaacccagatggttcagctcctgaatccttcttcttaccattatgttctgccacgtctcacataaccagtgggaatccacacagcagatgacccttaactttgttctgtaaaaattccatagtaggtaaaataagctatcacccaaggggtttctctactctccaatacagaaaatggacattagcctagtgataccaaaatgctactgttctttgtgkgaaatcctagccagttgaaaccattaaaggggacaaatgtcactgagcatctactggatgccagacattatttcatgcatttcaatgtgatttatctcacttagtcaaaaaaatatatatatggtaaatttgaagaatggttaaagaagtgggtgaacagccttggcattttctcaacactataatttttttggttgtttactttgttttttcttgtaattaagtaataataaaaagttcaataacaacagctcactttttgaagaatggttaaagaagtgggtgagcagcctggcattttctc

SEQ ID NO: 461934 - DNA, 563 bp, Homo sapiens
tggctaagcctctcattggcagtaggtgatacagcctgaagaacccagatggttcagctcctgaatccttcttcttaccattatgttctgccacgtctcacataaccagtgggaatccacacagcagatgacccttaactttgttctgtaaaaattccatagtaggtaaaataagctatcacccaaggggtttctctactctccaatacagaaaatggacattagcctagtgataccaaaatgctactgttctttgtgggaaatcctagccagttgaaaccattaaaggggacaaatgtcactgagcatctactggatgccagacattatttcatgcatttcaatgtgatttatctcacttagtcaaaaaaawatatatatggtaaatttgaagaatggttaaagaagtgggtgaacagccttggcattttctcaacactataatttttttggttgtttactttgttttttcttgtaattaagtaataataaaaagttcaataacaacagctcactttttgaagaatggttaaagaagtgggtgagcagcctggcattttctc

SEQ ID NO: 461935 - DNA, 503 bp, Homo sapiens
aaaaaaaaaaaaaaaggctaaatatttccattgctgagatgtaaacgaagaattcccaaacwtttgaggtatctgtttaatgtctaaaataagaagttgaaacctttcactaacaacttgtgctgtgaaacacgtaagtttaaatgagtaattcaacagttactgtttggatttacatagaaagacttttgcctaagcctgtgctgaacacatatcaaaacaattatgcctagcacgtacacagtgataagaatgttttcttttggcatccactagaggagaaacttagagcagcaccactttctactgctacccttgggtccatgctgcggtagttatttacctgaattgtcctcggagtaactgcatttccttgtataagaaatggacctaaagtaatggatttgcccattagtgaataatattagaaacagtttcaattgtaatgcagttcctgttcagttccatgcaatttctgcatagaaacacaactgaaaggaaaa

SEQ ID NO: 461936 - DNA, 483 bp, Homo sapiens
ttacatagaaagacttttgcctaagcctgtgctgaacacatatcaaaacaattatgcctagcacgtacacagtgataagaatgttttcttttggcatccactagaggagaaacttagagcagcaccactttctactgctacccttgggtccatgctgcggtagttatttacctgaattgtcctcggagtaactgcatttccttgtataagaaatggacctaaagtaatggatttgcccattagtgaataatattagaaacagtttcaattgtaatgcarttcctgttcagttccatgcaatttctgcatagaaacacaactgaaaggaaaatgacaaccaatcaaccagtaaaactgcaataaatacttttcaggtgagaaaacgtcaaaagagtgtggatttggaagtctttccattgtgctaattatagatcttttttatctctctgaacacttgtcaatagtcattaggtttatacaatt

SEQ ID NO: 461937 - DNA, 483 bp, Homo sapiens
ttacatagaaagacttttgcctaagcctgtgctgaacacatatcaaaacaattatgcctagcacgtacacagtgataagaatgttttcttttggcatccactagaggagaaacttagagcagcaccactttctactgctacccttgggtccatgctgcggtagttatttacctgaattgtcctcggagtaactgcatttccttgtataagaaatggacctaaagtaatggatttgcccattagtgaataatattagaaacagtttcaattgtaatgcagttcmtgttcagttccatgcaatttctgcatagaaacacaactgaaaggaaaatgacaaccaatcaaccagtaaaactgcaataaatacttttcaggtgagaaaacgtcaaaagagtgtggatttggaagtctttccattgtgctaattatagatcttttttatctctctgaacacttgtcaatagtcattaggtttatacaatt

SEQ ID NO: 461938 - DNA, 556 bp, Homo sapiens
tccacatcttagccaaatcacttcctgaaacctgactttacaacaaaaaccttctttgttcttccttagcctgtgcatagtggcagcatttaaaattaataccatgcaattaccttctgttctatgataatctttcatattttctcttgttttctcaaactcttcataactcttaggtcaaatttcakgcactatatagttcccttccttttgtatcacctttatgtagctaagattatagtaagttcttaacaagaatttatagatttatcggtcaaattattaacctttcaacaagaagaccaaagccaatgtaatatttttaaaagtagggattaagaaaattacctttggtattatccttaaagagagttttagtccttattttccaatacatacactcaactatacctcccattttgtaagaaaaccagctgcatttgggaacatttcttaaattgttgaagtcttaacattgatacatttaactatttacttacaatctttttgaatattatagaggatattcactaaagataactaaagagattgtact

SEQ ID NO: 461939 - DNA, 556 bp, Homo sapiens
tccacatcttagccaaatcacttcctgaaacctgactttacaacaaaaaccttctttgttcttccttagcctgtgcatagtggcagcatttaaaattaataccatgcaattaccttctgttctatgataatctttcatattttctcttgttttctcaaactcttcataactcttaggtcaaatttcatgcactatatagttcccttccttttgtatcacctttatgtagctaagattatagtaagttcttaacaagaatttatagatttatcggtcaaattattaacckttcaacaagaagaccaaagccaatgtaatatttttaaaagtagggattaagaaaattacctttggtattatccttaaagagagttttagtccttattttccaatacatacactcaactatacctcccattttgtaagaaaaccagctgcatttgggaacatttcttaaattgttgaagtcttaacattgatacatttaactatttacttacaatctttttgaatattatagaggatattcactaaagataactaaagagattgtact

SEQ ID NO: 461940 - DNA, 556 bp, Homo sapiens
tccacatcttagccaaatcacttcctgaaacctgactttacaacaaaaaccttctttgttcttccttagcctgtgcatagtggcagcatttaaaattaataccatgcaattaccttctgttctatgataatctttcatattttctcttgttttctcaaactcttcataactcttaggtcaaatttcatgcactatatagttcccttccttttgtatcacctttatgtagctaagattatagtaagttcttaacaagaatttatagatttatcggtcaaattattaacctttcaacaagaagaccaaagccaatgtaatatttttaaaagtagggattaagaaaattacctttggtattatccttaaagagagttttagtccttattttccaatacatacactcaactatacctcccattttgtaagaaaaccagctgcatttgggaacatttcttaaattgttgaagtcttaacattgatacatttaactatttacttacaatctttktgaatattatagaggatattcactaaagataactaaagagattgtact

SEQ ID NO: 461941 - DNA, 596 bp, Homo sapiens
atgaaatctgactgtaaaacatgggtgtttgaacaatgtgaaatcagtgcaccttgaaattgaactgaataacagcgattttatttttcaggggaagacaaccaaaggtctgactgcctgcggggtcaggcagaataaagccatatttttcttcttgcagagagcctataaacagatgtgcaagtaggagagatatcgctgattattttcccagcaagcaatattaataattgataccctggggaaggaatggattcctggggggaggtatataaacagccgctctgggagtgtctgtcttatgcggttgagataagtactgaaatacgccctggtctcctgcaataccctcaggcttattagggtagggaaaagatcccgccctggtaagtttgaggtcagaccagttctctgctctcaaactctgttttctgttgtttaagatgtttatcaagacaatatgtgcacagctgaacatagaccctcatcagtaactctaattttgccctttgccttgtgatctttattgccctttaaagcatgtgatctttgtgaygtactccctgttcatacacgccctccccttttaaagtcct

SEQ ID NO: 461942 - DNA, 582 bp, Homo sapiens
ttgttcacatttctagttctttttgttttgttttgtttcttatcagtatggctctgggagttatttacaaaatttaattttaaaagtgacagtccgcatcattagggttccttggaaacttatgaaaaaaataaataaatactggtagataagaaatttctgcaaaattgttagttatatgtgtaatatatctaatcgtaactaaagaaacatgtgtattacagtaataatttaatttattattgtcattttcttgccagatatgagggcatttttttaagctctccacaygtggtttactgtggaccaaacactggcagcttcaggcttacaatgtgctgacaaatccttcttagttcgttcactttgaagaatgtgagcatgcactgttcatgtgcctggcaagcatgtaacctgctcaggagaaggacagtgtccactcaggtcatcaggtgaacttgtgatgaggccatcaataggctgcacgtgtgctccagaaaatgaaattcccactatcaacctattttccatttccacccaatggcccgcccctgctccaaagccatgtctccacctcttagg

SEQ ID NO: 461943 - DNA, 484 bp, Homo sapiens
tttaagctctccacacgtggtttactgtggaccaaacactggcagcttcaggcttacaatgtgctgacaaatccttcttagttcgttcactttgaagaatgtgagcatgcactgttcatgtgcctggcaagcatgtaacctrctcaggagaaggacagtgtccactcaggtcatcaggtgaacttgtgatgaggccatcaataggctgcacgtgtgctccagaaaatgaaattcccactatcaacctattttccatttccacccaatggcccgcccctgctccaaagccatgtctccacctcttaggaatgcttgattttcagcattgctgaacaggggtcaaagaaaacaaactgaacaaacaaacaaatgaagcctttaacccgggagcaaagacacagcacctccccactccacaacagctccagagctgcacagctgctgccagagcctgagcacaggcctgagctctggcccatggatc

SEQ ID NO: 461944 - DNA, 590 bp, Homo sapiens
cagcataatctaagaatacagagcataaaaacctattttagaaaaaatattaaaagcataatggtaaaattcaacacttatttttagaacctactrtgtgccaggcactttaaaaaatgtttttaatacaaggatgagcaaaattggtgaaatctctgcccctgtggagtgtccagtctaatgaaaaaagagtaagcaagttaagaagcaaatgcataatatagtgttaggttgtgacaagggctatgtggaaaaaataaagcgtggttgaatatagaatgacacaatgtgtgtgtgtagagagtattgttggagagaaggctcagaagtgaaagaaatgatgaaagaaccacaccaatatctgatgcaagagggaatagccaatcagaagccttaaggctgcaagagctgggaggtttaataaacagcaagaaaaatagtgccaaagtgatatagagtggcagagggaaaagtagtaagtaagagatacaaaagataagcagggcccagattccctgtggcctgggagataatggtgaagacttatggatttgtttcctgtgatgaaaatctgttgtagaatttgagca

SEQ ID NO: 461945 - DNA, 484 bp, Homo sapiens
tttaagctctccacacgtggtttactgtggaccaaacactggcagcttcaggcttacaatgtgctgacaaatccttcttagttcgttcactttgaagaatgtgagcatgcactgttcatgtgcctggcaagcatgtaacctgctcaggagaaggacagtgtccactcaggtcatcaggtgaacttgtgatgaggccatcaataggctgcacgtgtgctccagaaaatgaaattcccactatcaacctattttccatttccacccaatggcccrcccctgctccaaagccatgtctccacctcttaggaatgcttgattttcagcattgctgaacaggggtcaaagaaaacaaactgaacaaacaaacaaatgaagcctttaacccgggagcaaagacacagcacctccccactccacaacagctccagagctgcacagctgctgccagagcctgagcacaggcctgagctctggcccatggatc

SEQ ID NO: 461946 - DNA, 590 bp, Homo sapiens
cagcataatctaagaatacagagcataaaaacctattttagaaaaaatattaaaagcataatggtaaaattcaacacttatttttagaacctactatgtgccaggcactttaaaaaatgtttttaatacaaggatgagcaaaattggtgaaatctctgcccctgtggagtgtccagtctaatgaaaaaagagtaagcaagttaagaagcaaatgcataatatagtgttaggttgtgacaagggctatgtggaaaaaataaagcgtggttgaatatagaatgacacaatgtgtgtgtgtagagagtattgttggagagaaggctcagaagtgaaagaaatgatgaaagaaccacaccaatatctgatgcaagagggaatagccaatcagaagccttaaggctgcaagagctgggaggtttaataaacagcaagaaaaatagtgccaaagtgatatagagtggcagagggaaaagtagtaagtaagagatacaaaagataagcagggccyagattccctgtggcctgggagataatggtgaagacttatggatttgtttcctgtgatgaaaatctgttgtagaatttgagca

SEQ ID NO: 461947 - DNA, 484 bp, Homo sapiens
tttaagctctccacacgtggtttactgtggaccaaacactggcagcttcaggcttacaatgtgctgacaaatccttcttagttcgttcactttgaagaatgtgagcatgcactgttcatgtgcctggcaagcatgtaacctgctcaggagaaggacagtgtccactcaggtcatcaggtgaacttgtgatgaggccatcaataggctgcacgtgtgctccagaaaatgaaattcccactatcaacctattttccatttccacccaatggcccgcccctgctccaaagccatgtctccacctcttaggaatgcttgattttcagcattgctgaacaggggtcaaagaaaacaaactgaacaaasaaacaaatgaagcctttaacccgggagcaaagacacagcacctccccactccacaacagctccagagctgcacagctgctgccagagcctgagcacaggcctgagctctggcccatggatc

SEQ ID NO: 461948 - DNA, 402 bp, Homo sapiens
ggccttcggaagcaaagcacaaagcagctggaagaggcttacagaaagagcacaagaatgcggggtatctgtgtgtgctgtcaacagtgctcactattactgcgaatgaatatctgtgtccccccaaaattcatatattgaagcctaacccccaagttgatgatatttggaggtggggccttggggaggtgattaggtcatgagtgtggagccctcataggtgtgattcctgcccttataagaaaagatgatctctctctccaccatctaaggatacaagaagacagcatctgcaaaccaggaagggggtcttcaccagtcacagagtctgctgacacmctgaccctggactatcctaggctccagaactccagaaatcaatctctgttgtttaaatcactc

SEQ ID NO: 461949 - DNA, 627 bp, Homo sapiens
ctgaattctggacggcctttccatgttctcttttctgtaaaaatgagactttttatttctggaagcacttgcctaggagatagcaaagttaaatgttgtgtttcatcacaatcagtctcaactaactaaaactaattaaacactaggaattttgagtaacccacctaccctcactagaccctttctggatctaactgaagatgttcatgatcaagaagcaagaggctgtttcagctctcatgtacagatctcagccttgtatagaaaggtagttctcagtgcttaattagcaccagcagcatggccctacacttcatagcatttaaaaccttcagttttgccyttaggtccacctatgcagttgtcccctaataagctcagctcagctccaggccacccctggctctgtggcccatggtttttgtattattctttgtcatctctaattagcctcttccgcctcgccactacttaattatttatccttttcagaacttctggcatgtattgtactatattttacttttaaaatatgttgccagtgttctcagtttgtcatttatatgacatgttccatgacaaagtacatccctaatacaaagccttaagcaatctcattaaggacag

SEQ ID NO: 461950 - DNA, 627 bp, Homo sapiens
ctgaattctggacggcctttccatgttctcttttctgtaaaaatgagactttttatttctggaagcacttgcctaggagatagcaaagttaaatgttgtgtttcatcacaatcagtctcaactaactaaaactaattaaacactaggaattttgagtaacccacctaccctcactagaccctttctggatctaactgaagatgttcatgatcaagaagcaagaggctgtttcagctctcatgtacagatctcagccttgtatagaaaggtagttctcagtgcttaattagcaccagcagcatggccctacacttcatagcatttaaaaccttcagttttgcccttaggtccacctatgcagttgtcccctaataasctcagctcagctccaggccacccctggctctgtggcccatggtttttgtattattctttgtcatctctaattagcctcttccgcctcgccactacttaattatttatccttttcagaacttctggcatgtattgtactatattttacttttaaaatatgttgccagtgttctcagtttgtcatttatatgacatgttccatgacaaagtacatccctaatacaaagccttaagcaatctcattaaggacag

SEQ ID NO: 461951 - DNA, 450 bp, Homo sapiens
taacccataaacaccaacagcaagtatagattcagacatttgtatctataatttagacagtttaaaatgcaatattaagtaattcaaaaattgttcaaagctcagtaccttttcacacattaatactttgattatcaacttccttttaaagagtaagtgagtagaaaagggtaagtagaaaagagtagaagaggcctttctttcacaatttgccaaracatgcatcacttatttaaaataaaaaaaaatgctgtttgaaaaacaagaaggatggcaagaatgaagctccttcatgcaagatacctctgactaccctctaaagacagatactatggcatggtcatagaattactgcaggaaaaatttgtccactgaggctgcttcctccagaggtaaggtttaacttatggtaacttgctatggatcaacagctcaagatgaagtgtgtgg

SEQ ID NO: 461952 - DNA, 450 bp, Homo sapiens
taacccataaacaccaacagcaagtatagattcagacatttgtatctataatttagacagtttaaaatgcaatattaagtaattcaaaaattgttcaaagctcagtaccttttcacacattaatactttgattatcaacttccttttaaagagtaagtgagtagaaaagggtaagtagaaaagagtagaagaggcctttctttcacaatttgccaaaacatgcatcacttatttaaaataaaaaaaaatgctgtttgaaaaacaagraggatggcaagaatgaagctccttcatgcaagatacctctgactaccctctaaagacagatactatggcatggtcatagaattactgcaggaaaaatttgtccactgaggctgcttcctccagaggtaaggtttaacttatggtaacttgctatggatcaacagctcaagatgaagtgtgtgg

SEQ ID NO: 461953 - DNA, 450 bp, Homo sapiens
taacccataaacaccaacagcaagtatagattcagacatttgtatctataatttagacagtttaaaatgcaatattaagtaattcaaaaattgttcaaagctcagtaccttttcacacattaatactttgattatcaacttccttttaaagagtaagtgagtagaaaagggtaagtagaaaagagtagaagaggcctttctttcacaatttgccaaaacatgcatcacttatttaaaataaaaaaaaatgctgtttgaaaaacaagaaggatggcaagaatgaagctccttcatgcaagatacctctgaytaccctctaaagacagatactatggcatggtcatagaattactgcaggaaaaatttgtccactgaggctgcttcctccagaggtaaggtttaacttatggtaacttgctatggatcaacagctcaagatgaagtgtgtgg

SEQ ID NO: 461954 - DNA, 577 bp, Homo sapiens
aatgaagctccttcatgcaagatacctctgactaccctctaaagacagwtactatggcatggtcatagaattactgcaggaaaaatttgtccactgaggctgcttcctccagaggtaaggtttaacttatggtaacttgctatggatcaacagctcaagatgaagtgtgtggctggcaatttaagtgtaaaattagatttccagtataatcagtcatctgatagcccatctaaatgtattctgcatttgcacatttaattaattatgtcttaattgaaaacattttgctcataacgattggttctaattttattccaaattaaattagtaggggagaaatttagtttgggaatttattgatttttatatatattaaagaaaaagtaaaaataatggattttctcttttcttcttaaaaggaaatatctttctgctcatttagaggtgcaaaggaaaacatttagaactttccagatgaataaattgcatttcatctgaatgaacatctaactttggagatggagagaacattctttcgtattgttgtagatatgcctagtataatattggtataatt

SEQ ID NO: 461955 - DNA, 577 bp, Homo sapiens
aatgaagctccttcatgcaagatacctctgactaccctctaaagacagatactatggcatggtcatagaattactgcaggaaaaatttgtccactgaggctgcttcctccagaggtaaggtttaacttatggtaacttgctatggatcaacagctcaagatgaagtgtgtggctggcaatttaagtgtaaaattagatttccagtataatcagtcatctgatagcccatctaaatgtattctgcatttgcacatttaattaattatgtcttaattgaaaacattttgctcataaygattggttctaattttattccaaattaaattagtaggggagaaatttagtttgggaatttattgatttttatatatattaaagaaaaagtaaaaataatggattttctcttttcttcttaaaaggaaatatctttctgctcatttagaggtgcaaaggaaaacatttagaactttccagatgaataaattgcatttcatctgaatgaacatctaactttggagatggagagaacattctttcgtattgttgtagatatgcctagtataatattggtataatt

SEQ ID NO: 461956 - DNA, 577 bp, Homo sapiens
aatgaagctccttcatgcaagatacctctgactaccctctaaagacagatactatggcatggtcatagaattactgcaggaaaaatttgtccactgaggctgcttcctccagaggtaaggtttaacttatggtaacttgctatggatcaacagctcaagatgaagtgtgtggctggcaatttaagtgtaaaattagatttccagtataatcagtcatctgatagcccatctaaatgtattctgcatttgcacatttaattaattatgtcttaattgaaaacattttgctcataacgattggttctaattttattccaaattaaattagtaggggagaaatttagtttgggaatttattgatttwtatatatattaaagaaaaagtaaaaataatggattttctcttttcttcttaaaaggaaatatctttctgctcatttagaggtgcaaaggaaaacatttagaactttccagatgaataaattgcatttcatctgaatgaacatctaactttggagatggagagaacattctttcgtattgttgtagatatgcctagtataatattggtataatt

SEQ ID NO: 461957 - DNA, 577 bp, Homo sapiens
aatgaagctccttcatgcaagatacctctgactaccctctaaagacagatactatggcatggtcatagaattactgcaggaaaaatttgtccactgaggctgcttcctccagaggtaaggtttaacttatggtaacttgctatggatcaacagctcaagatgaagtgtgtggctggcaatttaagtgtaaaattagatttccagtataatcagtcatctgatagcccatctaaatgtattctgcatttgcacatttaattaattatgtcttaattgaaaacattttgctcataacgattggttctaattttattccaaattaaattagtaggggagaaatttagtttgggaatttattgatttttatatatattaaagaaaaagtaaaaataatggattttctcttttcttcttaaaaggaaatatctttctgctcatttagaggtgcaaaggaaaacatttagaactttccagatgaataaattgcatttcatctgaatgaacatctaactttggagatggagagaacattctttygtattgttgtagatatgcctagtataatattggtataatt

SEQ ID NO: 461958 - DNA, 600 bp, Homo sapiens
tttattcattgttccatagtattccatgtagawatagatcacaatttatttgctatttcttctcttaatagatatatttgggttggcttctgttattgttattatgaatacgatgctttaaatattctttttttagtaaaaatatgtgcagatttatagctgaacagaaaaagctttgtcttttaacctggatatctggagttttttactcttggtgaagataactgcaatgacatttatcatgtatgatttaaagtcaggaaatgcctcctggtaacctacagggtcagtttttcactgatgggttacaactggcctaattggtttgacaaacctagcttgattacatggacaaggaaacataaaaggcttgtggagaatttctcctcgaagccctcctgaaagcatgattcctagcacagaatcttggtggttgacactggagacagaatgcacactctgtgtctgtgaatacttggagccctgggtagctttcaacatgggatgtctttcagactcccagtccatgcccgcactctctttcacttgctgcaccatatcctttgcctttaaataaaagccccatgtaaatatgttcta

SEQ ID NO: 461959 - DNA, 600 bp, Homo sapiens
tttattcattgttccatagtattccatgtagatatagatcacaatttatttgctatttcttctcttaatagatatatttgggttggcttctgttattgttattatgaatacgatgctttaaatattctttttytagtaaaaatatgtgcagatttatagctgaacagaaaaagctttgtcttttaacctggatatctggagttttttactcttggtgaagataactgcaatgacatttatcatgtatgatttaaagtcaggaaatgcctcctggtaacctacagggtcagtttttcactgatgggttacaactggcctaattggtttgacaaacctagcttgattacatggacaaggaaacataaaaggcttgtggagaatttctcctcgaagccctcctgaaagcatgattcctagcacagaatcttggtggttgacactggagacagaatgcacactctgtgtctgtgaatacttggagccctgggtagctttcaacatgggatgtctttcagactcccagtccatgcccgcactctctttcacttgctgcaccatatcctttgcctttaaataaaagccccatgtaaatatgttcta

SEQ ID NO: 461960 - DNA, 600 bp, Homo sapiens
tttattcattgttccatagtattccatgtagatatagatcacaatttatttgctatttcttctcttaatagatatatttgggttggcttctgttattgttattatgaatacgatgctttaaatattctttttttagtaaaaatatgtgcagatttatagctgaacagaaaaagctttgtcttttaacctggatatctggagttttttactcttggtgaarataactgcaatgacatttatcatgtatgatttaaagtcaggaaatgcctcctggtaacctacagggtcagtttttcactgatgggttacaactggcctaattggtttgacaaacctagcttgattacatggacaaggaaacataaaaggcttgtggagaatttctcctcgaagccctcctgaaagcatgattcctagcacagaatcttggtggttgacactggagacagaatgcacactctgtgtctgtgaatacttggagccctgggtagctttcaacatgggatgtctttcagactcccagtccatgcccgcactctctttcacttgctgcaccatatcctttgcctttaaataaaagccccatgtaaatatgttcta

SEQ ID NO: 461961 - DNA, 600 bp, Homo sapiens
tttattcattgttccatagtattccatgtagatatagatcacaatttatttgctatttcttctcttaatagatatatttgggttggcttctgttattgttattatgaatacgatgctttaaatattctttttttagtaaaaatatgtgcagatttatagctgaacagaaaaagctttgtcttttaacctggatatctggagttttttactcttggtgaagataactgcaatgacatttatcatgtatgatttaaagtcaggaaatgcctcctggtaacctacagggtcagtttttcactgatgggttacaactggcctaattggtttgacaaacctagcttgattacatggacaaggaracataaaaggcttgtggagaatttctcctcgaagccctcctgaaagcatgattcctagcacagaatcttggtggttgacactggagacagaatgcacactctgtgtctgtgaatacttggagccctgggtagctttcaacatgggatgtctttcagactcccagtccatgcccgcactctctttcacttgctgcaccatatcctttgcctttaaataaaagccccatgtaaatatgttcta

SEQ ID NO: 461962 - DNA, 440 bp, Homo sapiens
ctttttgccattaaaattgatgtcaaaaaccacaaattacttttgcaccagcctaataaaacttctcactccataactcagagtgattcagctctcactaacaacctggtgttctccattttcctttagcgtggactatagctattcatcacttttgaraatttttaagaggcaacattcttgcatgtgatctggtttatacaaccaggataaaaggccaatgttgactccaaagtttcccaggcccaggatctcctcagaaatatgtggcagagacagacctgcaggataaagacaagatatgcagtcttttctcattcactccattgatagctagtaacagccgaccatatctcagttcaatgaaggaaaaagatagacaaatagatacagtagagtgtagactatataatggtttagtatacataggaagtacacaa

SEQ ID NO: 461963 - DNA, 440 bp, Homo sapiens
ctttttgccattaaaattgatgtcaaaaaccacaaattacttttgcaccagcctaataaaacttctcactccataactcagagtgattcagctctcactaacaacctggtgttctccattttcctttagcgtggactatagctattcatcacttttgagaatttttaagaggcaacattcttgcatgtgatctggtttatasaaccaggataaaaggccaatgttgactccaaagtttcccaggcccaggatctcctcagaaatatgtggcagagacagacctgcaggataaagacaagatatgcagtcttttctcattcactccattgatagctagtaacagccgaccatatctcagttcaatgaaggaaaaagatagacaaatagatacagtagagtgtagactatataatggtttagtatacataggaagtacacaa

SEQ ID NO: 461964 - DNA, 440 bp, Homo sapiens
ctttttgccattaaaattgatgtcaaaaaccacaaattacttttgcaccagcctaataaaacttctcactccataactcagagtgattcagctctcactaacaacctggtgttctccattttcctttagcgtggactatagctattcatcacttttgagaatttttaagaggcaacattcttgcatgtgatctggtttatacaaccaggataaaaggycaatgttgactccaaagtttcccaggcccaggatctcctcagaaatatgtggcagagacagacctgcaggataaagacaagatatgcagtcttttctcattcactccattgatagctagtaacagccgaccatatctcagttcaatgaaggaaaaagatagacaaatagatacagtagagtgtagactatataatggtttagtatacataggaagtacacaa

SEQ ID NO: 461965 - DNA, 440 bp, Homo sapiens
ctttttgccattaaaattgatgtcaaaaaccacaaattacttttgcaccagcctaataaaacttctcactccataactcagagtgattcagctctcactaacaacctggtgttctccattttcctttagcgtggactatagctattcatcacttttgagaatttttaagaggcaacattcttgcatgtgatctggtttatacaaccaggataaaaggccawtgttgactccaaagtttcccaggcccaggatctcctcagaaatatgtggcagagacagacctgcaggataaagacaagatatgcagtcttttctcattcactccattgatagctagtaacagccgaccatatctcagttcaatgaaggaaaaagatagacaaatagatacagtagagtgtagactatataatggtttagtatacataggaagtacacaa

SEQ ID NO: 461966 - DNA, 471 bp, Homo sapiens
atgctggcagtgaattaaaaagataacaatagtttttaaagcctcattcaaatctgcatatctacaatagtgtatcaatttgggatggccaaagttatagataatttggataaataaaatargggctcagcagtaaaataatgactatctccagaagctttaagattaaatgaaaagaagaaaagactaaaggcagatcaagctatcatgctgactacagacatagtaaaggctttccacagaaagagaaaatagattagtcttgttttactctggtcaacaaaggatagaattatagaaatggagattgcagctgcatatagatagaattgttaagactcatagctattccaacatctttgcttagggggccatagggagtgccaacatcgagtatcagaacaaactagatgaatgccaaaatctcttatattctaaggttatatgagaaagtgattttgatgccaaaga

SEQ ID NO: 461967 - DNA, 471 bp, Homo sapiens
atgctggcagtgaattaaaaagataacaatagtttttaaagcctcattcaaatctgcatatctacaatagtgtatcaatttgggatggccaaagttatagataatttggataaataaaataagggctcagcagtaaaataatgactatctccaraagctttaagattaaatgaaaagaagaaaagactaaaggcagatcaagctatcatgctgactacagacatagtaaaggctttccacagaaagagaaaatagattagtcttgttttactctggtcaacaaaggatagaattatagaaatggagattgcagctgcatatagatagaattgttaagactcatagctattccaacatctttgcttagggggccatagggagtgccaacatcgagtatcagaacaaactagatgaatgccaaaatctcttatattctaaggttatatgagaaagtgattttgatgccaaaga

SEQ ID NO: 461968 - DNA, 471 bp, Homo sapiens
atgctggcagtgaattaaaaagataacaatagtttttaaagcctcattcaaatctgcatatctacaatagtgtatcaatttgggatggccaaagttatagataatttggataaataaaataagggctcagcagtaaaataatgactatctccagaagctttaagattaaatgaaaagaagaaaagactaaaggcagatcaagctatcatgctgactacagacatagyaaaggctttccacagaaagagaaaatagattagtcttgttttactctggtcaacaaaggatagaattatagaaatggagattgcagctgcatatagatagaattgttaagactcatagctattccaacatctttgcttagggggccatagggagtgccaacatcgagtatcagaacaaactagatgaatgccaaaatctcttatattctaaggttatatgagaaagtgattttgatgccaaaga

SEQ ID NO: 461969 - DNA, 471 bp, Homo sapiens
atgctggcagtgaattaaaaagataacaatagtttttaaagcctcattcaaatctgcatatctacaatagtgtatcaatttgggatggccaaagttatagataatttggataaataaaataagggctcagcagtaaaataatgactatctccagaagctttaagattaaatgaaaagaagaaaagactaaaggcagatcaagctatcatgctgactacagacatagtaaaggctttccacagaaagagaaaatagattagtcttgttttactctggtcaacaaaggrtagaattatagaaatggagattgcagctgcatatagatagaattgttaagactcatagctattccaacatctttgcttagggggccatagggagtgccaacatcgagtatcagaacaaactagatgaatgccaaaatctcttatattctaaggttatatgagaaagtgattttgatgccaaaga

SEQ ID NO: 461970 - DNA, 518 bp, Homo sapiens
tagaaccttgaaaaagcaccagggactcccaggcaacttagcttaaatctctctcgagtagagctggtctttgggatctccatcaagtggatgatgcctttaccaccatgatagcacattataaagttggccttgcaagcagcagggacaggcctgatgtcactgatcctgaggcaagcatcttataaacccatataatttaattttgcgtaggctcaagctcatcactgagatcatcctttgtatgacgatccatgaggccaccgtgaacagcatggatgsacccaggtcacagaggggccctcttcatcctggatgaggagcccacagtgtccattgcccctcagtcagaataaaatcaagacaaaagcaatcagaagacccatacaccatgaggctgagccatttttcaaagatgtcaaaataggaaaataataaaatggaagaaaacccagaatcccatcccctgacttgctccagaggcctccccaactccaggccaccaggagcaggggccc

SEQ ID NO: 461971 - DNA, 518 bp, Homo sapiens
tagaaccttgaaaaagcaccagggactcccaggcaacttagcttaaatctctctcgagtagagctggtctttgggatctccatcaagtggatgatgcctttaccaccatgatagcacattataaagttggccttgcaagcagcagggacaggcctgatgtcactgatcctgaggcaagcatcttataaacccatataatttaattttgcgtaggctcaagctcatcactgagatcatcctttgtatgacgatccatgaggccaccgtgaacagcatggatgcacccaggycacagaggggccctcttcatcctggatgaggagcccacagtgtccattgcccctcagtcagaataaaatcaagacaaaagcaatcagaagacccatacaccatgaggctgagccatttttcaaagatgtcaaaataggaaaataataaaatggaagaaaacccagaatcccatcccctgacttgctccagaggcctccccaactccaggccaccaggagcaggggccc

SEQ ID NO: 461972 - DNA, 518 bp, Homo sapiens
tagaaccttgaaaaagcaccagggactcccaggcaacttagcttaaatctctctcgagtagagctggtctttgggatctccatcaagtggatgatgcctttaccaccatgatagcacattataaagttggccttgcaagcagcagggacaggcctgatgtcactgatcctgaggcaagcatcttataaacccatataatttaattttgcgtaggctcaagctcatcactgagatcatcctttgtatgacgatccatgaggccaccgtgaacagcatggatgcacccaggtcrcagaggggccctcttcatcctggatgaggagcccacagtgtccattgcccctcagtcagaataaaatcaagacaaaagcaatcagaagacccatacaccatgaggctgagccatttttcaaagatgtcaaaataggaaaataataaaatggaagaaaacccagaatcccatcccctgacttgctccagaggcctccccaactccaggccaccaggagcaggggccc

SEQ ID NO: 461973 - DNA, 509 bp, Homo sapiens
  misc_feature (1)...(509): n = A,T,C or G
aattctatcatcaagctgtttatgttctttacatttctgttcttgataattatatgctagtctttgaatatgaagataatgcttctgacccaatattcataatgcatgtgcctcgagttgttattttttgcaagagaaataagtttattttgatctgatrcactttctttcccagtcttcatgtgaccagcagcaccaactgcaagactgtctgtcacctgagtgtggcttgcaaccaagcacatgtgggaattcagtgaaggcccctgccttgacctcattatcaacaggatccagtcatagacagnggtcactctttattcatgtaaatagacaccgtaatttattttcaaaaaaatccaaaggaaaaaatttaaggccattgtaataccagaaatctgcactgtgagtacttggaagatgacagttgataaagctgggaggtttacaatgactagattgtcagaaggggttaaatgtatgttctaatagtaagagaacaagaaaaa

SEQ ID NO: 461974 - DNA, 509 bp, Homo sapiens
  misc_feature (1)...(509): n = A,T,C or G
aattctatcatcaagctgtttatgttctttacatttctgttcttgataattatatgctagtctttgaatatgaagataatgcttctgacccaatattcataatgcatgtgcctcgagttgttattttttgcaagagaaataagtttattttgatctgatgcaytttctttcccagtcttcatgtgaccagcagcaccaactgcaagactgtctgtcacctgagtgtggcttgcaaccaagcacatgtgggaattcagtgaaggcccctgccttgacctcattatcaacaggatccagtcatagacagnggtcactctttattcatgtaaatagacaccgtaatttattttcaaaaaaatccaaaggaaaaaatttaaggccattgtaataccagaaatctgcactgtgagtacttggaagatgacagttgataaagctgggaggtttacaatgactagattgtcagaaggggttaaatgtatgttctaatagtaagagaacaagaaaaa

SEQ ID NO: 461975 - DNA, 509 bp, Homo sapiens
  misc_feature (1)...(509): n = A,T,C or G
aattctatcatcaagctgtttatgttctttacatttctgttcttgataattatatgctagtctttgaatatgaagataatgcttctgacccaatattcataatgcatgtgcctcgagttgttattttttgcaagagaaataagtttattttgatctgatgcactttctttcccagtcttcatgtgaccagcagcaccaactgcaagactgtctgtcacctgagtgtgrcttgcaaccaagcacatgtgggaattcagtgaaggcccctgccttgacctcattatcaacaggatccagtcatagacagnggtcactctttattcatgtaaatagacaccgtaatttattttcaaaaaaatccaaaggaaaaaatttaaggccattgtaataccagaaatctgcactgtgagtacttggaagatgacagttgataaagctgggaggtttacaatgactagattgtcagaaggggttaaatgtatgttctaatagtaagagaacaagaaaaa

SEQ ID NO: 461976 - DNA, 565 bp, Homo sapiens
  misc_feature (1)...(565): n = A,T,C or G
gtttattttgatctgatgcactttctttcccagtcttcatgtgaccagcagcaccaactgcaagactgtctgtcacctgagtgtggcttgcaaccaagcacatgtgggaattcagtgaaggcccctgccttgacctcattatcaacaggatccagtcatagacagnggtcactctttattcatgtaaatagacaccgtaatttattttcaaaaaaatccaaaggaaaaaatttaaggccattgtaataccagaaatctgcactgtgagtacttggaagatgacagttgataaagctgggaggtttacaatgactagattgtcagaaggggttaaatgtatgttctaatartaagagaacaagaaaaaagaatgacctggtgatgtgtaaatttaaaatacagtggtacattttaggaaaaccaaaaatcaatccatgaactttgaaatgaagggagatagttctgagagatctagaggaactggacttgagatccaagattacaatttactcaatttttttatagatactttaagtatggaaaatttaattttattcttacagat

SEQ ID NO: 461977 - DNA, 565 bp, Homo sapiens
  misc_feature (1)...(565): n = A,T,C or G
gtttattttgatctgatgcactttctttcccagtcttcatgtgaccagcagcaccaactgcaagactgtctgtcacctgagtgtggcttgcaaccaagcacatgtgggaattcagtgaaggcccctgccttgacctcattatcaacaggatccagtcatagacagnggtcactctttattcatgtaaatagacaccgtaatttattttcaaaaaaatccaaaggaaaaaatttaaggccattgtaataccagaaatctgcactgtgagtacttggaagatgacagttgataaagctgggaggtttacaatgactagattgtcagaaggggttaaatgtatgttctaatagtaagagaacaagaaaaaagaatgmcctggtgatgtgtaaatttaaaatacagtggtacattttaggaaaaccaaaaatcaatccatgaactttgaaatgaagggagatagttctgagagatctagaggaactggacttgagatccaagattacaatttactcaatttttttatagatactttaagtatggaaaatttaattttattcttacagat

SEQ ID NO: 461978 - DNA, 565 bp, Homo sapiens
  misc_feature (1)...(565): n = A,T,C or G
gtttattttgatctgatgcactttctttcccagtcttcatgtgaccagcagcaccaactgcaagactgtctgtcacctgagtgtggcttgcaaccaagcacatgtgggaattcagtgaaggcccctgccttgacctcattatcaacaggatccagtcatagacagnggtcactctttattcatgtaaatagacaccgtaatttattttcaaaaaaatccaaaggaaaaaatttaaggccattgtaataccagaaatctgcactgtgagtacttggaagatgacagttgataaagctgggaggtttacaatgactagattgtcagaaggggttaaatgtatgttctaatagtaagagaacaagaaaaaagaatgacctggtgatgtgtaaatttaaaatacagtggtacattttaggaaaaccaaaaatcaatccatgaactttgaaatgaagggagatagttctgagagawctagaggaactggacttgagatccaagattacaatttactcaatttttttatagatactttaagtatggaaaatttaattttattcttacagat

SEQ ID NO: 461979 - DNA, 565 bp, Homo sapiens
  misc_feature (1)...(565): n = A,T,C or G
gtttattttgatctgatgcactttctttcccagtcttcatgtgaccagcagcaccaactgcaagactgtctgtcacctgagtgtggcttgcaaccaagcacatgtgggaattcagtgaaggcccctgccttgacctcattatcaacaggatccagtcatagacagnggtcactctttattcatgtaaatagacaccgtaatttattttcaaaaaaatccaaaggaaaaaatttaaggccattgtaataccagaaatctgcactgtgagtacttggaagatgacagttgataaagctgggaggtttacaatgactagattgtcagaaggggttaaatgtatgttctaatagtaagagaacaagaaaaaagaatgacctggtgatgtgtaaatttaaaatacagtggtacattttaggaaaaccaaaaatcaatccatgaactttgaaatgaagggagatagttctgagagatctaraggaactggacttgagatccaagattacaatttactcaatttttttatagatactttaagtatggaaaatttaattttattcttacagat

SEQ ID NO: 461980 - DNA, 627 bp, Homo sapiens
taagcccctgaagattgttagggcagtgaaattattctttaagatactgttatgggaaatatatgacataatgcatttagcaaagcccatagaaccgtacaacacagggactaaatcctaatataaactgtggatgttagttaatcataatgcatgaatattggttcatcagttgtaacaaatgtgccacaccaacacaaaatgttaacaataggaaaaaccagaggctggtcggggacgagagtwtacaggaaccccatatattttgctcacattttctgaaaacctaaaactggtctaaaaatcaaagtctattaatttttttaaacaccttgaaacagtatatctattagttccctgcctttgtgaaaataagagcagacttttggtttttcttctttaggacaagaattatatttttataataactcctccattacttttgatatatctaattatttctttaataactggatcaaacacttaatattaatgaaggtagagccaataggatatcctggtagattggaagagacagtgagagaaacagaggcataaaggatgatgctgaagtttttggcttgagcaagaagaagcagggctgctactagggtgagccaagtgaga

SEQ ID NO: 461981 - DNA, 367 bp, Homo sapiens
tatttgtcagaaagaaaaagaggagccagcaaggaaccttgaaaaagagcaggcaataagagaaggaacactggcagtgtgtattcctggaagacaagacaatgcttcaaggagtagagagtaataagttgtgtttcatgctgctagagttgagttagacaaagcttgaaactagaactttggtrttagtagcattgaggtcatcgacgatgttgactaaaacagttttggtggagggatgacaacagaagcctggacagagtgcactgaagagagaagaagagaggagagaaatttgattctgcatatacataaaactctttcaaggtcttcttttagaaagaggaaggaagatagagagagagac

SEQ ID NO: 461982 - DNA, 367 bp, Homo sapiens
tatttgtcagaaagaaaaagaggagccagcaaggaaccttgaaaaagagcaggcaataagagaaggaacactggcagtgtgtattcctggaagacaagacaatgcttcaaggagtagagagtaataagttgtgtttcatgctgctagagttgagttagacaaagcttgaaactagaactttggtattagtagcattgaggtcatcgacgatgttgactaaaacagttttggtggagrgatgacaacagaagcctggacagagtgcactgaagagagaagaagagaggagagaaatttgattctgcatatacataaaactctttcaaggtcttcttttagaaagaggaaggaagatagagagagagac

SEQ ID NO: 461983 - DNA, 367 bp, Homo sapiens
tatttgtcagaaagaaaaagaggagccagcaaggaaccttgaaaaagagcaggcaataagagaaggaacactggcagtgtgtattcctggaagacaagacaatgcttcaaggagtagagagtaataagttgtgtttcatgctgctagagttgagttagacaaagcttgaaactagaactttggtattagtagcattgaggtcatcgacgatgttgactaaaacagttttggtggagggatgacaacagaagcctgracagagtgcactgaagagagaagaagagaggagagaaatttgattctgcatatacataaaactctttcaaggtcttcttttagaaagaggaaggaagatagagagagagac

SEQ ID NO: 461984 - DNA, 442 bp, Homo sapiens
acctataagtgtgacatacttttgctttcagtagtttcatgtaaagaaaaaaacttgaaaatagattactattaacctgaggacccatgggaataacagacactggggaggtagggtggggagcgggaacaagagctgaaaaactacctactgtggactctgctcactacctgggtgacaggatcatccataccctaaacctcaacrtcacacagtacacccagctaacaaacctgcccatgtgttccctgaatctaaaaaagaatcaaaataattgtttaaaaaaagaaaaagacaatagtattacccatgggacaaaatttgtactattagcaagaatcatttgtgtctcatttagaaacaatttgacttttgttccattgtttaaactttgacaaaaatggttttgaatagatctttataacctgatgccataaataca

SEQ ID NO: 461985 - DNA, 442 bp, Homo sapiens
acctataagtgtgacatacttttgctttcagtagtttcatgtaaagaaaaaaacttgaaaatagattactattaacctgaggacccatgggaataacagacactggggaggtagggtggggagcgggaacaagagctgaaaaactacctactgtggactctgctcactacctgggtgacaggatcatccataccctaaacctcaacgtcacacagtacacccagctaacaaacctgcccatgtgttccctgaatctaaaaaagaatcaaaataattgtttwaaaaaagaaaaagacaatagtattacccatgggacaaaatttgtactattagcaagaatcatttgtgtctcatttagaaacaatttgacttttgttccattgtttaaactttgacaaaaatggttttgaatagatctttataacctgatgccataaataca

SEQ ID NO: 461986 - DNA, 442 bp, Homo sapiens
acctataagtgtgacatacttttgctttcagtagtttcatgtaaagaaaaaaacttgaaaatagattactattaacctgaggacccatgggaataacagacactggggaggtagggtggggagcgggaacaagagctgaaaaactacctactgtggactctgctcactacctgggtgacaggatcatccataccctaaacctcaacgtcacacagtacacccagctaacaaacctgcccatgtgttccctgaatctaaaaaagaatcaaaataattgtttaaaaaaagaaaaagacaatagtattacccatgggacaaaatttgtactattagcaagaatcatttgtgtctcatttagaaacaatttgacttttgttccaktgtttaaactttgacaaaaatggttttgaatagatctttataacctgatgccataaataca

SEQ ID NO: 461987 - DNA, 649 bp, Homo sapiens
agtatttgcataaaaaatcaaatggtagtgttttgtgatctctattgtatttcctattaaggtttcatatattactttcccattgttcctgaatttgaaacatggatgagtaccataaaaaataaataaataaatatgccaaactcactccaatagcatccatcatatcatatgtattatataaatacatattttaccattataattgacaaaccagcaattatgagcttgatttttgtggatgyattaggagcaatgtttcttcataggatataatattttgtaatttcttattctttactgcttgctgcactgtaaaacatttataaaatgagttgcttttagggtgtgaaatgagcaatcatcagaggaaaagcattaaggacaagaaagtggagtgaggatcatgaagcacatgcatttctttctcaaggtcgtgggtaaatttcagctccatggaaaatcttgagaaagaatccagcaagaatgagatcatgaaatgttagttttccccaagtagaaattccataatagaactataaaattgctgcttacaaattttttcttccaaattctacttgaaattagggaattgaaagggccaggagggaccttggaattcatctagtctgaactcattatacatagg

SEQ ID NO: 461988 - DNA, 607 bp, Homo sapiens
gattccagtttgctttttgataatatacacattccatttcttatagtctgtgagtaaatgggcctttcataagcccatccaaagggtagcttataattttcatgctgtcccctctccttgcacttttcttaaagtgaattgctagttaatgcctgagagagtaaaattcctgatccaattttttcacaaaatgtatggttttatgtggaagaaaataggagtctggargatactcagtctcaatgaactttactcctctgaggaaggttagcaatggggataggagtcagtagaggcaccctcattagtcaccagctctgattgtaaacagtgggatcattgcttttaattctttaccaaagaactttctctggcaccagattcatgtaagtagaattcagaaatgtaagtgggtaaagcttattgtccaaggctcccaaggaccaaaaaagaaggtgcaaaaaatgcttaaaagtagccaagtaactctgacctggagtgctgaagttcattccctttctacatcatttccataatatctccatatccaaatggtatcccagaatacatgaaggaattaggaagtctaagaagttaaatggaaaat

SEQ ID NO: 461989 - DNA, 607 bp, Homo sapiens
gattccagtttgctttttgataatatacacattccatttcttatagtctgtgagtaaatgggcctttcataagcccatccaaagggtagcttataattttcatgctgtcccctctccttgcacttttcttaaagtgaattgctagttaatgcctgagagagtaaaattcctgatccaattttttcacaaaatgtatggttttatgtggaagaaaataggagtctggaggatactcagtctcaatgaactttactcctctgaggaaggttagcaatggggataggagtcagtagaggcaccctcattagtcaccagctctgattgtaaacagtgggatcattgcttttaattctttaccaaagaactttctctggcaccagattcatgtaagtagaattcagaaatgtaagtggrtaaagcttattgtccaaggctcccaaggaccaaaaaagaaggtgcaaaaaatgcttaaaagtagccaagtaactctgacctggagtgctgaagttcattccctttctacatcatttccataatatctccatatccaaatggtatcccagaatacatgaaggaattaggaagtctaagaagttaaatggaaaat

SEQ ID NO: 461990 - DNA, 550 bp, Homo sapiens
  misc_feature (1)...(550): n = A,T,C or G
nnnnnnnnnnnnnnnnnnnnnnnnnnnnnnnnnnnnnnntgtatgaggtctatgtattaacatcacactgaatataaactctataagtgggaagcattgtttccaggaagagcaaataccacattccaaccatattgatggtcgttgagtcagggccctcttcttctatgagattcctgtcgaaactaccttatcagcaactgtctggctgagagcaagaataatcttttgcctcttttatacacagattttatgtagttaattaaataaatgttaatttaaattaataaaaatcatactaaagcaatttctaaaaatatatttatcagccacttttttttgtaggtcttcaatagaagaaygaaatccatgaaaaatcctcgggttttcagagtttcatcttgatatcttagcattctgtcaagctataggctgagggagaaacattctgcagcttcccttagaagacccactttggatccacctttcctcagaggcatttttcaggatttctgtgtctagatttctccctgggaaaaccagggataaa

SEQ ID NO: 461991 - DNA, 523 bp, Homo sapiens
tttccttgttttatagaagagaaaacttgaattacagagaggtgaagtgaccgccctgagggcttccccagctagcaaattcaggataggctgagctggattccaggttctctggcttccagtctggtactcttcctgctattccatgctgtgttttctgattgaaaaatcataagtctttrgtatttctcagcttggtcaaatctgtttaaagatcacttagcccacttttgtctgagtccatatgaaccaagtgatcctttaatctgtcttactgagtaaatgcacccttcctgaagtaagtgagtgccctatggagttaggtgctgagctgagctgcagtcctgggttatttattgccaatttggcatcaccaactctcccttctaagggttcctctgtctttcagaaaagttgggagctatatttgcagaacgcccttcccatatggttataggttggtttaccaagaagtcccttcccttgctgaagatttggaaggctgaaacgaatgacaggctaa

SEQ ID NO: 461992 - DNA, 539 bp, Homo sapiens
aggtgcattgctttaaaattactgatcgtaagaaacagttcctgcaaatggtgtggggcatgcacccttctgtccatgygaattcagttggtaaacaccagaaacagaattctcattgggtacttgaagctcatagaaatgtcaagagtaaaaggaatggtgcagttggaattcctgtgcaatttgaagctctcacttgaacatgagagtgggacaaggaaccaggatgaacagaccaggggatcaagcaggaataatatatggttcaatacttgtccagagtaagagagatgaaatattcactgctttagaaaaactgaagttctcacctttctgaggtcatggccttccaagaagagatattttagttgcaataaatgagctctttctacatgaggctgagggtttggcttccttaattctgcaaaaaaaaataataaaaacagagagagagagaaataaaacacacccactgacgttcaaagaggaagagcaaaagcctgaacttgccatatcaatgactaactacagagttattc

SEQ ID NO: 461993 - DNA, 539 bp, Homo sapiens
aggtgcattgctttaaaattactgatcgtaagaaacagttcctgcaaatggtgtggggcatgcacccttctgtccatgcgaattcagttggtaaacaccagaaacagaattctcattgggtacttgaagctcatagaaatgtcaagagtaaaaggaatggtgcagttggaattcctgtgcaatttgaagctctcacttgaamatgagagtgggacaaggaaccaggatgaacagaccaggggatcaagcaggaataatatatggttcaatacttgtccagagtaagagagatgaaatattcactgctttagaaaaactgaagttctcacctttctgaggtcatggccttccaagaagagatattttagttgcaataaatgagctctttctacatgaggctgagggtttggcttccttaattctgcaaaaaaaaataataaaaacagagagagagagaaataaaacacacccactgacgttcaaagaggaagagcaaaagcctgaacttgccatatcaatgactaactacagagttattc

SEQ ID NO: 461994 - DNA, 534 bp, Homo sapiens
gggacgcagccttcaggagacactgaaggaatacagacattttttctagcctcaaaagcatggtttgcaaactggcttgttctttgtcggagaaaaccacacacgtggccattgacgcccttggttggcagagttgacgggattttctctggctctcaccttgagggcatcatcagcatcctgaagtcactagcaggcctctgtgcagatgtcctttcgaggggcttcaggctgtggaagtgaccagtgaacacaggacctgcctggactcccagyctcacagcacagcaccacagcctggactgccatctgcctgatacttggtttggaactttactccatcaaagcctccaaataaaaatatgtagactccccaccctatcccatctgctatagggttctaattcccccacagacatcccatcacagtgctttcccccatgacgggggacccctgcgctggactccatccctcccctatcggaaaagcacaggtgctgtggcatgagttcgaccgcctgaaattgcctgatc

SEQ ID NO: 461995 - DNA, 534 bp, Homo sapiens
gggacgcagccttcaggagacactgaaggaatacagacattttttctagcctcaaaagcatggtttgcaaactggcttgttctttgtcggagaaaaccacacacgtggccattgacgcccttggttggcagagttgacgggattttctctggctctcaccttgagggcatcatcagcatcctgaagtcactagcaggcctctgtgcagatgtcctttcgaggggcttcaggctgtggaagtgaccagtgaacacaggacctgcctggactcccagtctcacagcacagcaccacagcctggactgccatctgcctgatayttggtttggaactttactccatcaaagcctccaaataaaaatatgtagactccccaccctatcccatctgctatagggttctaattcccccacagacatcccatcacagtgctttcccccatgacgggggacccctgcgctggactccatccctcccctatcggaaaagcacaggtgctgtggcatgagttcgaccgcctgaaattgcctgatc

SEQ ID NO: 461996 - DNA, 312 bp, Homo sapiens
atgagaaaggggaaccaagagatcatcsttacatgggacacgccacaaaccccaaaaagacccatttggtgaaaagaagtaaaacaaccacaaggctattttggcctgaggtggtctcatggctgaagcagaccgctggtctcttgcctgggctactcaaataataacccagtgtgtccttccatgtgcattttccttcgggttgagcaaaaacactttgtcatcctcccactcctcaatagagcagaagggaacgaaaggcaactacagggccttacagagctgctccgggggccgcgggaaacttatcag

SEQ ID NO: 461997 - DNA, 312 bp, Homo sapiens
atgagaaaggggaaccaagagatcatcgttacatgggacacgccacaaaccccaaaaagacccatttggtgaaaagaagtaaaacaaccacaaggctattttggcctgaggtggtctcatggctgaagcagaccgctggtctcttgcctgggctactcaaataataacccagtgtgtccttccatgtgcattttccttcrggttgagcaaaaacactttgtcatcctcccactcctcaatagagcagaagggaacgaaaggcaactacagggccttacagagctgctccgggggccgcgggaaacttatcag

SEQ ID NO: 461998 - DNA, 520 bp, Homo sapiens
ttgtctcctcctagtttttctttttctcttaaccgacstaggtttagccttctaatccttctccctcctctgcttctaatgtcattgtttctttgtatgcctatcatatctacatgctacatgaccttcagctggttatgtataatatataagacttaatatcctataaaatagaggtaataatattatctacttgataggaaagttaagaatattaaatgacaccattgatgttaaatggaagtaactttctgaaatgtattgagacatgattctttgttctagtcttcactttatagactagactactttgtttgagttttctcttttcagtcagagaaagcaataaaattgtaatagtaaaaattaaataaaatttaacttaaaattgtgttctggtcttcttgttgttcagccatggaaagcaataaaattgtgatagcagaaattaaaagtgagcagagacttatttaaaaattggtattctcctttttgatgccaaaataagaactagaaagtt

SEQ ID NO: 461999 - DNA, 520 bp, Homo sapiens
ttgtctcctcctagtttttctttttctcttaaccgacctaggtttagccttctaatccttctccctcctctgcttctaatgtcattgtttctttgtatgcctatcatatctacatgctacatgaccttcagctggttatgtataatatataagacttaatatcctataaaatagaggtaataatattatctacttgataggaaagttaagaatattaaatgacaccattgatgttaaatggargtaactttctgaaatgtattgagacatgattctttgttctagtcttcactttatagactagactactttgtttgagttttctcttttcagtcagagaaagcaataaaattgtaatagtaaaaattaaataaaatttaacttaaaattgtgttctggtcttcttgttgttcagccatggaaagcaataaaattgtgatagcagaaattaaaagtgagcagagacttatttaaaaattggtattctcctttttgatgccaaaataagaactagaaagtt

SEQ ID NO: 462000 - DNA, 520 bp, Homo sapiens
ttgtctcctcctagtttttctttttctcttaaccgacctaggtttagccttctaatccttctccctcctctgcttctaatgtcattgtttctttgtatgcctatcatatctacatgctacatgaccttcagctggttatgtataatatataagacttaatatcctataaaatagaggtaataatattatctacttgataggaaagttaagaatattaaatgacaccattgatgttaaatggaagtaactttstgaaatgtattgagacatgattctttgttctagtcttcactttatagactagactactttgtttgagttttctcttttcagtcagagaaagcaataaaattgtaatagtaaaaattaaataaaatttaacttaaaattgtgttctggtcttcttgttgttcagccatggaaagcaataaaattgtgatagcagaaattaaaagtgagcagagacttatttaaaaattggtattctcctttttgatgccaaaataagaactagaaagtt

SEQ ID NO: 462001 - DNA, 623 bp, Homo sapiens
ggtttgtcaagctcaccttagttcctgggtagagagggtgggttggaagtgccagggaacgaagacaaagccgtccacagaggagcctggaatctgacttccaggtataaagtattcaatataccaaggtgccgtatttgaggtagcgtgtcctgaagcccctccccatggaatgtggccatcccagagggcagctgtgacttccttggaggtccgggtgaatcacagcgaggcttcaaccactcctcccacacacatgctgtgtcttccatttcctgaagcatcctgaaagccacaggtggyggggaacagctgggcggggcagggtggacctgggggccatgtagagaaagccaatgctgggctgcaccttttgatgtatgtttatcaggagggagactcgggagagctggagtaaatgaaaaaaagaggctgagaatgcagggcgctggaagaaatgccacttcctttattactctgaggtgcatcggttcacatgtacactcaacagtgcacaataagcgttggctgcatttgaggcacatagctacggtgcacaaaagtggctaaaatcagcccctgcctcttcggagcttacagcctgttcctctcccttcacgccc

SEQ ID NO: 462002 - DNA, 572 bp, Homo sapiens
gggctaaaacctagctaagcacgacctatctcagtgaatctcctgacaattacccctgctcctgccagtagatgctatttttgttttcattttgcggattcatttaattcattcattcaacagatatgcattgactgcctcaggcaacctaccaggtgctaaagatggagctgtgatcaggagaccagaggaaacttgatttctagtgcaagagggagacaagagatgggcaaacaagtgaggatgccgtgcccacccctaggcagagatacacgctacggagaagcagaaggaaggtgaacctggtgatggggtggcattttggagcagatggtcagggaaggcctctctggggaggtgacacctgagcagagacccagagggaccagaggagggagctgatattgtttggctgtgtccccacacagatttcatcttgaattgtagttcccataattcccatgtgttgtgggaggggccyggtgggaaataattgaatcatgggggctattccccccacactgttctcatggtagagaataagtctcacatgatccgatggttttataaag

SEQ ID NO: 462003 - DNA, 613 bp, Homo sapiens
aaggggtggctgaccgacctatattcaaataggtttggaaatgccaagtaaatacatttcggcattcatttcctgcaggaccgaatagatgaatcatgaatgccacaactctaaaaasgggtggaggggcgatgttggggcacagaagccttctctggggtatcttatagaaatacattgaggctgttcttggaggtgccagcaggtcctaccttcagggaaaaatgtgtcccaagcagaagtgtttttggtttggagggatccattggagccagggaggcagccaaaaaggagatgttgaagagagggaagaagagggtgattggctccatttgggcctgcagtcaccattcacagaaaccacagtgtgaacagcgtccctcaaagttgtgcaactacagaccccaaacttccctcctctgtctgctgtctccctggccctgccctcatcagcccagcccctctgatctgctcgtgcccttaccacccctttctcctctcttctgtaggctacctgacagtcaacattgagcctctcccccctgtggtggctggagacgccgtgactttgaagtgtaacttcaagacagatgggcgcatgcgggagatcgtg

SEQ ID NO: 462004 - DNA, 569 bp, Homo sapiens
ttattcatctttgcatctcttgcggagttttatttttccgcttctcctatgtgtcattcataaaattacaagtccattgtctttagcctttcaatctggaactggtagcagccttgcactcctccttgaaaatgtgaaagtggcttcccagagagtttaggggattccaatgtaattaaacaatatatttggtatttgaaagaaagatcccgctctagcccttcatttatgaatgatccttgggccagggattctatgtgggggcctcagggtycctaggaaatatgtggatgggcttctgggggtgctcaaaccccagaaaatatgcctaatatgttgtgtgtgtttttgtgggagaaaggtgcagaatattctcaaaggactctgtgatgcccccatgccccaactgaaaaacccaggaaatgcaacagcaggcatgcaggtgttcgctgagtgtgaaatgtgtagggcatctcattatctccactcttgggtcatcaaggtccatatttaggttggctctaccagaccctgtagctgcgaggttgtgccagatggcccatgagtgg

SEQ ID NO: 462005 - DNA, 569 bp, Homo sapiens
ttattcatctttgcatctcttgcggagttttatttttccgcttctcctatgtgtcattcataaaattacaagtccattgtctttagcctttcaatctggaactggtagcagccttgcactcctccttgaaaatgtgaaagtggcttcccagagagtttaggggattccaatgtaattaaacaatatatttggtatttgaaagaaagatcccgctctagcccttcatttatgaatgatccttgggccagggattctatgtgggggcctcagggtccctaggaaatatgtggatgggcttctgggggtgctcaaaccccagaaaatatgcctaatatgttgtgtgtgtttttgtgggagaaaggtgcagaatattctcaaaggactctgtgatgcccccatgccccaactgaaaaacccaggaaatgcaacagcaggcatgcaggtgttcgctgagtgtgaaatgtgtaggrcatctcattatctccactcttgggtcatcaaggtccatatttaggttggctctaccagaccctgtagctgcgaggttgtgccagatggcccatgagtgg

SEQ ID NO: 462006 - DNA, 488 bp, Homo sapiens
attaaaggtgaacttcagctccagcacaccagtgaaaaraaaagaacatgactgaaatgagggatgtttcccagctcagactcaccatccctcctaaatcctttctcccctcctctccccacattttccttgttgggtgtgagctcccacagggcaggcagtcttcccgttgcagacaggcacagccgtgtgcttttctaaaacacatatctgaccttaccacgaccacccctccctgccccacacttcgcaagagcttctcatcacctgaaagaccaagttcaaggtcattggcccagcatacaaggttcttcttgattcaacctctgttgactgatttcttcagccttgcttcctaccacgttcccaaatgggcccaccattcgaatcatatggctgatttgcagttctcagaatgtgccaacgttctttcccacctccgagctggtgcatatgtgctgtctctgcgtgcaatgcccttctcccct

SEQ ID NO: 462007 - DNA, 488 bp, Homo sapiens
attaaaggtgaacttcagctccagcacaccagtgaaaagaaaagaacatgrctgaaatgagggatgtttcccagctcagactcaccatccctcctaaatcctttctcccctcctctccccacattttccttgttgggtgtgagctcccacagggcaggcagtcttcccgttgcagacaggcacagccgtgtgcttttctaaaacacatatctgaccttaccacgaccacccctccctgccccacacttcgcaagagcttctcatcacctgaaagaccaagttcaaggtcattggcccagcatacaaggttcttcttgattcaacctctgttgactgatttcttcagccttgcttcctaccacgttcccaaatgggcccaccattcgaatcatatggctgatttgcagttctcagaatgtgccaacgttctttcccacctccgagctggtgcatatgtgctgtctctgcgtgcaatgcccttctcccct

SEQ ID NO: 462008 - DNA, 488 bp, Homo sapiens
attaaaggtgaacttcagctccagcacaccagtgaaaagaaaagaacatgactgaaatgagggatgtttcccagctcagactcaccatccctcctaaatcctttctcccctcctctccccacattttccttgttgggtgtgagctcccacagggcaggcagtcttcccgttgcagacaggcacagccgtgtgcttttctaaaacacatatctgaccttaccacgaccacccctccctgccccacacttcgcaagagcttctcatcacctgaaagaccaagttcaaggtcattggcccagcatacaaggttcttcttgattcaacctctgttgactgatttcttcagccttgcttyctaccacgttcccaaatgggcccaccattcgaatcatatggctgatttgcagttctcagaatgtgccaacgttctttcccacctccgagctggtgcatatgtgctgtctctgcgtgcaatgcccttctcccct

SEQ ID NO: 462009 - DNA, 608 bp, Homo sapiens
tgtgttcaaacagaatcttatttatgaaagaggtggtggcccagagttggcctgcaggctgcagttccttctctcctagaggcctgttctagaagacacaggctgcagaatgagctcctccaactctgacggtggacccaggcatggtccaaggaaagcagcctccacctagggcccgtgatctgagagctcagtgtctgggaaagtcccaggtccagccgcagagctaccctcttctcccgcttcctccatgctcccctttttccaagcttctcaaagtggcctgaggcctttctccaaacctctttccactctccctctgagcctagaaatgtctttttccatagtggctgctgtggagtgagggaggcagaggaaatctaggatgttaccagagggtgggcccaagtgggaggccagggcagggtasagaagagtctccatcaaaggccaaggaactggaaaatgagctccccacatcctgttttcctgagcaccctgatgctcaccttctaatccttgtccagctgagagctgcttctgcttccttaactgtagctgaacctcaccacctccaaaacgcccacacaaattgactctcctgaata

SEQ ID NO: 462010 - DNA, 527 bp, Homo sapiens
tttctgcttatatcagtgtcctgcctcacctattagacaacccattcccattagagtgaggtcaatgcttaccctgtcctactgggagctctctgagcctgagttacatacatacagctctccacagccaggggccatgggctctccaagggcagagactgagtctcctccatcatgctggcctctcctggaggtcaaatattgtctcccttattagtcctggaagttcctgaaagcagagagctttcattgaccccatttgctgggtctccctttcagtttgattgggagctcacagaggtggaatccagggtcatgagactctcaggtggtccctcttgtctcccygcaggacataggtgcacactgtggctgtgaaggcccctgtgtcacgtagtgaattgcaaaagggttcccattttcacgacttcttgggtccacactcagcgtttctcactaaaaaggcagcatctatttctctgctccttggacctgggctggccatgtgatatgctctggccaacagg

SEQ ID NO: 462011 - DNA, 599 bp, Homo sapiens
ggttaattctggcagctcgaaatgcgttgcagtgtctcccttcagagtccagttagccagcatcagccaggctcccactgtgtacacagcctcttgtggggagtgttgaagaaacaaaagggaagtagaggcagaagctcagcttaggggacatttataaccccaataacctggttgcatctcctttggtggtgttacgtgcacatttctctccagcactagaggaaaaatcctccttgcagtgtagacacttctatccttgccagtgtagatgctttaatccctggaatttttaactggagtgctcacacctatagctaatggctctatttgcctgggcagactgcgtgtgtgtggggctggagtttgggggaggaactaacattttaaagaaggtactaaatgagagtgtagaygctgaagccaaaccaccagagtttgaatcccacttcaaatcctgtgggatcttgagcaaatgattgcctttctgtgtctctgtctcctcatctatagaatggggacaatgacagtacccacccctagggttgctatggggattaaataagctgatatatgtaagtgtttagacagcatttggt

SEQ ID NO: 462012 - DNA, 604 bp, Homo sapiens
ttattcagctcagcattctgtcctctggattctcagagaatttatagaagaaaggtaattttttagataacaaaagatacccactttctcacttccttgtcagttacacatgcagtgactcaaagtaatttgaaatcatatattattatttttgccacagctttgaatggtagcaggaaatagtctttataaaataagtgcttgaatcagcaagtttattctttcagtattacaattgaatcccgtacttcaaatccagaaaaacatactcccctcctattttagattgtgttattttaaagcagtaatttttattcatttgtttgttttcccaattcatgtaatcacccaaggcaacaatggggtgatgaaatgttcattctacaatattttttgaagacaatcagcattctggtcattaattagacatacttggtctgtactggctgagctgatattgattcttcccastgcttcctaagaaaactgaagcatcccctgaatatttgagaacagctcatctgagagctgagggagcaacgtaagagaagggaggtgtgcaaggttctcaaaggaaggaaggcatcacaattgaaatgctaag

SEQ ID NO: 462013 - DNA, 604 bp, Homo sapiens
ttattcagctcagcattctgtcctctggattctcagagaatttatagaagaaaggtaattttttagataacaaaagatacccactttctcacttccttgtcagttacacatgcagtgactcaaagtaatttgaaatcatatattattatttttgccacagctttgaatggtagcaggaaatagtctttataaaataagtgcttgaatcagcaagtttattctttcagtattacaattgaatcccgtacttcaaatccagaaaaacatactcccctcctattttagattgtgttattttaaagcagtaatttttattcatttgtttgttttcccaattcatgtaatcacccaaggcaacaatggggtgatgaaatgttcattctacaatattttttgaagacaatcagcattctggtcattaattagacatacttggtctgtactggctgagctgatattgattcttcccagtgcttcctaagaaaactgaagcatcccctgaatatttgagaacagctyatctgagagctgagggagcaacgtaagagaagggaggtgtgcaaggttctcaaaggaaggaaggcatcacaattgaaatgctaag

SEQ ID NO: 462014 - DNA, 573 bp, Homo sapiens
tgaagacagagagagcattagaccttcttttccatctcaaaataatatatcaagcaggagtaatgtaacaatgtagaggtattcagaactgaggtattcttcatgcttctactttgaagcaaaggtggactggctagtgtcttcagtatttacaatagaattggttyccctaattttatgttgatattcctcaaatcctttgacatttatcacaggggtcatgagattagaatcatatctgaagctgtgtttattctagtgctatttttgaagacaatgatcgtttctcctgtccctgctccgtatataaaattccaaccaccagaggatctatagggattccttttctcctccttttaaaactgataattagaatatttaaaaaaaaagtcatacatgcatttttttttttttaattttggctgcaaggaagctgaatggtaggtaggtagatagtttttttgaagctcaaccacaacaatcacataacccttacaatttgtgtgtgcctacatatatacatatatatatatatatatatatatatacctgttatgaattttctatttttgt

SEQ ID NO: 462015 - DNA, 573 bp, Homo sapiens
tgaagacagagagagcattagaccttcttttccatctcaaaataatatatcaagcaggagtaatgtaacaatgtagaggtattcagaactgaggtattcttcatgcttctactttgaagcaaaggtggactggctagtgtcttcagtatttacaatagaattggttcccctaattttatgttgatattcctcaaatcctttgacatttatcacaggggtcatgagrttagaatcatatctgaagctgtgtttattctagtgctatttttgaagacaatgatcgtttctcctgtccctgctccgtatataaaattccaaccaccagaggatctatagggattccttttctcctccttttaaaactgataattagaatatttaaaaaaaaagtcatacatgcatttttttttttttaattttggctgcaaggaagctgaatggtaggtaggtagatagtttttttgaagctcaaccacaacaatcacataacccttacaatttgtgtgtgcctacatatatacatatatatatatatatatatatatatacctgttatgaattttctatttttgt

SEQ ID NO: 462016 - DNA, 573 bp, Homo sapiens
tgaagacagagagagcattagaccttcttttccatctcaaaataatatatcaagcaggagtaatgtaacaatgtagaggtattcagaactgaggtattcttcatgcttctactttgaagcaaaggtggactggctagtgtcttcagtatttacaatagaattggttcccctaattttatgttgatattcctcaaatcctttgacatttatcacaggggtcatgagattagaatcatatctgaagctgtgtttattctagtgctatttttgaagacaatgatcgtttctcctgtccctgctccgtatataaaattccaaccaccagaggatctatagggattccttttctcctccttttaaaactgataattagaatatttawaaaaaaagtcatacatgcatttttttttttttaattttggctgcaaggaagctgaatggtaggtaggtagatagtttttttgaagctcaaccacaacaatcacataacccttacaatttgtgtgtgcctacatatatacatatatatatatatatatatatatatacctgttatgaattttctatttttgt

SEQ ID NO: 462017 - DNA, 585 bp, Homo sapiens
agcaaggcatcagtaggctttggcagtggagtccagactcaaatgccctgagcagtcctgcagtagcttaaatgtgtgatgcaatgtgtgataagaaacaggagaggtgggagggcaggtatttatactcgactattaaagaaacatacaacaaaaacaaacaaacagaaaaggtgagtatgcrtgttttcaatcagtttcagaaataagagacctgtattttcagttataccctttgggggtgttaacgtttctacccattagaagacagctggcatggaggcaggaggagagactcttacttcgggtttggaatgagatgaaggggactgtgcaaggcatcttttgcccagtaaatcctgtcactgcaaaccttgacattaccccactcacacagaaaagttgtgaggctagactagggtggcagagctggacatagatatgggtttgaatccaggctgcactattagctgtatgtctgtggatgagatattaaatgttgatgatagtctatcttcttatacataaagtgcagaaataataactgacttaatgataacatatggaatgttttctgtgataagt

SEQ ID NO: 462018 - DNA, 613 bp, Homo sapiens
ccttcagctggcaaggccagcaatatacctctactgtccaacctcagtggtatatcagttctccggctttgtgtcataatcttattcagagagagcttgatcactttttgcttccgcaaggtatcacactggtccattacattgatgatattatgctgattggatccagtgagcaagaagtagcaagcacactggacttattggtgagacatttgcatgccagaggatgggaaataaatccaagtaaaattcagggaccttctacctcagtaaaatttctacaagtccagtggtgtggggcctgttgagatattatttctaaggtgaaggataagttgctgccatttggcccctcctacaaccaagaaagaggcataacacctagtgggtctatgtggattttggaggcaacacattcctcatttgggtgtgttactccagcccatttatttagtgaccccraaggctgccagttttgagtagggtccagaacagtagaaggttctgcaacaggtccaggctgctgtgcaagctgctgtgccacttgggccatacaatacagtagatccaatggtgcttgaggtgacagtggcagatagggatgctgtttgga

SEQ ID NO: 462019 - DNA, 536 bp, Homo sapiens
tatgtggattttggaggcaacacattcctcatttgggtgtgttactccagcccatttatttagtgaccccgaaggctgccagttttgagtagggtccagaacagtagaaggttctgcaacaggtccaggctgctgtgcaagctgctgtgccacttgggccatacaatacagtagatccaatggtgcttgaggtgacagtggcagatagggatgctgtttggagcttttggcakgcccccataggtgaatcacagcagaggcctctaggattttggagcaaggctctgacatcttcttcagataactactctccttttgagagtcagctcttggcctgttactgggctttggtggaaactgaacgtttgactacgggacatcaaattaccatgttacctaaacagcctatcatgaattgagtgctttctgacccatctagccataaagtgggtcatgcacagcagcattccatcatcaaatggaagtggtatgtatgtgattgggcttgagcaggtcctgaaggcacaagtaagtta

SEQ ID NO: 462020 - DNA, 558 bp, Homo sapiens
atacataatataaatttatcattttaaccattttaagtttacagttcagtggcattaagtacattcacattattgtgcaaccattatcaccatccatctccagaacccacccatgaaacattaaccccctatttcttccttcctccccccagcccctggtaccaaccattctactttctgtctctctaaatttagctatattgggcaacttgtatgagtaggaatgtacagtatttgtccttttaagtctggtttacttyatttatcataatgccttcaaagttcatccatgctgtagcatgtatcagaattattttccttttaaaggcagtatagtattccattatatgaatgtatcacttttgttaatccgctgatccatagatgaatacatagttgcttccaccgttgggctactgagaaaaatgctgctatgaacttggtgtatggatggagctgtgtattatatatttctgtctattcccaccacccagtactgttcctagaaatgcaggagatatttactagaagtattcagtggaaggaagggtgagaccg

SEQ ID NO: 462021 - DNA, 553 bp, Homo sapiens
tgttctagtgaggagttttcaagccttgaagccaacaggatctggatgcaaaactaactctgtcatttgactacaggagagaacttgcaataaaaaactctctcttggtctcagttaaataggcctacatcctgagattgctgtgaggataaaaaaacacacacagaaccttcaatggtgcccagtataccgtagattctcaatacatttcagcaacaggtttataaaacacactacaatttatgcaaaactttcacagcccacgtcttctgattggcatgccaatcctgacaggaggctctcctattgctgtttttcaaacattaaaatagactcagaaaggaaaagaagcttgcacaaaatcacagttgcatactaggacctttaacccagttctccttatcaaatcacattcataacaaataaattttagatctcraaagaacattagaaataatctaatttcaaattctcattgatcacataaggaaactgaggaacagagagaacatgatttgctttcagcaccagcaccactcagctgctagtggca

SEQ ID NO: 462022 - DNA, 592 bp, Homo sapiens
cgcacataaaaattctggttcacaagcccatgcctttgcttacactgtttcctgtgcctaggatgcgatccctgctcatctgaaactttcatttgttcttgagtactttgctcagcaatcctatcttccaggaactatacccagacttcacaaatggagaatagaagcctatccattctgttctgatagattcaacattcccctctacrtagccccagccatgccgaattataattctttctcttcttgccggctgtcctggacagtgagttaattgaaagcagaaatcctgccctgttcatttctgtatccacagtgtctaacatagtgcctagcaccaagtgggtgctgagtgaatttatttgacctcaactggatttaagttagccttaaattgggacttattagaataaaaaatgactcatgaaaggaacttcagtagggtctgaagaagctaacctacttttggagtgtcccaattgtgagaaagatcccaccagactctccctggctgtagcaatgtccattgtaaagccagaagacagtagcactgccctgcttactgcgatgtacaggaggaaaacgggggatg

SEQ ID NO: 462023 - DNA, 516 bp, Homo sapiens
ctacaacatccttttgttcaaaacaagtcacaagaccagtccaaaatcaaggtattagaaacagactctacttcaggacagcaagagcatcaaagtcacattacaaaggggaataccagtcaggatgtaagggatttgtagctgttaatctaccttatgctgcaatgaacatttttataaattgagctttatgttttagagactaaagcattatttcctttcaattaaccctagaatttgatttgccaggtaaaaagctccagatacaaaggctcttgctttccagaattcacytccatgaccactcactacctctgctttcttaggcaaaggaaattcagtcagtcagccccaaataaaaaagttacttctaatgttctattataaccaaaggcagatttttttttctaaaggaataaagcagctcagtggcaaagagctggatttttctatgtctgattaagaataacattctgcttggcataaacgaaatcttgagtgaggagctggaggcag

SEQ ID NO: 462024 - DNA, 611 bp, Homo sapiens
tactgagcacctgcaaagtgtcagtgaaaagagctcagatagatgagttgagattcagagatgttaagggatttgtcctatgtcccctagtttataagtggcagaggccaggcgtgtgccctctggaacataagttytatgaagataagtgtccagcctggatcagtgccctgtgcagtaagcattagttagatctaatccaggtaagcctgtaactccaaagcccatgaagcttttttcactgaactcatagggtaagcacttggtgctcccctgtctggatttagcagtgccagaagctttggcctggctatgaatcatctctgcagatccaagacctgcacagtggacatgcttcatgccaaagaagcctggtaccagaagctccttggtttgatagaaaattcaaaaatagatgcatctgaagatccctcagcacagctccctgctatggccatggaagaaccctctggcacaattttgatttacgagtccctggcatgacctaatttaacttctttcattcgcatgataaatgaaaatgccagaatggagtcccaaagggctttctccactcactgacaggcacctcagcccagtggctgcctggt

SEQ ID NO: 462025 - DNA, 611 bp, Homo sapiens
tactgagcacctgcaaagtgtcagtgaaaagagctcagatagatgagttgagattcagagatgttaagggatttgtcctatgtcccctagtttataagtggcagaggccaggcgtgtgccctctggaacataagttctatgaagataagtgtccagcctggatcagtgccctgtgcagtaagcattagttagatctaatccaggtaagcctgtaactccaaagcccatgaagcttttttcactgaactcatagggtaagcacttggtgctcccctgtctggatttagcagtgccagaagctttggcctggctatgaatcatctctgcagatccaagacctgcacagtggacatgcttcatgccaaagaagcctggtaccagaagctccttggtttgatagaaaattcaaaaatagatgcatctgaagatccctcagcacagctccctgctrtggccatggaagaaccctctggcacaattttgatttacgagtccctggcatgacctaatttaacttctttcattcgcatgataaatgaaaatgccagaatggagtcccaaagggctttctccactcactgacaggcacctcagcccagtggctgcctggt

SEQ ID NO: 462026 - DNA, 492 bp, Homo sapiens
aaatagttgataatgtcatagttaaatatgcttcataagtatgtagtcttttacaaggaaaattggaatgtgtgtaatgtgaatatagcagctagtattatttttatgtttttccctatctgagcttatagtaaagaagtccagttgtgaatgaaaagaaactcaaagacatacacattttaaaattctcattctgtttcagaattgcttctctaatgaaaggatccagcttgtcctcatgatctgaaaacacctacccatgaggcactgagagcctacagcaggtgggagggtcagaaggccttgagcctcactcagcagctgctccaagaaccctaggctctgtcagatatgtgcaccccatgtataaaagctgtttcccatagtrtagttcggtttcttcactctatggattagctagggccgattaagtaaccaatttatgtactcagagctgtttaaatgcatgctgtgtctgcatgatagatggcg

SEQ ID NO: 462027 - DNA, 589 bp, Homo sapiens
tcattcctttctaccccttatgggatgatttttcaaatttcttctgtccaaaaggtaacaggcatccttggtaaagtgccaggaaatgtcttgtattggattttcagatccacagatagtgccaggccaaggcaacaggttccttgtgtcgaatcaccccagtggagggtaaagtcagccccactctcaactcyaccacccagtaacttgtttttggaagagagtgactttaaccttattgatgattgtccccaaaatatagaatatataattacacctaatactaagagctgtctgggaagtggagaaaactgtaatatcatagagcttcaaagtaaaattaccccctaaaactaagagctcattgtatatatagaaccagggtggaagaggccttaaatagaaatagaatctcactttctgtgcccaagcagatttgaaactgaaattaaataaatgtaggcattcaaatttaatagagagttctgccaggaattggagttagactacctaaaagcctgccattaagggtgtatttctttaactaaaaggcttaggtatccataacacctaaaactggatccttaat

SEQ ID NO: 462028 - DNA, 564 bp, Homo sapiens
tggctcatgcctgtaatcccagcactttaggaggccgaggcaagcagattgcttgagctcagcagttcaagaccagcccggrcaacatggcaaaatcccatctctacaaaaaatacaaaaattagccagatgtggtgatgcatgcctgaagtcctggctactcaggaggctgaggtgggagaatcatttgagcccaggagatcaagcctgcagtcagtgatcataccactgcactccaacctgcgtgacaaagagagaccctgtctcaaaaaaaaaaaaaaaaagaaagaaagaaagaaagaaaaaagaaaataaaaaaaaagttaataggccaattaggtcttccaggactgctattttctccttatttctgtacctagtctgggctattttaacccattctcctcagggaagagacatacattttgtggaggtcttggatctacttcttggttctagatcgaaactggtctcacagatattcaaacctcacaaaattttctcagtttagaaacttcccttaacaagttattttctttcccatcactcaccctatatttgaca

SEQ ID NO: 462029 - DNA, 564 bp, Homo sapiens
tggctcatgcctgtaatcccagcactttaggaggccgaggcaagcagattgcttgagctcagcagttcaagaccagcccggacaacatggcaaaatcccatctctacaaaaaatacaaaaattagccagatgtggtgatgcatgcctgaagtcctggctactcaggaggctgaggtgggagaatcatttgagcccaggagatcaagcctgcagtcagtgatcataccactgcactccaacctgsgtgacaaagagagaccctgtctcaaaaaaaaaaaaaaaaagaaagaaagaaagaaagaaaaaagaaaataaaaaaaaagttaataggccaattaggtcttccaggactgctattttctccttatttctgtacctagtctgggctattttaacccattctcctcagggaagagacatacattttgtggaggtcttggatctacttcttggttctagatcgaaactggtctcacagatattcaaacctcacaaaattttctcagtttagaaacttcccttaacaagttattttctttcccatcactcaccctatatttgaca

SEQ ID NO: 462030 - DNA, 647 bp, Homo sapiens
catgtggctatcctgcaaattttccaatctttaacactctgctttatctttaaatatacattcccaacttaagtcatttatttgctcttgcatctgggtatatgccgttaggagtagccatgccacttattgaatactttgctgcttagaaatttcctccatcagatatcctagtttgtcactcttaagtttaagcttccacagatctccagggcatggacacaatatagccaagttctttgctaaggtgtaagaagggtgaactttgctccagttcccaataaattgcttatttcaatataaggcctcatcagcctggacttcactgtctatatcactataagcattttggtcacaaccatttaaccagtctctaacaagytccaaactttccctcatcttcctatcttcttctgaggcctccaaactcttcaaatctctgcctgctacccagttccaaagcctattccatatttttatagcaatgtcccattcctcaaaaccaaatttctgtgttaggctgttattgcattgctataaagaaatatctgagactgggtaatgtgtaaagaaaagaggtttaattgactcacagttctgcaggctgtacatgaagcatggtgtcagcatctgcttggcttcttgtg

SEQ ID NO: 462031 - DNA, 505 bp, Homo sapiens
aataggttcatcaaaggacattaacctaaatttaatttggaaaatattaccaactaaacatgatagcagagagcaatgtaataaaatgtgcttttgttgcaactgcttttgacattttcttaacgaaatctttgcctgtacctatgtcctcaatggtattgcctagatttccttctagggtttttatagtttggattttatattttcaagactcctagaaaaatagatatcttctatttcagcctcccttttgggtcagcagttgtcctgaggggcaagcatggttgctaggaatcatttcctcagggaagatgtcccttatgtgtctccctggccgcccccaccagtgtaaattaggtgctccttctaagtgctcagctgtaccctgtgcagtttctgtcctcagattagttctctctgggtctcctgctctagactgtgacctcccttcagataggaagctgtgtcttwattcatcttggaatccctgacacatgcattacat

SEQ ID NO: 462032 - DNA, 390 bp, Homo sapiens
tgatgtattttacgcatttttctaattacaattcctggcttatagactgcataggtatttaatattgtctagtaaagtgtgttgatgtacaatttcttgtttaattcagtactattattagctacatggttctgctttatcgttgccattaaactaaatatatactgmttattttcatcaggcaccagcgttaatgtgtttctcctaagtgagttgacctcatgggaattcatcacatctgtggactatattttagtgttaaaggcttaatgtactactgtttcaaaacttacaagtattggtatttcacatgcttttaaaagtactgttgtactttttttttttttttaagacaaggtctctctgtcacccagactggaacatggtgga

SEQ ID NO: 462033 - DNA, 587 bp, Homo sapiens
tttttttttttttttttttttttttggtaattaaccaaaagtgaaggcttttatatcaaagactcaattgaggaagcagtggccttagtcattattggcataattgctttagtttgcttatggatcttaaaacgtttatgactatatctgcaagtaaaaaaaaaattcaataattaaaaacctaaacatatcgagtgtttattttctctttttgcaaaggtatattctaaactcaatgttcttcgggaarttttccaattaaggctctgagtattgatatttgggatttagagaatggctttctatgaccagaatggttagtgatgagattttatgtaagtaggactgggtttttcagggggccttgtgtaacttgccatcaagagttgggaaaggaggccctgagcagtgcagcagagctatgtaaagtgagagtttgggtcttgggaccaggtagcctgggctcaaatctgctctcacacttagcaatgtggtcttgagcatgattcttcacttccccaggactctgttttctcttatgtaaaataggaataatatttattttcaatgatgggggtaaaaagtac

SEQ ID NO: 462034 - DNA, 567 bp, Homo sapiens
caagccttgtttccactctgcaacctcactggaaagtataaagcacacttttaagtctcaaaccaaacaaggactccagttaattgataagagagccaagcaggttaacagcccagaaggcctggtcttcctgtccttcagggctttctgctctgcagctctaagaggatacaaagcacctgtttgcttcttagcacaagtgtcattttaatgaggtgcaaattcaacttgttcagtaatgctacaacaagacagcacagtgcaaagtgtggtccttccatcaagcaatagcagcgatgcccagtgcttgtytgaaatgcagaatctgaggcaccatcctgacctgctaaatgaaaacctacatttgacaatgtccccaggtgatatgcagccacattaaaatctgagagaccctgttctccagagttttagatcctctgtgaaagaagtcattgctactgccctctaatgaacagaacaaaggagaatccaggctcctcccagcctgccttctctctcttgttaaacagtaaaattagcgccaaatgcccaagtattaattcatct

SEQ ID NO: 462035 - DNA, 567 bp, Homo sapiens
caagccttgtttccactctgcaacctcactggaaagtataaagcacacttttaagtctcaaaccaaacaaggactccagttaattgataagagagccaagcaggttaacagcccagaaggcctggtcttcctgtccttcagggctttctgctctgcagctctaagaggatacaaagcacctgtttgcttcttagcacaagtgtcattttaatgaggtgcaaattcaacttgttcagtaatgctacaacaagacagcacagtgcaaagtgtggtccttccatcaagcaatagcagcgatgcccagtgcttgtctgaaatgcagaatctgaggcaccatcctgacctgctaaatgaaaacctacatttgacaatgtccccasgtgatatgcagccacattaaaatctgagagaccctgttctccagagttttagatcctctgtgaaagaagtcattgctactgccctctaatgaacagaacaaaggagaatccaggctcctcccagcctgccttctctctcttgttaaacagtaaaattagcgccaaatgcccaagtattaattcatct

SEQ ID NO: 462036 - DNA, 567 bp, Homo sapiens
caagccttgtttccactctgcaacctcactggaaagtataaagcacacttttaagtctcaaaccaaacaaggactccagttaattgataagagagccaagcaggttaacagcccagaaggcctggtcttcctgtccttcagggctttctgctctgcagctctaagaggatacaaagcacctgtttgcttcttagcacaagtgtcattttaatgaggtgcaaattcaacttgttcagtaatgctacaacaagacagcacagtgcaaagtgtggtccttccatcaagcaatagcagcgatgcccagtgcttgtctgaaatgcagaatctgaggcaccatcctgacctgctaaatgaaaacctacatttgacaatgtccccaggtgatatgcagccacattaaaatctgagagaccctgttctccagagttttagatcctctgtgaaagaagtcattgctactgccctctaatgaacagaacaaaggagaatccaggctcctcccagcctgccttctctctcttgttaaacagtraaattagcgccaaatgcccaagtattaattcatct

SEQ ID NO: 462037 - DNA, 602 bp, Homo sapiens
cctggtgattctaacgtgtagccaggggtgagacccattgtggagcattgtattgtcactttctgtagcctatggtgttgctacagtggtttaaggtaagtcaaaaatacgttgttagaaacatgggaagaaaaaaatggtattggaaaggggacacatcagagaattacagcatgtagacttttgtgttttgtctaaatgctctttcttgattttcctgcgaagagtagttgatgtttattagggacccataattccatgtagaatacttaygggaatcttaagtgatatatttcatttgcagaagtaccaatgaaagttgagtagtagtggcaggatattcatttatgtttacacggtaaagtaagtcataggaaagattattttccatatcaaattaaaaacttttactataaactagtaaattaagtgcaaaaagtttttattgtttttaaggtcagaaagaaacctggcctctgagtcagtgttttctgtctcccttatgtaatcccaaatatccaaatctaggagcagatcttatggatggtttatgaaggcttatgtaagagctatgactgtgcttttggtactccattaaactc

SEQ ID NO: 462038 - DNA, 598 bp, Homo sapiens
agttttatattgagtgagctaatttgccactactagcagattttgaagttattttaatataaatacattgtcctctacccccaaactttatactgaaatttttctgctaaattttaggattataattttgataatggcccaggatattggaataaaatataaatgtgagttagcattaatatctcagtttagagaataacaataaaagcaggaatgtgacctgcagccacatttcttcagtatcgggggaaattcagcccccaatatttgacgtgggtccttttctattttccctaagtattggccggtctgagaaataaagggaaatagtacaaaagagagaaattttagagctgggtgtcygggggagacatcacatgttggcaggttccgtgatgcccctcaagccgcaaaaccagcaagtttttattagtgattttcaaaaggggagggagtgtacgaatagtgtgtgggtcacagagatcacatgcttcacaaggtaataaaatatcacatggcaaatggaggcagggtgagatcacaggaccggggtgaaattaaaatcgctaatgaagttttgggcatgcattgtcattga

SEQ ID NO: 462039 - DNA, 541 bp, Homo sapiens
ggacagaaagattacttgaggaaataatggacaaaaactcaagcagcaagagagaagtgagtaatcatgtacagaggatcttcaataagattaacagctgacttctcatcagaaactggaggctagaagatagtggaatgatgtattgaaaatgctgaaagacaaaaaaactgtcaatcaagaattctatatccagcaaaactattattcaaaaaagaacaaaagattaagatgtctcagaaaaacaaaaacagagaatttgtcactagcagactgtccctacaagaaatattaaaggtaatctttcagtttgtaactaaaggacacaagtcagtaacacacatccacaggaagaaataaagagtagcagtaaaggtaattatataggtaaatataaaagagtacaaaccactaagaaaataactaaaaaatgtaaaagaaacggaatgaaaatgatatattgaaaaatatctatttaacacaaaagagggcagtagtggaggaacaaaaagacatcagacrtaacacaacaaatagcaaa

SEQ ID NO: 462040 - DNA, 585 bp, Homo sapiens
attgcagaagacaaagaaggtcattacctgttgttaaagggatcaatttctcaggaagtcaaatatgagcatgcatgtatttaacaatagatcccctaaatatgtgaagcagaaacagaattgaaagaagaaatagaaaattcaacaatagtatttggagatttcaatacacattccctccctccctcccttccttcctttcttccttccttccttttttatttatttattatttttttgagacagagtctcactctgctgctcaggctggagtgcagtggtgccrtcttggctcactgcaacctccgcctcctgagttcaagcgattctcttgcctcagcctcccaagtagctgagactacaggtgcatgccaccatgcctggctatttttttgtatttttttttttagtagagacaggctttcactatgttggccaggcttgtctcaaacttctgaactcaggtgatctgcctgcctcagcctccccaagtgctaggattacaggtgtgagccactgtgcctggcatcaatacctcattttcaaaaatgggttgaaacagaagatcttattttcttgctgaag

SEQ ID NO: 462041 - DNA, 589 bp, Homo sapiens
attcaacaatagtatttggagatttcaatacacattccctccctccctcccttccttcctttcttccttccttccttttttatttatttattatttttttgagacagagtctcactctgctgctcaggctggagtgcagtggtgccatcttggctcactgcaacctccgcctcctgagttcaagcgattctcttgcctcagcctcccaagtagctgagactacaggtgcatgccaccatgcctggctatttttttgtatttttttttttagtagagacaggctttcactatgttggccaggcttgtctcaaacttctgaactcaggtgatctgcctgcctcagcctccccaagtgctaggattacaggtgtgagccactgtgcctggcatcaatacctcattttcaaaaatgggttgaaacagaagatcttattttcttgctgaagatcagcaaggaaataaaaggcttgagcaactttataagccaaytggaattaacagacacctaaagaacacttcacccagtggtagcagaatatacattgttcttaaatgcctgtaggaaattctttaaaatagactatgtaat

SEQ ID NO: 462042 - DNA, 586 bp, Homo sapiens
taggcaggaatatcatcacccctctctagcctgaagaagttacagaagatggatctttgtctctctacaacccttaggattaagggttcccttgtaaaagggaagggggaaatatgtcagaggtgtttgaaccacagtgatgccattttgaatagcggctgggtaaaatgaggctgagacctactgggctgcattctcaggaggttaggcattctaagtcacaggatgagataggctggcacaaggtaagctcacaaaggccttgctgataaaacagaytgtggtaaagaagccggccaaaacccaccaaaactaagatggtaatgaaagacctctggtcgtcctcactgctcattatacgctaattataatgcattagcttgctaaaagacactcccaccagtgccataacaatttacaaatgccataagttacccgatatggtctaaaaggttgggggaacccttagttccaggaattgtccacccttttctgtgaacactcatgaataatccactccttgtttagcatttaatcaagaaataaccataaaaaatagccaaccagcagcccccaaggctgctct

SEQ ID NO: 462043 - DNA, 589 bp, Homo sapiens
taaatggcggggagcattaagcctctaagtttgtggtaatttgctacacagtgtagaaaactaatacatgcttgatgatgaagtttctgtttcctgctgggagatgacggaggtggggcaggtgatatccatgactccaagctaggaattctcactggaaaatcaggaattgcactgaatatgagaagggaaaaggaaatgagaaatgttatgcaactctctaccatgctcaaacatatttttctctcaaggtttgatggagtaaacaactaatatagtgtaacttgaggaatactgaaaagctaggtcaaaaaatatctgcccatcttcctgtcttgacatttaagatatttatctgcagggggagtctttatgcaaaaagaagcatttggagtccctgtttaaagtgcgcatgcttgagccccaycctacaccctcaaaatcaaagtagacattttaatcggggttatccgggtgcttctgatgcttgcatctgggggctgtcccttgaagaacaccaccttaagcaccttctgggggcatgcacattacaactggaatgatgcggtcaagaatttggaaatttata

SEQ ID NO: 462044 - DNA, 625 bp, Homo sapiens
aaaatttaacgatttgcccaagtcccccctcccctccccaggaaaagccagcgaccacattccaaccctccgctaactctgcattgagcactctctttcctatgccctccacctgcgcccattcccctcttctgcgggccgaccgggatcctgctgggggctacagcccaaacatgttacttttccaactgttgttttatgtgtttctatgagaaaggatattcggattcagaaatgctttgcaactccagagctgttgagcctgcggcgcggcccaccactcaacagcggtgctgagtggctgctcggtcgcgcgggatccactccgggcctccgagggtgggtgcacgatccactagccactctccaggggagagtgacgtccrggtggaccaatcgccgctggggcaccgaccgctgggcccaatcgcaggagagccgggtagaacagtgacagcgccgcggcagccgaccccgcctcctcggcggacagcgatgctcagctggctgcggccgagtcatcgcctagcgctggcagggccgctgaccgaccgacggaggcgccgattggccgattgtccactgcgcagaaggagcagctgctccgcgccccgccgcgccgcgc

SEQ ID NO: 462045 - DNA, 615 bp, Homo sapiens
atgcggtgatgcacgcctgtaatcctagctatttgggaggccaagcccaggaggtcaaggctgcaggcagctatgatttcaccactgcactccagcatgggtgacagaatgaaaaaaaaaagaaaaaaaaagattctgatccttttgattatttcakgttgacaccctcttctgcatcttttgttaaaatcagccttgaatgatggccacaacttgaatacacagagaaggaggtagagaagggacctattgtgtgaatatgcaagaatttcttaagaagtctgtagccctgttggagagggtgctctgacctgcataaatgactatctgaccactagacaagcatgattcatctcatttttccagcttgataaaaataagcaacatgactatccaagttcattcatcttgtttcatatttacccaatggtcttcttaattaaatttctacaatagattttcttactgtgaagacaatattcagactggccaaagtaaattctctaaccctcttgtcaattagatagtaaatgtcatatttctcattctaaattaataactagtcctttttgctccttaagcaatttctttggaattttggtttaatcagtttgt

SEQ ID NO: 462046 - DNA, 617 bp, Homo sapiens
tgaaccaccacgcctggcttactttgttgattttaagaagtcagtaatatcttttccctctcttatgggttttcagattttcttcatcttcgatttttagcatttacagtataatatgttaactcatacgcttagttgtgtttaatagcttcttcaatctgtaaattactgtctgttactattgtttcttggaaattctcaacaataatctcttcagatatygtatttgctctactttctgtttcctcattttctgagtaagaaaaacacgtggaaaaaacccgtgtgcatctgggaggctgaggtggaaggatcacttgagcccaggagttcgaggttacagtgagctatgattgctccattgcactccaacctggtggcagagtgagaccctgtctcaaaacaaacaaacaaacaaacaaacaaacaaacaaacaaacaaaccaaacaaaaccaaacccgaaaccaaaataaaaaccttcattaattttctaactcttctttgactcttaatctcttttttctatttcaacagttttgcctttctataccttatcctaatttctttttacctgtattgtaattcactaattttcttctcttttatttctcacaca

SEQ ID NO: 462047 - DNA, 568 bp, Homo sapiens
gcatatgtttagctttggtagattctgccaaagagttttccaagatggttgtatcaagtcacaccttcaagagcaatatrtgagagttctagttgttccacagttgatacttaatattgttgtattatcaattatttatttatttagagacaaggtctcagtctgtcacctaggctgaatgcagtagtgcagtcatagctcactgcagcctcaaattcctgggttcaagtgattctcctgccccaggctcctgaggagctgggactacaggtgcacactatcatacccagctagttttttttttttactctagagatgaggtcttactctgttgcctgggttggtctcaatcttctggcctcaggcaatcctcccgtcttggcctcccaaagcagtgggattacaggtgtgagccaccatgcctgggctgtattatcagtttttaatgtgtgttttcttttttgagatgttttttagacaaacatcctcagggtgtggtttttggatggggggaatttgcagtgtctccttccctcaattatgttttttttgggaaggacagtgtctt

SEQ ID NO: 462048 - DNA, 568 bp, Homo sapiens
gcatatgtttagctttggtagattctgccaaagagttttccaagatggttgtatcaagtcacaccttcaagagcaatatgtgagagttctagttgttccacagttgatacttaatattgttgtattatcaattatttatttatttagagacaaggtctcagtctgtcacctaggctgaatgcagtagtgcagtcatagctcactgcagcctcaaattcctgggttcaagtgattctcctgccccaggctcctgaggagctgggactacaggtgcacactatcatacccagctagttttttttttttactctagagatgaggtcttactctgttgcctgggttggtctcaatcttctggcctcaggcaatcctcccgtcttggcctcccaaagcagtgggattacaggtgtgagccaccatgcctgggctgtattatcagtttttaatgtgtgttttcttttttgaratgttttttagacaaacatcctcagggtgtggtttttggatggggggaatttgcagtgtctccttccctcaattatgttttttttgggaaggacagtgtctt

SEQ ID NO: 462049 - DNA, 568 bp, Homo sapiens
gcatatgtttagctttggtagattctgccaaagagttttccaagatggttgtatcaagtcacaccttcaagagcaatatgtgagagttctagttgttccacagttgatacttaatattgttgtattatcaattatttatttatttagagacaaggtctcagtctgtcacctaggctgaatgcagtagtgcagtcatagctcactgcagcctcaaattcctgggttcaagtgattctcctgccccaggctcctgaggagctgggactacaggtgcacactatcatacccagctagttttttttttttactctagagatgaggtcttactctgttgcctgggttggtctcaatcttctggcctcaggcaatcctcccgtcttggcctcccaaagcagtgggattacaggtgtgagccaccatgcctgggctgtattatcagtttttaatgtgtgttttcttttttgagatgttttttagacaaacatcctcagggtgtggtttttggatggggggaatttgcagygtctccttccctcaattatgttttttttgggaaggacagtgtctt

SEQ ID NO: 462050 - DNA, 300 bp, Homo sapiens
actcttaagtgtgtcctctctcccctgagggcagctgggtccgggaagcgcrggcccccgcctcgggaatatagttgattggcccgaggtggaccctgcagtgctaggtccaccctcctggcttggacgggcgttctaacctgccgtccacagaccgtcgggacaaaataccaactgaaacctagcatttcctttattatgaatttgactacaaataccaggagtattagcagtacctgtgactttgtgggcaatagtcatcacagacgttttcatgttactttacagttgttggtgata

SEQ ID NO: 462051 - DNA, 634 bp, Homo sapiens
cttgagcccaggagttccaggttgcagtgagctgtgatcacaccactgcactctagggcgacagagtgagaactttgtctctaaacaacaacaacaaaaacccccacaaaactataactggaatatttgtaacacaaagaaatgataaatgcttgaggtgatggatacccattttccctgatgtgattattacacattgtatacctgtattgaaatatcttatgtaccccataaatatatatacctrcaatatacccataagaattaaaaataaaaaagtgaaattattaaaatgacttcaaagacttgagagttaagacaatcaaaaggttaattgcttatttttggaaaatgacttttttttttctataatgcatgtaacaaagaaaattccctgtacaatactgaaaaatcaaaccgctgtaggccaaaacttagctatctatttacatgtacagatatctcatcgtaaacataaattcttcaaggctaaatcaactatgtttaatttgcttttgccacaggaaaaatattattcagttctgataaaagtgccccaaaatattaccatgtggaatcaagaatttatttcaaatttgaaataacatattatgattattctaagggagcattt

SEQ ID NO: 462052 - DNA, 559 bp, Homo sapiens
aaaaagggatcttggggaactcaggaaggcctccgagaagaagtgttcaatctaaaaggtggtaaggatttaggtaggtgaagaatgaagacaatgggcaagtagatgtccattactcaccttaagttcataacctttcatctgaaaaatggcctcctaactgattttgaaatttctggtctcttccattgcttcagactgagttattatgttacgaagtcagttacatcacatcacttaaggtctccaaaatgtaatcagctctctactgaataacagccaaattctccaacacggcactgctcccctcacccaaatggtctggctttcacctacctgtctgtatctcactaactctgcccatttacytcatgaggcactcatgatgatctcttccccactgaccaaacacatcctattcgtttctatttccatgctgtgcactgtactccaccctccctctattgaagttctcttcatctgatacaaaagcaatgccatgacaccttctctttggaagtttccctggtaagtctcccttcctcctctgaacaaatct

SEQ ID NO: 462053 - DNA, 560 bp, Homo sapiens
atttatttggtgcaactatatgcatcagttctgtactcaagagggaccatttggtcatccaactcaattcctactcaatgcaataatcctaggatgggggacacccagaccstagaaatttaggacatgctcagggtttcctgagagcttatagcagaggtgagactgccatcttgtaccctctctcccatcttgagtgggctttgtccatctgttggccaaacatttccctatttctaaggaaagagtctgggagatgtatgaattagaactttttacaagtcagtctgctattgcaacataacttaactctattgcaacttaactctcatgagttaagtgcaaatgaatcagaaccagatggacaaattttttgaaaacaatgtgtttaaaagtggaggagaaagaagaaaattgttggcaaaactctcaaagatctgtggctacatcttatgtgaaacactttgccctgcttttagctatttccatcacgggagaaaatgacatctcagaactccaggggaagtagggtggtgagagtagggatggtacccaccatc

SEQ ID NO: 462054 - DNA, 568 bp, Homo sapiens
tgcatgcaattgtgttgctttagagtttacctccttgccttgactaacactttactcttctgtttcacttctgccatttcccatgtttgtatcactgttgctggtattatgtatttagagttgtggcttcgtaaactgtttcttaaaatattcctgtgctctaagaggcagcatactggggaaagaacactaggaagaaaagagaaggggagacagggaacaggggtggaatctgttccttaagaaatccacttaacctccctgggacttgtttgtgttatctgcagattgaggaatatttggcaagacagggtgtaaaatcgcttgcagcttcaatgcactgcatttaaaaacctgttactttcctatcttgagacaccaaaatgctcttagacttgaagatgactatgtatgcaagtgcatccctcccaccctccttcccaaacaaacacacacacaaacacaaacacaccccaaatgctctgagaaaacccatgrttttgttgtttgaacatgttgttttctttaaccaagtggttgtttgcaaacgttttctgattgtaacagc

SEQ ID NO: 462055 - DNA, 545 bp, Homo sapiens
ataagttgcataatgttctacagattgaaaaagtcattattgatggcaaaagttaaaagttgcaaccttttatctgttaataggcctaactcttaagggtggtagagaatagagatttttgaagttgtgtgtgaatgtatgttggcggcagaaaaaaaagagactgcacttgcctgaacctcagagcaagtgtctctttatttatttatttatttgacagagtctcgctctgtcacccaggctggagtgcggtagcatgatctcagcttactgcaacctctgcctcctgggttcaagygattctacggcctcagcctctctagtagctgggattacaagcacctgccaacatgcttggctagtttttgtatttttagtaaagaagggtttcaccatgttggccaggctggtcttgaactcctggcctcaagtgatccgcctgcctcagccttccaaagtgctgagattacaggcatgagccactgcgctcagcttgtacctctttaaattttgcattctaggcaactcttttccctcactcttgt

SEQ ID NO: 462056 - DNA, 633 bp, Homo sapiens
cagtaagtcgggcagttgtgattacagcagcataagcagtagctgctgtctgaccccgcagcagcagagttggcagttagtgttcctaggctctgctaacaccacctccatccttctgtgcctccagccctactggtggtagcagcttcctgaagttactaatctctgggattatttacaacccccttttggcttcctttgctttcgaatgcttttggaaccaagtgcctgcatcaaatcctccctcccaacccttgtttgaaataattagtgtagttttcattttcctgatcagactctcactgatttaggggacaggagagatttaagcaaatawaagctccttctaaagggtttcctaatatctccactgcaggataggccaactcatgaggtacttaccacacccctgtctctttgggcatgccaagtccagctacccccaactctcaggtctttgagtatgttcaaacagacaacacgtgcctaggattcaaactgaagctgggacatgttcagtaggtattaaggtggtttatattaaccttaaatgtcccttttagttgtaatattttcgaatagtggtttccatcctgtggatcattgtgggatgttagaaattttttttggaag

SEQ ID NO: 462057 - DNA, 573 bp, Homo sapiens
gcccctggtatgtgtagaaccttcaaagcaatgtctggcatagtaactctgtactttgttttggctttattattattattattgttgttgttacctcttacaattgttgggaagattacrtaagattgctcatacatgggaaatgtttagcatggcaactggcttggagtacacgttcaatatggattagatgttttaatcattattacttttattattaagaattgttgaagaaatgatcttcctgttttcttgtctgttgccctttagacaccatctctggaagttccactgactttaaaactcactacatccaaaatttatctcacaatattcccctgaaacctgctcatgtaaaaatgcttggcagagcagctacataaatattttcttcctctcgtcctgtccccttccctctcttcttcctccttctccatccctttctgtttttctccctaattatcccatcacctttctcttggtgttctaaaattaatctcttgcctctccttcccctcaacacaatatttcactgattcccatgatatttttgaaaggtgtctgggttgcatg

SEQ ID NO: 462058 - DNA, 573 bp, Homo sapiens
gcccctggtatgtgtagaaccttcaaagcaatgtctggcatagtaactctgtactttgttttggctttattattattattattgttgttgttacctcttacaattgttgggaagattacgtaagattgctcatacatgggaaatgtttagcatggcaactggcttggagtacacgttcaatatggattagatgttttaatcattattacttttattattaagaattgttgaagaaatgatcttcctgttttcttgtctgttgccctttagacaccatctctggaagttccactgacttyaaaactcactacatccaaaatttatctcacaatattcccctgaaacctgctcatgtaaaaatgcttggcagagcagctacataaatattttcttcctctcgtcctgtccccttccctctcttcttcctccttctccatccctttctgtttttctccctaattatcccatcacctttctcttggtgttctaaaattaatctcttgcctctccttcccctcaacacaatatttcactgattcccatgatatttttgaaaggtgtctgggttgcatg

SEQ ID NO: 462059 - DNA, 546 bp, Homo sapiens
gggtcttccagagcctgatgcctcactcagatctagtcacttttctagttgctcctatgtgtacatcaaccttagcaacctcttacctacaccacatctcatttctcttataagcaaagacaagatacctaaggtttaattaggctatgcccatttctcttgtttcttgggaagcttaatgcctaatggttcaggtgttaggttctggagtcaaactatcccatcatcaaagtctgaccttggcaattacttgctgcataacaytgggcaaatcacttattgtttcatgcctcagtttcctcatctgtaaaaatgggacaataatatcacctaccacttaaggtttgtgtgaaaattaaatggaaaaatgcatgtaagggacttagaacaatgcctcacacatagcaattactcaataagtgttattacttcacaaattaacttctataataccggacactttatttcttatttcaattatatcctatgactgggttcattagcataaagagtgagaatgagagaaaatatacataagaatcattg

SEQ ID NO: 462060 - DNA, 324 bp, Homo sapiens
atcactttcagccctcaaaaaaccggctactgtcccaagtcttgaagtcctctagagcaacagcacctgttggctgttttcctgtgaaatacgaagacaggaatagggctggaatgggctgttaattcatttaacacttaggtgctgagccccagctcagcaaatatcctgagcagcacagtggtagaaggagcaaggacatcagaattaggctaaacctgsgttcaaatcccatctctgctatctagtgcctctatgaccttgagtgagtcatctaccctctttgaacctcatatctgtatcaaaaagtaaaaatagcaatgc

SEQ ID NO: 462061 - DNA, 583 bp, Homo sapiens
gagcagggaccccagccaacacccagtgaacatgtagcataagcaagacataatccactgaacttatgtttgttattgcagcttaactcctcccaacctgcacacacctgatgtttctaaaatataaagcaaaccaagggagcctgcagagtgaagcaggagtcagtgctagccttttatgagacactcaagcatttggattttatcctgaaggaatggtaatggattttatgacatgrtcagattttgaggggccatactggaagcagagaaaataaacaggggactggtctaggcaataaggctgagtacaaagatggaggaaagctcaagtagaaaggctgacatgcacttccccatcaacctgcataagaaggggacttttgtgatcagtgtgaggggaccatcagcatggcctcctacaatctgcggtggcttcagtttcatttgtagctgttggctacaaggaattattccacaggtccaccatggtagatagcatggctctcatgaagtattctgaatccattttcaaggtcattttcctcttattttttttccagcccaggccagacttcaaaac

SEQ ID NO: 462062 - DNA, 405 bp, Homo sapiens
tttagttcttttgttgttggttgttgtttttaagacagggcctctctccrttacccaggctggagtgcagtagtgggatcccactaggctcaagtgatccttctgcctcaccctccccagtagctgagactacaggcatgtgccaccacacccagctaattttcatattatttgtagagacagggtttcatcatgttgcccaggctggtctcaaactcctgggctcaagcgatcctattgtcttggcctcccaacgtgctgggattacaggcatgagccaccacactcaaccatcattagttttaactaagcacaaactctgtgaatataggcatttaattgccgattaaaggcgaaaaaaatgtatcctatttttgctttataaaatatgtttgagggtaatca

SEQ ID NO: 462063 - DNA, 538 bp, Homo sapiens
acttttcaatccctaatgaaataattgactcaagcaaagattacccatagatgaaaccatctgatgaaagattaaagggaaattttagaatagagataccagactgtcaccacctgaacscttgattaaattagcatcctgaaaaatgggacaaccagactttatgtgctctctaatatgatgcaacaaggaagtacacggccctgacaattaaatattctaggaaatagacctcggacttaaaacaaatcaagactttagaatgaacttctaaagtttgctataaataggagagttagagaaatcagttaaatgaaaccccaaagagacaaacagaaaattcagaatgtgagtctttctataagacatggttttgtcaataaaaaatagaataaaaatggaggggtcggggaaagagggcaaggaggacaggctgttttagattccaagagacttaagaaatacaactaaatgcaatatatgtggatcttgtttgatcctgatttgaataagtcaacagtaacatcacattcttgag

SEQ ID NO: 462064 - DNA, 573 bp, Homo sapiens
accatctgatgaaagattaaagggaaattttagaatagagataccagactgtcaccacctgaacgcttgattaaattagcatcctgaaaaatgggacaaccagactttatgtgctctctaatatgatgcaacaaggaagtacacggccctgacaattaaatattctaggaaatagacctcggacttaaaacaaatcaagactttagaatgaacttctaaagtttgctataaataggagagttagagaaatcagttaaatgaaaccccaaagagacaaacagaaaattcagaatgtgagtctttctataagacatggttttgtcaataaaaaatagaataaaaatggaggggtcggggaaagagggcaaggaggacaggctgttttarattccaagagacttaagaaatacaactaaatgcaatatatgtggatcttgtttgatcctgatttgaataagtcaacagtaacatcacattcttgagataactggaggaatttgaatattgcaccaggcattatagtgagtttctttagatgtgatcatgatcctatggttagctaagacaatgtcc

SEQ ID NO: 462065 - DNA, 583 bp, Homo sapiens
ctacaccttgttccagccgcagctgtgatagatatttccatgccagctcagaatcaccttgtactatcagcttcccatatcaagcaagtagctcccatctttcagcattctgtcccaggactttctccagtgttgccataatctgcttgacttgtgtaggtaagttcagcccagaagtgcaggggcattaacaactcccagccctcaggacagctcctgatcaacagggcatggtggctgatgagtgaatgcaccagcctcccactcycctaggagacagaatttaacacccattgcctacagcagtgacctcaaaaacaaaacaaacttattttatcttttccttctcccccgtctccctctccctgtccctcactcctgcttcttgagatcccctgtaccggttcctaaatccttgtatcaaccttcaatttgagggaaattcaaattaaggcatcaaatttacaaggttatggcaaagattaactatgataacatgagtgaaattcttcatgcatttcccagcacattgtcagtgcttaacaaattatagttattaatggtagctattatatttttgatg

SEQ ID NO: 462066 - DNA, 557 bp, Homo sapiens
ctacaccttgttccagccgcagctgtgatagatatttccatgccagctcagaatcaccttgtactatcagcttcccatatcaagcaagtagctcccatctttcagcattctgtcccaggactttctccagtgttgccataatctgcttgacttgtgtaggtaagttcagcccagaagtgcaggggcattaacaactcccagccctcaggacagctcctgatcaacagggcatggtggctgatgagtgaatgcaccagcctcccactctcctaggagacagaatttaacacccattgcctacagcagtgacctcaaaaacaaaacaaacttattttatcttttccttctcccccgtctccctctccctgtccctcrctcctgcttcttgagatcccctgtaccggttcctaaatccttgtatcaaccttcaatttgagggaaattcaaattaaggcatcaaatttacaaggttatggcaaagattaactatgataacatgagtgaaattcttcatgcatttcccagcacattgtcagtgcttaacaaattatagttat

SEQ ID NO: 462067 - DNA, 583 bp, Homo sapiens
ctacaccttgttccagccgcagctgtgatagatatttccatgccagctcagaatcaccttgtactatcagcttcccatatcaagcaagtagctcccatctttcagcattctgtcccaggactttctccagtgttgccataatctgcttgacttgtgtaggtaagttcagcccagaagtgcaggggcattaacaactcccagccctcaggacagctcctgatcaacagggcatggtggctgatgagtgaatgcaccagcctcccactctcctaggagacagaatttaacacccattgcctacagcagtgacctcaaaaacaaaacaaacttattttatcttttccttctcccccgtctccctctccctgtccctcactcctgcttcttgagatcccctgtaccggttcctaaatccttgtatcaaccttcaatttgagggaaattcaaattaaggcatcaaatttacaaggttatggcaaagattaactatgataacatgartgaaattcttcatgcatttcccagcacattgtcagtgcttaacaaattatagttattaatggtagctattatatttttgatg

SEQ ID NO: 462068 - DNA, 544 bp, Homo sapiens
tgttttctactcaaagggtggagtcgttacaaaacaggggccagaattacagtatttggtttggtatcactctgggtagaaaagcatcttggactttgcccattcaattgcctccacctgaaacctcttttctcctatcaaaaccctgtgcrtacttcaagcctcatctcaaacatatccttgtttattttaccagtgattggatgttggaatttgcctacagtcataaaacatatcagtgtcaaacctagagaaaaacaggcctttggccaccatcctctcctacattctttcctccataccagggctgtccaaagtgcctgagacgctgagtgggaaatgttatcttctacccctttctagagaagtcttggtccctatgaacaataaaagcctgtagcatattctatagttttactgcaattgggaaacaatttatttttatttaataaagcattttccaactcatttgagcccttttccccattacacccactaacttgcccttgaattattgttccagaaaacacaatttgggaaatac

SEQ ID NO: 462069 - DNA, 540 bp, Homo sapiens
ttaccagtgattggatgttggaatttgcctacagtcataaaacatatcagtgtcaaacctagagaaaaacaggcctttggccaccatcctctcctacattctttcctccataccagggctgtccaaagtgcctgagacgctgagtgggaaatgttatcttctacccctttctagagaagtcttggtccctatgaacaataaaagcctgtagcatattctatagttttactgcaattgggaaacaatttatttttatttaataaagcattttccaactcatttgagccctttyccccattacacccactaacttgcccttgaattattgttccagaaaacacaatttgggaaatactgctctctatcatgattatgctaactcacttccccctcatctttatacatggggaagccaaagaaagacagttattatataggtgaagtgctaagatatttggacaatcgcctcttttcatggcttgtaagagaactctattttcaatataaacaaaaattttatccagaaaaagaggggccaaa

SEQ ID NO: 462070 - DNA, 546 bp, Homo sapiens
taaggctgagcacctcttaataagaatttgcaggtctaaaactgggaaaatgtgtcttttacatttgtaagactgggaaactattactttaaaaatctttaccaataacctgttgctctcccaaattagccctcacaggggcctagggtcatctgctcttctgtataaccaaatgaggaggtccacccctggttgctgacttagtgttaaggcctggcctatggactaagacctggaccatcccaatacccagagatacagaatscccgccactgaagttgcagtgtctcctcgagaggttcaacagtaaagcaaaaccaagacagaggaggcagccagggtcccgggaagccacgggctttgtaatccattggaccagcctagctttgaatcccagcacttccttttccttgtggacctgaagaagttctgtactttctctgaacacagtttatttcttttgaaaaaagaatgaccggagtgagagattacaggatggtcaggagatttaaaccagatgaagtaggtaactcaggtgttggctgt

SEQ ID NO: 462071 - DNA, 546 bp, Homo sapiens
taaggctgagcacctcttaataagaatttgcaggtctaaaactgggaaaatgtgtcttttacatttgtaagactgggaaactattactttaaaaatctttaccaataacctgttgctctcccaaattagccctcacaggggcctagggtcatctgctcttctgtataaccaaatgaggaggtccacccctggttgctgacttagtgttaaggcctggcctatggactaagacctggaccatcccaatacccagagatacagaatgcccgccactgaagttgcagtgtctcctcgagaggttcaacagwaaagcaaaaccaagacagaggaggcagccagggtcccgggaagccacgggctttgtaatccattggaccagcctagctttgaatcccagcacttccttttccttgtggacctgaagaagttctgtactttctctgaacacagtttatttcttttgaaaaaagaatgaccggagtgagagattacaggatggtcaggagatttaaaccagatgaagtaggtaactcaggtgttggctgt

SEQ ID NO: 462072 - DNA, 546 bp, Homo sapiens
taaggctgagcacctcttaataagaatttgcaggtctaaaactgggaaaatgtgtcttttacatttgtaagactgggaaactattactttaaaaatctttaccaataacctgttgctctcccaaattagccctcacaggggcctagggtcatctgctcttctgtataaccaaatgaggaggtccacccctggttgctgacttagtgttaaggcctggcctatggactaagacctggaccatcccaatacccagagatacagaatgcccgccactgaagttgcagtgtctcctcgagaggttcaacagtaaagcaaaaccaagacagaggaggcagccagggtcccgggaagccacgggctttgtaatccattggaccagcctrgctttgaatcccagcacttccttttccttgtggacctgaagaagttctgtactttctctgaacacagtttatttcttttgaaaaaagaatgaccggagtgagagattacaggatggtcaggagatttaaaccagatgaagtaggtaactcaggtgttggctgt

SEQ ID NO: 462073 - DNA, 622 bp, Homo sapiens
gttaacaaccacataatattctattgcaaagacctgccatattmatttaacaactcttttgtcactgggcatttaggttgtttccaattcttggttattataaataatgcagcaatggatggttttggccagaaggttttgtctgcatttcggattatttccttcagctaaattcctagacatagaattcccaggccaaaaactatgaactcatgatacatagtgccatatcgttatccagatcctccacatatttgaagacaacgatcatactcccaagtcttttctccaagataaacacgcacatatcccctatcactcctcatatgactcatttcccagtgtggtcaccattcttgccccttttcctctggaagaaagcacaaactcctaagctggcattcaaagctcttccactctgactcaacttcatctttgccccttcatctcctgtagtacctcacctcccttgtcaggcccctcctctcctctcagtcgctgctccctacaaatgccctgttccttcactctgccattcacttatttactgttccttcagtccaggatgcctttcatacttttgatgcctaggaaactccatctcatcttgcagtacagagct

SEQ ID NO: 462074 - DNA, 603 bp, Homo sapiens
tgctgactgttcactcatcttccttgggtaagcaggaatggcctagagagatgagaatggcaccttccaaaagttccarattggagactgatccatcccacaatgaaatggcacatcagtctgaataggattcagcaaagaagttataaggacaaataagcagacggggggaagtgatgagacagaaggttccaagtggacaatggaagggattcttgggctatagcatcttagaagcactaacatctaagtgaaaactgaaagccaagaaggagttggtcagtacagaaggagaaacaccattctaagcacagggaaagtcctaagtgaaggcctgaaagcaaagatgtctgggtgggttggggtgctgcagtgaggttggggaggtagaaagaagtctgacacattgggtacagggtacaccacttgggaaatgggtgcaccaaaatcacagaaatcaccaccaaagaattgactcatgtaaacaaacaccacctgtttcccaaaaacctatttaaattaaaaatagtaaataaataaataaaaagaagtctgtgtgtaatactaaggagctcagatttatttcctcttcacaaggaacag

SEQ ID NO: 462075 - DNA, 589 bp, Homo sapiens
tgtgggttattaaccccattttatagacgaggaggcttaggtaagagaaataccaaaacccattcagtttcctgcctcccggtctagttctatttcttcctcaatctctccatctacaattactttgagtttcaccccaaggtgaagactttccgccaccatggcatgtctcattcattgtcctacctacaggaagatagcaagagatttaaaaggagtgcaggctacagatccaacttgggtatcaattctgctgtgctgtatgtgagctgggcgactttgagaaaaatcacttaatctctctgagtcacagttgtccyttctgtaaaaagatgatcgtgttgtctaccatatgtagaggtaatatatttaaagcagtagtcaataaatggcagccattattattgtctcttttgggtcctaactgctggtgcccatgaggagcatctctcctataactaactgccttcaatttaatgctcacaaatgcagtaggcgagccttcgtgatattaagtgagagaacagaccatcttctgggctaacagccactttggagcctgactcccaattttctcaaatacctaccc

SEQ ID NO: 462076 - DNA, 349 bp, Homo sapiens
ttctctctctcaggcattcgtggtctgggaaaaaaagctaagaccatgaagatctttataactgagtgggctttggtgtgtaattggccctayaaaaggaaacaaaaccaccatgtattgatatctacgtggatgattcaagcattttgcatatcttatttaattctcaaaaaaacatgtaaagaaaaaaattattgtttgtcccattttcatatggagaaacaggctgagagtaagcgatttcccccctaacacaaaaagtcccatgagtgacatcactaaagtttgaatacaggtttttctggctcaaaaagctggtgctctttttacataccacctgataaaactt

SEQ ID NO: 462077 - DNA, 501 bp, Homo sapiens
aggcagctgcggggagttatgaactgtgagaactgcctggagccaggakggcaggtcattttaaaagccaatggagagttttatcaggccatggagagttttaattggtggagacactcttatactcaggatagttaactgtcctctactgtgctcagtaaaccaagaacaagaaaatttgtgtgtgtgtgtgtgcgtgtgtgtgcctgtgtgtgtgtgtgtgtgtgtgtgtgtgtgtgtgtgtgtgtgtgtagaagagaagagtagagatttgggggcaggttttattgaaaacgacctgtggatttatcccacatgtccagaacccatactaaatatgaatcagcatttgccgaataaatgatgagtaaatgggtgaattatagtaaataaagataggaagggaagtggcagatcacaaagtttaagagcaccataaaccttcctctctgcactcagttgccctgaagcaaggcatattggaaaatctccaagctcccc

SEQ ID NO: 462078 - DNA, 608 bp, Homo sapiens
ttcacaactttatggggtacagattaatgtcatttccattttataggtgaagaaaccaaggcaacatatgactaagtgacacatttgagagagcccagggagtggaggtcagaattcagagttgggcacagaggatccagagccaccttcttggttatcrcatggtactgtcaaaagttgggttctctgaagaagagatggagataaagtttgtgatgggatgtgtttactagagattgacaacatctgtgaggaagcaagatcaggcagagggagtgctgcagtagatattattaatgagagttgatctgacttaagcttagatgactggagctttacacccttgctttgcttagtcgtcatacatgggctgctctaaggaagggtgtgaccttgggcaaagccgctccttctagctaactcacagtcccagatgttgctggcagctggaggctgtgtgttcatcacactcttcatagctggtcaagtccttccttgaaaggaatatgaacagctcatacccttgtcaaccatatatcatagtctgtcagaggaaatataataaccatttgttaaattaacagaatgtttattagttataataacta

SEQ ID NO: 462079 - DNA, 608 bp, Homo sapiens
ttcacaactttatggggtacagattaatgtcatttccattttataggtgaagaaaccaaggcaacatatgactaagtgacacatttgagagagcccagggagtggaggtcagaattcagagttgggcacagaggatccagagccaccttcttggttatcacayggtactgtcaaaagttgggttctctgaagaagagatggagataaagtttgtgatgggatgtgtttactagagattgacaacatctgtgaggaagcaagatcaggcagagggagtgctgcagtagatattattaatgagagttgatctgacttaagcttagatgactggagctttacacccttgctttgcttagtcgtcatacatgggctgctctaaggaagggtgtgaccttgggcaaagccgctccttctagctaactcacagtcccagatgttgctggcagctggaggctgtgtgttcatcacactcttcatagctggtcaagtccttccttgaaaggaatatgaacagctcatacccttgtcaaccatatatcatagtctgtcagaggaaatataataaccatttgttaaattaacagaatgtttattagttataataacta

SEQ ID NO: 462080 - DNA, 593 bp, Homo sapiens
attctctccgagtccatctgacactggagtccacactcctaacctctaggtatgtatttcctcaaattgattgtcgtgagcttctctggagcagagaccatcaatttcgtgatgaatagcaatactaatgcctgacacatagtatggactgagtatatttttgtcgaatgaatgattagttggtcttccattaaaaataatttaataatttagcaacttttattgaaaacaatcgagcattttatcaggcatataaagccattaaagttataaatctttatttaacaagtctagtcaaagctaagaatcattggtgaaaagaacaggaagaacacatgcaagcacacacacacagagacacaaagtgtgcagaggtggctagctggcacattgagcaaatcaatcraggtaaatgagaggctgcatgctcttatagaaagagcattggcctagaattagagaagttttaattgcaggcatttcactcaagtgagtttgtcattgacaagtcacttcactattcttatttttgaaatgaggaattaagtgtgggagatgatcctcaagtttcctttattactgacatgctgtaa

SEQ ID NO: 462081 - DNA, 548 bp, Homo sapiens
gtctgggataggaccaatattctgcatttttaacattcttttagatgacgataatgatgttggtccttgaaccacacttggagtgacaaggtcatggctcacaccatagcaataattagattacttgtctgttttgactgttaaaaccaagaatttttttttattcctattgcataatataartctggcacagaataagatactcagtaaatttctggtgaatgaatacataactattatctcaataattcactataataacctaaattactagtattactactagcctttttctttttctaaggagaaaaaatgactcagagaagttaaataactagttagaaagtgatggaatgagaactccaacgcagctctactaactcaaagtcttgtgtgctattcactctgtcacttgccttccaaaatgcaaacacaatgcaggttagatctgaggagtggagaggcttagaaaactaataaaatacaactattcctaatgtcttgtttaagagattggaactttaaaattttagcctcagagaatacag

SEQ ID NO: 462082 - DNA, 595 bp, Homo sapiens
gcaacctcataaggctcctaaattacagtagagaatcgaataacccaagtcacatacttgatacataataaaactgagatttgaatcttggatttatctgcttccaaagcctgaagtctctccatttagttctactggcaaatcattgactatctctgaacctcagtttcttcatttgtaaaatggggataataatatctaaattataggacataatgaggattcactatgataatatccttggcactcaataaggatatggtagaaagatcacaagctttaacacagtaaagactggggtttgaatttaatcttaatacttaataaccataatatcttacatttgttacttagattcctgaatttcaattttcttatctgtaaaatagtgataatattagytaccttaccagttttggtgaagattaaataaaaggatccatacaaagtgcctaattcagtgcttggcacatagcaggactcaatgtaagctgtgattttttgtttgtttgttttattttttttccttctttccccttctgggctgtattctctgatattcttacttttggattgtctgtcagtaaataacacc

SEQ ID NO: 462083 - DNA, 639 bp, Homo sapiens
aaattgccaaactgattataaaatttatatggaaacacaaaagatctagaatatccaaaacaatttctaaaagcaagagtaaggttaaataacttccactatctttttaagatatgattttaagactccctataaatatatattaatcaaaatagtagtattttcacaaagaggcaaatagatcagtggaatgtgtacatgtgtgaacatgattttcaacaacaatgcaaaggctattcaggcaagaacattagtcttttcaacaaatggtgctggaaaaattaaatatgtatctgcaaaaaaaaaaaaaaaaaagaacttcaatccatactttgcactatttaaaagaattagctcaaaatggattatgtacctaaatgtaaaatttttagaagagaacacaggagaaatccttcataatcttgggtcagggaagaagctgttagatccaacaccacaggcaggatctatagaagaacaaagtggactgccggctgtatgagtcgctctgctgttgaagtaattaccaggtggtcacttgggtctggagaaaaagcaaagactaatgaaaattgctctgtaaaatctttacagcyctctgaagtaaactagattcattggggttttctgttatttcac

SEQ ID NO: 462084 - DNA, 634 bp, Homo sapiens
caaaaacaacattgcataatgctctaatgctctaacattcctcgttcctgtaattgatactgtctgaacagctttcatgctcactcaacatcttctgtaggcaaatctctctcagagatcgacattcccgtagcacccagatggagtgtaatgctgagcactttatcccttgtctgagctgaaaacctaggggtaattttcagcgcttatatgctatgttgtctttaatgggatacagactcaagccagggatttcggcatatgctgtcagaagtatgttgcatcgttcctgaagtatcactagcacttatttgagactgytactcatttattcaattataataaaaggttaattggtggtgattcatttggagatggttgcctaagtccatgcagtcataacaggttcccccaagacattaaagaagtgtgactttttttattgaaaagtacatagaaaatgacttccatgtgatgtaaaaattgtttctgagctgtcatagctgaatacaatgaaatactgaatgtcttcttagaaaagcaagtattagtttggaacattaggaattattagagactcatttcgattccagccaataaattaaatcgatgaacacagaagtacagggaaagc

SEQ ID NO: 462085 - DNA, 549 bp, Homo sapiens
ctggatattagccctttgtcagatgggtagattgcaaaaattttctcctattctgtaggttgcctgttcactctgatgatagtttcttttgctgtgcagargctcttcagttttattagatttcatttctcaattttggcttttgttgcaattgcttttggtgttttagtcatgaagtctttgcccatgcctgtgtcctgaatggcgtcacgtaggttttcttcaggtttagaagctgatgaaattacaggaactggtgccaaaagcaaggactgtagcagagtcccactgctggactcaaggaagccttttatctttccctgttgtccacagagtatgggttgtcatgtgaggcaggtcctagaggggtgtacagcagctcccaagttctgaaaatcctcagcctatggaactctcatgagaagtgccaccacactcagaatttcttcctggagactttttgggaataactcaaagaatgtcacatagatataaggaaataatgcatcttactcactttaatgttttcagatgacattcttacaagat

SEQ ID NO: 462086 - DNA, 573 bp, Homo sapiens
tggtatcattaaaagaaagtttaaatatacagaaatagagaataaactgtggttaccaggtatgagggagggaggaggaaatgagatacacgtgggtcaaaagacacaaactagcagatatgtactggggtggggtcacagaagaggaaatrgggagatagatgtgggtcaaaaaacacaaagtagcagatatgtacaataaacaaatctagagatctaggtagaacatgaggactatagttaatacaactgtattgcatttggtgtttttgttaagtaagtagattttagctgtcttctcacaaaaaagtaactatgtgagatgatagatatatcgattttcttcactatagtaaccatttaactatatataattatcacataacatcattttgtaagcctcaaatatacataataaaatttactttaagaaaataaaaaataaaacaggctttaaaatgagctcactttaatgcgcttatcatattggttggaaagaggagggcttctgaaattacacagccatctggagaaaataaattaaaaaatcacaactggctacaaagtataata

SEQ ID NO: 462087 - DNA, 619 bp, Homo sapiens
gaataaactgtggttaccaggtatgagggagggaggaggaaatgagatacacgtgggtcaaaagacacaaactagcagatatgtactggggtggggtcacagaagaggaaatggggagatagatgtgggycaaaaaacacaaagtagcagatatgtacaataaacaaatctagagatctaggtagaacatgaggactatagttaatacaactgtattgcatttggtgtttttgttaagtaagtagattttagctgtcttctcacaaaaaagtaactatgtgagatgatagatatatcgattttcttcactatagtaaccatttaactatatataattatcacataacatcattttgtaagcctcaaatatacataataaaatttactttaagaaaataaaaaataaaacaggctttaaaatgagctcactttaatgcgcttatcatattggttggaaagaggagggcttctgaaattacacagccatctggagaaaataaattaaaaaatcacaactggctacaaagtataataaatgcattgacaaacttaaatggtcaaatgtatctctgaaagcaaataatgctacactatatactaaaacagagaaagagtaaag

SEQ ID NO: 462088 - DNA, 573 bp, Homo sapiens
tggtatcattaaaagaaagtttaaatatacagaaatagagaataaactgtggttaccaggtatgagggagggaggaggaaatgagatacacgtgggtcaaaagacacaaactagcagatatgtactggggtggggtcacagaagaggaaatggggagatagatgtgggtcaaaaaacacaaagtagcagatatgtacaataaacaaatctagagatctaggtasaacatgaggactatagttaatacaactgtattgcatttggtgtttttgttaagtaagtagattttagctgtcttctcacaaaaaagtaactatgtgagatgatagatatatcgattttcttcactatagtaaccatttaactatatataattatcacataacatcattttgtaagcctcaaatatacataataaaatttactttaagaaaataaaaaataaaacaggctttaaaatgagctcactttaatgcgcttatcatattggttggaaagaggagggcttctgaaattacacagccatctggagaaaataaattaaaaaatcacaactggctacaaagtataata

SEQ ID NO: 462089 - DNA, 619 bp, Homo sapiens
gaataaactgtggttaccaggtatgagggagggaggaggaaatgagatacacgtgggtcaaaagacacaaactagcagatatgtactggggtggggtcacagaagaggaaatggggagatagatgtgggtcaaaaaacacaaagtagcagatatgtacaataaacaaatctagagatctaggtagaacatgaggactatagttaatacaactgtattgcatttggtgtttttgttaagtaagtagattttagctgtcttctcacaaaaaagtaactatgtgagatgatagatatatcgattttcttcactatagtaaccatttaactatatataattatcacataacatcattttgtaagcctcaaatatacataataaaatttactttaagaaaataaaaaataaaacaggctttaaaatgagctcactttaatgcgcttatcatattggttggaaagaggagggcttctgaaattacacagccatctggagaaaataaattaaaaaatcacaactggctacaaagtataataaatgcattgacaaacttaaatggtcaaatgtatctctgaaagcaaataatgstacactatatactaaaacagagaaagagtaaag

SEQ ID NO: 462090 - DNA, 684 bp, Homo sapiens
ggaggtatttagcatgcgtgtttaataaaggataaaaattttaaaatgacagtcgtaacaatacgaaagctgtgtcagtcctacccagactaatgtttattttatgttaaaatgtaaagtctctgccaagatttatgtatttatgttttacatgcatttgtgtatttatgctttatatatatatatatatatagccattaaacttatttaatatttagttgtgattgattcaaatgctagtctctaccctacatccttgctcttcaaggtggtgtttgggcatcagccacattggcatcaccaggggagcttgttaaaaatctagaattcaggtgtcactctgaactactgagtcaaggtctgaattttaaaaagacaccttcccctgtagatgtgaattaacatttggttttgaaacattgccgttatctttgggatgtgagagccctgtagaaataatawtttagtatttttcttaaaagtttctctcttctagcttctcttccctgccagatggagattgcatgtaggagtcacacaaacaaaatataacaaagaaacattagacacaatgtctttagtaacctaggaagcaagacctcattagatactgtgaatataccaagctctgatatcagttgaagttggttctttctctttagtgacctctgtgtcattagttat

SEQ ID NO: 462091 - DNA, 684 bp, Homo sapiens
ggaggtatttagcatgcgtgtttaataaaggataaaaattttaaaatgacagtcgtaacaatacgaaagctgtgtcagtcctacccagactaatgtttattttatgttaaaatgtaaagtctctgccaagatttatgtatttatgttttacatgcatttgtgtatttatgctttatatatatatatatatatagccattaaacttatttaatatttagttgtgattgattcaaatgctagtctctaccctacatccttgctcttcaaggtggtgtttgggcatcagccacattggcatcaccaggggagcttgttaaaaatctagaattcaggtgtcactctgaactactgagtcaaggtctgaattttaaaaagacaccttcccctgtagatgtgaattaacatttggttttgaaacattgccgttatctttgggatgtgagagccctgtagaaataataatttagtatttttcttaaaagtttctctcttctagcttctcttccctgccagatggagattgcatgtaggagtcacacaaacaaaatataacaaagaaacattagacacaatgtctttrgtaacctaggaagcaagacctcattagatactgtgaatataccaagctctgatatcagttgaagttggttctttctctttagtgacctctgtgtcattagttat

SEQ ID NO: 462092 - DNA, 605 bp, Homo sapiens
atattggtttctacaaagctaaatttatgttataaaaattattctactttacacatctaaagtaatgatcactgtctgtcaactctctggagcactagtttttctctgactttgagacataggataggtgcttttctgattttaattccttctattttaaatatagttataggttctatatcatatctgagaaaactgaggcttagagggtaaggaacttcctcaacgttcaagttagttgaggagtagaacctataatcagaactgacatcaggccaggtgtggtggttcacgtcyatcatcccagcgtgttgggaggccaaggtggatggatcatttgaagccaggagtttgagaccagcctggccaacatggtgaaaccccgtctctgctaaaaatactaaaattaaccaggcatgttggagcatgcctgtagtctcagctactcaggaggctgaggcaggagaattgcttgaacctgggagacagaggttacagtgaacctagattgtgctacagcattctagcctgggcaacacagcaagactctgtctcaaaaaaaaaaaaagaactgacttcaaaataatgtcatagatacagagaag

SEQ ID NO: 462093 - DNA, 614 bp, Homo sapiens
ttattttagagattttagtgtaaagacattttatagcatctgctactcttcactagaattttggattaagtgactgtagcgtactgttacctgttactatcacatcatgacttgtgggtttgtttcatttgttgctcttctttgttttctttttttttttcatgttaataaaatccaacatcaattataatttttctattttttctttttctttctcaatcttttaaaaaactaactgcatgcttttatatgattcactttcattccaaaacacatccagatataaaatttcaggwaaattgtaatatatgtggatttaaaaatggttatgcagctcagttgaatatgagttaaacattgtttacatagcttcctgtattttctgagaaatcatttcccatggttactgtaggcaacaccaagatagacactcgctttgacagcttgaagaccgtattccgtgttctggagtcagggacgatgccctgtgtggagctggctctccagaggtgcaggggacacactgagtctctaggtccgcacgtcccagtgtggcagccactgggcaagtggcgaccatgcactgactgtgaggttagtgaggccgaggcaat

SEQ ID NO: 462094 - DNA, 614 bp, Homo sapiens
ttattttagagattttagtgtaaagacattttatagcatctgctactcttcactagaattttggattaagtgactgtagcgtactgttacctgttactatcacatcatgacttgtgggtttgtttcatttgttgctcttctttgttttctttttttttttcatgttaataaaatccaacatcaattataatttttctattttttctttttctttctcaatcttttaaaaaactaactgcatgcttttatatgattcactttcattccaaaacacatccagatataaaatttcaggaaaattgtaatatatgtggatttaaaaatggttatgcagctcagttgaatatgagttaaacattgtttacatagcttcctgtattttctgagaaatcatttcccatggttactgtaggcaacaccaagatagacactcgctttgacagcttgaagaccgtattccgtgttctggagtcagggacgatgccctgtgtggagctggctctccagaggtgcaggggacacactgagtctctaggtccgcacgtcccagtgtggcagccactgggcaagtggygaccatgcactgactgtgaggttagtgaggccgaggcaat

SEQ ID NO: 462095 - DNA, 614 bp, Homo sapiens
ttattttagagattttagtgtaaagacattttatagcatctgctactcttcactagaattttggattaagtgactgtagcgtactgttacctgttactatcacatcatgacttgtgggtttgtttcatttgttgctcttctttgttttctttttttttttcatgttaataaaatccaacatcaattataatttttctattttttctttttctttctcaatcttttaaaaaactaactgcatgcttttatatgattcactttcattccaaaacacatccagatataaaatttcaggaaaattgtaatatatgtggatttaaaaatggttatgcagctcagttgaatatgagttaaacattgtttacatagcttcctgtattttctgagaaatcatttcccatggttactgtaggcaacaccaagatagacactcgctttgacagcttgaagaccgtattccgtgttctggagtcagggacgatgccctgtgtggagctggctctccagaggtgcaggggacacactgagtctctaggtccgcacgtcccagtgtggcagccactgggcaagtggcgaccatgcactgrctgtgaggttagtgaggccgaggcaat

SEQ ID NO: 462096 - DNA, 554 bp, Homo sapiens
tctttacccaatgagtggtaatatctgtaaattcatattagtagacttgcttggtcaacaggtgagtgcattttaatttttgatgtgatgtcaaatctttactaaaatattatgtaaatacaaatcattgtcctttagaaaataaaaaagaatcaccatatgaatttctttcctaatgagaacactctgatttaaactaatgaattcatatattcataaattaacctcataaattttactgacaagctcttaaagatagctgtcaatgtaaaaagatttatattatacctatgccatgattaaatacagctaaattcaggagtctcatcaaattgattgatgtagagtgttacttattttatattagaaatcaracacattattatacagattacattaatagagaaaaaattcatgtgaaaatattttactcagtaattaagaataaggaaataatctaggtcctctaatcaacaatgcgttgagtcactggtcgttttacctgtgagaatataggataagaaggaaaaacaatagaaaagaagggatcagca

SEQ ID NO: 462097 - DNA, 544 bp, Homo sapiens
gtaaaattactattttagttataaaggaatagcttgttgaccagcgttcccactgagaacatctagaaacgttagatgcaattttaaaagatgtgtaaaactctcagtgctgactggtcagtgctagaagggctgttaccaagagcagggaagcccrtttttgtgaggcaagtttgctgcatcctgttttccccatagtgtgatttgctgattgctgatgcagggtaagaaaccaagaactcccagaactcaggttgagagtggctaccaagagtcagaacgagcatctgaacttactgcaacctcttggagtttgggagcaaaaacctggaattgaattttgctatgatactcgggaatgagaaattaaaatcccagagaggagaaaagcacaaggaaataaagtcaatacatggtgccggttttgccttcagttatttgctgattaagctgctcagggcagaagtctaagaaaccaggcacagaacagctggagagtaaaacagggattttttttttttttatgtctcccagtatttgcatg

SEQ ID NO: 462098 - DNA, 479 bp, Homo sapiens
tatatatatatatatatatatatatatatatgtatgtatgtatgtatacacacacacactctaaatgtcttttttaaaggtatttttttctgtcctgtgatgctaaaattaactagaagaatgcattaagtagccaagtggagagtggttgagtagaaaatgcacatgatttaaagttaattagatatgggttcaagttcagtctttgccatttattggctacttagcactggatagattttttttttttttaacctsagtttccgtgtctgtaaacaggggaaataatattaaacctggttgctattgtgaaaatgggaagtaatagacgtatgtttctgagtatgtagtagtgtttcctgtgtcaacagaagctatcacacaactgtgtaaaccttatgtcaacagaagctatcacacaactgtgtaaacctatcattaaaaattcaccttggcgttctgtattttattctgtatta

SEQ ID NO: 462099 - DNA, 479 bp, Homo sapiens
tatatatatatatatatatatatatatatatgtatgtatgtatgtatacacacacacactctaaatgtcttttttaaaggtatttttttctgtcctgtgatgctaaaattaactagaagaatgcattaagtagccaagtggagagtggttgagtagaaaatgcacatgatttaaagttaattagatatgggttcaagttcagtctttgccatttattggctacttagcactggatagattttttttttttttaacctgagtttccgtgtctgtaaacaggggaaataatattaaacctggttgctattgtgaaaatgggaagtaatagacgtatgtttctgagtatgtagtagtgtttcctgtgtcaacagaagctatcacacaactgtgtaaaccttrtgtcaacagaagctatcacacaactgtgtaaacctatcattaaaaattcaccttggcgttctgtattttattctgtatta

SEQ ID NO: 462100 - DNA, 479 bp, Homo sapiens
tatatatatatatatatatatatatatatatgtatgtatgtatgtatacacacacacactctaaatgtcttttttaaaggtatttttttctgtcctgtgatgctaaaattaactagaagaatgcattaagtagccaagtggagagtggttgagtagaaaatgcacatgatttaaagttaattagatatgggttcaagttcagtctttgccatttattggctacttagcactggatagattttttttttttttaacctgagtttccgtgtctgtaaacaggggaaataatattaaacctggttgctattgtgaaaatgggaagtaatagacgtatgtttctgagtatgtagtagtgtttcctgtgtcaacagaagctatcacacaactgtgtaaaccttatgtcaacagaagctatcacacaactgtgtaaacctatcrttaaaaattcaccttggcgttctgtattttattctgtatta

SEQ ID NO: 462101 - DNA, 549 bp, Homo sapiens
tactggttataactggataaagtgttttcatatgcaaaaattatatctaaataaagctatggctagcatttctcaattatattgagtctctcctgaaaactagaatcacatcagtttccttcctttcttcctttcttctgtgtattaggcctagggtaatgttcagcatgtagattatcagcaaaatgttgattatataaataaatataagtaagaatgtacaaaaagcttaatatcagtattatgtaattaagttttgcaaaagtgtataagtattaatagcaaagtctaaaagcaagaatttttgaggayggtttactgatttctgatttcgaaggtatcttttttttaagatgtgttgaaaacttaggagatcattctaatacttggtacaatatttatgggctgtctgtcttctatgaagctcacagcgtcccctaggtctgatctcattaaatttcatgctgtttctctgaggcaggttatgaaccataactaaattataaatgaaaagctattagatttataatagagtatttcatggatgga

SEQ ID NO: 462102 - DNA, 601 bp, Homo sapiens
ctgagatctctacacagttggatgagttaattaatactttgaagtttcccattgaatcccttcttttacccctcttgtctccaccttcttctaaaacctcagttctaaaacctcaggaaacatatttttacttattgaatagatacaaacaactcaatatccccttttcatttcatgcttggaaccctgaacttggacagtctctgctgtaaatgttaaagtacgcttcctggtcttaagccatttggaaaacaaaattgcatttttaaaagttagtatggaatgtttatcttcatacaaatgtactcttattactttgttctctatctccaagacatactttttttttttttttttctgaatgtactttacaattgctactgcggttttgttgttgtggttgtgttgttgttattgcagaaacatttgtttgtggcccgtggcaatctcctacayaatttactgcccttagatttaaaaactccttgcagttagccaatctcaatcttcccttacacttatatgtgtgatcctttcactatttgtagtttgccttcccttcttaatttccgtatttcagctcccacccaactaaacactt

SEQ ID NO: 462103 - DNA, 446 bp, Homo sapiens
tgatgctacaggtccacttctaggagctgagagcggagcaaacaatgttggaaagtagatctagtggggacaatggacgcctgagatatcttcatttctgaagtaagagcactgaagttcagagagattcataccctgagtggtagatatacctgagaatgtttatataatcatttcatgctattatttcatttagtctcctacacctactcctgacctacaaagaaaatattagatctattatgtacatctaatattactcttttaagataatattaaactatcatcactattcattactgaagatttaagaaaatacttttaaccarttctttgtacacccataacagaatatattcttatgttgatgagaaatccatatatatgcataaacactaatttttttcaataatctaaaactctggccttaaatttttccaataata

SEQ ID NO: 462104 - DNA, 483 bp, Homo sapiens
tttttaaaaaaaaaaaattttgtcacatagacagaaggcttgcccaattgctgaaggatagtggcaaccggaaagcgtttgtggaaaaaaaaaatcaacaatatatgataattattgaaattctggcctggaggttggccataatagaaagcaaatatggttaacctagttaagttaatggaaccttaattagatagcagagaaactccagtgtctgtcacaagtgccattctgactgtggtgaggaaactgtcagggggtgacacagagctctgtgtgacttgacctctccctcgggttgccgtggagtggatcacaggcttatctgaactggatcaagagaagaaataagaattaggaaacacgatgaaataacagaaggaaattttgtgtgtgtatacaagtaaaggacaagagagatcatgataytacaattaaaattttagtggcttggcttgaatttactaaaattaaattttgata

SEQ ID NO: 462105 - DNA, 451 bp, Homo sapiens
ttaaaagtgcctcttaacagaagctcttgagtttcataaggaggattttggactctatagataaatatttctgagtaaaggtgtagtgtgtcacagtacatcacaggatataattgtgcgttattgatatattagatacataatatacataatttatgaataatatatacataatttatgaataatgtatgtttgcacatataagtggagaattgtacagaagttaatctggttctagagaagaggacagaatagagaggcaagagattaatgrgaagattgaccaatatgcgaaagcaacatctctatggagagactttgaagatctagttcacagaatgactttttttgcatgcaaaaaagaagaacaggatgggacagactttgaactgcatattgacaggagtttgtgactgatggaatgaagtaaatgtgagagacaaagcaatct

SEQ ID NO: 462106 - DNA, 582 bp, Homo sapiens
gatgttctttctctctgttatgaccctattgctctgtctcagaagctcagttataatgctttatgcagttccggataagattgtcatggacttacggggagtagtccctaaaagtcagaatcctcgtcataccatcacagtcagcaactgcaccaaaccagttcccacagaacctgcctcattaaaggaagaagactctcatcccacttcctccccacctacctagtggctaccacacctatgattatcctagcgaactgtgtcctcagatatttttcctggggagaaaatcakctcagcttggcttgagcaaggagaaaaaataataggtggattttgtggactagatgaggaaaaggcagttcttgagaggagtatttagagctttaaatgagcaccaaacaaagagttgtgtgaaactggtgaatagctgccccatgtagttgaaagaacacagtctttgaagccagtgtgatgtagatccaactctgggtttcaatggacttactcaacaaatacttatttcacccctactctgaaccaggccctgcgctttctaatatggcagccaatagctacttg

SEQ ID NO: 462107 - DNA, 623 bp, Homo sapiens
tatggtttaactgtggtatgagatattaaaatccacacacgaaaaacaacaatgacaacaaaacaaaacacatgaaaatacgattatcttgacaggcttctgcagggttttctgctttgaagatctttaaaggtctttttaacctttaaccgaagactcaaatgctgaagaggccttaaytgtgtgtttttccagcactggtgataaatccgctacataccttctaaaggtcttttttggctgtaggacaaagcaatttctatttcattagttttctattcaggtctattacccttggacacaaaaaggaaacatttgtcccctaaggaactgatgaatgaattttatgtgctgttatgaaaagagtcactggaatttatctccaccttcaaacacagttgaacattcttcaagaatgaaatatcttagtacatttcatttgcaaagtcttgttactgtaagacatatgatagttatatagtaccaacataatcaatttttcaatgaaaagaaattactcaaccaaatatgtagtatcacaacaagtgaggagggggttatatgttttgttaatttagatgaattaagtcatttaagttgagatagtagacacattaaataat

SEQ ID NO: 462108 - DNA, 579 bp, Homo sapiens
gctattgttgaaagaatttcaaccaccaatttgacataaccaatttaacaccaaccaactactttataccttttctctttatttattttttttttccttcaacttctaagttccagggtacatgtgcaggatgtgcaagtttgttacataggtaaacgtgtgccatggtggtttgcagcacagatcaacccatcacctaggtattaagctcagcatccattagctattcttcctgatgctctcccttgtttttcattttagttttctatttctaagtaaagtgtgtttatcaataactagctcatttttccatttatgtttaccagaaatgcataatcagcagagctttggggacaacataaaataagtgtcatactaacaccaaataaccayaacgataacaacagcaatggtattctaaagtaaaaaataaagaaaaattcaaaaagtgttgtcatactttagagtatttgtttcagttgtgttgaaagagaactcatttgcattataaaatgttaaaaatgaagtagtgtagagtccataaatatcacttccaagggctcagtgtcacttagatct

SEQ ID NO: 462109 - DNA, 623 bp, Homo sapiens
tatggtttaactgtggtatgagatattaaaatccacacacgaaaaacaacaatgacaacaaaacaaaacacatgaaaatacgattatcttgacaggcttctgcagggttttctgctttgaagatctttaaaggtctttttaacctttaaccgaagactcaaatgctgaagaggccttaactgtgtgtttttccagcactggtgataaatccgctacataccttctaaaggtcttttttggctgtaggacaaagcaatttctatttcattagttttctattcaggtctattacccttggacacaaaaaggaaacatttgtcccctaaggaactgatgaatgaattttatgtgctgttatgaaaagagtcactggaatttatctccaccttcaaacacagttgaacattcttcaagaatgaaatatcttagtacatttcatttgcaaagtcttrttactgtaagacatatgatagttatatagtaccaacataatcaatttttcaatgaaaagaaattactcaaccaaatatgtagtatcacaacaagtgaggagggggttatatgttttgttaatttagatgaattaagtcatttaagttgagatagtagacacattaaataat

SEQ ID NO: 462110 - DNA, 582 bp, Homo sapiens
cctccttccctaaagtgtgttccctaccctaatctaggcaaaaagccagaagacaaagaggtggtggatgtttaggcatgaataatttagggtagtgagaaattttgaggaaagaggggatctatgggagccatttaaagatgctatacaatttgcccatcttacttgtttttaaaattgtagtaaatctgaaatcaataggatcttaagtaaacaaactccaaaaggtcagagattacatctttcttatttactgttatatctacagtactggcacaatccctagtacataacaggtactcaataaatattggccaagtgaatgaattatttgatgaattactcaatgaagacttacattgtagatttacattaaattcatccaacctagatgagtattttgattggttggccattaargaatcttaaaattttgactggttatagcctcaagattgaaaaatacttttattctcatttttacaaaaagaatctcttgaacaaggatgaggatgataaattgaatgaaacatattgctcatctgctatacaaaaaatgtactattcaacagttattactat

SEQ ID NO: 462111 - DNA, 582 bp, Homo sapiens
cctccttccctaaagtgtgttccctaccctaatctaggcaaaaagccagaagacaaagaggtggtggatgtttaggcatgaataatttagggtagtgagaaattttgaggaaagaggggatctatgggagccatttaaagatgctatacaatttgcccatcttacttgtttttaaaattgtagtaaatctgaaatcaataggatcttaagtaaacaaactccaaaaggtcagagattacatctttcttatttactgttatatctacagtactggcacaatccctagtacataacaggtactcaataaatattggccaagtgaatgaattatttgatgaattactcaatgaagacttacattgtagatttacattaaattcatccaacctagatgagtattttgattggttggccattaaggaatcttaaaattttgactggttatagcctcaagattgaaaaatacttttattctcatttttacaaaaagaatctcttgaacaargatgaggatgataaattgaatgaaacatattgctcatctgctatacaaaaaatgtactattcaacagttattactat

SEQ ID NO: 462112 - DNA, 632 bp, Homo sapiens
tggttggccattaaggaatcttaaaattttgactggttatagcctcaagattgaaaaatacttttattctcatttttacaaaaagaatctcttgaacaaggatgaggatgataaattgaatgaaacatattgctcatctgctatacaaaaaatgtactattcaacagttattactatcatatcatggcacctgtagtatgtatgtttcctttttctaacacattggaatggtcaggaattgacttgacattgaatgatactgacacgtgtgtttctccagyatctctggcaaatggtcataacacagactttgcagttcatggagaactggaaggctggcttttttagacattggagatgagttatagaacactatgcagttaccagtttcagtgctgtttattcctttgtataaatccacatttctatctggtatcatttcttctgcctgagggacttcatttgacatttgttgttgtgtaagtctgctggtgataaattcatcagcccttatatgttttaaagagtctatgtttaatgttcatgtttgaaagatactttcactggttatagaattttaggttgacaagttttggggggtgaaggttggagtgggggtacattagcgatgt

SEQ ID NO: 462113 - DNA, 632 bp, Homo sapiens
tggttggccattaaggaatcttaaaattttgactggttatagcctcaagattgaaaaatacttttattctcatttttacaaaaagaatctcttgaacaaggatgaggatgataaattgaatgaaacatattgctcatctgctatacaaaaaatgtactattcaacagttattactatcatatcatggcacctgtagtatgtatgtttcctttttctaacacattggaatggtcaggaattgacttgacattgaatgatactgacacgtgtgtttctccagcatctctggcaaatggtcataacacagactttgcagttcatggagaactggaaggctggcttttttagacattggagatgagttatagaacactatgcagttaccagtttcagtgctgtttattcctttgtataaatccacatttctatctggtatcatttcttctgcctgagggacttcatttgacatttgttgttgtgtaagtctgctggtgataaattcatcagcccttatatgttttaaagagtctatgtttaatgttcatgwttgaaagatactttcactggttatagaattttaggttgacaagttttggggggtgaaggttggagtgggggtacattagcgatgt

SEQ ID NO: 462114 - DNA, 585 bp, Homo sapiens
  misc_feature (1)...(585): n = A,T,C or G
aatcaatggtgagtgctgacatttctacatcttatctcaggtctaaagcaaggttcagcctatttaattttggcttcagttggccctttgcaatctggagatctttttcatttgcccccttgtctacaatgttatagccaataacctgattaggtaaattcttcagctcagattgttgaatgggtggtcatttcttattttgatgagttatttcaagggtttttcataatttggatatgaaaatattttattgtgccttattgattctagctttcatattctaatgcttttggctcattttcntgccatccrctcctgtttgctgtgtttaagcctcactgatgggtactaactggctggaaggtcaatgtaaatcagatactaggctgaattaaagtcaatttttaaagaaatacattttaaatgcaagcggggactcaaactaaattttcacaaagttctgacagaaggcttccaagtagaagtcccctcaaaaaaaagtattgncgngataattgacgtaaattttttgcttccctgtttgcatacaaatagttaatgggttaaagtccttaaaancgattt

SEQ ID NO: 462115 - DNA, 298 bp, Homo sapiens
tgacaaacattggtctaagctgacagggcagttcttggagtttccaagcagaatgtcacaggatctgagtcccacaagctgaggcttctttgarcaaatgttcccgggcaggctaagcctctaggcatctacacagggcatgagaggcagggacccctgcctgttggccccagcacaaccttacctcctgcaagtcctgttggatttgaaggctgggagtgaagttcagcagggccaggcccacagctcacatggagccagtactggtctggagtcaagggcaaggaagagaccaaag

SEQ ID NO: 462116 - DNA, 535 bp, Homo sapiens
tctcatccagcccatagtagcacctactctactcaggcaccctctattctcccacctgactccttattcccagccttcaccyctgtcctttatcatccttaccccaaaaccagtttgtttatttccttgtttcttgtgttttgatcctctctcacttacccacgtccacactagagtataaactccatgagggcacggagctgtaccatgctcccacacttacaactggacctggtatataataggacctctgtaactattgttaaatggctaaatggtggtcttgagttaatgagtgtctggatttcaaatgttggagcttaccttgctttgccagggcagagtttcgaacattgctttaggggtgaaatatacaagaaattcccttactccgatacaagcaaaccccaaaccacatccagggacttactatctggctttctggtggcctaaaagaatttctggggtttctgtaggggcctctcagcatcagaagtctcacacttggcaggcagtgtgcttgcagggtgcaaat

SEQ ID NO: 462117 - DNA, 571 bp, Homo sapiens
ggtcccacaggtcgtcgcacacggtgccccaggcaccctggtggagaatctccacgcgccccaagcaccggcctgagccgcccatcagcctcagctccggccagccctctgcagacagagacacagcatgtgatttcccaaaagaccccgcctgggtccaccagtgccagctcagagagggttagggagggacattccccagtcttgagccttggggctttttcctcagatttctcacgtgttcctgagttgcaggttgtggggtcttcagacaatttaatttcattttaagtacttattgattgtcttttatgttaggcactgatgatacagctctaaaccagggatgtgatttctgtcctcagggagcctggagtctatttattagtcaaatgcaggcactgccacagtgcatcattgcatactgtgataaatgggccaaagaggggaaaaacaggatgctatgaaggggacaatagagaggaaagggctggaggacacctctttraaaactgagaaggagctagtcaggggaagagctgaaaaagtgccctgagccagaggaatagtg

SEQ ID NO: 462118 - DNA, 590 bp, Homo sapiens
aggacaaaatcaagaacagctgatatttaactcccgtcaacaaaaggtgtgactgacctggactgttagcaagtgattcttcagcatctgtttgtagagagaataagtatatcagtattttttggaaatcctgactttaataactgaagatgaaggttttagttccatygttatacgcatttattaatctgatgtgggaaaaattagtccttttaaaaaacatagtactgggagaagcagattcatctgtagataatgaaagtaagtttctctctggttgttggtttgtaccaagttatgtaaaaatggccggatgcaaaggtacatttgggatgatctgacttaaaccatcaattttgcagcaggtgtttcacttttggtgtctctggggggacctcagatttagacaatcatcctctggaagattgagacgtgggaataacatatacccaggaggctgtcactaggatacatgtcacccatgataagatgtcacaaggtaaatagacaaatgaatgcaccaacacataagacaatgtctttaagtatgcacttcaaattacaggtcacggttagcaggtactgacatg

SEQ ID NO: 462119 - DNA, 590 bp, Homo sapiens
aggacaaaatcaagaacagctgatatttaactcccgtcaacaaaaggtgtgactgacctggactgttagcaagtgattcttcagcatctgtttgtagagagaataagtatatcagtattttttggaaatcctgactttaataactgaagatgaaggttttagttccatcgttatacgcatttattaatctgatgtgggaaaaattagtccttttaaaaaacatagtactgggagaagcagattcatctgtagataatgaaagtaagtttctctctggttgttggtttgtaccaagttatgtaaaaatggccggatgcaaaggtacatttgggatgatctgacttaaaccatcaattttgcagcaggtgtttcacttttggtgtctctggggggacctcagatttagacaatcatcctctggaagattgagacgtgggaataacatatacccaggaggctgtcactaggatacatgtcacccatgataagatgtcacaaggtaaatagacaaatgaatgcaccaacacataagacaatgtytttaagtatgcacttcaaattacaggtcacggttagcaggtactgacatg

SEQ ID NO: 462120 - DNA, 583 bp, Homo sapiens
ctgtactcccaagcttactgcagtattactcacaatagccaagatatgggaacaatctatgtgttcatcaatggatgaatggataaaggaaatgtggtgtatatgcctgtggaatactattcagcctcaaaaaagaaggatgttctgtcatttgcaacatgggtgaatctagaggacattatgttaagtgaaatatgccaggcatggaaagacaaacactgcatgatctcacttttaggcagaatctagaaagctaaactcataaaaatagagggtagaatgatggttaayagagcctgggggtaagggtggaggtgcatggagagacagaatttggtcaaagggtacaaagtttcagttagataggaggaataagtttaacagatacattgcatgtcatggtgactgtagttagcaatggtaatgtattgtatgttccaaaattgctagaaaagtagaatttaactgttcttttcacaaagaaatggtaagtatgtgaggcaatgggtatgttaattagactgacttaatcattctgcaatgtatacatgtgtcacaacacacatcctaccctatacatata

SEQ ID NO: 462121 - DNA, 522 bp, Homo sapiens
atacagttgcttcaaggggatgcccatcccctcccaggattcagcaggaataatggtgagggggcattctgaggcccatgagctcagatccctgaggtctccttttagggcagaacatgacattgctactgtggatgaactaatgtgcaccctgtggcaatcagcaaaagcgaagctcataggccgttggccccagggggctggctgtctagaggccatccattggccagcacctctctctctgttgcctcctccctacatatgccactgtcatgacttggaatctgctctgaattggcatgaggaagccttgcacggcatgggaactgtttttgactgtggtagtagttacacaactggatacaattaccacaattcaccaaactggaccttaaaatgggcamattttatggtatataatcaaactttaataaaaaatgagatggatcgatgtatgaatgcagaaatgaaagatgaatttatagactcatcatggaatctaggtaggagttccttgttaaa

SEQ ID NO: 462122 - DNA, 485 bp, Homo sapiens
tgtaagatgaggtaggaggtgatctttggctcttggttaagatcagtagaaaatatccacaagtgtttcatctagttaacaaagggaagttggtcctacctgttggagaagtgattgaagacttggcacctaccagtaaagagagaacatctatcatctatatactctcatgtgtgagctatctgcarcactgccaattctgtagaaagatcctggggaataatattttacatctaagtgaggactgagagccattccttcacttgtgcagatgatgctggcattctccaggtgcccacaattgtgcctggtccagctcctgttcacacactgccccaggtggctctcactgcccacatgctgaaagtcatctagcaggatcttcctggagcctgaccaaaagtgggcccttatgcgggctgccatagcctggccatattgcagctggtggcacacaatggtggcctcagccagatctcagagat

SEQ ID NO: 462123 - DNA, 485 bp, Homo sapiens
tgtaagatgaggtaggaggtgatctttggctcttggttaagatcagtagaaaatatccacaagtgtttcatctagttaacaaagggaagttggtcctacctgttggagaagtgattgaagacttggcacctaccagtaaagagagaacatctatcatctatatactctcatgtgtgagctatctgcagcactgccaattctgtagaaagatcctggggaataatattttacatctaagtgaggactgagagccattccttcacttgtgcagatgatgctggcattctccaggtgcccacaattgtgcctggtccagctcctgttcacrcactgccccaggtggctctcactgcccacatgctgaaagtcatctagcaggatcttcctggagcctgaccaaaagtgggcccttatgcgggctgccatagcctggccatattgcagctggtggcacacaatggtggcctcagccagatctcagagat

SEQ ID NO: 462124 - DNA, 613 bp, Homo sapiens
tgctgggcacatggttccctttctccataaaacaaatgccaactgacctgttggaggagttgggggaagcacagtgggctctgtggtagttaatgacagtgcttgacctgtgaatgcaaaacaaagagagcccttgttcactgctagacacctcctggctatacatgggagtgtgaacttctgactataagcccaaagagaacttctkgttccaaaggtgtcccatcagggttctggtggcccctgtatctccttcctgccacctcattcaacactagatatcagatgccacagtgaaatgaaaagtgctaatactttgaggacacaccattggtttgtacactgtagcttgtgaagtgcccacaaaaccatttgtggatggtttcctctttttctttttggagcaatccatggacatggcagtcaatgaaatggccgaatgttttggtttccatctagatctttggtggctgtatctggactctgagtagctaagccacgtgaggctttcacggagcattaagacacctcttttcatcttattaactcctaaatagcagtcaggtattgtgttgtttctttttaaaaaggatctcaaacaattagggcaaat

SEQ ID NO: 462125 - DNA, 603 bp, Homo sapiens
attttccacagatggcggggaggatggtggatggtttcaagatcaaactgttctacctcagatcatcaggcattagtcagattctcataaggtacactcaacctagatccctcacacgtgcagttcacaacagggttgtgctccygtgagaatctaatgctgccactgatctggcaggaggcagagctcaggtggtaatgctcacttgctcatcattcacctcttgctgtgtggcccagttcctaacaggctatagagccctactggtctgtgacctgggggttgaggatccctgccttagactaccagtcagtgaatgtcttcatggattcaacttggcctaatgggttgaacaaatttttcccttggcttatgcattgagctgagttgcccagaattcactgatcatcatcaggggatcagagatggcctttaagagtaaggttaatataaacatattttaaaactcaaaagatgactaaaaatgaaagaatttgaccaggacataaaaagttgtttaatcaattcactggaaaaccaaacaaaaaaaattatagcaagccagatggaacccaaaataacacttaaattaccttttgaggt

SEQ ID NO: 462126 - DNA, 584 bp, Homo sapiens
taattggtcaaaacctaccaaatggcaaacaaattttgtttcatagttaatttgttttcttctctgtgtccctagaacacggaaatcatggtcttcattgatttaattaacaaatattgactgcccactcctctgtgccagggactgtgccagggctggagtaaaacagccaacaaaactacataggttctttctgtcctcaaagacaggactgtgtcatgggaaattcagatgaggtcaagtgattatacaaataaatgtaaaattgcaattgtagcaagtgctatgaaggagagaggcacgatggtaccagagcccatggcaggtgatcgracctagccaggaaagtcctctctctatcttaccatcctccaaccaccacctcatgccaggcagagggtctggcctggatgaggcaccctgctcaaagacgatgataacttgataccacaccgcccccaagcctgcctagtcttggccccagtggtggacagaggtgatcctggtgtcccatttgcatacatttgtagtgcagtgggcagagggcattaccaggtgaaggagttacttcttctgaagtggaa

SEQ ID NO: 462127 - DNA, 607 bp, Homo sapiens
taaaaacaccaattcaggagaacactttcccgtgtacaagtcacacaactgtcatccaagacagtacaaacattcttgcccctactggttccacagtactcctctcctaagtacacttccatatttcttgctgaacttaaaatgccaatagaagcgatttcttcacctccatcagggccacacctcaggtaaaggaagcaggggttttcatcttggttgttcaatcttctcttctaaatcaccagattctggctgagaagaaaacaggtgaaaacatcacacagtatagtttctgaacatggctcaaaacccacttgttaggccatgaggtttattctaacaaatgctcaacacagaattcataaggaaatggaggcatcacacatcaggkcttccccctctattttttcctcaatcatcaacgttctactcagtcccctgcaattgattctcggatacattactggacacctactgtgtgcacaggagtaggagcagaacacaatagaagacaaagtgtatctttttcgaaattaagtcgacggcggtcgtctatagctggactttttacacagcctgttttggtggagaggaggtggcttgtttg

SEQ ID NO: 462128 - DNA, 576 bp, Homo sapiens
tctcaactctagttcacacatgccaggctccagctccctcaggaggccctgggccctcctttcctttgcatgctctggaaaattctcatgccactgtaccccagctttagtagcgaaatcaaatgagcccattcccctayacttcatgtctactaccagctacattatcctcttgcagtgttccaacacagttgacatttgttttcatccttctctcaccaggtctggctgactctcttgtacctaaggacaatggtaaagtcttccctctagcgtctgaggctaaggatgctgatgggggagctgagagaacagccaagcaggggagaaagaacaggctgtgatggggacccgcttctgtgtttacactgagatctctggatttccacccactcgctgggttttaggaggttgggaaaaagcccctttgcacccaggctccctttcttcaacttacctccatacaaagacccagatagatcgtgttcaggtgcacagttctcaacatgagaaatgagccatgcatggaatgtgggctatgggtaggattccccatgggtgtggggtgacctcaaa

SEQ ID NO: 462129 - DNA, 576 bp, Homo sapiens
tctcaactctagttcacacatgccaggctccagctccctcaggaggccctgggccctcctttcctttgcatgctctggaaaattctcatgccactgtaccccagctttagtagcgaaatcaaatgagcccattcccctacacttcatgtctactaccagctacattatcctcttgcagtgttccaacacagttgacatttgttttcatccttctctcaccaggtctggctgactctcttgtacctaaggacaatggtaaagtcttccctctagcgtctgaggctaaggatgctgatgggggagctgagagaacagccaagcaggggagaaagaacaggctgtgatggggacccgcttctgtgtttacactgagatctctggatttccacccactcgctgggttttaggaggttgggaaaaagcccctttgcacccaggctccctttctycaacttacctccatacaaagacccagatagatcgtgttcaggtgcacagttctcaacatgagaaatgagccatgcatggaatgtgggctatgggtaggattccccatgggtgtggggtgacctcaaa

SEQ ID NO: 462130 - DNA, 576 bp, Homo sapiens
tctcaactctagttcacacatgccaggctccagctccctcaggaggccctgggccctcctttcctttgcatgctctggaaaattctcatgccactgtaccccagctttagtagcgaaatcaaatgagcccattcccctacacttcatgtctactaccagctacattatcctcttgcagtgttccaacacagttgacatttgttttcatccttctctcaccaggtctggctgactctcttgtacctaaggacaatggtaaagtcttccctctagcgtctgaggctaaggatgctgatgggggagctgagagaacagccaagcaggggagaaagaacaggctgtgatggggacccgcttctgtgtttacactgagatctctggatttccacccactcgctgggttttaggaggttgggaaaaagcccctttgcacccaggctccctttcttcaacttacctccatacaaagacccagatagatcgtgttcaggygcacagttctcaacatgagaaatgagccatgcatggaatgtgggctatgggtaggattccccatgggtgtggggtgacctcaaa

SEQ ID NO: 462131 - DNA, 576 bp, Homo sapiens
tctcaactctagttcacacatgccaggctccagctccctcaggaggccctgggccctcctttcctttgcatgctctggaaaattctcatgccactgtaccccagctttagtagcgaaatcaaatgagcccattcccctacacttcatgtctactaccagctacattatcctcttgcagtgttccaacacagttgacatttgttttcatccttctctcaccaggtctggctgactctcttgtacctaaggacaatggtaaagtcttccctctagcgtctgaggctaaggatgctgatgggggagctgagagaacagccaagcaggggagaaagaacaggctgtgatggggacccgcttctgtgtttacactgagatctctggatttccacccactcgctgggttttaggaggttgggaaaaagcccctttgcacccaggctccctttcttcaacttacctccatacaaagacccagatagatcgtgttcaggtrcacagttctcaacatgagaaatgagccatgcatggaatgtgggctatgggtaggattccccatgggtgtggggtgacctcaaa

SEQ ID NO: 462132 - DNA, 617 bp, Homo sapiens
tcctgcatggaatggaggatctgacagtggccgttcctgggtattaaagccagtgcaaaagatagagcgtccaaaaggcaacttcttccttatttgtgaagtcagaaagtaaaatttacattgaagtgctaagctacattattctgaatattttggcagtcatatttgggcagatgagttgctttcctgaaattactcagcaccrtcattcatcctgacaaaagctagtggtacagatgcacctttgggactgaggccaaggtgaaacctgcgttttccaggtctgcccactcagttttggaaggactctcaataaaaccggcctcacaccccaagcatcacccctcctgtccttagtaagtacactctggctggaatctagggtcccagcatctagcccttgggacttcacataaattcatcaagtatcttcctccactcaaaaatctcttacagaatctttgacattttaagcttcattactgcaaagtggatatagttcattctcagcttcaggattccagaagcatacataccaggtcagaatggagaggcatcacgctttccttcagcaagcttcaggggagacaggatttagggtgggctacacatatacc

SEQ ID NO: 462133 - DNA, 510 bp, Homo sapiens
aggtgggcatctttgatgaggaagtgtcagtttatgcttaccacactggacaaggagtttatctcggttgtggtggacacatttctctgaatcatacagaggtcatgttagccactttctcackgatggctcttttcccgaagaataacagtgggaaagaaaaatgccagcctttgaaaagacagagagacagaggagtataccatttttcttatgtgagtgaagaaatggtgataggaatggttactttctgaaaatatgcaaggactatctaaaaccctggaatgttaagggcttgatgacatagaagtcatagtagcaactccagcctcagctggaagtaggctgaagtaggctgcatggcctctttacactttcgcatatgcttccagatcccacatgtcagtgacaaatgatcgtgttatatagcaaacacgtaagaacacaagctctggagtcagccagacccacatccttgctccgctagctctgctattactaattggggtg

SEQ ID NO: 462134 - DNA, 597 bp, Homo sapiens
gaagctttgcatcgtccctatggttgtgatgttgaaccccaggcactaaatgaggctatcaggtggagctccaaggagaacttgctcggagccactgagagtgaccctaatctcttcgttgcactttatgattttgtagcaagtggtgataacacactcagcatcactaaaggtgaggcttctatgtagcatcctttcacttttcagttttcattaatgattaagagataaaggggcctggccaggcacagtggctcacacctataatctcagcactttgggaggccaaggcgggcaggtcacctgaggtcaggagtttgagaccagcctggccaacatggtgaaacctgtctctaataaaaatatgaaaaaaattagtcaggcgtggtagcccatgcctgtagtcccagctactcaggaggctgaggcatgagaatcacttgaactcgggaggcagaggtatgcagtgagctgagatcacaccactgcactccagyctgggtgacagagtgagactccatctcaaaaaagaaaaaaaaaaaaaaaattatcctgaaatacatttttttccccagcagtggctttcatatgttcaaa

SEQ ID NO: 462135 - DNA, 597 bp, Homo sapiens
gaagctttgcatcgtccctatggttgtgatgttgaaccccaggcactaaatgaggctatcaggtggagctccaaggagaacttgctcggagccactgagagtgaccctaatctcttcgttgcactttatgattttgtagcaagtggtgataacacactcagcatcactaaaggtgaggcttctatgtagcatcctttcacttttcagttttcattaatgattaagagataaaggggcctggccaggcacagtggctcacacctataatctcagcactttgggaggccaaggcgggcaggtcacctgaggtcaggagtttgagaccagcctggccaacatggtgaaacctgtctctaataaaaatatgaaaaaaattagtcaggcgtggtagcccatgcctgtagtcccagctactcaggaggctgaggcatgagaatcacttgaactcgggaggcagaggtatgcagtgagctgagatcacaccactgcactccagtctgggtgacagagtgagactccatctcaaaaaagaaaaaaaaaaaaaaaattatcctgaaatacatttttttccccrgcagtggctttcatatgttcaaa

SEQ ID NO: 462136 - DNA, 606 bp, Homo sapiens
tccctgtttttttctagtggttttatagcttcaggtcttacgtttaagtctttagtccatgttgagttgaattgtgtgtatggtgagaggtaggggtccagtttcatttttctgcatatggaaatccaattttcctgcaaacattttttaaagaggatatcctttccccaatgtatgttcttggcatttttgtcaaaaatcagctagctgtaaatatggggttttatttctagattctctgttttgttccattggtctctatgtgtctttttataccaacaccatgctatttttgttactatagccttgtattttgaagttaggtagtgtgatgcctaaagctttgtcctttttgctcagkatagttttggctatttgcgctcttttttggttctatacaaacttcaggatttttaaatttttttctgtgaaaaaataatgttatttcgatagggattacattgaatgtgtggattgcttcggatgatacgatcattttaatcatattaagtctcttcatccatgagcataggatatctttccatttgtttgcaccctcttcaatttcttttgtcagtgtgttttagtgcaacttgtaggtatatt

SEQ ID NO: 462137 - DNA, 628 bp, Homo sapiens
tatgtccttgggtctcttaccttcctcagccctatgcagagtatgtatcttcttcattttaaacttttaaccaggagaaagctaaatgctaatgttggaacttacgaaagcaacttctctgggctttttaatattagattatacttcatgttgaacttttatctagctcagagattatttgtctattacataggaaccattttaacacttttttaaaagtatccactggcttcttcacattttttcatgcagtagtttttcttgaattttgttttttataaaaattactaggaaagtttgttaaattttcagatttccaggcctcatatcatcagtaaatctggatcaccctcaaaatacccatctttgtcaagcatcttgggtgataatgttgtgtctctctttagaaccycaaggctattgagagggaaatatgtgaaaaataagcctgcccatacacaacaataacatgggaaaggaacaatgtaaatttcacactgcctacgtgagagtgtgtgtgtgtgtgtgtgtgtttgtgtgtgtaggtgttttaaatataaaacacttaaaactgtttcccagattattttccactgtttgaccccctagtactgaagctctaccaagc

SEQ ID NO: 462138 - DNA, 541 bp, Homo sapiens
agcagaatcaatcaaaataatgccttaataatgaatcaaaaagtgaatgccaaagtatctgcctttagtcaatttgagtgtagcaaatgaaatatgacttaaaacagggtcaatcttgaatgcaaaatatggactttctgaacacacacaaatgtttccataaatatataaaatgtatttgtatttcatagacaactaasgtacaatttaaactacgtttgtttttgcaaactcctaaatttcattatctgccattcattaagaaaaggaggcgaaagaaaaaaaaaaactttaaacactaatgtataatttcaattttgttttaggcaactgtgtaaatggcattttttttggcatatttgtataacacaataaatgtgtagcccacagccaaggggattgcataaaatttcccctggcatagctactatttccaatccaatcatgctcaagagaatatcttatctgctttgtatacacacacatacacacacacacacacacacatcttcaacatttgttaacattaacattcattttg

SEQ ID NO: 462139 - DNA, 614 bp, Homo sapiens
caaaatatggactttctgaacacacacaaatgtttccataaatatataaaatgtatttgtatttcatagacaactaaggtacaatttaaactacgtttgtttttgcaaactcctaaatttcattatctgccattcattaagaaaaggaggcgaaagaaaaaaaaaaactttaaacactaatgtataatttcaattttgttttaggcaactgtgtaaatggcattttttttggcatatttgtataacacaataaatgtgtagcccacagccaaggggattgcataaaatttcccctggcatagctactatttccaatccaatcatgctcaagagaatatcttatctgctttgtatacacacacatacacacacacacacacacacatcttcaacatttgttaacattaacattcattttgtttcctgttaygcatgtgtatatgtgcttttatttaataatgttagttaacatttcctttttctgtaaataatgatagtataatttgaaaagtctggctcaattcccagacttaggtcaagctaatatacgaatatatttagtccagtttactgttttattggactttgatgttgagttatgttttttgaaagag

SEQ ID NO: 462140 - DNA, 545 bp, Homo sapiens
tctaacaaatgttattgtgttttaattgtgctaagaaaaccctgctctggcaacctaataaagtagcctgctaataacaggtactcaataaatatttgtggaacaaatgaattattgattctttgtatgaacagttcattctcaagcaaacacctgaacatcaacctctcccaccccacaccccttttgaaatattcttcataaaacttcctactgtatgaaagtatcttctgtgtgtgaatttttacagtctgcatcaccacatggaatgtgagatccctgagaaaggagactttgtttgttttgttccccacagtgcctcagtgtctgmaatagcacctggtaaatcatagggacttctgaaatactttctgaatggataaatgagtggtaggaaaagtgtgaacatggtagataaaagagaagtcaccactagaacaccaagttcctgacatacagtttcaaggtccagcaacatagttgctacgaactagctgcctttaaagttctctagatcaactatatagattagcaagtcttttaac

SEQ ID NO: 462141 - DNA, 569 bp, Homo sapiens
acagcatagaaaaattttaaacttaagcaaagttgaatagctctcaagtactgatatatgtatgtgtccaatattatgattccaccattgctaatgcacacaaaaaaaactaccaatttatttttcttatataattatatctctgataaaattattgtttattcagaaacctaatatcgaccattaatgttccagtttcagaaaacaaaaactcctaagagaatgaatagaaattttcttaaggaattataaagaaccatctcagaattttactctgttactgcaaaatctcatgcaaagatraccaagtacggtatgtgaacgtctcttcttctaaagctcatgaaactgctctctgattcctctagcgttgacagagaatctggagttcagtactccatttcattcctggacatttagcccattattcttgtatccatatttcatattttcctttcatgggggataattgtaagttaaaggtgaatttgttgactcaaaccttataaggaatcatagatcaacctaaagatttcctaaaaatatacctacatattgaatacttgctt

SEQ ID NO: 462142 - DNA, 673 bp, Homo sapiens
tatgtgggtcacttagggtctaactgccacaactacatatttggatataatttcaaagaaagactgtgaaaaagcataaagaattgtrggaattgcctgagaattgaggacgttcatctgcaatgcctgtaaggcttacattaaacaagtctagcttactgagaaagttttaaaaaatgggtttgtatgactttacttattgggagaagccatttgacttgtctttgaggggaaaaataatttaaaaatacagatatactctctctgcaaaacaattcctggaatatgatctaacagaaaagcccagcagacctgattcaaacctgatgtgaacacagaatgctttgaaatgagtaaatttaattattaaacctaatttttcaggtgaggaaactgaaacactggggttaagtatcttttgcagggtcacacagctaaagaattttggagcaggaattcaaattcaggcagctggcttcagacctcatgctattaaacctgatattaaacttgacatccatcttacatgcaaatgttactctctctatcaggaaaataacgcatttataaaagccagctcagatgttacttccaaccaacaaatttcctggacacactaagtaatagagttaatcacaccgtcctgtaagtactacccacagtatccgggctc

SEQ ID NO: 462143 - DNA, 554 bp, Homo sapiens
taattaattttctagttttcacttcaaataatgattatttactctattccctctagcattagattattttcttgcaaaccgttttttttttttctttttttctttttcctgtaatagttttagagtttctgccttaacacatttaggtatattttgtaggaacaaagggaaaaggtatcagggagaggaaatgatttctaaaatgtaaattccaaagacagggaatgttaaaagtgtttgccagtcctgtttcttacagagcacagaactcagatgctcttataaagrtacaggataaatcacatcatttcctgctccatcatcagaatattattatatgatttagatcacttttttaaaaaagaacatggacttagtacagaacaacagcaaaagcctggggaaggagaggagtgcaccatgaggagtcaatggggagcagaagccagtccatttgactgatttggttcgtgtgcaaaataattgctaaataattgcatatatgtgagactccgggtattttcaaaaccagctggcaaaattgtgttattctc

SEQ ID NO: 462144 - DNA, 554 bp, Homo sapiens
taattaattttctagttttcacttcaaataatgattatttactctattccctctagcattagattattttcttgcaaaccgttttttttttttctttttttctttttcctgtaatagttttagagtttctgccttaacacatttaggtatattttgtaggaacaaagggaaaaggtatcagggagaggaaatgatttctaaaatgtaaattccaaagacagggaatgttaaaagtgtttgccagtcctgtttcttacagagcacagaactcagatgctcttataaagatacaggataaatcacatcatttcctgctccatcatcagaatattattatatgatttagatcacttttttaaaaaagaacatggmcttagtacagaacaacagcaaaagcctggggaaggagaggagtgcaccatgaggagtcaatggggagcagaagccagtccatttgactgatttggttcgtgtgcaaaataattgctaaataattgcatatatgtgagactccgggtattttcaaaaccagctggcaaaattgtgttattctc

SEQ ID NO: 462145 - DNA, 558 bp, Homo sapiens
tggggaaaaaagtattccaaggagaggggcagggtgtaggacaactaaagagcaagggtgattagaatactttgatgaagtgaaaaaaacactccaatgagtgagcgcgtatgaagaaaagggtggagagcagattattgaggtccatttagatcatgttttagatcctggacagcatccttaaaataataaggagccactaaaagtttgaagaagggcaatgacatgttccaatttgcttttttacaagatcactctgacttctgcctggagtagcatataaagggactaagcacgataccaggtggcacataggagctgaagtggctcttgtcaaaataaggtgatggggatgggagtggrtttgtttcctaggctgctacaacagagaactgtgaatggagtagcttaaaataacagaaatctattctctcccagtttgggatggaggtttcagcaggacatgctctctctaaagactttaggggaaaatctgttcaatgtccttctcttagcttccagtgttgctggcaatccatggagctccttgcttgttgg

SEQ ID NO: 462146 - DNA, 540 bp, Homo sapiens
ttctggtccaggtaccacactttgaatactgctgttttaatgcttacatggggtagcatgagttagttttgcctggggcttttaattccaagttctgctacttaacagctgtgttataatgattaagttatgtgatgtctctgtagcttgatttctttgtataatgaggaaaataatcatwcccttttacataagattattgtgagaatttaataaacaagaaatttcttataatgcctggtacatagtaatcactcaataagttatgtcaattgtcaaagcacatgtctgaattatagatgagagagaaatattgtgaattctatggcactttaatggcctgttctctctacccatctctagccgtaccttacactggcttatcctgtgctcttcctttcctgagggaacccaaccacatatactgcctaaagcactcttttggcacttctaacataggtgcaaggaggaaatttcaagaaattatgacaaactacaagactcaaatctccttttaaattttaaaaatcaaaacatgta

SEQ ID NO: 462147 - DNA, 446 bp, Homo sapiens
gtgcccacacactgtaggcactgaatgtcacacttgagaatgtccctggtcctagcttatctataacaggaatattttccrtcatatggaatttaaagataagaaatgaatcaccacgcagagagatgtgctatcacatcccatctatggaaaaaacaaatgaaaaaaaaaaaaaacatgaagaaagactttttgaagtgcagcatcacctgcatttatgatattttcagacatataaaacaaatattattctcatggttttgaataaaattgtcacttttaaaatttgacatgggatatcacaatggacaatgcagggacccttcagcccatagtcaacaggtgatcaattgtgaaaactgatattctctattaggaaggttagctagagtaggagataaaaaacaacatgattacaaaaaggaggatcatttgagaccaacttt

SEQ ID NO: 462148 - DNA, 583 bp, Homo sapiens
ggactccttccacctggatccaaaagggtaaaagacacaaagatcacagtcagtggaccagtggagaacttttcatgggagtgagaaatacgcatctgctgttaagagtcactgacagatgaagatactttgtgtaaacccatggaaatatattttacttgaaaattatttcattaatcctgatattacttaaacttcccccttcttttaaattttacactaaagaggcctacagaaacacataccaagtaatgcagtgggatttccttatggagttgatataaaagaacagagrtatcaggtaattctaaactccccaaagacacctgaccgcttgacatgaacaaaaaatgttttatgatgttaatttatggagaacatgggttttgatttgtaaaagaagttgggatttccttaattaatatttacttcccaggaagaaattttaaatctgtggtgttagaggctttatatgacaagatggctaaaattattcagtttgaagacatattgttacataatgaccctctgtgtgtgtaaatatatgtatttatatgtataaatacatacatacatttatatg

SEQ ID NO: 462149 - DNA, 552 bp, Homo sapiens
gtttttgtatttaacgattctgtctgaataacctgcattttgccagtgttttgtgaaagactgaatgattcgtaccagcactccactcccccgtagtacatcgacagctttaccatggcttgwtggttggtggcatgtacttcccagtccttgcattttgacttcatcaagtgtgcttatgtagttaagcttcattcattcataagctcctctcagtgcctttaaagaacatgccactgcctgggcttctccaaacacttcagtctgtgcctcgtaatgaaacgtgatgagccaagctcagccagcttgcagcctgaagcagatccatcctcccagctcagccaagtcaagagtagccaaaactcagccaaccacagaacagagagctccagagtaatatttgttgttcgaagccatgaaatttttgaatgggtgattatgcagcattatcgtcatgatatttgaaaaagaataacttatcactgcaagttcttgatcacgttttttaaacgaactttttaatctatctctaataaatcaaggtatataaaa

SEQ ID NO: 462150 - DNA, 557 bp, Homo sapiens
agaatcatataatagaactccttcgtatgcagtggccagctcagcagttgtcattgaatactgaacttttaaaaataacaatccttcctacttacttatgaaatgtgtgtatacatacatatatgtataaggcatgtacatgcatgtgtgtgtgtatgtgtgtgtgtgtgtgtgtgtatatatatatatatatatatatatatatatatatayacacacacatttggacatatgattatggaggccgcaattcccaagatggaaagctggatacccaggaaagtgtttccttcttattaggccctttccttctcctctggcctttggttgattggatgaggcccaccacattagggaggacaatctgcttcacttagtctgtctattccagtgttaatatcatccagaaacaccctccagcacacacccagaataatattggaacaaatgtcctggcacactgggactcggtcacagtgacacacacaattaaccattatacaggtccttcatcatatgtgggattttcatatttttctcccagtttgtagcatatg

SEQ ID NO: 462151 - DNA, 614 bp, Homo sapiens
aggatgtgaataattttcagaactgaaggtaaataataattttcttcctgtctttcttgtttttcttaaagagattggaaacctgagcaaaccaaaaatcgagggaggtagaaagtactggagacctacagttggccttgagccttggcttagtaacatctgtgctttcaagcataaaccctgtgcatgaaaatttatatcccacctaatgtgagtactttggttagaatattgggagtaaatgatattctcctctttattcccagcttgtatgtgtcacaggaacaactggggtacttcagaagtgcctactttttaatttttattttttgagatggggtttcaccctgtcscccaggctggagtgcagtggcatgatctcggctcactgcaacctccacctaccaggttcaagcgcttctcctgcctcagcctccagggtagctggtattacaggcgtgcaccacctcgcatggctaatttttttgtatttttagtacagacagggtttcaccatgttggtcaggcggtcttgaactcttgacctcatgatctgcctgccttggcctcccatgtgtccactttttaaaaatgatattaagagcttaataaag

SEQ ID NO: 462152 - DNA, 614 bp, Homo sapiens
aggatgtgaataattttcagaactgaaggtaaataataattttcttcctgtctttcttgtttttcttaaagagattggaaacctgagcaaaccaaaaatcgagggaggtagaaagtactggagacctacagttggccttgagccttggcttagtaacatctgtgctttcaagcataaaccctgtgcatgaaaatttatatcccacctaatgtgagtactttggttagaatattgggagtaaatgatattctcctctttattcccagcttgtatgtgtcacaggaacaactggggtacttcagaagtgcctactttttaatttttattttttgagatggggtttcaccctgtcccccaggctggagtgcagtggcatgatctcggctcactgcaacctccacctmccaggttcaagcgcttctcctgcctcagcctccagggtagctggtattacaggcgtgcaccacctcgcatggctaatttttttgtatttttagtacagacagggtttcaccatgttggtcaggcggtcttgaactcttgacctcatgatctgcctgccttggcctcccatgtgtccactttttaaaaatgatattaagagcttaataaag

SEQ ID NO: 462153 - DNA, 577 bp, Homo sapiens
tgtatgtaaattgtacctgaaaagcaaaaaaactatagataaatatgaactttaggaaaggatgtgaatgctgaaggattcagtgggatgtgaattcagygtactgatgtctgtagtttacttgaaatgcatcaaaaaacatagatgaatgaagaggtggattgggagatgggtaaatatatagatatatgataaagcaaggatagtaaatattaatgatagaatctaggggataggtatataggtaaaagcaccccacgtttgtaaaagtctttcaactttgttttatatttgaaaattttaataaggaaatacttcaagcctttggaaaccccagcacaagggaaattaccatcacttcatctgtcgactatatcatgaccatgttcattagaacaccgacttctcgcccaaaataaagccatctttgtaatcactttaaatggaactgccaaagccggtccaggagtaaccagtgctatggccagagggagtctcgctggagagaaaattggcaaatacttcaaacttaatgaaaataagaacaaaacatattaaaatttgtgagatgaagcta

SEQ ID NO: 462154 - DNA, 586 bp, Homo sapiens
accttggttgccagtgaaggattcacacggttattatgggttttttgatgggagtctctgatcactgctacttctattcagccgtcttggccccaccaccctgtgtctgaaatctatagctgaaatggatttatggagccaaactaaatataaaagtagaagcagcagcaagaagagctgtgtaggcactcctggtcctcagcttgagcacagggaagccattcctggctttatctcatggaggtccttggggtatgratattcttatacaagccttttggtggacatgtgttttaacttcatgcaaggagtgggatttttgtgtcatgtgataggtgtatatttaagcttattagaaactgacaagctgtctttcagggcttttgaatcattttacattcccaccagcaatgcttgagagttccaagtgctccacatcctcagtaattgttagtaattgttaatctggcattgttagtgttttaatactttttgtcttaattcaaaaagtgagaaatttattttttgtgctataacttaacacaaagtaagggactaaaaactgcccaactatcaacatagcaaa

SEQ ID NO: 462155 - DNA, 613 bp, Homo sapiens
gtgccttctaggcctttttattttaacactgtgacataaaawgtaaatttttttgtctaggtacttttcctggtgtttagctttgctaggtacttcctaattcctctgcttgttgcctctttgctatttatctttcctaacaagaacctaaagacaaatgtggagaaagcagctttgcacctcctcctggttttcacaacaggggagaacaggtcttctctgtgtgtgcaggaaatccacggggctggtgagtttatcgagggtcatgcttacaggtacaatgaagacaatggacaagcatgttaacaggactatttccttgttgggtgagcacatgaaatcagtgcactctgcagctttctttatcctgcatctggaatctgtgactaccttcacctcccttgtgttcttgctgagaccttttccatattttaccactcattacctgctcctgattattcagtcttacctgggagcaggtgattcctgtactttatcaagctccttggttttatcattttcatcctcatctgtgtcattttctgcaaatacagaagtgttcgttcagatatttcccacttcacactctgcaagcacagtcagcccaatgtgc

SEQ ID NO: 462156 - DNA, 269 bp, Homo sapiens
tatgagggtttccaagtgaggacaacaaaccctagccatcttgtgcacctcatcctgttttagaagcttgaagagtctggattataaaaacaaatgtaaaattcaacactatttgaaatgcttattgatatattacagatattttaatatctactctctcwcactggaagaaacatactccctcaactacaaaaactttttagttgactaagttgaatatgaatctttcaactaatactaattatctttattagcttgggagagatttc

SEQ ID NO: 462157 - DNA, 617 bp, Homo sapiens
acccaagaataaatggctgcatgatgtgtttaggtatttgaggccataaaggcataatatcctcctgggattgctgtgctctacagatgttcatgtacagcagaataatctgtacagctttagcaagggttgtgattaagattttggcaggtaagatttagaaattcctacataatcccattcaatcagtgtaagtgagaaaggcattgttgtctggagatgttcatttaagtggatattgaagtggccaagagaatatggatctgcggttgcaatgattgagcaagggctccattcatagccacttgtgccaagttggcaaaaagacacaggctgctagctcaaataatacttgaataaactattgaggcaatatagttaattaaaactaagaactacaatgataacaatgaaaacaaaatagagagcttgtatataggaagcttatcttccagggtgtatataaggtggtggaggtgtctgttgctgggtcagaatgcagcttagggcttgggtgagaaaygaatgtaaaaatagtgatttaattcttttgcttttcctccaagtttcctgccctttcaccataaatacaggcttctgaaccctgagtgcaggta

SEQ ID NO: 462158 - DNA, 610 bp, Homo sapiens
agtttagtattatgtttgtatggatctagatccctcactatctttgatcgttatgactcataatagatagtcayagctgatgaagtctcaaggtttctcagtgaatgttttactaaagaacttcagggtgatattttggaaagaatgagaacattaatagttctcctaatcctggtcttaacctcgaagaagactttatctacttgtcagtagttttgagagagtcctgagttttaatgttaagtaatatgcaaacttccatttagcacatcagggcttttaatttcaagtgttattgtagaaaatgccacaaaatagctttgatgccttaccgtatgtagcataaataatccatatacaatatatcctgaagtttgtttgtgaagaatattgatcttcggaattttctttgctcttctgatgatgtcctttggaacctcaaacgtttggtcaggaccagcttcagatacagaagaggcttcattcacctctaggagactattacgtttggaataatttgatataatgatgattctctttttaatgaatttcctcttcaagttgatgtttaaaaccttcacatgaaagaactgtgtctgcgtagccactg

SEQ ID NO: 462159 - DNA, 589 bp, Homo sapiens
gtcatggagaggatagttgatgtctggatttggagccatatgataattttatcaaagcaaaagtaagttaagaaaaagcaaggaggatctggaaggatggccayaaaaataccttcgagtgttcatggttttcttttataggtttacgttgctgttaatgtagagacactaagttggtcttaagatagtaggtagagagggatattaggaaggtcaggttaccccaattcaaaggtcagagagtagaggaaacttggtagaaattaccatgtttcaggacatttttgtttcccctttttggtaatcatttcatgtagagtaatgcctttggttaggactccagcatacaacatacaaattactgtcaccaatgaagacaattcagaacattgctccataatccatactgtgcagataaaattgtaatagatgaagcaaagaaatgctttaaaaatgtgcatttgtgctgattctgaagcagtgggcaataatttgcaatttgtgccatcacacagaaagctcactaatagaacatacgagagctcctgataagggggtaaaagtcttggatggaccttcatgacttttt

SEQ ID NO: 462160 - DNA, 419 bp, Homo sapiens
gctaccaatgtgtgtttcccctctatgtgtccatgtgttctcatcatttagctctcacttataagtgaaaacatgcagcatttggttttctgttcctgcattagtttgcgaagggtaatggcctccagctccatccatgttcctgcaagggacatgatctcattcgttttcatggctgcatagtattccatggtgtatatgtaccatattttctttatccagcataccattrtttggcatttaggttgattccaatctttgttattgtgaatagtgttgcaatgaacatacatgtgcatgtgtctttatattaagacaatttatatttcttagggtatacactcagtaatggaatttctagtttcttatcactttctaccctgatgtccctctctctcctcttcaaggccagtaactct

SEQ ID NO: 462161 - DNA, 419 bp, Homo sapiens
gctaccaatgtgtgtttcccctctatgtgtccatgtgttctcatcatttagctctcacttataagtgaaaacatgcagcatttggttttctgttcctgcattagtttgcgaagggtaatggcctccagctccatccatgttcctgcaagggacatgatctcattcgttttcatggctgcatagtattccatggtgtatatgtaccatattttctttatccagcataccattawttggcatttaggttgattccaatctttgttattgtgaatagtgttgcaatgaacatacatgtgcatgtgtctttatattaagacaatttatatttcttagggtatacactcagtaatggaatttctagtttcttatcactttctaccctgatgtccctctctctcctcttcaaggccagtaactct

SEQ ID NO: 462162 - DNA, 609 bp, Homo sapiens
cccgcttattgctcccaacaaatatttgtaggggatgctggggctggtggccttggttgggatgagtatgtggcaaccctatttcagtcaggctcaaaataggtagggccagtgtggccaccctgaatggaaccctatgtgttctcctggaatagctgccaattgttctgcaggatctcagtgcccactttttgttactccagcccatcaaaatttttatcctttcttaagtgtaaataaaaagaaagtattttctttttcagatggtgagagatatttaactgagttgttagactatctctgatatctgggggacataataagagactagaaaattcatatttcagagcagaaaaattcaataaaaactaataaaaatcattcaattataaaatgcaacacatattatctctagatgttaatgtgttcttttccttcttctgggattttcccgaatccttcaactctcttcccttttcttctacttctatgtttgtggttggacattcttttcacctcaatttatacattattccatttcctgaattagatgatcttcacttatgcttcattggaccckgaagattcttattttggtaattggtactc

SEQ ID NO: 462163 - DNA, 562 bp, Homo sapiens
actaattacaattgtcataagtattatagtagaaaaaatcccaaggtcctacacatatgaacatcaggaagacttctagcctgaggaagaaatgatctgaccaatttaggagatttccaggtagagaaacatggtttataaaactcctaagtagaagaaggatgttgaagaaactttaatggattagaaagtgaagggaaaagtgtgaaagaaactccagkagtagacaacgaacccaccgctgtgctcacatgtattgctagggatgctacacatctttgattttccccatgaaaagtgaaagagaacttcttgaggcccaaaatatatcaattcaccatgtatcccatgtagaagcagaatattaaaatatagttaattatcaatatatgcatctgagtaaataataatcagaattatttttggtagaagatgaaatgagatgctattttgaagttcaaatcatgagttatagaaaatagagcaaaagaggaacaagagaaaagtgtgttaattaggacaaaatgcttctgtgattttgtgattactaagtaggtaccca

SEQ ID NO: 462164 - DNA, 562 bp, Homo sapiens
actaattacaattgtcataagtattatagtagaaaaaatcccaaggtcctacacatatgaacatcaggaagacttctagcctgaggaagaaatgatctgaccaatttaggagatttccaggtagagaaacatggtttataaaactcctaagtagaagaaggatgttgaagaaactttaatggattagaaagtgaagggaaaagtgtgaaagaaactccagtagtagacaacgaacccaccgctgtgctcacatgtattgctagggatgctacacatctttgattttccccatgaaaagtgaaagagaacttcttgaggcccaaaatatatcaattcaccatgtatcccatgtagaagcagaatattaaaatatagttaattatcaatatatgcatytgagtaaataataatcagaattatttttggtagaagatgaaatgagatgctattttgaagttcaaatcatgagttatagaaaatagagcaaaagaggaacaagagaaaagtgtgttaattaggacaaaatgcttctgtgattttgtgattactaagtaggtaccca

SEQ ID NO: 462165 - DNA, 567 bp, Homo sapiens
cacatattatagggtgagtaaagaggagaaaacaatcaaccttctagaactaatatgaagattaagtgtcacaaaataattgccaagtaccaggtaccaaatatataatcaataaatttagctaaattttagttttagatacttactttctgctattctattctgaataaaattaattatcttcagtgtttgcctaatgcagctcttcctagggcagctttctaatgtatcagatcactatagtggattgcgagaacaggraatatggtttgaaagtgcgtgaagagcagtcggtgttttgaggaaatgcataaaaccagatatttcacatcaggcaggcccagatattcctctaacacagacaagtgccttcatgcacatcaccagaaggtgcctcatttggcagaaaaattacccaattatgccccctccaggagaccaattctgaaaagatatctactgctctgggctaaaacagtaacacagcacttggcaactgaaccacaaactggatttcacgcttacttatccctttagcctggtttctttcagcagaacacagcctgt

SEQ ID NO: 462166 - DNA, 542 bp, Homo sapiens
cattgtctggggatggaatactcagtcttcacgtcctgtaaaactggactgagttatttggtcaggtacaactcttagggctattttgggggcagcatggcttgcaataaagttggctacatttatggacatttattaactaggcctttctcatcaattagatacacaaaccagtctctctcaagtgctcttcagcatacaagaaacccagatctccatcctttagggatctctgatcatagccataataagaagattctctcaaattcacaattcctcagggaaggttctatgatcactacagtatggatcaggcaatcagaatctttcagagtttttagctgtattcagaagaatttaatattccacctaaagcattcccattagctatatttttatacatttttcaagtaaaattggggaatatctctaaaatcacataccttgactacttttaattaaaccaatggaagtccaaaaaatattcatcctatttggccaatgtggcacwttattttagcagttttcccattcagtaacct

SEQ ID NO: 462167 - DNA, 542 bp, Homo sapiens
cattgtctggggatggaatactcagtcttcacgtcctgtaaaactggactgagttatttggtcaggtacaactcttagggctattttgggggcagcatggcttgcaataaagttggctacatttatggacatttattaactaggcctttctcatcaattagatacacaaaccagtctctctcaagtgctcttcagcatacaagaaacccagatctccatcctttagggatctctgatcatagccataataagaagattctctcaaattcacaattcctcagggaaggttctatgatcactacagtatggatcaggcaatcagaatctttcagagtttttagctgtattcagaagaatttaatattccacctaaagcattcccattagctatatttttatacatttttcaagtaaaattggggaatatctctaaaatcacataccttgactacttttaattaaaccaatggaagtccaaaaaatattcatcctatttggccaatgtggcacattwttttagcagttttcccattcagtaacct

SEQ ID NO: 462168 - DNA, 552 bp, Homo sapiens
ttaataattatacatttgtagtaagtattgatacctagtagtagggatagtacatcctgataaacatattcaacttgttttgcaggtttttgtctttatttttttcatttaggttttaggatcattctgataaattctatgaaaaaccctttgagattttggataggagtttatagattaatttgacaacactgctgtcttcattttatcaaatcttcccatttaaaatatcagacatacacccacttaagtaggtcctttaaatctcccaataaagttttataagkttccctttaaaactcttaaatatattgtattcgatgttcttatgtactttgtagttttgttgctattggaaattactttttttatgtaatttttttctctcttggagtggtactaaaataaaggaatgcatttctgtatattaatcttatagttataaactgttgaattattatttataatgttttgtgtattattttggatactatacataaacaactatattactacaacgtgattttggcaacaagttacaaaaataggttg

SEQ ID NO: 462169 - DNA, 545 bp, Homo sapiens
ttaaactcattatattatatacctcattcttccagctgataccaattttccaattccaaagccatctccacatttttaagtatttgttacaataataccccatgtcacttttccaaactattacttttctagggcctctaaaagaaaataccacaaactgggtggcctaaacaacagaagtttatggtttcacagttctggaggctataagtccaagatcaagcatgagcagatttgattccttctgatggctgtgaaagaatctgtcctgtgcctactccgtargttctagcggtttgatgaaaatcttcagtgttctttggcttatagatgcataaccttactatctgtttttatgttcacactgtattctccatagtatgtccttctctgtgttcaaattttccctttttataaggcatagtcatatgaaatggaggccactgtaaagactttatctgaattagctttgccaggaagacactattttaaaatccacaggtattgcagctttctgtctagaaagaaaagactagtcattttca

SEQ ID NO: 462170 - DNA, 523 bp, Homo sapiens
gagttggcagagacagaactccagattgcrcagacagagggtttggcacaggaatggctgcagtggagcatggacatggacgcccatcccttaagtcttgccatactcctctaggtggctttagcctttgttggctgcaagggctggatagaaatgaactatctgctcaaagggtggggctggtttgatcagagtgtccccatctgctggcctctctcagagtttctgcctcgctgcaccaactttcagcatggccttggcagcactgacccacaattgctgtcccaccaaagcatttttgccagcatgtccccacatagatggtttagacagtagactgagaacacctcagccccttcagtgcagcaggtcctttacctcaagtggtcagaaaaaaaggtgttggcctagtttcagacccctaggggtagagcacacagcctaacagtgctgagctgatccttggacccatgaaattatccagaaacaaagccgatcaactaaacccaacttatagcacagc

SEQ ID NO: 462171 - DNA, 546 bp, Homo sapiens
catgatgcctggaatcaaatgacctggattcaaacctctgctctatcacctgccaactgaagaatctagacaagtttctatacctctatctgagctgttcccatgtcggtaaaaggaggaccacaatatctacttagcacagcacctggcacatactgagtaccagtatgctttatgtcccatgtgctgtcctaaatgtttaaatgtactgwtttatgtaaatcccactacaactctaggaggcagatactatcctcattgtactggcgctgcaaataaggaaaatgaggcccagggaaatccagtgacttccccaagttcatggagctaataagatgctcactaaatggcagcaattactgtcctcaggtagtaatgcaaaggacacaatctcagtgaccccaaggactctggggtcctggctgtggggtttctgcacctggactagctccattctcacttcttcaattacagcaaacaacggagaccaatcagtgttgtaaatagagttaacataatatatttattttaagtgccattcatgca

SEQ ID NO: 462172 - DNA, 541 bp, Homo sapiens
tacactgacaaacaatgtggtgtgtagctcttgggctctattatctgctcactgaggaagaccagttgccaggtagtttgaaaagaaataacagataacctaagactcatgttcttgtaayaggtaacaaattagcataggagcaagaatacatacacacaggtccctttatagcatggcttttccccccgtggatccaaactgaaaatacatgagtagttaacaattgagtgtaccaggccaccctaacctctggggtttacagaattcccttctcagatctacagctggaaaccatgttgacacacacatcttctaagctctaagaagtacagaatatcaccaactattgctctactaaactaaagtgcaatttttttcctgttccaattgcttttctcttggacacaggacagaataaagtagaccaaaatctgttaacactgcacaaccattttttaaaaatctaatatggtaccaaattaaaacactaacaagctacaatctcctctaattttgatctacttactaagttaataaa

SEQ ID NO: 462173 - DNA, 599 bp, Homo sapiens
taggcaaagatgttctgctgctggaggaaaagtagaagcaaatcccttgaactctgggagaggtataggaaactaccttgggcccaggatcctatacagataccatgtagaggtctgctacacctggagaagaggcgcgaaactctcacccaaaagtaactacagatacacaagactagtctggctgagggaagaaacactgaaacagcccaccctaagttcgagggtctgcataagactaaggctggaccaacacaacagagaaaactccttgcctctaccaaaagcataccactgaataacaagcaaacacagtctactgacagagaagggacgagaaatccccatgtgtaaaaaggtgggcagagacaactaaaatctaaagagatgaaaaaacaaaaaaatcctaccgcaccctctccaagcacaaattaacaggagcccactgctggaggaatgtaaagtttgtggtatactgaagataaagacataaatttwaaaaaaatccacattactgacagacagactcaatccccacaagaacggcctgagaaaaaagatgcttgtccattcacaagtacaagtactatttaactcaa

SEQ ID NO: 462174 - DNA, 604 bp, Homo sapiens
ccacagaagccagtttttcctgaatttacacatctaaatgatgacagaagtctagcactcaggttgtcaacatcagggatgcccactaagaaatgacagagacttggacattgcagattggggtacaaaagaaactcaattatcaaggtcagagtggcacctgtagcagatataagaaatgtggccagtaagttactgtcataaatttccttctcttcacccttcatttactcaagcctgccccggaacttgggactgaactaagttcaagttatccacaggtaaacgtttagtagttaacatttggaaaagtgggaaatttggaaaatcagtcatgttatttcattgtactttaaamaaaattagtgttttaatttgttctatattggaaaatgtttaaattcttcaaaatacaaaaaaaaattaagtatctcataatgtcactggccagggatgcccaatgttaacattttcgtctattttatttcatttttgtttgcaaacataaataattttacatcatgtggtctctaaactgaaattgatgtttacctttgagtcatgaagaacatgaattatggttaataccaatggcatggatata

SEQ ID NO: 462175 - DNA, 587 bp, Homo sapiens
ttaaatcactaggagtaggatttctggtcatatggtaaatgaatgattaactattaaagaacatgctaaactgtgcaaaaatagtgaattaaaatacttcaaaagtttatttctgcaagaaagcaataaaaaactgacaatatatgtcagaatcaactgtttttgaactctaaaaaataactaaaagtatacatctaccagaaaagtgcttaagcaagaaaaaataactaaatttcagtaagaacaacaagatttttggtgttttaaccaaactctggtcccctcctctactccacatttcagcaatagtcttggaaataccagcttacattcccagtatagaaggtagcagaatgtatttcaattacaaaacattgtaataatttattttctccagtctaatggctctctggaagaccaggccaaaatgcttgcctttgttctttgtaacttggaactcagtgcaaagcaggtactcagygggttttcactttaaatatttacaggaagacatattaatcactgctgactgaggtaataaaaaaactgttggggcaaatggactaaccaaaaagcttgatgagaaa

SEQ ID NO: 462176 - DNA, 552 bp, Homo sapiens
gtgtataaatgctactgagttttctacattaattttgcatcctaaaactttgctgaagttgttgagtagcctacggtcatggtgttttctaggtgatcaattacaaygtctgtgaagagagagagtttggcttcatttcttcctatttagaagccttttaatttctttcttttgcctgttttctctagctaggactaccagtaccatgttaaataggaaaggtgagagtgcgtaaccttgttccaggtctcaaggggtatggttgcagcattttgccctttcagtatgatgttgactgtcacatatggccctcattattttgaggtatgtttcttcaatacctagtttattaagagtttttaacattaagggacgttgagttttgtcaaaaaccttttctgtatttattgagataatcatgggttttttgtttgtagatctgtttatctagtgaatcacatttattgatttaagtatgttgagccaacctcgcatctcaggtatgaagcctacttgatcatggtggattagctttttgatgtgctgatggat

SEQ ID NO: 462177 - DNA, 552 bp, Homo sapiens
gtgtataaatgctactgagttttctacattaattttgcatcctaaaactttgctgaagttgttgagtagcctacggtcatggtgttttctaggtgatcaattacaacgtctgtgaagagagakagtttggcttcatttcttcctatttagaagccttttaatttctttcttttgcctgttttctctagctaggactaccagtaccatgttaaataggaaaggtgagagtgcgtaaccttgttccaggtctcaaggggtatggttgcagcattttgccctttcagtatgatgttgactgtcacatatggccctcattattttgaggtatgtttcttcaatacctagtttattaagagtttttaacattaagggacgttgagttttgtcaaaaaccttttctgtatttattgagataatcatgggttttttgtttgtagatctgtttatctagtgaatcacatttattgatttaagtatgttgagccaacctcgcatctcaggtatgaagcctacttgatcatggtggattagctttttgatgtgctgatggat

SEQ ID NO: 462178 - DNA, 530 bp, Homo sapiens
tttttcttcatttttcctgatttaaaattactaaaaattaagctgtgcttttcttaaggccctgtgacctgaagctagacaatttgaacttcagaggaaaataacagcagcctatttatrtatacatatataaactattttcataccttcctacatatataagtactgatgtatggacttcagagtcacacagtttatatcagttttcaagcattgtttttcttttttacgtctgttatttcctccatttttctgttttctttctctcttcctctccctactttttttggtgagacatgagattttacaacctactaaaaatgagcttgactaacaatgtggtacctttccatgcaagaataaatgccctagtcatgagagatcagacaaaacccaagactagaaactaattttcttctaaaaagctttctcttatagattttattttttaaaaaagaagggggagaaatgtgaaggaaaataaaaactttggaacctaattcactatgccaacagaaaaaaagttaagc

SEQ ID NO: 462179 - DNA, 530 bp, Homo sapiens
tttttcttcatttttcctgatttaaaattactaaaaattaagctgtgcttttcttaaggccctgtgacctgaagctagacaatttgaacttcagaggaaaataacagcagcctatttatgtatacatatataaactattttcataccttcctacatatataagtactgatgtatggacttcagagtcacacagtttatatcagttttcaagcattgtttttcttttttacgtctgttatttcctccatttttctgttttctttctctcttcctctccctactttttttggtgagacatgagattttacaacctactaaaaatgagcttgactaacaatgtggtacctttccatgcaagaataaatgccctagtcatgagagatcagacaaaacccaagactagaaamtaattttcttctaaaaagctttctcttatagattttattttttaaaaaagaagggggagaaatgtgaaggaaaataaaaactttggaacctaattcactatgccaacagaaaaaaagttaagc

SEQ ID NO: 462180 - DNA, 514 bp, Homo sapiens
acagataattagactgaggaagagtgctgtggacactcaagtcctataatggtcttatgaccaaactagagaaaagcttattacataattatttttttatatataaaatattatcttatatgtctttataccatatggagattctctactttgcttaattacttttcacaggcaggcagccaattgtaggcattgattttggttcatacatcagcatgacacacagattgagataaggcttgctagtcacytagtgagagtgagatgagtttttctgcttgttggataacagtgcttcctatagctgatcaaagtacacttaatcctacttattaagagttgatgtaacaaaaaataagcaagatattaagtccatgtatacagtaataatatttgattgctttgttttgtatttatgtacacggtgtttaaaatactgtgtggatataaactcaaaaaagaaattgtttcttcctttgtagaaagatcagaagaagttctgagacttatgagg

SEQ ID NO: 462181 - DNA, 561 bp, Homo sapiens
agcagactagggtaactatagttaagaacaatgtactgtatacttcaaaatagctaaaagggaggagcttgacatctttccaatgcataaaaatgataaatattcaagttgatgaatactgtaaataccttaacttatcattaaacattatatgcatgtaataaaatatcatgtcctcataratatgtgcaaatattatctgtaaataaaaacccccttgatgttgatcttggcaataattttttggatatgaaatcaaaaacacaggcagcaatagcaaaataaacaagtggaactacatcaaattaaaaagtttatttttttgcttttttaacttttattttaagttcggggtacgtgtgcaggtttgttacacagataaaacatgtgtcatgggggtttattgtacagactatttcatcgcttgagtattaagcctagtacacattagttatttttcctgatgctctccctcctccaaatctccaccctccaataggcccctgagtgtgttattccactcttaatttgttcatgtgttcttatcatttagctcccaca

SEQ ID NO: 462182 - DNA, 592 bp, Homo sapiens
cccaaaattccaaaggagacaataacggttccccttctgagaacgctgcaggccatatgtcaaaaaattatcctcccaatggaaagagtacaccaaaactaatttggagcttcagtaaccatcataagggtcttttgagttcctccaaacttgtctttcttaggacaaaattagaagactctggtcctaaaattaaacaatccaaatgggaggcctacttcaactggcacctaaaaggttctaagcacattcaggattctaacattgcctccctgcaagacactgtccccaaattaactgagaaaaacagttagggaaagatgacaaagccttggaggcccagactttttcctccctgaaggggacctcccttctctctcctctgtcccctgtctccatcctcctttggctgaaatgcctttccctctagattcctcagctcctactaccctgaacctgatcctgttaaaacctgtccttctaaagttaagytcactaatgattcctctaacccccacgtttctcatgttccttggtgcaaggctgaactacaagtcgctgcaaagaattcccaaagtctctgaggaccctg

SEQ ID NO: 462183 - DNA, 467 bp, Homo sapiens
ttgccatttttaacaagttcagaataattcctctttaacagttctaatactaccccaaaacttcgttgctagaaaccaccatttggttttgctcacagtgtgggaggggcatgggagaagtctgtctgggacccatgaggagtcagctgggagctggggctgagcagccacttccacgatggcatcttcactcccatgtctggcacttggggccttcctggcctctccctctcttcctggcagctcatcctccagggcttcacactgtggcytctccagcatggtgagtgcaggcattcctgagacatcttgcatggggtggcagctgacattcctgagtgcgtgtcctggcagggcctggagaagctgcagagctggaaatcccacatgtcatttctgccacatgctagtggccaaccaagtctctgaggatggctcagagtcagggggagggaggaacagactcc

SEQ ID NO: 462184 - DNA, 525 bp, Homo sapiens
ggggacagcaatcccaattctgcaaccaatgggctctgtcactgtggggcctttccatgcctctgcctcctcatctgaaaatgagcgggttggatagatttttcactactgttcctttaagttctaccatgcggaggttttttacattgctaccttcttatgtgacatagttttgcaattaagaactctcaagttcctctttgcagttggtatttgagatgttaagaatggaaacgctgattcccctcagacccgctttgcagataaccctgcattttaccgagatgtcaaagcaggaagtgcttggctggaacatctgccgacagcctcatctctttctgcaagatcatgatgttctgcatgctcctgtggcctcttatttcacgttggtaagaattttatgtttatttattaacctaaggtaatgtggtaaattccatggtggctcacctaacttctgagtaagcttttgytttatttttatttttttccatgtttcctcctggcaagctctccctgcaaatt

SEQ ID NO: 462185 - DNA, 609 bp, Homo sapiens
agtaaagacatagatgtatatttttagttttgattaaaactaaaacaattggtagcccttaytcatatttttctatcattaaaacttatctttaaaaaatgtcttcagtcatatttttcccttacttccattcatatttactctttacttctcttgtccttaccagaatgtatgcagtaagttttcatattgtaacacattcaacaaaagttatatgtgaacataatagctgctttctttaaaacggttactttgagaaactgcatacctatttttttttttttttttttgagacggagtttcactcttgttgtccaggctggagtacagtggcacgatcttggctcactgcaatctctgcctcctgggttcaagtgattctactgcctcagtctcctgagtagctgggattacaggtgctcgccaccatgcccggctaatttttggtatttttagtagagacgggttttcaacatgttggccaggctggtctcgaactcctgacctcaggtgatctgcccacctcagcttcccaaagtgctgggattatgacataagccgccacgcctggcctgcacatttattttaataatgttgtcatagctacag

SEQ ID NO: 462186 - DNA, 609 bp, Homo sapiens
agtaaagacatagatgtatatttttagttttgattaaaactaaaacaattggtagcccttactcatatttttctatcattaaaacttatctttaaaaaatgtcttcagtcatatttttcccttacttccattcatatttactctttacttctcttgtccttaccagaatgtatgcagtaagttttcatattgtaacayattcaacaaaagttatatgtgaacataatagctgctttctttaaaacggttactttgagaaactgcatacctatttttttttttttttttttgagacggagtttcactcttgttgtccaggctggagtacagtggcacgatcttggctcactgcaatctctgcctcctgggttcaagtgattctactgcctcagtctcctgagtagctgggattacaggtgctcgccaccatgcccggctaatttttggtatttttagtagagacgggttttcaacatgttggccaggctggtctcgaactcctgacctcaggtgatctgcccacctcagcttcccaaagtgctgggattatgacataagccgccacgcctggcctgcacatttattttaataatgttgtcatagctacag

SEQ ID NO: 462187 - DNA, 609 bp, Homo sapiens
agtaaagacatagatgtatatttttagttttgattaaaactaaaacaattggtagcccttactcatatttttctatcattaaaacttatctttaaaaaatgtcttcagtcatatttttcccttacttccattcatatttactctttacttctcttgtccttaccagaatgtatgcagtaagttttcatattgtaacacattcaacaaaagttatatgtgaacataatagctgctttctttaaaacggttactttgagaaactgcatacctatttttttttttttttttttgagacggagtttcactcttgttgtccaggctggagtacagtggcacgatcttggctcactgcaatctctgcctcctgggttcaagtgattctactgcctcagtctcctgagtagctgggattacaggtgctcgccaccatgcccggctaatttttggtatttttagtagagacgggttttcaacatgttggccaggctggtctcraactcctgacctcaggtgatctgcccacctcagcttcccaaagtgctgggattatgacataagccgccacgcctggcctgcacatttattttaataatgttgtcatagctacag

SEQ ID NO: 462188 - DNA, 255 bp, Homo sapiens
caaagattaatatgaagtcacagatggctaaatttaagattcaagasaattaacctgccctactgagtatgtcagagtcaaggatacccaaacagtccccagaaaagaacaacttatcacagataaggccagaaggagggctgtttgggaaacattcctcctggggaaagaacaccttcccatgggctgtggaaaatgataagtaagttacattgtccactcccatttccagaggggtttcagagaagaaatgag

SEQ ID NO: 462189 - DNA, 255 bp, Homo sapiens
caaagattaatatgaagtcacagatggctaaatttaagattcaagagaattaacctgccctactgagtawgtcagagtcaaggatacccaaacagtccccagaaaagaacaacttatcacagataaggccagaaggagggctgtttgggaaacattcctcctggggaaagaacaccttcccatgggctgtggaaaatgataagtaagttacattgtccactcccatttccagaggggtttcagagaagaaatgag

SEQ ID NO: 462190 - DNA, 617 bp, Homo sapiens
ttcccaaacccaagacatccagctagctcccctgtgccatctcatctctgcacayccacccttaccacacagggaggccagtgctgagcagcatccgcatgcctgcttagcagcaacactgaagcctgatgatgaatagaggtacagaggtctgtccaggtttacttctttggagctgctctccctattctaggaagacccactgacctattatttgtgtcaggcactttattcctcacaacaatgctggaagattggtataactattctcaaattacagatgaggaaactgaggtctggggatctgtctgtgtcagagatccccaacccccggggcatggacaggtactagtccatggcctgttaagaaccaggccatataccccctgaactccacctcctggtcagatctgtggaagcattagattctcataggagcacaaaccctattgtgaagtgtgcatggaagggatctaggatgcatgctccttatgagaatctaatgcctgatgatctgcagtggaacagtttcatcctgaaaccatccccactgctgccccacctgtggaaaaaatagtcttccacaaaacaggtccctggtaccaaaaaggttgggg

SEQ ID NO: 462191 - DNA, 617 bp, Homo sapiens
ttcccaaacccaagacatccagctagctcccctgtgccatctcatctctgcacacccacccttaccacacagggaggccagtgctgagcagcatccgcatgcctgcttagcagcaacactgaagcctgatgatgaatagaggtacagaggtctgtccaggtttacttctttggagctgctctccctattctaggaagacccactgacctattatttgtgtcaggcactttattcctcacaacaatgctggaagattggtataactattctcaaattacagatgaggaaactgaggtctggggatctgtctgtgtcrgagatccccaacccccggggcatggacaggtactagtccatggcctgttaagaaccaggccatataccccctgaactccacctcctggtcagatctgtggaagcattagattctcataggagcacaaaccctattgtgaagtgtgcatggaagggatctaggatgcatgctccttatgagaatctaatgcctgatgatctgcagtggaacagtttcatcctgaaaccatccccactgctgccccacctgtggaaaaaatagtcttccacaaaacaggtccctggtaccaaaaaggttgggg

SEQ ID NO: 462192 - DNA, 493 bp, Homo sapiens
aatctggttcttaggctctgcctatatccttttacctgtcttgggtaactgccaagaaattaaatcaacaaattttggcctgcagtctggcattaatagatgtgaatttagctaggtttctttcaacacaggctccaggtcaatcgtaatcttatgtgaagtttcttattcaggcatgtctcrttagcaccattaatttcacacaggaattctttttttctccctttttttgtgactaagcaaaatgagaaatatttctctttcaggatatggagaggcttaattaaattctttaattttgtctacatctgcccttatgaatgatagcaaaggaatgggggatatcagaatatgagaaaaagtaatcatctaaaaatttccaagcactttaaaatttattaagctagcataaatatgtgggtgtgatagaggttttcattaggcctcctctcaacatacagtagttaggaatgaagtttagtgtctctccgtc

SEQ ID NO: 462193 - DNA, 560 bp, Homo sapiens
aataaactaaatatctataattaagacaaaacctatgaataaacccaaccttcagcttgcatgtttatgtgtggaatttcactttgtgtaacaaattagaaaagtaaaataagaaagaamaaaatgctgcaaatttccaggcctttaacaaggatgaaaagttgagaaagtagaattgtacttttctaatctttgcaaaactaaaacagttttgaaagttcctttcttaccatttgtttgaatgaagatacactctccactcttagcctcctataaatcttaagccatgtgtattatggtaaaaactagctgaaataggttgaatggaagccaaaataatttacatctaaatgaaaaacatagaaaacagagtaataaaaaaattccaactgaatgggaaaattcattgtatagtattatcttccccatgagtaggttcactaatacacatcggcagaacaataagcaccaacgagatccaaatgacactgaccaacatgatcacagtttacatgtccaaaaggttcaggatctcagtgtaataaaacccaacagagagg

SEQ ID NO: 462194 - DNA, 560 bp, Homo sapiens
aataaactaaatatctataattaagacaaaacctatgaataaacccaaccttcagcttgcatgtttatgtgtggaatttcactttgtgtaacaaattagaaaagtaaaataagaaagaaaaaaatgctgcaaatttccaggcctttaacaaggatgaaaagttgagaaagtagaattgtacttttctaatctttgcaaaactraaacagttttgaaagttcctttcttaccatttgtttgaatgaagatacactctccactcttagcctcctataaatcttaagccatgtgtattatggtaaaaactagctgaaataggttgaatggaagccaaaataatttacatctaaatgaaaaacatagaaaacagagtaataaaaaaattccaactgaatgggaaaattcattgtatagtattatcttccccatgagtaggttcactaatacacatcggcagaacaataagcaccaacgagatccaaatgacactgaccaacatgatcacagtttacatgtccaaaaggttcaggatctcagtgtaataaaacccaacagagagg

SEQ ID NO: 462195 - DNA, 616 bp, Homo sapiens
attttcagcatggtgaggtgataatacatgttggtcccccatgcagaatgctgcctctagcactttagccaaaggagctctacagtctgtccagaagtactgggggacactggtaataacctgagaacacttacagagccttccagaaagtgccctttcacatcatataaacagatcatgggaagctgagggaatgcaaagtcaaggcctcattggagagcrgaaaggaggctgagattggtggagaggagtggctgttacattctaattagaagaatgacatgtgcagggccatgaagcaactaaagatgggatgaaaaacttaacttgtgaatcgcaaaatttgagtaggaaggagctggaaaggcctggaagtgcgaagtgattggcccttggtcagatggctagaagatagagagccaggcatagaacccagaatccaggccatcattttgtggcctcttttatcctaatgacatgttagccagaggtgtcttccaaagcacctgattatagggaagaatgaatgtcacttaccctagagtgagtgaaatagagatgccaggaagatataccaggtttatccagtttctttgcatttttctggcatactgta

SEQ ID NO: 462196 - DNA, 596 bp, Homo sapiens
tatttatacatgatatatgcactgtcataataatgacatattcttaaattgtcaatttctgaaaccacgtatgtgtatcacaaactaatatgaatgtgtgtgtgtgtgtgtgcgtgcacgctcatatttatgtgtgtgtgtatgagtggttttctacacttacactcccctacttgaagagaagtggtrccggctctccctgatttcagccaatgtgggatgattgctgacaccaaaaacaaaggaaatgaaataggataactgtggtttgaggctcacaggtcagatgagaggcaatgaatgagaaagtcaatgagctgaaaatgacttaagtacaggcacctcctaggaattatacccctaataaatgattgtattgaacatttgtttaaactgatgtaaagtactttgaaggttaacatcctttccctccctcacaatattaagtagtgtagcttggaggttgaaagcagattctgggttcaaatccaggttctgtcagattctaccacttaccagctaaatgacgttggacaagtcacaatatctctaagcccttatttctttacttgtaatgtgggagtacaatctgcccc

SEQ ID NO: 462197 - DNA, 473 bp, Homo sapiens
tttgcgctttttgtttgcacaaactcggtccccttctgtttctctacgatgttttgatgcagcatgaggcagtcatgagaacccaccagatacagctgcctgatcctgaatttcccagccaacagaaccaagtgctaaataaaactctttttaataagttacccactctcaggtattctattatcgcaacagaaaacagtttaagacacctgctaggctcctaaccttgaggggctagaaaacaaagccagaggtccartaccagcctcctcagagttagaatacacagctcatgagtgctgagctcagccttggcccctacaatcttccagaaatgaggccacttggctgagcccattatatgcaacattcagacccccaagggcatcaaagaagacaaaagcagaaaaacctatccaagaaacagcaacttcaaaggttgaagcaacatcagaccacacaggtgagaacca

SEQ ID NO: 462198 - DNA, 473 bp, Homo sapiens
tttgcgctttttgtttgcacaaactcggtccccttctgtttctctacgatgttttgatgcagcatgaggcagtcatgagaacccaccagatacagctgcctgatcctgaatttcccagccaacagaaccaagtgctaaataaaactctttttaataagttacccactctcaggtattctattatcgcaacagaaaacagtttaagacacctgctaggctcctaaccttgaggggctagaaaacaaagccagaggtccagtaccagcctcytcagagttagaatacacagctcatgagtgctgagctcagccttggcccctacaatcttccagaaatgaggccacttggctgagcccattatatgcaacattcagacccccaagggcatcaaagaagacaaaagcagaaaaacctatccaagaaacagcaacttcaaaggttgaagcaacatcagaccacacaggtgagaacca

SEQ ID NO: 462199 - DNA, 473 bp, Homo sapiens
tttgcgctttttgtttgcacaaactcggtccccttctgtttctctacgatgttttgatgcagcatgaggcagtcatgagaacccaccagatacagctgcctgatcctgaatttcccagccaacagaaccaagtgctaaataaaactctttttaataagttacccactctcaggtattctattatcgcaacagaaaacagtttaagacacctgctaggctcctaaccttgaggggctagaaaacaaagccagaggtccagtaccagcctcctcagagttagaayacacagctcatgagtgctgagctcagccttggcccctacaatcttccagaaatgaggccacttggctgagcccattatatgcaacattcagacccccaagggcatcaaagaagacaaaagcagaaaaacctatccaagaaacagcaacttcaaaggttgaagcaacatcagaccacacaggtgagaacca

SEQ ID NO: 462200 - DNA, 473 bp, Homo sapiens
tttgcgctttttgtttgcacaaactcggtccccttctgtttctctacgatgttttgatgcagcatgaggcagtcatgagaacccaccagatacagctgcctgatcctgaatttcccagccaacagaaccaagtgctaaataaaactctttttaataagttacccactctcaggtattctattatcgcaacagaaaacagtttaagacacctgctaggctcctaaccttgaggggctagaaaacaaagccagaggtccagtaccagcctcctcagagttagaatacacagctcatgagtgctgagctcagccttggcccctacartcttccagaaatgaggccacttggctgagcccattatatgcaacattcagacccccaagggcatcaaagaagacaaaagcagaaaaacctatccaagaaacagcaacttcaaaggttgaagcaacatcagaccacacaggtgagaacca

SEQ ID NO: 462201 - DNA, 426 bp, Homo sapiens
  misc_feature (1)...(426): n = A,T,C or G
tgtctgggtgacagagcaagatcctgtctccaaaanaaaaaaaattatttttataaaaaagtggtattgggcctgtctaattgcaaagccacattctttactgcatgctttagtccattgttttttaaactgcagatcatgaccacgaatgggtcatgaaaccaatttggtaggtctccaacagcactttgggggaaaaargggtagaatagagagtatcacatagtatggacaagcattgtttcttgaaatttttgtttttgctatgcacgtatatatgtgaatattgaggtctggtacaagatatatttctcactgtaggtcacagtaaaacatgttggtaagctactattttcttggctatgggactatatgtcatctaatcactttttaaaaacagattacaaactgtaggccttagaaagg

SEQ ID NO: 462202 - DNA, 540 bp, Homo sapiens
acctgacttcttgtaagtccaaaaaattacagtaaaacaatacagtccaatcaagaaagcacgagattgtgaatcaacagacctacaaggaccacctataaaactgcttccctttagaagaaagagtccttagagaacttaaccacatactcccatgtccttttgagtcctggcaggtgacagagtatcagstgtatggtctagcagggtctgccatggccagtcaacatgacccttattcaaacgcaaaatgcaccccagctttttttcatgtgtgtacaggttgggatggtgtaacagcaccttttttagagcactgttcgtacttgtctgcttaaattcattaactttctcattttgactaagccatttgataggattaagatgtccacaatataatgcatgaacttgaccctattatcccctccaatttaaaatatgtaagatatcatgtgcttttcctcaattaagcattgagaaatagtaagtgcttctttctcttatttccactgaaacatcaattggctgatacctagtttt

SEQ ID NO: 462203 - DNA, 540 bp, Homo sapiens
acctgacttcttgtaagtccaaaaaattacagtaaaacaatacagtccaatcaagaaagcacgagattgtgaatcaacagacctacaaggaccacctataaaactgcttccctttagaagaaagagtccttagagaacttaaccacatactcccatgtccttttgagtcctggcaggtgacagagtatcagctgtatggtctagcagggtctgccatggccagtcaacatgacccttattcaaacgcaaaatgcaccccagctttttttcatgtgtgtacaggttgggatggtgtaacagcaccttttttagagcactgttcgtacttgtctgcttaaattcattaactttctcattttgactaagccatttgataggattaagatgtccacaatataatgcatgaacttgaccctattatcccctccaatttaaaatatgtaagatatcatgtgcttttcctcaattaagcattgagaaatagtaagygcttctttctcttatttccactgaaacatcaattggctgatacctagtttt

SEQ ID NO: 462204 - DNA, 512 bp, Homo sapiens
cattagcagtcactcatcaattctrttctcccataccccacccctttattccctctagtcctagacaaacactaatctgctttctgtttctatggatttgcctattctggacattttatataaatgagatcatataatatgtggtcttttgtgactggcttccttcacttagcagaatgtttttgaggttcatctatattgtggcatctatctgtacctcattcctttttattgccaaataatatttcattgtatggatatttcacattttgtttatctgttcatcagttgatgacaaatgggttgtttctactttttggttattgtgaataaagtttctgtgaatatttgtgcacaagtttttgtatggaaatatgttttcattgcttttgggtagattcccaagataaaagaattgctgggtcatatggtaactctatttttagcatttagagggactgtcaaacttttccaatgtggctacaccattttactttcccactagcagtgta

SEQ ID NO: 462205 - DNA, 512 bp, Homo sapiens
cattagcagtcactcatcaattctattctcccataccccacccctttattccctctagtcctagacaaacactaatctgctttckgtttctatggatttgcctattctggacattttatataaatgagatcatataatatgtggtcttttgtgactggcttccttcacttagcagaatgtttttgaggttcatctatattgtggcatctatctgtacctcattcctttttattgccaaataatatttcattgtatggatatttcacattttgtttatctgttcatcagttgatgacaaatgggttgtttctactttttggttattgtgaataaagtttctgtgaatatttgtgcacaagtttttgtatggaaatatgttttcattgcttttgggtagattcccaagataaaagaattgctgggtcatatggtaactctatttttagcatttagagggactgtcaaacttttccaatgtggctacaccattttactttcccactagcagtgta

SEQ ID NO: 462206 - DNA, 512 bp, Homo sapiens
cattagcagtcactcatcaattctattctcccataccccacccctttattccctctagtcctagacaaacactaatctgctttctgtttctatggatttgcctattctggacattttatataaatgagatcatataatatgtggtcttttgtgactggcttccttcacttagcagaatgtttttgaggttcatctatattgtggcatctatctgtacctcattcctttttattgccaaataatatttcattgtatggatatttcacattttgtttatctgttcatcagttgatgacaaatggrttgtttctactttttggttattgtgaataaagtttctgtgaatatttgtgcacaagtttttgtatggaaatatgttttcattgcttttgggtagattcccaagataaaagaattgctgggtcatatggtaactctatttttagcatttagagggactgtcaaacttttccaatgtggctacaccattttactttcccactagcagtgta

SEQ ID NO: 462207 - DNA, 512 bp, Homo sapiens
cattagcagtcactcatcaattctattctcccataccccacccctttattccctctagtcctagacaaacactaatctgctttctgtttctatggatttgcctattctggacattttatataaatgagatcatataatatgtggtcttttgtgactggcttccttcacttagcagaatgtttttgaggttcatctatattgtggcatctatctgtacctcattcctttttattgccaaataatatttcattgtatggatatttcacattttgtttatctgttcatcagttgatgacaaatgggttgtttctactttttggttattgtgaataaagtttctgtgaayatttgtgcacaagtttttgtatggaaatatgttttcattgcttttgggtagattcccaagataaaagaattgctgggtcatatggtaactctatttttagcatttagagggactgtcaaacttttccaatgtggctacaccattttactttcccactagcagtgta

SEQ ID NO: 462208 - DNA, 567 bp, Homo sapiens
tcttccttccaatattaacagaatcttcccaatcttctaatatttcagtgactgttagaacataaacatatgttctgtgctttcggtcttggttctgctcaaatatgcccagaagtctgcctagttttcctttgactccagcctcctcataaacttccctcacggcagcaccgccaggttcctcctcgggttccattcctcctcctgggacaatccactggtctgggtaccggctgctactcaccagcagcacctcgtcctcctgctcgctccggaagcacaggcacgccgcccgcttcttgaagccctcgcggtcgtaggtccgcgtctggttgggcttgaacttcatcatagaggcgggctcctgctgctgctgctgctgctccggccgccgccaccccgccggggagtgggggcgagggcgagtcgggcgcaggagcgccygggagcgctagtcggtgcgggaggtgcggcgaggccggtcagtcccggggccggcggccgctccgacgcgggcgggacgggacgctagcgcgggtcactggaaccagggtgccgagatgaaag

SEQ ID NO: 462209 - DNA, 553 bp, Homo sapiens
tgttgttttcaaggttttgctattacagtgttacaacgaatatccttagcttagctggtctccttgtcttatacaaattttactgacctttcaagatccygctttcatcccagctcctctgggaaagccttccctgaatcccccagcccacagcggcaaagtcttggtactcaaagttgcttgtgcatctttggtatcatcccactgccaagcacacagctacgcaaagtaaggcacttaagaaatattcgctacacggatgaacaaatgaatgaatgaatggggcagcaccactccgtgatggctctattcctttttaatggactttggcgccttggcccactttccttctttgacagcactggtcctactccagagcattcctctagctagcaaagcagtgtgtggatgtgtgggtgtaggtggcgatacagacctcactggatgaggaccgcctctccctgcaagttcacgatcccggcaaactccagtgcttgaagttcagagtcctaccccacccccctcacccccacgccccttctgcactggtcaa

SEQ ID NO: 462210 - DNA, 553 bp, Homo sapiens
tgttgttttcaaggttttgctattacagtgttacaacgaatatccttagcttagctggtctccttgtcttatacaaattttactgacctttcaagatcctgctttcatcccagctcctctgggaaagccttccctgaatcccccagcccacagcggcaaagtcttggtactcaaagttgcttgtgcatctttggtatcatcccactgccaagcacacagctacgcaaagtaaggcacttaagaaatattcgctacacggatgaacaaatgaatgaatgaatggggcagcaccactccgtratggctctattcctttttaatggactttggcgccttggcccactttccttctttgacagcactggtcctactccagagcattcctctagctagcaaagcagtgtgtggatgtgtgggtgtaggtggcgatacagacctcactggatgaggaccgcctctccctgcaagttcacgatcccggcaaactccagtgcttgaagttcagagtcctaccccacccccctcacccccacgccccttctgcactggtcaa

SEQ ID NO: 462211 - DNA, 557 bp, Homo sapiens
ctaaagaaagtagcaataaagaagagtagattgctttttttccaagcttttgtgtttttaaggcaccccgctggttttgacattcgttgctccagctgaactgctctatgctgaagccctgcaggtctcaagtgtttggttcagagtaatttcaggccatatgaatgctttcttaagtatcattggaatttactgggctggctgtctgccagctattaccatatttagcatgaagagacctggggaatgaggacatttctgatcaaccaaggaaggaaacctatttgaaggattacaatattttcttttttttttttaatggtgtagttcagaaaacgccagttagactgagactcaratttatgtccactggtctttgtttctgtgccccatcccaaaattaatttatgaataggaaaagagatttgatagtgaagttctttctcactctgaagtctaatactgtttctgggaggaagtaagagaattattatgcccacactgtgcactgaaaggcttaaccagcaggtgaagctgttgattaaaaacataggttg

SEQ ID NO: 462212 - DNA, 561 bp, Homo sapiens
  misc_feature (1)...(561): n = A,T,C or G
atggtagtgccttagtcgtttaactgcctgtcactttaagattttgaaatactggttctygttgtgtaagccagacacatcttgagaatattttacggggcaacttgccctttctgaaacctcagtcatcctgaaaagtaactctgtacctccttgactttaatttttctgtcttaattctatttgtatacaatgtttgtggtgtctgattctctgtctcgtattgctgaaactcatggccttgaatttctgggtcactcttaaaaaatagacataacttgattactaatgaaaaagtgactcattttcttccaggcaaaggctgacactttttgtcacagnttgtgacatatttttggggggtaattaggagacatcacctattcttttctaaattttataagaatggaggatagcctcatgagatgggaagtgagtaagataagcgtttatgcttgtagagaggatgcataaaaatgaaatctggataaagttctatctgaatttacctttttaagtggttgattccctgtgagcttaaatttagtgcttctcttgcca

SEQ ID NO: 462213 - DNA, 574 bp, Homo sapiens
gactttggaaagcacctttgtcactcattttgttttataagtgaggaggctgaggtgtaatacagctaagcgaattagcctttattacataactcattagratgtagactgggactaagagctgtttctccagatcccattaggcaatctaaagattctgcactatttctttttcatttttggtatccaaataggtacagttgtttttgatctaggaaaatccttttagactaaacagtaagctttttaaattactctgcttttagatattttttggacttcagaactttgaaggtggtcatccaccaacattggggaatggaaagaaggctccaacacttttctttctagagatcttctttaattttcaatggcagtcactacagaatctagcagttcatgctattgaggccactttgtaggatttttttttttttttagtcagggctccaggtccctggtggtttatgtagtcagtcttatcaacaaccgatgaaagaccaataaaagtgcaagagggaatgaggactgtgtgtgtgtatgtctgcacatgcacacatgcctctctgtgtgt

SEQ ID NO: 462214 - DNA, 549 bp, Homo sapiens
ttcttttcctgtgggaaacttttaatttggaagcatgcaacctaatgtgggaaccaagattaacattttctgaaatacttctacaagaaaagcagaaatggtctgtccaggaagctgaatttacatagtagaaaaatgagctgccctgcagtatttggtagtctttgtgtattrgttgtgataaaagtgtgtatgtgtgtgtgtacgtgtgtgagagtgagagattgtatacttgtctttgtttccttcacatacaactagtaaggccctagaaaaactacactagaaagtgtgttttaccacaagcgtcccagttctggacaccaatctatacacaaatacttttttttaaagttctttttgtttttccttcttgctgagtaagctatagtatttccttttttttctttctttttatttgagagaaggggggttgagagtagagtgggaatggcaagaagtagtatgacagagcttcttctctttttttcccctctttaccaggaagttaactagaagtcctcatgcatgtttttaaaacaaagttgg

SEQ ID NO: 462215 - DNA, 439 bp, Homo sapiens
gaagggaagcatgatgtttctcactggaaattaaaaagatttcaatataggggacagtaaacaagattgtggaaataatacggagtgttcgagttatggattactaaagagtaagatggttagatgattggaatgggacagacargcagatcagagattgtaaagaacttggatttgaaaggcttggtattaatactgttgctagtttctgagcagaagaatgacatgaaaattatgcttaggaaagattattcttttagtcatatgcttaggttcagcaaggaatttccagactgtccttagggagaggagaggtatggataggatgctggtccatttaggatgttagagctgattgaataggtgctagtcttggggcaagacttagtcatacactttcagttaagtactgtttcattgcaaggtctaggtgaagata

SEQ ID NO: 462216 - DNA, 450 bp, Homo sapiens
tgatggatttaaaaggaatgaatgatagttccaattattgggttcaaaaaacatgtgctacaagtataagatgagaaaaatagggtacactagtagttcatgtgaaataaggctctgaatattttagctgagtgtgtattccatagcacatagtagtattttgtggcttctaaaaaagtacacatatccattgggtatgagtcggagcrttattctttcttgaactgcgctctcacgatgcctcctcagtttaagaacttactctgaaatagtaaaagcatagtgtccagatcaggaggtcatggttcagctctgtgctgcactggtaagaacatgtgttaagcctttttccattttgagcctcactttttaaagaggtttttgatgaactggagtcatccagtgatggggaggcaggatagcctagtgttgaagcacacgcactctaga

SEQ ID NO: 462217 - DNA, 563 bp, Homo sapiens
tgacaagctaacaagtggtaggggtcagatttgaacctatgttgcaaccattttagagtcctatatgttttccattatttatatcatcttggagaactaaaaaaggtgaaagttacagagtcagccartgtcatagcaggaattaaattcaaggtgttctgatttccagggcagcctacaaatatccaccatattgaaagaactgtttgaatggatatgtttaatgttccaagaatttatgaaacttaaaaatatatgttgatactacagtttgaaaaggacccagaattggaaaagctgcttgttcatgagtgtcccttgtctctactgtcctgtagtcagtgccccctcaaagttggatgcatctgagtggagatgcttttctgtcacctaaagtcacacatttacctttgatccagaccctccccagaagcagtgcttttgaaatctcttctcctcttctttttgtttgacaaaatataaatgatagtttatttctagaacgatgccaaattcaataaagcaatgatggagttgtgtttcgttttctggtcaagttgaca

SEQ ID NO: 462218 - DNA, 610 bp, Homo sapiens
cttccaaactgacttggagctgtgctgaggtgttcatggcctcaagcattcaagcargttgattggatatgaggtgtgatattccttttcctcaagtcatttatcctctggagatcctaacctaacctaatctctcctaacctaaaaacaggagcagacccagggtcctgactgggcattctcattatgcttcctaaaaccattaggatctcttcgtggtcacatccaacagcctttctctttctcaggcctgcagctcactgcatgtggtgctgcctctcacattctcctctttaattagaggtcagccactctaactccagccttcatcacactctgcctctagggtcttctgaatgctgtctttgagggtcttctcagtctcttccttcctctttatcttttatcaaaggcactcttttaatcttttggttcctttctgttgcccctccattctcatctgtttatatgttcgctttaaggtcataaacattattgagtgcttgctatatgcctagtactgatataaacaagatatggcttttgtgcattcttgtgatggaacagatacatatataaaaccaagcaaaacacaatgtgaaatatgtaa

SEQ ID NO: 462219 - DNA, 543 bp, Homo sapiens
aaaaaaaaaaaaagtaaaataaaattatctgtcttctggaatacttataatttacattaaagcagacattgaaatcttttcagccagaacctatacctgtaaccatatagccaaarttacatttgtttaaaagtgaattttcatttttgctcctcccctttttcattctcctattcccccccccccaccttttctactggtgtagcatttttttctattgatgtaattttgatttccagttacagtaaagacacttgactggataccatacaagagatacaagaggcaactatatatatatatatatctgtgtgtatgtgtttgcatgtgcgtgtatgtatatattctatattaaataggctgtagaaatcttagtattacatacagcattgatactagggaaaacacattccacaatggcaaataattgcgtattcatttttattcttctcagtgagacaagggcctgcggttattgattagaccagctttgtctttaattcccttccagtaatgaagaggaatactcttgcctgagagaac

SEQ ID NO: 462220 - DNA, 543 bp, Homo sapiens
aaaaaaaaaaaaagtaaaataaaattatctgtcttctggaatacttataatttacattaaagcagacattgaaatcttttcagccagaacctatacctgtaaccatatagccaaagttacatttgtttaaaagtgaattttcatttttgctcctccyctttttcattctcctattcccccccccccaccttttctactggtgtagcatttttttctattgatgtaattttgatttccagttacagtaaagacacttgactggataccatacaagagatacaagaggcaactatatatatatatatatctgtgtgtatgtgtttgcatgtgcgtgtatgtatatattctatattaaataggctgtagaaatcttagtattacatacagcattgatactagggaaaacacattccacaatggcaaataattgcgtattcatttttattcttctcagtgagacaagggcctgcggttattgattagaccagctttgtctttaattcccttccagtaatgaagaggaatactcttgcctgagagaac

SEQ ID NO: 462221 - DNA, 543 bp, Homo sapiens
aaaaaaaaaaaaagtaaaataaaattatctgtcttctggaatacttataatttacattaaagcagacattgaaatcttttcagccagaacctatacctgtaaccatatagccaaagttacatttgtttaaaagtgaattttcatttttgctcctcccctttttcattctcctattcccccccccccaccttttctactggtgtagcatttttttctattgatgtaattttgatttccagttacagtaaagacacttgactggataccatacaagagatacaagaggcaactatatatatatatatatctgtgtgtatgtgtttgcatgtgcrtgtatgtatatattctatattaaataggctgtagaaatcttagtattacatacagcattgatactagggaaaacacattccacaatggcaaataattgcgtattcatttttattcttctcagtgagacaagggcctgcggttattgattagaccagctttgtctttaattcccttccagtaatgaagaggaatactcttgcctgagagaac

SEQ ID NO: 462222 - DNA, 543 bp, Homo sapiens
aaaaaaaaaaaaagtaaaataaaattatctgtcttctggaatacttataatttacattaaagcagacattgaaatcttttcagccagaacctatacctgtaaccatatagccaaagttacatttgtttaaaagtgaattttcatttttgctcctcccctttttcattctcctattcccccccccccaccttttctactggtgtagcatttttttctattgatgtaattttgatttccagttacagtaaagacacttgactggataccatacaagagatacaagaggcaactatatatatatatatatctgtgtgtatgtgtttgcatgtgcgtgtatgtatatattctatattaaataggctgtagaaatcttagtattacatacagcattgatactagggaaaacacattccacaatggcaaataattgcgtattcatttttattcttctcagtgagacaagggcctgcggttattgattagaccagctttgtytttaattcccttccagtaatgaagaggaatactcttgcctgagagaac

SEQ ID NO: 462223 - DNA, 540 bp, Homo sapiens
cccactagcaggacatatgaaagttgtgatgagttaagctgagtcagacacatattcctgcctatttcacatgtatcaacatcctgtstaggaaccagggacaactgattaacaatgtaagcacagaatagctttaagaaaagctaactgacccatctggggaaagaatactcaaattctgctccatttctgtcatgctctgatgcagctaaccaaacagaaataaagagaatcctttcacatcatgagaaatgaaattcagatttagggacattataaaattatgcggtatcatgaaataagaactgctctggaaatcagaacctgggttctagctctggcttttccatatactaaccatatggtctaaaggaattcccttaagctatttgagactgattattttcatctgtaaaactaaaataatgtaaccagccctccattcttaccagagttcatttgtggcccaaataaatcatgtctattaaggtgattacaacctagatagcattatttaatgtaaaatattattttataata

SEQ ID NO: 462224 - DNA, 540 bp, Homo sapiens
cccactagcaggacatatgaaagttgtgatgagttaagctgagtcagacacatattcctgcctatttcacatgtatcaacatcctgtgtaggaaccagggacaactgattaacaatgtaagcacagaatagctttaagaaaagctaactgacccatctggggaaagaatactcaaattctgctccatttctgtcatgctctgatgcagctaaccaaacagaaataaagagaatcctttcacatcatgagaaatgaaattcrgatttagggacattataaaattatgcggtatcatgaaataagaactgctctggaaatcagaacctgggttctagctctggcttttccatatactaaccatatggtctaaaggaattcccttaagctatttgagactgattattttcatctgtaaaactaaaataatgtaaccagccctccattcttaccagagttcatttgtggcccaaataaatcatgtctattaaggtgattacaacctagatagcattatttaatgtaaaatattattttataata

SEQ ID NO: 462225 - DNA, 233 bp, Homo sapiens
tgctcattgttcatatgtcccaggtggagttcagaaaatattctcttcatttccacaaagggraatagtgcctggagatggttttcttttaaaaagtccttttcataatgcagtgcccttccttccattgcccttcattccattgcttcccatgcttgccaagagactaaaatgttacttatagtaatagtcactatctcaatgtaaatagcacccttatttgatgagaatta

SEQ ID NO: 462226 - DNA, 233 bp, Homo sapiens
tgctcattgttcatatgtcccaggtggagttcagaaaatattctcttcatttccacaaaggggaatagtgcctrgagatggttttcttttaaaaagtccttttcataatgcagtgcccttccttccattgcccttcattccattgcttcccatgcttgccaagagactaaaatgttacttatagtaatagtcactatctcaatgtaaatagcacccttatttgatgagaatta

SEQ ID NO: 462227 - DNA, 555 bp, Homo sapiens
ccctataattctttttccctaagccaaagcctttttcaagggtctcttatgttgcctgggaacctcatcactaacaactctgagtcctaatgttgacaayccctgcttcccaaagctgtgcactgctccctggtccattctttgaatactattgccagaatagtatcgtctccatattatgactcaatttttactctttttgtcttaaggcattttactctcatgtgttgtgcagttataatccaagtatgaaatccaattaacagaattttatcatagatgtgctagaagctacaaggatttggtctgtttctttcttagttttcagttagccaatcttttctgaaagaaattgaagccaccctcctcttagaaaaacaatccttctttcttcattttattttcatgggctgcttctaggagtatattgaattctgccttccatatttctaatcaggcttcacagtttcttccttttctgtccctttctctctgttcctatttctgccatatcaactaaggctttccttagctcttgctttacctatagcaata

SEQ ID NO: 462228 - DNA, 522 bp, Homo sapiens
ccaggtgaacatcttggtcagscgccctacctgtagtctgcggtctctgaggcccattcgcactgcctccatgccttcctttggagaaatgacagcctcagccctccggggtttctatcaagtgccacatctgctctccacctctcagggagacaactgaaccttcatctctcacctcatgtgctgatttcacttcccaatttcatttccttctccccatgaccccaccctccatcatggctcctcccatgccctggatgagactctgtgcctgctcctggaagcgttcaggcacactcaccctcccaagcaagccctacatttccattcctctgcctttggctgcttcttgcttagaagccctaaaacatgaaggaggtaatggtattacctgaatggtggcttcagcccggatcccaggtgtcagcctgccctggctggaagctagctggccagcaccaggccccatccctttcctggggtccctgtttctcaagtgaccatctatcctctggtgccaga

SEQ ID NO: 462229 - DNA, 522 bp, Homo sapiens
ccaggtgaacatcttggtcagcygccctacctgtagtctgcggtctctgaggcccattcgcactgcctccatgccttcctttggagaaatgacagcctcagccctccggggtttctatcaagtgccacatctgctctccacctctcagggagacaactgaaccttcatctctcacctcatgtgctgatttcacttcccaatttcatttccttctccccatgaccccaccctccatcatggctcctcccatgccctggatgagactctgtgcctgctcctggaagcgttcaggcacactcaccctcccaagcaagccctacatttccattcctctgcctttggctgcttcttgcttagaagccctaaaacatgaaggaggtaatggtattacctgaatggtggcttcagcccggatcccaggtgtcagcctgccctggctggaagctagctggccagcaccaggccccatccctttcctggggtccctgtttctcaagtgaccatctatcctctggtgccaga

SEQ ID NO: 462230 - DNA, 497 bp, Homo sapiens
aataattcaatacctgccagctattcttattccacatccaagccctttcgcctgctgctgggtgaaaacacatgtcagtgtttcctgacggtttccacaaagaagattccaaaattacaacctgccagtctgaagaatctccaaaacatcccgcacgcatcctggaggcgcggscttggggatgggactgcccgcccgggtcctgaacaggatgcgtgcgcgcaggcacacacacaccagccagcctgtgtgtgcggccggagtccggtgcggtcccgggtgagcagcgcgtggctggtgggcggggcagagccattgttcgcaggcgtaccgagtcccccgcgctcgcccgggagggaggcggggcttcccgcgtcccccaagctccagatcctggggtggctgccacgtctccctgccacgcgcctggggggacgggaagacgggacggagatgttagtggtgggcgccccccgagggttcaccactgtttcctg

SEQ ID NO: 462231 - DNA, 497 bp, Homo sapiens
aataattcaatacctgccagctattcttattccacatccaagccctttcgcctgctgctgggtgaaaacacatgtcagtgtttcctgacggtttccacaaagaagattccaaaattacaacctgccagtctgaagaatctccaaaacatcccgcacgcatcctggaggcgcgggcttggggatgggactgcccgcccgggtcctgaacaggatgcgtgcgcgcaggcacacacacaccagccagcctgtgtgtgcggccggagtccsgtgcggtcccgggtgagcagcgcgtggctggtgggcggggcagagccattgttcgcaggcgtaccgagtcccccgcgctcgcccgggagggaggcggggcttcccgcgtcccccaagctccagatcctggggtggctgccacgtctccctgccacgcgcctggggggacgggaagacgggacggagatgttagtggtgggcgccccccgagggttcaccactgtttcctg

SEQ ID NO: 462232 - DNA, 497 bp, Homo sapiens
aataattcaatacctgccagctattcttattccacatccaagccctttcgcctgctgctgggtgaaaacacatgtcagtgtttcctgacggtttccacaaagaagattccaaaattacaacctgccagtctgaagaatctccaaaacatcccgcacgcatcctggaggcgcgggcttggggatgggactgcccgcccgggtcctgaacaggatgcgtgcgcgcaggcacacacacaccagccagcctgtgtgtgcggccggagtccggtgcggtcccgggtgagcagcgcgtggctggtgggcggggcagagccattgttcgcaggcgtaccgagycccccgcgctcgcccgggagggaggcggggcttcccgcgtcccccaagctccagatcctggggtggctgccacgtctccctgccacgcgcctggggggacgggaagacgggacggagatgttagtggtgggcgccccccgagggttcaccactgtttcctg

SEQ ID NO: 462233 - DNA, 627 bp, Homo sapiens
ggcttatgaagaaggtgggcagcagaaggtgaatgatgcaagcatcctaatagaatattgtacttatarcagtagaagtaataaaaacacaaagaaaaaacttttgagaaaaattcaaagacaaattgtaatagctttcagatgtttgagaaagtcaatacacatataaaacaaacaaacgaaaagcaggacctgcctggttgctgttagcagcagccagactgacagtgaataaagcagtgggaatgggtctctattgtttactaaagcaccagagacaactctgaggacagctgatacaagagctctggcagaagcagaaatttatttaaccccaatacctctatcacttgtcaatccttaatttgaaaaatacaggcaagtcactggttacatactgttgttcagcctataaattcctttggaatcaggtactaaacacaaacaggaaaaataaaccctctgcatttttgctgtcatcagattttctaagaggaaaagtagtgaacatattttacttcacatttagttttagacaaaatatgttcacctatttaacaaacattcactgagtgccttcactgtgccagcatctatttctgaaactgaaaatataaaggagacaaa

SEQ ID NO: 462234 - DNA, 609 bp, Homo sapiens
gtcaacctatgtgatagcatttttccacaaacaattcccattttcttattattccctatgaaccaatattgttagagatattgtttcaactctttcctttttacttattagctctctcccacattgtatgaaaattgaaagcctcttccttagataacatccaatataaatgtattcaatctagtcattatcaccccctaagtgttttggtacccttctcctcttataaaacataaaggataaaggaatatacattatatcaatayctgcatgtggacactacctagacatagagaagttgagttcaggcatgagtctcccatagaaaatgaagtctgttaaaactgttgttggaggcaccaactaggagcagctgtagcttgagataaccaagtaggaagaccatagcctggagacctctaaccaggatataagaagcacagtttctacaagcaatgggactgacgaagtaaggagccagtgaacggctcttctggacaatatttggtacatttgtggccttagaataattactaggattcagaggtcagaagccagtagtcccaaagagcgatggttttacaaatgtgtcaaattcaagcatgtttt

SEQ ID NO: 462235 - DNA, 609 bp, Homo sapiens
gtcaacctatgtgatagcatttttccacaaacaattcccattttcttattattccctatgaaccaatattgttagagatattgtttcaactctttcctttttacttattagctctctcccacattgtatgaaaattgaaagcctcttccttagataacatccaatataaatgtattcaatctagtcattatcaccccctaagtgttttggtacccttctcctcttataaaacataaaggataaaggaatatacattatatcaatatctgcatgtggacactacctagacatagagaagtkgagttcaggcatgagtctcccatagaaaatgaagtctgttaaaactgttgttggaggcaccaactaggagcagctgtagcttgagataaccaagtaggaagaccatagcctggagacctctaaccaggatataagaagcacagtttctacaagcaatgggactgacgaagtaaggagccagtgaacggctcttctggacaatatttggtacatttgtggccttagaataattactaggattcagaggtcagaagccagtagtcccaaagagcgatggttttacaaatgtgtcaaattcaagcatgtttt

SEQ ID NO: 462236 - DNA, 609 bp, Homo sapiens
gtcaacctatgtgatagcatttttccacaaacaattcccattttcttattattccctatgaaccaatattgttagagatattgtttcaactctttcctttttacttattagctctctcccacattgtatgaaaattgaaagcctcttccttagataacatccaatataaatgtattcaatctagtcattatcaccccctaagtgttttggtacccttctcctcttataaaacataaaggataaaggaatatacattatatcaatatctgcatgtggacactacctagacatagagaagttgagttcaggcatgagtctcccatagaaaatgaagtctgttaaaactgttgttggaggcaccaactaggagcagctgtagcttgagataaccaagtaggaagaccatagcctggagacctctaaccaggatataagaagcacagtttctacaagcaatgggactgasgaagtaaggagccagtgaacggctcttctggacaatatttggtacatttgtggccttagaataattactaggattcagaggtcagaagccagtagtcccaaagagcgatggttttacaaatgtgtcaaattcaagcatgtttt

SEQ ID NO: 462237 - DNA, 458 bp, Homo sapiens
tcagttccaggtgtgcctctttaatatgtttggcttggaccaagttgttgaagttttcaagcctaagcttttctaactctaagtgaggatgataatagttgtttctatttcrtagaggtgttgtgaagagtactggaggtaatatatgcaaaatgctcaacacagtgcctggcacaaaattagtgctcattataaatcagctgctgtggtataggttgctagttccctaatacacatgctactcttcctttgttctaacaaaatcacagttttgttgggagtgcattatgcctactataatctgttttccaggccgtttcgcaggtagaggcgaccatgtaaaatagatatcattaatgagatgccaggtaacttatagcctcaaggaatgctcaaaaagagcagaggcagtttttactggcagcattcattttgcttttacctttctccctggctgg

SEQ ID NO: 462238 - DNA, 590 bp, Homo sapiens
tatttcaagtgctcgatatccatgtgtggctagtggccactgcattagacactttattttcttataactctccaaaaaataccaatctccatgactagttttttactctccatttgcttgaacatctggtatcaccaactctattttttataacatcttacaaattttgaaagactccagccccaaccataactgcaaaagcttacccatatcctctggtatgaattgatctttttactgttttctcattgtattttgtagttcttcgccacacttaacctaaacctttcttattgtggttatgttcgtattcataggtgttmcctactgtgctattagctattagaagccacagactgggcctagttgatctatggataccccatatagtccttaatatgatgccttatatacagtagctaatcgataactgtcaaaatgaatcaaatcaaatggccagggaaggagaaacagtaaagcatatttgaaaaatgatccattttgttatgtgatttgtttgatgttagaatggctcaatttagatgatattttaagactgatatctgtagtgtgctaaacatttttggtgt

SEQ ID NO: 462239 - DNA, 603 bp, Homo sapiens
gtatttgtaagtggaatgttggcgaggacgcaatcaatgtccctatatatgtttaaggcaacaaatgtggtaccacttcaatggagaataagtagatgcctttcttgttaaaagcaactaaatcacaattgaaatgagtaatcaatttgaaagaacccttttacagagtcaccattgatcattttcttgcactttacctcatgcatctgcatttgcttgatggaacttaaaccaagacacgcataagtttactgtctaggacattaagaaatacaccattgaagtaaaaataaagtattttaagattcagattgtaatgtaaaaacaaacatyagagctttaaatagtcatgtttcacaaagtttcaagaaaagacagacctacaaaacactatctggaattaatttataataaaatctttgaatcctgctccctttttgcagatcatattttgaaattcttgtttaaagctatgttttattcctttaaggaagtctaatttacttttaatatttgtcctctagaatctatttgtttgaaagagacaaaaatttatgttcccattatcagtattttattttcaaagactgtgtctattaagtc

SEQ ID NO: 462240 - DNA, 603 bp, Homo sapiens
gtatttgtaagtggaatgttggcgaggacgcaatcaatgtccctatatatgtttaaggcaacaaatgtggtaccacttcaatggagaataagtagatgcctttcttgttaaaagcaactaaatcacaattgaaatgagtaatcaatttgaaagaacccttttacagagtcaccattgatcattttcttgcactttacctcatgcatctgcatttgcttgatggaacttaaaccaagacacgcataagtttactgtctaggacattaagaaatacaccattgaagtaaaaataaagtattttaagattcagattgtaatgtaaaaacaaacatcagagctttaaatagkcatgtttcacaaagtttcaagaaaagacagacctacaaaacactatctggaattaatttataataaaatctttgaatcctgctccctttttgcagatcatattttgaaattcttgtttaaagctatgttttattcctttaaggaagtctaatttacttttaatatttgtcctctagaatctatttgtttgaaagagacaaaaatttatgttcccattatcagtattttattttcaaagactgtgtctattaagtc

SEQ ID NO: 462241 - DNA, 594 bp, Homo sapiens
tgcaccttctacataggtgcagaattgctatgaaaagacatatttacagattctaatgtgattctagaaaaagtgaaatcattgtatgacaacttaatgctaaaggaaggtggaggatccaaatctggataatttaatgccagcaaaggatggcttgatatttttaaaaagaggcctggcttcaaacatgtaaagataacaagrgaagcagcttctgctgaccaagaggaagcaaacaaatccccagaagccattaagaaagtcattgaggacaaaggatatcttcctgaatcggttttttgttttgtttttttttaattttaatgaagacaaaagtgccacaaagggcatctgttgctaaggaagagaagcaagcaccaggatttaaggcaggaaggaataggccaactctactgttttgtgcaaatgctgtcagactgcccttatctataaagctgctaacctctgagtcttctaggggagagataaataccagctgccagtctttagttgcacaacaagaaggcctggacaatgagaacccttttactgaactgattccgtcaatgctttgtccttaaagttgggaagtgc

SEQ ID NO: 462242 - DNA, 279 bp, Homo sapiens
aaacaagaatgggttgaggtggatgagcaggtttaaaacaaagtgatacagtaaaagcaatctattaaaatatcaactgtccttaaaagtgaaaaggggaccttaaagttgaactcaagagcataactttcagatgctattatacctgtaaaaraagaagcagttgtctgcaatatttttaaaggtcaaagatatattcagaaacaggtcagcaagaacgagtggcaagatgccacactggccctgagaaaggtggctccgcgccccagttgccctgca

SEQ ID NO: 462243 - DNA, 490 bp, Homo sapiens
tccccccactcatttattacagcatgtgactctcgccaagacacacagagagaaagaaacgaagacagactgagcaagccttcctttatctcgtgcataaaatggyaaatatacatcacaagatagaatactgatgaatttgttttatgggaaccttcagatagatacatttatgttcaaagaaacaactgtaaagctaaattattctaacaagggtttctactttagagtctctaaagcattttaaagaataaactcactaaaatttgatatgcttataaaaatacactatataaagttatttagtaatgattcattgcttcagaaccctttccaaagatatgatatagcacctgttacatatttatgttcaaatataaagtctaatattcttagtttttgagtgtctgtctagcaaataatgaggaccatttgggtatagatttaaaactctggaaaagaaagaagcaattggacaggacagttcata

SEQ ID NO: 462244 - DNA, 635 bp, Homo sapiens
tcctgtttgcaatgatatgaggtatgtgagttgagttcttattgtgacttattggtattacaaaatttgagcctcagtcttatcaaattctgttgaatatttctgataatataacaaaagagaaagccagaatatttttgttaggggggacttcaaaatgattaaacacatgatagctttgataaatttatcaatatctaatatcttaatatattgtgaaagaagcatttattatctcaaagstttgattttgagatattattgttcaagatatttttgtgccacttagccttgtgacaaaagaatataataaacaatagcaaaaataagagacaaggccaggtgcagtggctcacacttgtaatcccagcactttgggagaccaaagtcaggggattgcttgagcccaggagaaaccagcctgggcatcattgggagactccatctctgcaaaatataaaaaagttagccaggcatgatggcacgtgcctgtagtcccagctcctcagaaggctgaggtgggagaattggcttgagcctggcaggttgaggctgcagtgagctgtgatcataccactgcactctagactggaagacagagcaagattctgtctcaaaaagaaaaaaaagagaga

SEQ ID NO: 462245 - DNA, 569 bp, Homo sapiens
tagccattcatctgttgatggacacttgggttgactccatagcttggctattgtgaatagtgctgcaatggacagggagtgtgcacaactcttggatgtactaattttctttcctttggctctttacccagtagtgggactgctagatcatatgctagttccatttttgtttttttgaggaaactctatactgtttyctatagtggctgtactagtttacattcccaccaatagtgtgtaagaattcccttttctccaccttctcaccagcatttattatttttttgtatttttgacaatagccattctaactgaagtgagatgatacctcactgtggttttgatttgcatttatctgatgattagtgatactgaactttttccatatatttgttagtcatttgcatgtccttctgagaactatctgtttgaatcatttgcccatttttaattttttttttttttttttttttttttttgctgttgagatgtttgaattccttgtatattctagatatgaatcccttgttggatgaatagtttgcaagtatctctcaccctatgcgaaa

SEQ ID NO: 462246 - DNA, 648 bp, Homo sapiens
ttccaactcatgaacataatatatctctctactgaggtcttctttgatttcttttagcaatgtttgtagtgtacaggttttacacatctttgttagttttatttctacgcagttgatatatttttatgccattttaaatgacatttgaagatcttcattttctaaatatttgcagttggtatataggaacataactaatttttgtatattgacttttgttcatttgtttgtcttaagacagggccttgctctgtcaccayaggctggagtgcagtggcacctgggatcaagcatttctcccacctcagtctcccacatagctgggactacaagcaggcatcaccacacttggctaatttttaaaattaatttttgtagagaaggagtctctctggtctcactgacccaggctggtcttgaactcctggattcaagcaatcctcccacctcagcctcccaaagtgctgggattacaggtgtgagccaccacacctggccttgtatgttgactttacatctagcatccttcataaattcacacattcattttaataatgaatttgtagattcccttggattttttaaatatatgcaatcacataaagttactactttctttccactttttatactttttttctttattga

SEQ ID NO: 462247 - DNA, 591 bp, Homo sapiens
ctgctgtgttcattcattgctgaccattcacataggatagacatatcttcatgatttttgcccattctgagaggcctatccacatatcttttccccaaatatcttcgccaccaatttttccaattgttctttccatgtccctgaccacccagcataarcattgagcacagctggtgaaatagtccatcactgcacaaatggccactgctccttccaagcaaagcacacagccaggtacactgcccgcagctctgcccaggaggacttcccttccccactatccttcagagatgtcccagggaggggctgtagttctgcagcatccattttcaggtggtgtctgcatatggggcagagccgtctgtaaaccaggcctgagtcatctcttcctctgtcagatatcatagggacctccccaggaggttacaggctcaggctaggagagagggtctcagctgagaaaggcggtggggcaggagtggggaccataggcacttggaccacttcttcatgtaaactacttgagcattcaggggctggttgggcctaatcacatacataccacttccatttgatgacagagtgttgctg

SEQ ID NO: 462248 - DNA, 638 bp, Homo sapiens
tttgcccattctgagaggcctatccacatatcttttccccaaatatcttcgccaccaatttttccaattgttctttccatgtccctgaccacccagcataagcattgagcacagctggtgaaatagtccatcactgcacaaatggccactgctccttccaagcaaagcacacagccaggtacactgcccgcagctctgcccaggaggacttcccttccccactatccttcagagatgtcccagggaggggctgtagttctgcagcatccaytttcaggtggtgtctgcatatggggcagagccgtctgtaaaccaggcctgagtcatctcttcctctgtcagatatcatagggacctccccaggaggttacaggctcaggctaggagagagggtctcagctgagaaaggcggtggggcaggagtggggaccataggcacttggaccacttcttcatgtaaactacttgagcattcaggggctggttgggcctaatcacatacataccacttccatttgatgacagagtgttgctgtgcacacctaactgtatggcttgttgggtcagataacaccctctgacaccaccctctgacacatagacatctcaccaataaatgtagaatagttgttacttct

SEQ ID NO: 462249 - DNA, 577 bp, Homo sapiens
agttttggcaaaagcactgtgtacagggaaggcaaagagaagtatctatttccgaaaaaaacactggccctttcataatggaagcaggccagcaatgtaataaacatgactccaggtagctggctgatcacctagggatggtgccatattggaggctcagtgttggtctctgctactggcagattggacctttagcagtgaccatagctaggtcagccttggtgagtgaaagtccatgtttctgatcctgtraaaaacctccatgtctgccaccacggaaactttggtcatgaacccattgggcaatgacaggagtggctggggaaagaggctgagtggcattcacagaaagggtcatcatatctacttgattattaaagttctcctctgctgtggtcaccttttggtgatcattcacatgaaacataaatatcttcacaagttttgctgatttggagatgtctatccacatttctgtctcctaaatttatttgtcaccaattttccaattactttccttccgagttcctgaccatccggccaaacaaccattggctacagcctatacataagtatt

SEQ ID NO: 462250 - DNA, 577 bp, Homo sapiens
agttttggcaaaagcactgtgtacagggaaggcaaagagaagtatctatttccgaaaaaaacactggccctttcataatggaagcaggccagcaatgtaataaacatgactccaggtagctggctgatcacctagggatggtgccatattggaggctcagtgttggtctctgctactggcagattggacctttagcagtgaccatagctaggtcagccttggtgagtgaaagtccatgtttctgatcctgtaaaaaacctccatgtctgccaccacggaaactttggtcatgaacccattgggcaatgacaggagtggctggggaaagaggctgagtggcattcacagaaagggtcatcatatctacttgattattaaagttctcctctgctgtggtcaccttttggtgatcattcacatgaaacataaatatcttcacaagttttgctgatttggagatgtctatccacatttctgtctcctaaatttatttgtcaccaattttccaattackttccttccgagttcctgaccatccggccaaacaaccattggctacagcctatacataagtatt

SEQ ID NO: 462251 - DNA, 543 bp, Homo sapiens
acaacttccgcggccccttcaccatctaagagtccatgaagtatctaacacaacgaaacatttcctttttagagaaaacctaattaattgtggaaagctgttaggaaaacttgattgtgttttatatctcccatctgcatatctgtaagcaaaccaaaagcagaaacttactggcagcttcaccttctttggcgagtttagtattgtcaatacagtaaagcctctcaattctgcatgcaatttgacatgaacagaaggaagaaaaaaaattagaattccaccttcagaaccacctaggagggtgtctgacattgaacaggtaatgaacaatgaacaggaccatttccccagcagcctttgttttccctgccacctgcaagggatggacagttttatttcacaatgatgaacagtgatgtcgggctgagccctccactctgtctcaattcactccccacctggagggaaagggataacaaatacaaggtcttattttgtttttgaagggtctttcasggacaggaaaagcagctgttgtagttt

SEQ ID NO: 462252 - DNA, 562 bp, Homo sapiens
aatgatctcatcctattgagtcctttgggacatgggggtagcagtagaatgttacttcagagaagtggcaagaatccaactggagaagcctcccattaggagagctcacttaggtttcctgctgctccataggtaatgccttttaagagtgtttatcttataaagacatttacaggtaaggtagtgcaaaggaaaacttctgtgatgatggaatttttggtactctgtagcccttcaaatttctcttggtatatgtaaggctagctttgctcactggtcttgagaatttgtgtttttggttacatatgggagtgggagatggatctgatttgatgccatgactgacacctgctcttctcctagatggaaagaagtgaatttatggtcccttgcttctcttccatttcccttcaccagtggaaactctcttttctggtttccttcaccaggaaaaagtatagtcctaaatgacygaaatagctctcagtgtcagattaatggatgattttaatgccattgccttgagaaaaacaatttccagcttttaagatatgagtaaatg

SEQ ID NO: 462253 - DNA, 535 bp, Homo sapiens
cgtatcaaatgcatacattccactggtttccattggttccattgttttccactgaatttttgttaatgattttatggtagtttctgggaaacctgaaggcmaaaaaaattgtgaggcaaactcattattactccaagaaaaatacctcaacattctcatcttgtgaaagtagcttagtgaaattatcttcttacaactagaccacaggataaatacttctgaaattttgtaggttgacttcagctctctgtaccttagttaaaataaattttgtggtaatttatttccaatcacttagttatcaatagaattttaaaaatgatttgagatgactactttcttaaaatttatctaaaactcccatttatttaccccccaaagatagtaggccaaaaataataaacggcttaccaaaagatacacagctggtttgtgattggtggagaggctgggaaccagaaagctgtgtttggggttttccactctatatcacctggcctgtgacaccagctctcgggtggctacataagtttct

SEQ ID NO: 462254 - DNA, 566 bp, Homo sapiens
tatctcacagtggctttgatttgcatttctctagacctaaccattttcatatctttccacgtgcttattggccattgacatagcttctttggcaaatacctactcctcactttttagttgaattatttgtcttttcattgtttaattgtaaaagttgtcttatattcttttttgtttgtttgtttgagatggagtctcgctctgtygcccaggctggagtgtagtggcaccatttcagctcactgcaacctctgcctcccaggttcaagcaattcttgtgcctcagcctcccaagtagctgggattacaggcatgcgcccccacacctggctaacttttgtacttttagtagagacggggtttcgccatgttgaccaggctagtctcaaactcctgacctcaagtgatcctcctgccttggcctccccaagtgctgggagtacaggtgtaagccaccacacctggcctgtttatctattgttgatagcaatcccttatcagatacatgattttgaaacattgtctttcattgtgtgagttgtctttgttgaagaaaccgttttttt

SEQ ID NO: 462255 - DNA, 566 bp, Homo sapiens
tatctcacagtggctttgatttgcatttctctagacctaaccattttcatatctttccacgtgcttattggccattgacatagcttctttggcaaatacctactcctcactttttagttgaattatttgtcttttcattgtttaattgtaaaagttgtcttatattcttttttgtttgtttgtttgagatggagtctcgctctgttgcccaggctggagtgtagtggcaccatttcagctcactgcaacctctgcctcccaggttcaagcaattcttgtgcctcagcctcccaagtagctgggattacrggcatgcgcccccacacctggctaacttttgtacttttagtagagacggggtttcgccatgttgaccaggctagtctcaaactcctgacctcaagtgatcctcctgccttggcctccccaagtgctgggagtacaggtgtaagccaccacacctggcctgtttatctattgttgatagcaatcccttatcagatacatgattttgaaacattgtctttcattgtgtgagttgtctttgttgaagaaaccgttttttt

SEQ ID NO: 462256 - DNA, 566 bp, Homo sapiens
tatctcacagtggctttgatttgcatttctctagacctaaccattttcatatctttccacgtgcttattggccattgacatagcttctttggcaaatacctactcctcactttttagttgaattatttgtcttttcattgtttaattgtaaaagttgtcttatattcttttttgtttgtttgtttgagatggagtctcgctctgttgcccaggctggagtgtagtggcaccatttcagctcactgcaacctctgcctcccaggttcaagcaattcttgtgcctcagcctcccaagtagctgggattacaggcatgcgcccccacacctggctaacttttgtacttttagtagagacggggtttcgccatgttgaccaggctagtctcaaactcctgacctcaagtgatcctcctgccttggcctccccaagtgctgggagtacaggtgtaagccaccacacctggcctgtttatctattsttgatagcaatcccttatcagatacatgattttgaaacattgtctttcattgtgtgagttgtctttgttgaagaaaccgttttttt

SEQ ID NO: 462257 - DNA, 627 bp, Homo sapiens
gcgggtgacaatctgaccaaatgttcggccaccacataagaagggtcaccagatttgcagcctgaaatacctgagacctcactatccaaagccccacctcttccactcagccaattccacatttttgaatcttatttgctgcatcctcyttcaggtagaaagtccacttcaggtataatgcattcagctgcagctactaagtaaatctgccggaatacagtgccctataacgcagctcacagaaaggtgtttgaatgcagatttgccactgataattccatcatttcttacactccaatcatgatattgtccatgaagaatagcttgggtacatgatctaatttattcctcacaatattgatatgggacacaactatgatatacatgggtatatgataagatatgggtatattatcatccccattttactgatgagtaaattgaggctcagagcctaggtactttgctcaggttctcacatttgctaagttgtggagctgagatttgaacctagatccgagtgacacagaagttggttctttttattatttaatcactttaatcatttaatctattattgaggtaaaactgcaccacagaggaccaaaaggagaactacagtgcaag

SEQ ID NO: 462258 - DNA, 627 bp, Homo sapiens
gcgggtgacaatctgaccaaatgttcggccaccacataagaagggtcaccagatttgcagcctgaaatacctgagacctcactatccaaagccccacctcttccactcagccaattccacatttttgaatcttatttgctgcatcctctttcaggtagaaagtmcacttcaggtataatgcattcagctgcagctactaagtaaatctgccggaatacagtgccctataacgcagctcacagaaaggtgtttgaatgcagatttgccactgataattccatcatttcttacactccaatcatgatattgtccatgaagaatagcttgggtacatgatctaatttattcctcacaatattgatatgggacacaactatgatatacatgggtatatgataagatatgggtatattatcatccccattttactgatgagtaaattgaggctcagagcctaggtactttgctcaggttctcacatttgctaagttgtggagctgagatttgaacctagatccgagtgacacagaagttggttctttttattatttaatcactttaatcatttaatctattattgaggtaaaactgcaccacagaggaccaaaaggagaactacagtgcaag

SEQ ID NO: 462259 - DNA, 627 bp, Homo sapiens
gcgggtgacaatctgaccaaatgttcggccaccacataagaagggtcaccagatttgcagcctgaaatacctgagacctcactatccaaagccccacctcttccactcagccaattccacatttttgaatcttatttgctgcatcctctttcaggtagaaagtccacttcaggtataatgcattcagctgcagctactaagtaaatctgccggaatacagtgccctataacgcagctcacagaaaggtgtttgaatgcagatttgccactgataattccatcatttcttacactccaatcatgatattgtccatgaagaatagcttgggtacatgatctaatttattcctcacaatattgatatgggacacaactatgatatacatgggtatatgataagatatgggtatattatcatccccattttactgatgagtaaatygaggctcagagcctaggtactttgctcaggttctcacatttgctaagttgtggagctgagatttgaacctagatccgagtgacacagaagttggttctttttattatttaatcactttaatcatttaatctattattgaggtaaaactgcaccacagaggaccaaaaggagaactacagtgcaag

SEQ ID NO: 462260 - DNA, 577 bp, Homo sapiens
ctaggtactttgctcaggttctcacatttgctaagttgtggagctgagatttgaacctagatccgagtgacacagaagttggttctttttattatttaatcactttaatcatttaatctattattgaggtaaaactgcaccacagaggaccaaaaggagaactacagtgcaagtccaggtgcctgtagccatggcacagctgtggcatagttgttccaatgtggyaaccagatgtgtccttctggttgtcttggtacggagccacagctccagtactgagtcacagccacatgcagatgccaccacagaacatgtgatattttagatctgagttgacagtttaacatgtaaacattatcagaaaataatgagtcaggctctcccgagccatatgcttcatctcagagccaaggctgtgtcatcactgtcaaatgctccttcaggccactaaatcaccacagtaagatcatagcttcaggacctaagtagctcctggggatgggaaagagatgactgactgaggtggttgatgggattcttacaggtaagtcaaatgggttttttcacttgcatcacc

SEQ ID NO: 462261 - DNA, 577 bp, Homo sapiens
ctaggtactttgctcaggttctcacatttgctaagttgtggagctgagatttgaacctagatccgagtgacacagaagttggttctttttattatttaatcactttaatcatttaatctattattgaggtaaaactgcaccacagaggaccaaaaggagaactacagtgcaagtccaggtgcctgtagccatggcacagctgtggcatagttgttccaatgtggtaaccagatgtgtccttctggttgtcttggtacggagccacagctccagtactgagtcacagccacatgcagatgccaccacagaacatgtgatattttagatctgagtygacagtttaacatgtaaacattatcagaaaataatgagtcaggctctcccgagccatatgcttcatctcagagccaaggctgtgtcatcactgtcaaatgctccttcaggccactaaatcaccacagtaagatcatagcttcaggacctaagtagctcctggggatgggaaagagatgactgactgaggtggttgatgggattcttacaggtaagtcaaatgggttttttcacttgcatcacc

SEQ ID NO: 462262 - DNA, 577 bp, Homo sapiens
ctaggtactttgctcaggttctcacatttgctaagttgtggagctgagatttgaacctagatccgagtgacacagaagttggttctttttattatttaatcactttaatcatttaatctattattgaggtaaaactgcaccacagaggaccaaaaggagaactacagtgcaagtccaggtgcctgtagccatggcacagctgtggcatagttgttccaatgtggtaaccagatgtgtccttctggttgtcttggtacggagccacagctccagtactgagtcacagccacatgcagatgccaccacagaacatgtgatattttagatctgagttgacagtttaacatgtaaacattatcagaaaataatgagtcaggctctcccgagccatatgcttcatctcagagccaaggctgtgtcatcactgtcaaatgctccttcaggccactaaatcaccacagtaagatcatagcttcaggacctaagtagctcctggggatgkgaaagagatgactgactgaggtggttgatgggattcttacaggtaagtcaaatgggttttttcacttgcatcacc

SEQ ID NO: 462263 - DNA, 406 bp, Homo sapiens
ttttcacctaggtttgacattcatcatttaaaggcaagttctccctcatgtcttgagcatacctggagtgcagctgcctcaaaatttaaaaaaacaatcattatcatttttttgcctaccaatgccttaacaggctgagtatgtaaaggttctctttatcctaaaatggaatccttacctcagctacaactgcttagaaaaatcataccttctagtttaargtcaagctgcggtgactaacaccccacagcacacagtatttttcctgaggcatttgtactgtttttccaaagctctcgtacttgcagctctgtctctatagagacagccgctcactgtggacaaagttgccataagctgatgtgaaccaccaaggtgaaaagtcccatatggctgtgcctgaagc

SEQ ID NO: 462264 - DNA, 406 bp, Homo sapiens
ttttcacctaggtttgacattcatcatttaaaggcaagttctccctcatgtcttgagcatacctggagtgcagctgcctcaaaatttaaaaaaacaatcattatcatttttttgcctaccaatgccttaacaggctgagtatgtaaaggttctctttatcctaaaatggaatccttacctcagctacaactgcttagaaaaatcataccttctagtttaaggtcaagctgcggtgactaacaccccacagcacacagtatttttcctgargcatttgtactgtttttccaaagctctcgtacttgcagctctgtctctatagagacagccgctcactgtggacaaagttgccataagctgatgtgaaccaccaaggtgaaaagtcccatatggctgtgcctgaagc

SEQ ID NO: 462265 - DNA, 557 bp, Homo sapiens
gttcactactgatttctattgctctaaaacttttacaattggtattttgaatataataccatgatcaagaataygattgacatccttgaaggctctctcgtgcctctttcaagctactgttcccccaaaagtttgctaccattctgactcctatagccagaagtcagtttaacttgcttttgatctttatatgtgagaatgttgtagtatgagccctactgtgtttggcttcttttgtacatgttgtgaagtacaacgttaatgtatttattttcactgttgtataatattgtaatgaatgaacatgcttcccattattttttcgtactattgttgataggttttttggattctttcgaatttaggacagtggttttcttttcaatttaggacagtgggatgattttcctgccccaaggggatatttggcaatgtctggaaacaagtttggttgtaatgactgggggaggctactggaatctagtgaatagaggccaacgatgatgccaatcatcctataaagcacaggaaatcccccacaacaaaaattattcaat

SEQ ID NO: 462266 - DNA, 557 bp, Homo sapiens
gttcactactgatttctattgctctaaaacttttacaattggtattttgaatataataccatgatcaagaatatgattgacatccttgaaggctctctcgtgcctctttcaagctactgttcccccaaaagtttgctaccattctgactcctatagccagaagtcagtttaacttgcttttgatctttatatgtgagaatgttgtagtatgagccctactgtgtttggcttcttttgtacatgttgtgaagtacaacgttaatgtatttattttcactgytgtataatattgtaatgaatgaacatgcttcccattattttttcgtactattgttgataggttttttggattctttcgaatttaggacagtggttttcttttcaatttaggacagtgggatgattttcctgccccaaggggatatttggcaatgtctggaaacaagtttggttgtaatgactgggggaggctactggaatctagtgaatagaggccaacgatgatgccaatcatcctataaagcacaggaaatcccccacaacaaaaattattcaat

SEQ ID NO: 462267 - DNA, 561 bp, Homo sapiens
tttacagattttataagaaatacacaagtggtttatctacctgaaatttgtaaacagggtaattgatccagttataactatgttgttgggactctgtatttgtacattaccactgatatctgtgtgctagcagagatttgaattttctgttctgtctcctgaagagcccctgactgacagaacatttgaatactgtgattatatggatccagtgatcatatgaatcactggatttgtttcatttttatcayaaataaatgaaagagaaaggatcgtagaacgttaggatcctagaattctagaagccgtcttaaagactatgttctataaaacttcattttacagatgagaacattgaaatttgaaaggtggataatttcatgagatcacatgactgggaagacagggttgcaatgagtctttggctggactaaaaggaattcacataaacagatgaattacctagacaaagtgagacttaatttgtcagtgtggctgatgagaagggggtgcttcttaaagctttgtgagaaacccctcagttgccttcctaaagagaaa

SEQ ID NO: 462268 - DNA, 601 bp, Homo sapiens
attttcttgagcaagaaataaattcttttattttaagccagtgagattttgaggtttgtctgtcatcataacattacctgcctgtcctaaataatgcatgtgcctattgagatgattatgtactttttcctcccttaatgtatttattatattacaatataagattttctgatgttgagttatccttgcattcttgagatagcctttatattatggcgtaggaatatatatatatgatgtatttgatatatatatgtatatatgttacacttaattaactaatatttcatctatttttgactctaagattacaagtgagrttggtctatcatttgcttttttgtcctgttcttgtcccgttttgatattctgatattctagattcataaattggctaatttttcctcattttctattctctgaaacagattgcttaagatagagatggcgtattccttgagttttgagcaaaggggaattgtagcatagaatgaagttggagaggtgaggagaagccagataatttagggtcttgaaggccaccataaaaatttcagattttattctaaggtcattgggaatctattgaaggatttaagcc

SEQ ID NO: 462269 - DNA, 602 bp, Homo sapiens
ttggttgccaccatgtgagacgtgtctttcactttctgccatgattgtgaggcctccccagccacgtggaactgtgagtccattaaacctctttcttttttaaattgcccagtctcaggtacgtctttatcagcagcgtgaaaacagactaatacagttcacacggcaccactatgctctcctggagccactggggcctacagtctggctctcattttgattccatagaatcatttggagatgtctgatttctactaaagaagttcatgatacagacaaaaccagacttccagatttggaaagaatcttaagaatgctcctgaaacactggttccccaggatgttaatcattttcccttgggggaaaaatgtccatgaccagataagtttaggaaatgctagaataaataatattaagcatacttttttactgcagaattttccagtcataactactattctmtatgaatcacaaagaaaatcacaaactataggaagcgtctccaaaaattacttggccataaaatcctttttacattgagcacctttaaaaaaaattaatagtgtgtgtatgtggagttttagatttacagaaagtttgg

SEQ ID NO: 462270 - DNA, 577 bp, Homo sapiens
gactctggccacttgccaccgttgtcgcccgccgccgctgcagggagggtgcacggagggagcagaccgtctccggagcccgccgccctgggggctgcagtgatggggccgggctgaggcacctgccggcggggtagcagggcagtcgagcacggagggagsggcgggcctccaggggacttcagcgggagccgggcctggggcggtgccgcacttgcacacggagtgtggggggccaggcctgggaccaggagctggggccgggcttcggcgcagaggcaggaagaggaagcggcacccgcttcggggacccagccggcggccaggccaccgcgcccacccggccgatggcaccgtgttcctgcgcctcgggagggaggaggctctgcgcgggactgcaggttctgccccgcatcggagtgatcgctgagcctgacgctctcgaaggctgggcctggggcccgcaatctactccggaggctttcccactgggcagggtcgctagcagggtgagagaaagccccgggccatccccgagtgccggggccacaggaagaatttgtggcgacatcatccc

SEQ ID NO: 462271 - DNA, 577 bp, Homo sapiens
gactctggccacttgccaccgttgtcgcccgccgccgctgcagggagggtgcacggagggagcagaccgtctccggagcccgccgccctgggggctgcagtgatggggccgggctgaggcacctgccggcggggtagcagggcagtcgagcacggagggaggggcgggcctccaggggacttcagcgggagccgggcctggggcggtgccgcacttgcacacggagtgtggggggccaggcctgggaccaggagctggggccgggcttcggcgcagaggcaggaagaggaagcggcacccgcttcggggacccagccggcggccaggccaccgcgcccacccggccgatggcaccgtgttcctgcgcctcgggagggaggaggctytgcgcgggactgcaggttctgccccgcatcggagtgatcgctgagcctgacgctctcgaaggctgggcctggggcccgcaatctactccggaggctttcccactgggcagggtcgctagcagggtgagagaaagccccgggccatccccgagtgccggggccacaggaagaatttgtggcgacatcatccc

SEQ ID NO: 462272 - DNA, 577 bp, Homo sapiens
gactctggccacttgccaccgttgtcgcccgccgccgctgcagggagggtgcacggagggagcagaccgtctccggagcccgccgccctgggggctgcagtgatggggccgggctgaggcacctgccggcggggtagcagggcagtcgagcacggagggaggggcgggcctccaggggacttcagcgggagccgggcctggggcggtgccgcacttgcacacggagtgtggggggccaggcctgggaccaggagctggggccgggcttcggcgcagaggcaggaagaggaagcggcacccgcttcggggacccagccggcggccaggccaccgcgcccacccggccgatggcaccgtgttcctgcgcctcgggagggaggaggctctgcgcgggactgcaggttctgccccgcatcggagtgatcgctgagcctgacgctctcgaaggctgggcctggggcccgcaatctactccggaggctttcccactgggcagggtcgctagcagggtgagagaaagccccgggccayccccgagtgccggggccacaggaagaatttgtggcgacatcatccc

SEQ ID NO: 462273 - DNA, 563 bp, Homo sapiens
  misc_feature (1)...(563): n = A,T,C or G
nnnnnnnnnnnnnnnnnnnnnnnnnnnnnnnnnnnnnngcacatggagtgttttggaggtttttaagtagagaaggccgtgatcacgctggcagctatgttgagaacagacataggtgggaagggatgcaagcrgagaccagttagaaggttactgccttcaaccaagagagattcaatggtgcctcaaagcagggaggaagcagaggagatgttgtgcagtgaccagattctggatacagcttctaggtagacccggtgggactcactgatggaactccatgtgagctgtgagagaaaggaaggactctcatcttctgaatgagactggttgctccttgaggacaaaaatcacctgttatatttctttatgatctttgtagaaacctaagaaggcttcatgcacaataaatccatgactaagtttttgttaaatgaaaaaaggagggaaaaagcaggtctatatcaatagatttggggttcctatatccataatgatttgcaaaaatagacactatttcctgtatttccacaaaatcttaaaaactgactatttttcccaag

SEQ ID NO: 462274 - DNA, 563 bp, Homo sapiens
  misc_feature (1)...(563): n = A,T,C or G
nnnnnnnnnnnnnnnnnnnnnnnnnnnnnnnnnnnnnngcacatggagtgttttggaggtttttaagtagagaaggccgtgatcacgctggcagctatgttgagaacagacataggtgggaagggatgcaagcggagaccagttagaaggttactgccttcaaccaagagagattcaatggtgcctcaaagcagggaggaagcagaggagatgttgtgcagtgaccagaytctggatacagcttctaggtagacccggtgggactcactgatggaactccatgtgagctgtgagagaaaggaaggactctcatcttctgaatgagactggttgctccttgaggacaaaaatcacctgttatatttctttatgatctttgtagaaacctaagaaggcttcatgcacaataaatccatgactaagtttttgttaaatgaaaaaaggagggaaaaagcaggtctatatcaatagatttggggttcctatatccataatgatttgcaaaaatagacactatttcctgtatttccacaaaatcttaaaaactgactatttttcccaag

SEQ ID NO: 462275 - DNA, 563 bp, Homo sapiens
  misc_feature (1)...(563): n = A,T,C or G
nnnnnnnnnnnnnnnnnnnnnnnnnnnnnnnnnnnnnngcacatggagtgttttggaggtttttaagtagagaaggccgtgatcacgctggcagctatgttgagaacagacataggtgggaagggatgcaagcggagaccagttagaaggttactgccttcaaccaagagagattcaatggtgcctcaaagcagggaggaagcagaggagatgttgtgcagtgaccagattctggatacagcttctaggtagacccggtgggactcactgatggaactccatgtgagctgtgagagaaaggaaggactctcatcttctgaatgagactggttgctccttgaggacaaaaatcacctgttatatttctttatgatctttgtagaaacctaagaaggcttcatgcacaataaatccatgactaagtttttgttaaatgaaaaaaggagggaaaaagcargtctatatcaatagatttggggttcctatatccataatgatttgcaaaaatagacactatttcctgtatttccacaaaatcttaaaaactgactatttttcccaag

SEQ ID NO: 462276 - DNA, 568 bp, Homo sapiens
ggcttgcctgttttctcctctttggctggttgctctggaggcttctgcagttaggcttttacccacggtgacccgggtaaaatggcctgaaggcttgacctcccactagttcttgttgccgggacatattctggtgtcttcttgcaaaaattaggcaggattacctccggacttccgaagcgaagtggggagaaaggagagcagccggtggctggcagcgcaggcaggtgaaagtaggcgaagcatatactccggctctgtgtgggagacccgggggaatagagaggaagccsgtgcgctggagaatgacaccgggaatgggcctctctgatgggctgcaggtggggacactagacagatacctaggagaaagtgtgctaacccgccccccactcccccaccgcatcccccagtggtgcctttccaccctttgggggaaaacatcaccaagttcagatgcaagtattgggagagaagagaactctgtactaggaaaatgctacccacgagtttttagggtgagcatcaaacacttctcaaaatgagtatccagaaaatgaagtcagct

SEQ ID NO: 462277 - DNA, 568 bp, Homo sapiens
ggcttgcctgttttctcctctttggctggttgctctggaggcttctgcagttaggcttttacccacggtgacccgggtaaaatggcctgaaggcttgacctcccactagttcttgttgccgggacatattctggtgtcttcttgcaaaaattaggcaggattacctccggacttccgaagcgaagtggggagaaaggagagcagccggtggctggcagcgcaggcaggtgaaagtaggcgaagcatatactccggctctgtgtgggagacccgggggaatagagaggaagcccgtgcgctggagaatgacaccgggaatgggcctctctgatgggctgcaggtggggacactagacagatacctaggagaaagtgtgctaacccgccccccactcccccaccgcatcccccagtggtgcctttccaccctttgggggaaaacatcaccaagttcagatgcaagtattgggagagaagagaactctgtactaggaaaatgctacccaygagtttttagggtgagcatcaaacacttctcaaaatgagtatccagaaaatgaagtcagct

SEQ ID NO: 462278 - DNA, 609 bp, Homo sapiens
agtgttcttctgccccaatcatttttattgcattttatagatgattttttgagtatattatctggagtgcttattgggcaatatttctttagttaacactaacaatggtaaaaaggaagtcatgctttgaaacaccccaaaattgttaaaggctttaattagagaaaagcccattgaagagttcaagatgtttgcatttctttctttttcagcarggggatcagagctgattatgaataaagatgaaagactatgtgctactttaacctgcactaaatcaaaacttttcatccgtgtagcccagaatcattaaaaggtagtgatgaatatgtgtttgagggaatattgctatggctttaatggaaagatgcacaggcgtcctggtacaatgctagctgttttattctctagcctgggcgaacagtactatactgtgtacctatgaatgcatttatatgtgtctgagataaaacagtatgatgggaaagataaatcagaacttagctttctatgttagtcttaaagcattccaactgcataaatcaggaaaataatctacttgagtttaaattattagtattgtatttttaagttaattgaaataactgg

SEQ ID NO: 462279 - DNA, 560 bp, Homo sapiens
agcagattttgttattttttatgcccattctaatcacataacattgggtatttacattgatgatattaggcaattgtccagtgcagcctttattaagctttgtattgtaaatacaactacattttagtttaacacagtgttggaaccaagaaggcttgtccccacaccccacagcacccctttttgttcctgctacagaaagtgcatgcttcaacactgcacttaataacactactgcaactgtggatttgcctgactattcctgttagtctcagtttgttgaggaaagaagcactgttcctcctttccatgttctagtgcctaacaccaaacctggcacttacaatgccatcagttaatgcttattgaatgatactatttaattaaatgtatagattgaatttatgtagataacattcaccctttttagggtgtcaagacacctagtttgtttttactactcgagtcaaacagccagtcacttaagtgagagaaaacaaaaaggtcaaccatttgtttaagttatggragtgtcaaagttgcttatccattcattcatt

SEQ ID NO: 462280 - DNA, 479 bp, Homo sapiens
ttggtgcttaataagtaaaggtttgattgattcataaaaaatactgttatttctggggcacatgctttggaatcagcaggagctcttatagacaacttccctggcctctctctctctctctgcagtggctcaacggggagatgtcaggtcctcttcccttaagtatatcctggcctaaatgttctgcttgtggtcaaggtagaattgtgtcatccatgtttgggagtccatatcatgcttgtaaggggtggggaattgggtattcaacaggactgcatctggtacacatcacatacaagtcccatgagggagaggcagcctcaggccaggacaaatctgaaggccttgaatatcatatccctcgcccagggcagrgattgttaatcagtctcaatattccttctgctgatctttcgggtgctttcagctctttctcaacacaaagtattctggttggctgaaccaaaacaaaagcaaaa

SEQ ID NO: 462281 - DNA, 598 bp, Homo sapiens
ctactgtactcactcaaccccactcaaccccacccagccaggtgaactcctttgagacttagtttagatattgcctcctccaagaaaactttctgatcactttaccccttcattcaccagactagttttagtattccatttaacacttccatatttcatttatgagttgtgtgtggttttaaaaaattaygtgtatattttttgtcttcactaaaatgtgagctccttgaaagaatagactattttattcttcttcgcctctccagagcttaggacacagactgacacaaagaggtgcagaagaaatatttgtataaaatgtaataggttttattgaggatgtagtttatgctggaggatatagtttagaagacagaggactgaaaggcatatttgaaaatttagaagtctgtcccctaatataaagactgggaaatgctgttctaaactgaaatgtggaaataataattgctcagaaatttcttatggatctgaagctccatataagacttggaggccaagattaaaagaatattaaatcgtatgcatagatttgtccaaccatagtgttttgaaaggtacatagtgtgacaagaag

SEQ ID NO: 462282 - DNA, 609 bp, Homo sapiens
aatataaagactgggaaatgctgttctaaactgaaatgtggaaataataattgctcagaaatttcttatggatctgaagctccatataagacttggaggccaagattaaaagaatattaaatcgtatgcatagatttgtccaaccatagtgttttgaaaggtacatastgtgacaagaagcctacatttccaggaggtacctgatgatagtctttgaattcaagcaaacttaccttcaaatccatctgctatctacaccttgggcaaattacattccttctctgagcattagtttcctcttttgtaaaaatagatataactcactgaccatgtgtattaagccattcttgcattgctataaagaaatacctgagactgagtaatttattaaaaaaagagttttaattgactcgtggttctgtagactatacaggaagcataatgctgacatctgcttggcttctgaggaggcgtcaggaaatttacagtcatggcatatattattctgttctcacattgctgtaaaaaatacctgaaactgaataatttataaagaaaagaggtttcattggctcacagttctgcaggctgtccatgaagcatggcagc

SEQ ID NO: 462283 - DNA, 609 bp, Homo sapiens
aatataaagactgggaaatgctgttctaaactgaaatgtggaaataataattgctcagaaatttcttatggatctgaagctccatataagacttggaggccaagattaaaagaatattaaatcgtatgcatagatttgtccaaccatagtgttttgaaaggtacatagtgtgacaagaagcctacatttccaggaggtacctgatgatagtctttgaattcaagcaaacttaccttcaaatccatctgctatctacaccttggrcaaattacattccttctctgagcattagtttcctcttttgtaaaaatagatataactcactgaccatgtgtattaagccattcttgcattgctataaagaaatacctgagactgagtaatttattaaaaaaagagttttaattgactcgtggttctgtagactatacaggaagcataatgctgacatctgcttggcttctgaggaggcgtcaggaaatttacagtcatggcatatattattctgttctcacattgctgtaaaaaatacctgaaactgaataatttataaagaaaagaggtttcattggctcacagttctgcaggctgtccatgaagcatggcagc

SEQ ID NO: 462284 - DNA, 609 bp, Homo sapiens
aatataaagactgggaaatgctgttctaaactgaaatgtggaaataataattgctcagaaatttcttatggatctgaagctccatataagacttggaggccaagattaaaagaatattaaatcgtatgcatagatttgtccaaccatagtgttttgaaaggtacatagtgtgacaagaagcctacatttccaggaggtacctgatgatagtctttgaattcaagcaaacttaccttcaaatccatctgctatctacaccttgggcaaattacattccttctctgagcattagtttcctcttttgtaaaaatagatataactcactgaccatgtgtattaagccattcttgcattgctataaagaaatacctgagactgagtaatttattaaaaaaagagttttaattgactcstggttctgtagactatacaggaagcataatgctgacatctgcttggcttctgaggaggcgtcaggaaatttacagtcatggcatatattattctgttctcacattgctgtaaaaaatacctgaaactgaataatttataaagaaaagaggtttcattggctcacagttctgcaggctgtccatgaagcatggcagc

SEQ ID NO: 462285 - DNA, 573 bp, Homo sapiens
tgacaattttactgtcagctggaaatttgaccaggaatgtttcagagagaagcaaaatgagcaatacagcttctattcagatatccagagttagggaggcgtaaggtgattattcattcattcacagcagaaagatgtatggtaatgcagagacgaaaaatatcagtgtcactagagaagcatcaataacatgctgagggatttcagcagatrcaggaggaaacctgctggcctgggaatgtttaatttgtaatggactaagagaacaatcgagtttccaaaattgtactttggctacttccattgctgaatttcctttccagccactgccccctcgacctctgttacagtctttacatttttatgaggttgactttcaaacatttattccaaagagcaccgtgtagtttttaaaagtaatcatgcaaggaacagtaatggaaatcgtaagcacaggactggagttaagtgaagcatcagccagttaggggctgtctagaggaggcccacaggaaggataatggatctgcaaaccacatcatgtgacatatgattaaatgaaacagaaacatt

SEQ ID NO: 462286 - DNA, 426 bp, Homo sapiens
tggggtgttatctagcaaacacctggaaatgaggagcagctttgaaagtgggtaatgcytacaggctgaaagagtttggaggtgcgtgctagaaaaagcctagattgttgtgaatgaagggcaattctaatgatggcttagaagaagagagctgtaggaagagcctaaatcttcttagagattttctaagtggtcatgatcagaatgttggtagaaatatggactgtaaagtccattctgctgaggttttatttgaaaatgaggaatatcttataggaaactgaaggaaaggccattcttgttataaagtggcaaataacctggctgaattttatccatgtcctggtactctgtggaaggcagaacctgaggacaatgaactggaatatttgatgaaaagtctctcaacaaaccactctgagtgct

SEQ ID NO: 462287 - DNA, 426 bp, Homo sapiens
tggggtgttatctagcaaacacctggaaatgaggagcagctttgaaagtgggtaatgcctacaggctgaaagagtttggaggtgcrtgctagaaaaagcctagattgttgtgaatgaagggcaattctaatgatggcttagaagaagagagctgtaggaagagcctaaatcttcttagagattttctaagtggtcatgatcagaatgttggtagaaatatggactgtaaagtccattctgctgaggttttatttgaaaatgaggaatatcttataggaaactgaaggaaaggccattcttgttataaagtggcaaataacctggctgaattttatccatgtcctggtactctgtggaaggcagaacctgaggacaatgaactggaatatttgatgaaaagtctctcaacaaaccactctgagtgct

SEQ ID NO: 462288 - DNA, 548 bp, Homo sapiens
gattaaagacttaaaaccacaaactgtaaaactactagaagaaaaactaaggaaaaaacttcatgatattgatatagacaatgattttttggataagaccccaaaagtacaagcaacaaaagcaaaagtaaacaaaaatgagattgcatcaaacttaaaagctctgtgcaacatatatcraaagaaattgaaattcatatgtcaaagaggtatctgcactcccatgttcacagcaacattattcacaataactgagatataaaatcaatctaaaggtccatcaacagatgcataagtaaagaaagtgtgatatatataaacagtggaatactattcaccctttaaaaaggaggagaggaaatcctgtcctttgtgtcaacatggatacacctggaggacattatgttaagtgaaataagcctggcatagaaaggtatataccatgtgatttcactttcatgtggaatctaaaaaagttgaactcatagaagtagagagtagaataatggttaccagggctggggagtggggtgtttggagtgatgtcg

SEQ ID NO: 462289 - DNA, 548 bp, Homo sapiens
gattaaagacttaaaaccacaaactgtaaaactactagaagaaaaactaaggaaaaaacttcatgatattgatatagacaatgattttttggataagaccccaaaagtacaagcaacaaaagcaaaagtaaacaaaaatgagattgcatcaaacttaaaagctctgtgcaacatatatcgaaagaaattgaaattcatatgtcaaagaggtatctgcrctcccatgttcacagcaacattattcacaataactgagatataaaatcaatctaaaggtccatcaacagatgcataagtaaagaaagtgtgatatatataaacagtggaatactattcaccctttaaaaaggaggagaggaaatcctgtcctttgtgtcaacatggatacacctggaggacattatgttaagtgaaataagcctggcatagaaaggtatataccatgtgatttcactttcatgtggaatctaaaaaagttgaactcatagaagtagagagtagaataatggttaccagggctggggagtggggtgtttggagtgatgtcg

SEQ ID NO: 462290 - DNA, 548 bp, Homo sapiens
gattaaagacttaaaaccacaaactgtaaaactactagaagaaaaactaaggaaaaaacttcatgatattgatatagacaatgattttttggataagaccccaaaagtacaagcaacaaaagcaaaagtaaacaaaaatgagattgcatcaaacttaaaagctctgtgcaacatatatcgaaagaaattgaaattcatatgtcaaagaggtatctgcactcccatgttcacagcaacattattcacaataactgagatataaaatcaatctaaaggtccatcaacagatgcataagtaaagaaagtgtgatatatataaacagtggaatactattcaccctttaaaarggaggagaggaaatcctgtcctttgtgtcaacatggatacacctggaggacattatgttaagtgaaataagcctggcatagaaaggtatataccatgtgatttcactttcatgtggaatctaaaaaagttgaactcatagaagtagagagtagaataatggttaccagggctggggagtggggtgtttggagtgatgtcg

SEQ ID NO: 462291 - DNA, 564 bp, Homo sapiens
ttatcagaatttcaaagtggtctgagttctcaaatatgcttagacccaatagcctagtctccaaaaatctacaattaggtagggagaaatagattccatcataatgctttttaggaaaaatcaatagtcaattaatttagtaaaacatagtatcatttagccccatytgtcttttttatgtgcaatcatagagtaagaaattgcaataattgacttttgagatctttctgtggacatccttgttcaaaaatccagaaatcttgcttagagaggaaatgagattgtgaaactggaaaaaagaaaccattttctgcttcctatactgctatacctctgttgtgttctgtctgtaaatttaatcaggcccttgcaagtatttatattattcttagcctcagttaaatcttagactgagcaacagaaatttcagaatttgatttatcagatattgaagaaaatgaaattgctctacacacagttttgtttctttttgctccttctagcacacagtagtgaaaggggagagtagatttacagtcggtacagagaaaaaagagaaaagat

SEQ ID NO: 462292 - DNA, 564 bp, Homo sapiens
ttatcagaatttcaaagtggtctgagttctcaaatatgcttagacccaatagcctagtctccaaaaatctacaattaggtagggagaaatagattccatcataatgctttttaggaaaaatcaatagtcaattaatttagtaaaacatagtatcatttagccccatttgtcttttttatgtgcaatcatagagtaagaaattgcaataattgacttttgagatctttctgtggacatccttgttcaaaaatccagaaatcttgcttagagaggaaatgagattgtgaaactggaaraaagaaaccattttctgcttcctatactgctatacctctgttgtgttctgtctgtaaatttaatcaggcccttgcaagtatttatattattcttagcctcagttaaatcttagactgagcaacagaaatttcagaatttgatttatcagatattgaagaaaatgaaattgctctacacacagttttgtttctttttgctccttctagcacacagtagtgaaaggggagagtagatttacagtcggtacagagaaaaaagagaaaagat

SEQ ID NO: 462293 - DNA, 564 bp, Homo sapiens
ttatcagaatttcaaagtggtctgagttctcaaatatgcttagacccaatagcctagtctccaaaaatctacaattaggtagggagaaatagattccatcataatgctttttaggaaaaatcaatagtcaattaatttagtaaaacatagtatcatttagccccatttgtcttttttatgtgcaatcatagagtaagaaattgcaataattgacttttgagatctttctgtggacatccttgttcaaaaatccagaaatcttgcttagagaggaaatgagattgtgaaactggaaaaaagaaaccattttctgcttcctatactgctatacctctgttgtgttctgtctgtaaatttaatcaggcccttgcaagtatttatattattcttagcctcagttaaatcttagactgagcaacagaaatttcagaatttgatttatcagatattgaagaaaatgaaattgctctacacacarttttgtttctttttgctccttctagcacacagtagtgaaaggggagagtagatttacagtcggtacagagaaaaaagagaaaagat

SEQ ID NO: 462294 - DNA, 572 bp, Homo sapiens
caagttttcccctgccctgggtaggtccagatatgccatctggaaaccagggcctggagtcagaaaccttaggaacctaactcacgctgtattctattgtggctgacttggaatccaagccayaagacaaagtccttcccactcttccctctcatttccacaagcagaggagtcttttcccagggccacccaccacaggcccatagggaatactgccagactaacactgatgttcactcaaggcccaagggcatgaaagttactaggtgtgggactcacccttctggcccagggcaggtccagaaatgccctccaagagccaatacccagaatcgaggacaacaagtgcctgcttggtgctgtaccccactgtggccaactcattacttaaactgatttttgtttctcatgaaggtgcctgttttgtgtagatggttgttaaatgtggtgtttctgtagggaggacaatcagtggagggttctgttgggccattttgctccgcctcatgctccccacatataaattcattttaaacttcacatttaaatattggcattttaatttcaaagta

SEQ ID NO: 462295 - DNA, 572 bp, Homo sapiens
caagttttcccctgccctgggtaggtccagatatgccatctggaaaccagggcctggagtcagaaaccttaggaacctaactcacgctgtattctattgtggctgacttggaatccaagccataagacaaagtccttcccactcttccctctcatttccacaagcagaggagtcttttcccagggccacccaccacaggcccatagggaatactgccagrctaacactgatgttcactcaaggcccaagggcatgaaagttactaggtgtgggactcacccttctggcccagggcaggtccagaaatgccctccaagagccaatacccagaatcgaggacaacaagtgcctgcttggtgctgtaccccactgtggccaactcattacttaaactgatttttgtttctcatgaaggtgcctgttttgtgtagatggttgttaaatgtggtgtttctgtagggaggacaatcagtggagggttctgttgggccattttgctccgcctcatgctccccacatataaattcattttaaacttcacatttaaatattggcattttaatttcaaagta

SEQ ID NO: 462296 - DNA, 572 bp, Homo sapiens
caagttttcccctgccctgggtaggtccagatatgccatctggaaaccagggcctggagtcagaaaccttaggaacctaactcacgctgtattctattgtggctgacttggaatccaagccataagacaaagtccttcccactcttccctctcatttccacaagcagaggagtcttttcccagggccacccaccacaggcccatagggaatactgccagactaacactgatgttcactcaaggcccaagggcatgaaagttactaggtgtgggactcacccttctggcccagggcaggtccagaaatgccctccaagagccaatacccagaatcgaggacaacaagtgcctgcttggtgctgtaccccactgtggccaactcrttacttaaactgatttttgtttctcatgaaggtgcctgttttgtgtagatggttgttaaatgtggtgtttctgtagggaggacaatcagtggagggttctgttgggccattttgctccgcctcatgctccccacatataaattcattttaaacttcacatttaaatattggcattttaatttcaaagta

SEQ ID NO: 462297 - DNA, 572 bp, Homo sapiens
caagttttcccctgccctgggtaggtccagatatgccatctggaaaccagggcctggagtcagaaaccttaggaacctaactcacgctgtattctattgtggctgacttggaatccaagccataagacaaagtccttcccactcttccctctcatttccacaagcagaggagtcttttcccagggccacccaccacaggcccatagggaatactgccagactaacactgatgttcactcaaggcccaagggcatgaaagttactaggtgtgggactcacccttctggcccagggcaggtccagaaatgccctccaagagccaatacccagaatcgaggacaacaagtgcctgcttggtgctgtaccccactgtggccaactcaktacttaaactgatttttgtttctcatgaaggtgcctgttttgtgtagatggttgttaaatgtggtgtttctgtagggaggacaatcagtggagggttctgttgggccattttgctccgcctcatgctccccacatataaattcattttaaacttcacatttaaatattggcattttaatttcaaagta

SEQ ID NO: 462298 - DNA, 531 bp, Homo sapiens
tatcctttgaatggccacaactgtgaagtaaaaaagttctgtctgaacaagaaatggctggtgctttatccagccaaagaggttaaagtagttctggaagctttggttgaagttgtggaggtaattccgatggggatgacaacttgagtcatggaggaarccacagtggttgaggaggttttggtagcaatcatggtggtggtggatacagtgacagtgggcatggctataatggaattgataatgatgggagcagtttgagaggtggttgaaactacaaggattttggcaattacaataagcaatccttaaattttgaagccacgaggggagaaaactttggaggcagaagctctagaccctttaatggtggaagtcaacactttgcccaaccacaaaaccatagtggctacaatgatggttccaatagcagcagtagttatgacagtggcagaaggttttaatttctgccaggaaacaaagtttagtggagaaaagagccagagaagtgacaggaaagttacagtttac

SEQ ID NO: 462299 - DNA, 620 bp, Homo sapiens
tgagggtgctgggaagtttaagctttttagctatctttaaaaaatggtgacagctttatgagctggaggaaaatgtttattgggtagaattctccctaagtggttaaagagaattttagacatttatctcttcctggcatcattcaagcttttgataactgggaatggrgtaaggggaaaagtccaattttaggaattgaatcagagacaaggaagacaagggaacagggagggtttcaccataggaaagttagatttgatagccccactctaagacaggaagaagaagagtgcttacatgtaggaaaagcacaggatttgtgatcacacatctagtcctacattctgaaccagattatccaatgaggtggatcagccctgaagctctttctcatactggtagaatgtgacactggaattagccttcaagtggtgctccaggtgtggactgaacctgagggggcataacatgggatagggtggttagagagggactgatatcttttgaataccaattaagtgctagacactatcctaggcgcttttggcatgctattggatcaatgagatacatttttttaagcgatattttactgatgataaaactgagaagcagtaaa

SEQ ID NO: 462300 - DNA, 562 bp, Homo sapiens
cacttctagggattatgctgtgacccttttaatatgtgcttttaatttttttcatttcttaatactcttttttctatactcaatggtgcaagcttctggttttctactggctccttatttaagaatgtgaaaacatccagatatttgagagggtagaagtggaaattaggaatgcctaaacaaactytaaaagaagaattttagcagtattaatttattggctttatcaattaattggtattatggctactatcctaactacttgaatccctacttggtcaataacaaatattatgaaaatatctaagcttttcttctggcctataaaatttaaaaaattagcaaaacatatcacgttgaagacattcatttttcacagagagcagtgaaggcatttctctatttcctttcccccatcctaccctaggattgctctgcagtattcatgtgttagtataggtcaacaaaaagcactatacttgtgttcacctgtttaaaatgatgttaatacacttaatgctataaaaaaaaaaaaccaaaaaggttcgataggtacattcac

SEQ ID NO: 462301 - DNA, 613 bp, Homo sapiens
tgtcctttatcagagcttgagcattgtgctgggagatccactgctctcttcaaagctgacaggcaggaaagtttaagtctgttgaagctgcacccacaactgcmccttcccccaggtgctctgtcccagaaagatgggaattttatccataagcccctgactggggctgctgcctttcttttagcaatgtcctgcccagagaggaggaatctagggcggtagtctggctaccacggctttgcggtgctgtggtgggctctgcccagtctgaacttcccagtaactttgtttacactgtgagaggaaaaccacctactcaagcctcagtaatgatggatgcccctccccccacaaagttcaagcatcccaggtcaactttagactgctgtgctggcagtgagaatttcaagccagtggatcttatcttgctgagctctgtgggggtgggatccactgagcaagaccacttgactccctggcttcagcccctttccaggggagtgaagagttctgtctcgctggcattccaggaaccactgaggtacaaaaaaaaaaaaacaaaacaaaacaaaaaaaaacttctgcagctagcttggtgtctgccaaacagtca

SEQ ID NO: 462302 - DNA, 613 bp, Homo sapiens
tgtcctttatcagagcttgagcattgtgctgggagatccactgctctcttcaaagctgacaggcaggaaagtttaagtctgttgaagctgcacccacaactgcaccttcccccaggtgctctgtcccagaaagatgggarttttatccataagcccctgactggggctgctgcctttcttttagcaatgtcctgcccagagaggaggaatctagggcggtagtctggctaccacggctttgcggtgctgtggtgggctctgcccagtctgaacttcccagtaactttgtttacactgtgagaggaaaaccacctactcaagcctcagtaatgatggatgcccctccccccacaaagttcaagcatcccaggtcaactttagactgctgtgctggcagtgagaatttcaagccagtggatcttatcttgctgagctctgtgggggtgggatccactgagcaagaccacttgactccctggcttcagcccctttccaggggagtgaagagttctgtctcgctggcattccaggaaccactgaggtacaaaaaaaaaaaaacaaaacaaaacaaaaaaaaacttctgcagctagcttggtgtctgccaaacagtca

SEQ ID NO: 462303 - DNA, 613 bp, Homo sapiens
tgtcctttatcagagcttgagcattgtgctgggagatccactgctctcttcaaagctgacaggcaggaaagtttaagtctgttgaagctgcacccacaactgcaccttcccccaggtgctctgtcccagaaagatgggaattttatccataagcccctgactggggctgctgcctttcttttagcaatgtcctgcccagagaggaggaatctagggcggtagtctggctaccacggctttgcggtgctgtggtgggctctgcccagtctgaacttcccagtaactttgtttacactgtgagaggaaaaccacctactcaagcctcagtaatgatggatgcccctccccccacaaagttcaagcatcccaggtcaactttagactgctgtgctggcagtgagaatttcaagccagtggatcttatcttgctgagctctgtgggggtgggatccactgagcaagaccacttgactccctggcttcagcccctttccaggggagtgaagagttctgtctcgctggcattccaggaaccactgaggtacaaaaaaaaaaaaacaaaacaaaacaaaamaaaacttctgcagctagcttggtgtctgccaaacagtca

SEQ ID NO: 462304 - DNA, 622 bp, Homo sapiens
acccacaactgcaccttcccccaggtgctctgtcccagaaagatgggaattttatccataagcccctgactggggctgctgcctttcttttagcaatgtcctgcccagagaggaggaatctagggcggtagtctggctaccacggctttgcggtgctgtggtgggctctgcccagtctgaacttcccagtaactttgtttacactgtgagaggaaaaccacctactcaagcctcagtaatgatggatgcccctccccccacaaagttcaagcatcccaggtcaactttagactgctgtgctggcagtgagaatttcaagccagtggatcttatcttgctgagctctgtgggggtgggatccactgagcaagaccacttgactccctggcttcagcccctttccaggggagtgaagagttctgtctcgctggcattccaggaaccactgaggtacaaaaaaaaaaaaacaaaacaaaacaaaaaaaaacttmtgcagctagcttggtgtctgccaaacagtcacccagttttgttcctgaaacccagggctcttgtggtgtaggcacatgggcagaggttggaagattttggagggttcagaagaagacaggaagatgaggga

SEQ ID NO: 462305 - DNA, 622 bp, Homo sapiens
acccacaactgcaccttcccccaggtgctctgtcccagaaagatgggaattttatccataagcccctgactggggctgctgcctttcttttagcaatgtcctgcccagagaggaggaatctagggcggtagtctggctaccacggctttgcggtgctgtggtgggctctgcccagtctgaacttcccagtaactttgtttacactgtgagaggaaaaccacctactcaagcctcagtaatgatggatgcccctccccccacaaagttcaagcatcccaggtcaactttagactgctgtgctggcagtgagaatttcaagccagtggatcttatcttgctgagctctgtgggggtgggatccactgagcaagaccacttgactccctggcttcagcccctttccaggggagtgaagagttctgtctcgctggcattccaggaaccactgaggtacaaaaaaaaaaaaacaaaacaaaacaaaaaaaaacttctgcagctagcttggtgtctgccaaacagtcacccagttttgttcctgaaacccagggctcttgtggtgtaggcacatgggcmgaggttggaagattttggagggttcagaagaagacaggaagatgaggga

SEQ ID NO: 462306 - DNA, 489 bp, Homo sapiens
atatttgaaaaatttgcagcctggccacgtggtaaaaaagcaaagtccattttcagggtagaaattcaagcaggctttgaaatttgcatacctaaaaaggaagcaagtctgatagccaagacaatgggaaatggcctcaaaggcatttaggggatctaagaggcagcccctyccaccacatgcccacaagtttaggaagacagaatggtgtcctgggccaggcctgaagccccactgccctgtacagcctcaggaaacttctccctgcatcccagacactccagctccagtctcagctgtggcttaaagggcccagttgcaactccagccactgcttcagagagtgcaagctgtaagccttggagacttctatgtgttaatgttgtgggtgtgcagaatgcaagagatgaggcatgggagcctccacctagatttcagaggatatatctgaaaagcctgggtgtccaggcagaagcctgctgagagggg

SEQ ID NO: 462307 - DNA, 581 bp, Homo sapiens
taatacggtttgtatctgttatctcaccaaatctcaggttgaatttgtaatccccaatgttggaggtggggccgggtgagaggtgactggatcatgagggtggctttctcatgaatgggttagcaccacccctttcattccgtcttcaagatactgagtaaattttcamgagatctggttgtttaaagtgtgggggacctcactttcaccctcttgctcctgccatgtaagatgtcagtgctcccccttcaacttctaccatgattttaagtttcctgaggcctccccagaagctgaacagatgccagcatcatgctttctgtacagcttgaagaaccatgagccaattaatcctctcttcttagtaaattatccagtctcaggtatttttacagcaatgcgagaatggactgatataataactaaatatctatcaacgcaggacttataaataaattatggtacatccataaactggaacatcccagtttgcatataaaaggatatgctaatttggaaagatctctaagacatagtaattgaataaagcaaactaggtatagtatgtatgatgagataga

SEQ ID NO: 462308 - DNA, 562 bp, Homo sapiens
tcacacatttattttcctatcatgctggtttgtttttgatgaattctatattactacaagtctcacaagagaataaaatttttgaaataaatactgtaaaaattcagattttttaaatgtgtgagttatttgaggtatatgtcctcaatttaaataaattaactcctttctyttcccctggcattttatgaaatttaatgcacaaatatatgtgcattccaaagtgtcaaaagattatttttatgtgtcagaagattcaatccatgcttctcttaaaaatttagaacttgtttacttctaaggctgagtgcattttagaataactttgtgttagctacaaataacaatcttttcaagccctagcaaccaagctctgcctcagcaaaggcctttgaagagtttctttcactgcctttgcccctccctccttctgtacccacccaggtcctcagcatcacaatttcaaaaagtagagggggaggaagggaggaagggaagaagagagggagagagggagggaggtagggagtgagggaggaaggatggatggaaggaaggaagg

SEQ ID NO: 462309 - DNA, 593 bp, Homo sapiens
cagctattattgtattggggggctatctctctctttagctataataatatttgttytacgtatttaggtgttatctatttatatatctgggtgttatatgtatttaaaattgttatatcctcttgctaaattgacccctttatcatttatagtgactttcttggtctcttcttatagtttttgtcttgaaatctgttttgtctgttataagcatagcaattcctgctctttttttggtttccattggcatggaatatctttttccatccccttattttcagtctttgtgtgtctttataggtgaagtgtgttttttgtaggcaaaagatcaatggatcttgttgtttcatctattcagccagtttatgtcttttgattggagagttaggtccattgatattcaatgttattattgataagtaaggacttattcctgccatttttgttatttgttttttgggtgttttgtggccttcttttccttctttctttccttcctgtcttcccctatgaaggtgattttctctggtgttatgagtttcttgctttttattttttgtatatccattgtatgatttttggtttgaggttac

SEQ ID NO: 462310 - DNA, 422 bp, Homo sapiens
gggagcaggaaaaatcctctaccttctacttaaaccttaacatgatcatatgtcctagaataatgcgattgcatttcaccattgcaatatgtcaatagttgtaaaatcagcagcagttgatccagtttggaaatatgagggtggatgtaacacagtggaataaagagacacgtaggtaaggcagagggtgttgaaaatggtgtgtgggttgggaaaggaattaaaggacagtgaagtactgaccaactacgcagctggtatttgctagttaatactaaagctgtgaaataagaaagaaagaaatgtgatagcatcttggcgattcttytgggatgaaaaactttttaatacaattttttgttttaagcattggtatttacagaatatcatgctcattaacaactttaaaaagtgacaagatt

SEQ ID NO: 462311 - DNA, 568 bp, Homo sapiens
gagcaaattaatgcagcaaagcagtcagtgatattgttataaacaaaggagacattttcttgcatgacttttagaaaatgagtttttgacactagacaaaccacatgtgtattgttttaatggacatcaagaaattactaacttaakgcctataaaaagaaaacagttaaagcttctatatagcaaatactgaactgcattgtgcatataacacatgcaagtttttttaaatacccatattacataccatttaaaagaggtcctgtggttgagtgttgtaggcaaaggaattttatccattgtttctaatactacttcaaacgggatcatttgaaaccttgattaaaaaggtatactggtatgtcaggtcagatattagggaagaggaatgtgctttttaagacccattatacaatttttgttatttgagaaacagaaagtaagaaacaaaataacacataggttttaaaaacataaagcttgcaacaccacccatctttaaatttcttctatcaaaaggttatataaagaaataaaatgatcaaatggaagagcacatggaggcata

SEQ ID NO: 462312 - DNA, 568 bp, Homo sapiens
gagcaaattaatgcagcaaagcagtcagtgatattgttataaacaaaggagacattttcttgcatgacttttagaaaatgagtttttgacactagacaaaccacatgtgtattgttttaatggacatcaagaaattactaacttaaggcctataaaaagaaaacagttaaagcttctatatagcaaatactgaactgcattgtgcatataacacatgcaagtttttttaaatasccatattacataccatttaaaagaggtcctgtggttgagtgttgtaggcaaaggaattttatccattgtttctaatactacttcaaacgggatcatttgaaaccttgattaaaaaggtatactggtatgtcaggtcagatattagggaagaggaatgtgctttttaagacccattatacaatttttgttatttgagaaacagaaagtaagaaacaaaataacacataggttttaaaaacataaagcttgcaacaccacccatctttaaatttcttctatcaaaaggttatataaagaaataaaatgatcaaatggaagagcacatggaggcata

SEQ ID NO: 462313 - DNA, 568 bp, Homo sapiens
gagcaaattaatgcagcaaagcagtcagtgatattgttataaacaaaggagacattttcttgcatgacttttagaaaatgagtttttgacactagacaaaccacatgtgtattgttttaatggacatcaagaaattactaacttaaggcctataaaaagaaaacagttaaagcttctatatagcaaatactgaactgcattgtgcatataacacatgcaagtttttttaaatacccatattacataccatttaaaagaggtcctgtgrttgagtgttgtaggcaaaggaattttatccattgtttctaatactacttcaaacgggatcatttgaaaccttgattaaaaaggtatactggtatgtcaggtcagatattagggaagaggaatgtgctttttaagacccattatacaatttttgttatttgagaaacagaaagtaagaaacaaaataacacataggttttaaaaacataaagcttgcaacaccacccatctttaaatttcttctatcaaaaggttatataaagaaataaaatgatcaaatggaagagcacatggaggcata

SEQ ID NO: 462314 - DNA, 509 bp, Homo sapiens
ttgaatgccacaaggaactatgcatttgattcctacagacaagcatctttcaaacggttcctttgtatgacaatccttgttaggaataaagatctgtggttgaataattggaaaagtcctgtcaaccctgacccktttggagatttccatgaacatctgaacatgttaaaggttctgagatctattcttaaaaatgccatctgatcatgtttaacttaccattttctcattacttttaatttcaaaaccccttgctttgcctatcatttgtggcatcatatgttctaatgtggaatatttctcagaaaaaaatttgggtttttctgcagaagagaacaataaaatctttaaattggaaaatagtacaatggaatttctcttttagagaggtacatgtgaaagtcatataaattcaaataacttctgtccaattaagcaggaactgggatatacagtctgtccaattttgtgcttaatgggttgttcacggtggtgtttaccatttcaac

SEQ ID NO: 462315 - DNA, 509 bp, Homo sapiens
ttgaatgccacaaggaactatgcatttgattcctacagacaagcatctttcaaacggttcctttgtatgacaatccttgttaggaataaagatctgtggttgaataattggaaaagtcctgtcaaccctgacccgtttggagatttccatgaacatctgaacatgttaaaggttctgagayctattcttaaaaatgccatctgatcatgtttaacttaccattttctcattacttttaatttcaaaaccccttgctttgcctatcatttgtggcatcatatgttctaatgtggaatatttctcagaaaaaaatttgggtttttctgcagaagagaacaataaaatctttaaattggaaaatagtacaatggaatttctcttttagagaggtacatgtgaaagtcatataaattcaaataacttctgtccaattaagcaggaactgggatatacagtctgtccaattttgtgcttaatgggttgttcacggtggtgtttaccatttcaac

SEQ ID NO: 462316 - DNA, 646 bp, Homo sapiens
acacatctttctactttaattggttaacatttcacatagctttttagctgtagtaactctctgatttataccttttattttgttttttaaaaaatattgccagtcaccattcagtgtgtcaaattcataaccccattaaatgggtcttgactcatttaaacgactgtcaattcagatttccatgtccactaaaatccattttaaaagatgtctaaagcagaggaaatcttcaacataaaaaaccaacaagctaaaataattagcttgctaggaactaataaaatacttttcctagtgccaaagaactatgcttgagacaagaaaaaaagatagagccaaattttaaaatgtagttgcgatagttaaaattgacttgaaagagatttacaaagaaactgcaatgaaaaaycttttcacttttactaccctaccccccaactttataggctgctaagcattattattaggaggccatcattcagaaaacttgcttgttaccccaacacactaaattcaaaggtcgttttcccaagtttttggaatttatacttgtcaggcctctgagcccaagccaagccatcacatccgcggtgacttgacgtatatgcccagatggcctgaagtaactgaagaatcacaaaagaag

SEQ ID NO: 462317 - DNA, 589 bp, Homo sapiens
aagtcaacccatcttaaacccaaagagggaagtccttcaaaggtttctgagcagttataaagctaaaagttgagaaatgggctacaaatatttctgcattacttaataatatttttataattattttcctttttacaaaataatttaatcagactatttacaatgaattacactaggcaagaggttttttttaagtttgagaagccacaagatatcaataccattccctacttttaaaggaccttgtatattttggtaagattacatgaactgctgacctttagtcaattttgtatgatcatggaaacacacagtatcatttctactaccaatttraaaaactatcttttatgtgtgggcaaaatgaaaagtcagtctacataccctttatgtaactgttatataagtaactctgtaattaagaaaaaaattcccaaagtccttatcccatcatttatagtgagaaagacagattggtgaaagcatccaggtgctggaggtttagactacaaattagagttcacatttgtacccactacgtcttttagttggggttgtaaattaacatctataacatctattttatact

SEQ ID NO: 462318 - DNA, 541 bp, Homo sapiens
gagcgggcgacggtcacgggacaagggtggagggggtggggacctcatccgagtctcagagatggaattttcgaggaagggagcgatttcgagagagaatagtttgagaagttgttctcagtcccttcyctcgcgggagtgtggtatttagggaagcttcggcctcttaacccatggactgttaggatggagggaatccttcccgctcgattcctatcgcggagtcctttcggagcatcgctattgatcattctcgccgccccaaccccgttgtttactttggcttcgcagatctctgtggtcttttgccctcccgcagcgcccatggccccgtcaaggttgggcagcctttctctgcaagaaggcccacgaacaactgcggttatattgggatggattgcgcgtgattttactctttacaatacattctttcatgcttcctagggattgagctgcgcggcggatccctccgacttaattctgggcctgagaaaagtttctcttggaatgcgcagtttcgtgacgcagcattattgcgtga

SEQ ID NO: 462319 - DNA, 562 bp, Homo sapiens
tgaaaaagaataataataacatagtaacatatcccaattttataggctagaacacacatacacatacacacagagtaggaaaaatgaaaagtatgtacaccatacacttaatagtggttcatcccaaaaaatggggccacagatgtggtagtttttacttaattctttgcactgtataattttyttttactttaaccatctgttgctcctataagctaaaaataaccaataatgcattttctactttggataaaatgataaagagtgcagtgtgtagaggagatgggaggagagcagtcctggcagcagcaggacacgtggaaaggagtaggaagtggaagtgtggggcattggtgggagcccctagcagttcagcatcatgcaacctccagtgtcagaggagacagccaaggagtcatgcaaaacagtttagttcttatcctaaaagggaccaggaaccagtgacagctttggatcaggagagagacatggccctgtgtgcagatccctctggggtcagtgtggagaatggatgaagggggctgattgacagcagagaggt

SEQ ID NO: 462320 - DNA, 562 bp, Homo sapiens
tgaaaaagaataataataacatagtaacatatcccaattttataggctagaacacacatacacatacacacagagtaggaaaaatgaaaagtatgtacaccatacacttaatagtggttcatcccaaaaaatggggccacagatgtggtagtttttacttaattctttgcactgtataatttttttttactttaaccatctgttgctcctataagctaaaaataaccaataatgcattttctactttggataaaatgataaagagtgcagtgtgtagaggagatgggaggagagcagtcctggcagcagcaggacacgtggaaaggagtaggaagtggaagtgtggggcattggtgggagcccctagcagttcagcatcatgcaacctccagtgtcagaggagacagccaaggagtcatgcamaacagtttagttcttatcctaaaagggaccaggaaccagtgacagctttggatcaggagagagacatggccctgtgtgcagatccctctggggtcagtgtggagaatggatgaagggggctgattgacagcagagaggt

SEQ ID NO: 462321 - DNA, 636 bp, Homo sapiens
aaacaccttctcagctggtatttctgttttgacttcatttgctgccaccttayatcataagcaccctgcaccatgtcatagacactgttggttctgtctatgcaatgagattgtgtttttcaaaagcgtttttttctgcaagtaagtaaactctgcctggtctttgatgtgagcttagtcactgaatgaatagctttgttggacaatgagataagattataatagagtctataataatgatgccaatcacagatggcaggaaggctgttattcttagactgttgtatttgtaaatcatgctagatttcccatgacaatctaaaaatgccaccttgttagtgattgaggtttatattttaagttcccaagaaaaatattccagaaagaacttcctactcttctttactgtgtaataaataagttccaggaaggactcacatcattgcaggaattacccagggggcatttttacttcttcacctgaccctgtaacaggcaggcagttgtcacattcacttatatgtaaaatgattcttacttgtattgaaggttatatatttattttctgtagttttatttttacctaaattggaagcacatattctgttatgggccagggagttggagtatggaagc

SEQ ID NO: 462322 - DNA, 563 bp, Homo sapiens
atttattggcataactttataatattcccttattatattttaatatctatgctatctgtagtgacatcctgttttttattacttccgttggtaatatgtgtttctttccttaatacattgatttaraggtttacaggttgagaattcctaatttgaaaatctgaactctgaaatgctccaaaatccaaacctttttgagtgcatgatgccacaagtggaaattccacacctgacctaaggtgatgaatctcagtcaaaatgcaggtacaaaacacacagtttattcaacatccccaggggaaaaagactttcccagccccttcagctgcaataaatttgggtctcatccccaatacatctcattatgtatatgcaaatatttaaaaatccaaaatagttctggtcccaagcatttcagataagggatatttaacctgtaataaatattaatgttttcaaataagcaactttttactttcttgatttttctctattatttgtccattttctatttcattgattttactcttacctctattgtttccttcttgaactttgtgttt

SEQ ID NO: 462323 - DNA, 669 bp, Homo sapiens
gcccataggtgggtgaaatcacagaaagtgaaatcacagataaggaggtagtactgtaccactaaaacagtaatcctatgaaatctggcccacattctccctaaaacacctgaaggggttgtgcctaaccatatcttgggttaaatttgctaggtgcataattttttggagtaagttgtagggttggcaaagcacttcaaagatgtcctccaatcccaaagatctgagctgttagctataacaatggagataaattgtattttaggagttatccactactgtcagtagcaggcaaggaacccatatgcggccacactccaatgcattcattgagcattgctgtactccctccaagagaagataggaagagccaggaatcagccaacaacttatagaattgactccatagatccccaagagccagaattgatgtcaaaaacggcccaaattcttcaccctttcctttattcatgcctctgcaatgtgacttttaagtttctttcatcaagcagtaaaatctatttccccacctgaatctwgtttggccctatgattcgatgtggctcttggaatggaccaaagtggctgtgtgccacttccaagcctggacatccaaaagcctttcatgtttctactttctctctcctgaaactctgtccagcatcatga

SEQ ID NO: 462324 - DNA, 650 bp, Homo sapiens
acttactgtgagtaaaacaatagagcaagcaaggatrcagaaaagactccatagattgctctacatttttatagtttaatcataagtccctttatctgaagaaattacttccaatcatgtaaggaaatgatggcataattggttgtcttcttaccagcctagaatatgagtagacacttatcattcatggtatgatttgaaaggctgaacaaatcttatcatgaaatccaccctttttctcctctgtgcctgaaattccactattagcaattcaatcttttggatcttataggatttttattttaaatgtactatggtctcttgtggccaagcttcttgtagttgtaatagcctttggtatttctgaatttccatttgctatagaacttcacatgcatgtttaggttagcatgcttgaaattattaaggcagagtacaaatatcattttaaaattagacatttactaaattttggatgtaaaatgaagtaagttgtaaggtcatgatatccattcttcccccttcaaagatatgaacttattccatttttaattacatactcttcaaaaaataaattacacatcatattacctaaaccaatgattaacaaccatcacagtcaggcaatgtcttacctaagtaaaaaaaaa

SEQ ID NO: 462325 - DNA, 604 bp, Homo sapiens
aacaaccatcacagtcaggcaatgtcttacctaagtaaaaaaaaaagttttcaactacatcaatagctccttcagtacaatgtagaaattgtttttgagccttcactaaggaccagctactgcactaggcctgttagagaatacaagatcagacttggctcttgccctcaagagggtcccacataaattcaggtagttccaaggcagcacagactatgacaaatgcagcaggagaaatacaaacacaatgttagtggagacatggattactttaaaattgggagagtgacctgtagaaagcagtttggagatttcttaaagaactgaaaatagaactaccttaccaccaagaaatccaytattgggcatatacctaaaggaaaataaaacattttaccaaaaagacacatgctcttgtatatttatcacagcattattcataatagcaaagacatggaatctatagggcgaaattcacccccgatatttcacgtcggttcttttctagtttccctaagtgtcggccagtctgagaaataaagggacagaatacaaaagagagaaattttaaagctgggtgtccaggggagacatcacatgttgg

SEQ ID NO: 462326 - DNA, 604 bp, Homo sapiens
aacaaccatcacagtcaggcaatgtcttacctaagtaaaaaaaaaagttttcaactacatcaatagctccttcagtacaatgtagaaattgtttttgagccttcactaaggaccagctactgcactaggcctgttagagaatacaagatcagacttggctcttgccctcaagagggtcccacataaattcaggtagttccaaggcagcacagactatgacaaatgcagcaggagaaatacaaacacaatgttagtggagacatggattactttaaaattgggagagtgacctgtagaaagcagtttggagatttcttaaagaactgaaaatagaactaccttaccaccaagaaatccactattgggcatatacctaaaggaaaataaaacattttaccaaaaagacacatgctyttgtatatttatcacagcattattcataatagcaaagacatggaatctatagggcgaaattcacccccgatatttcacgtcggttcttttctagtttccctaagtgtcggccagtctgagaaataaagggacagaatacaaaagagagaaattttaaagctgggtgtccaggggagacatcacatgttgg

SEQ ID NO: 462327 - DNA, 604 bp, Homo sapiens
aacaaccatcacagtcaggcaatgtcttacctaagtaaaaaaaaaagttttcaactacatcaatagctccttcagtacaatgtagaaattgtttttgagccttcactaaggaccagctactgcactaggcctgttagagaatacaagatcagacttggctcttgccctcaagagggtcccacataaattcaggtagttccaaggcagcacagactatgacaaatgcagcaggagaaatacaaacacaatgttagtggagacatggattactttaaaattgggagagtgacctgtagaaagcagtttggagatttcttaaagaactgaaaatagaactaccttaccaccaagaaatccactattgggcatatacctaaaggaaaataaaacattttaccaaaaagacacatgctcttgtatatttatcacagcattattcataatagcaaagacatggaatctatmgggcgaaattcacccccgatatttcacgtcggttcttttctagtttccctaagtgtcggccagtctgagaaataaagggacagaatacaaaagagagaaattttaaagctgggtgtccaggggagacatcacatgttgg

SEQ ID NO: 462328 - DNA, 602 bp, Homo sapiens
tctggcataccaaggtaggatatggcatggaaagggatttcttattgagatacaatgagcctgaaagaatacattctccacaaggagcaatactaaaaggattcccgaatgcaataggactctctccttgaattcaccactactgcatagacagctcctaccatcactacaacatgcaaattattctctttgccaccctccactctccactgacccagatccattctctctgtgttctgtgtatgcctgaaaggctgaaccctacagagtgcatggcatgggctratgaaaagcctaacaaggaatcagaaggaaggaagagagaggtcaggccagttattggcttgctcatgcctgctttaatgctaggattcttacattggatgtgactctctctgatttcagctcctgccaggcagcgcctcctccaaggctttggctcacagggctttggtgaactgttccccaccccttcaggtttaggaatggtaacaccttgatgttgccagtcagggggtccctctgcttctcttgtttgttttctaatccaaatgccacatatctctagctagtacactcattaaattctcctcagaattcca

SEQ ID NO: 462329 - DNA, 634 bp, Homo sapiens
agaaaacaataatttatagcattcatgacttttatagtattaatatttccatcatgatccatttcaaactacccacaccacactgagaagagcagcacaccrttataagacatacatataatacatacagacacaatagatgtaaataacaccaatagcatagataagcgtaaaatgtagtatgaaaggacaagccttgagtatttattacctttgtttttaacataatgttcaattgtttatataatttaagtttaacagcaaaattgctgaaactttgtcagttcttgcgagcctgtgtgagctgactccagcatgtcaacgcctctgtccctcctagttgccagaagagtacacttccccgtattagtctttctagatgtgtttcctcggttgcagtattattttagaaattccctactacaatttgtttggttttatgattctcattattatttcctgaaatgaaatgcaatttaatagataaccaatgaagtaaagaagggtggtcaattatccattaaagagcaaactacgaggcagtgaaaggaacacaggattttgagtcagaagaccaagacctgggcatgacacttagtcctattatcttaaatgtatcttttaaattttgacc

SEQ ID NO: 462330 - DNA, 634 bp, Homo sapiens
agaaaacaataatttatagcattcatgacttttatagtattaatatttccatcatgatccatttcaaactacccacaccacactgagaagagcagcacaccattataagacatacatataatacatacagacacaatagatgtaaataacaccaatagcatagataagcgtaaaatgtagtatgaaaggamaagccttgagtatttattacctttgtttttaacataatgttcaattgtttatataatttaagtttaacagcaaaattgctgaaactttgtcagttcttgcgagcctgtgtgagctgactccagcatgtcaacgcctctgtccctcctagttgccagaagagtacacttccccgtattagtctttctagatgtgtttcctcggttgcagtattattttagaaattccctactacaatttgtttggttttatgattctcattattatttcctgaaatgaaatgcaatttaatagataaccaatgaagtaaagaagggtggtcaattatccattaaagagcaaactacgaggcagtgaaaggaacacaggattttgagtcagaagaccaagacctgggcatgacacttagtcctattatcttaaatgtatcttttaaattttgacc

SEQ ID NO: 462331 - DNA, 634 bp, Homo sapiens
agaaaacaataatttatagcattcatgacttttatagtattaatatttccatcatgatccatttcaaactacccacaccacactgagaagagcagcacaccattataagacatacatataatacatacagacacaatagatgtaaataacaccaatagcatagataagcgtaaaatgtagtatgaaaggacaagccttgagtatttattacctttgtttttaacataatgttcaattgtttatataatttaagtttaacagcaaaattgctgaaactttgtcagttcttgcgagcctgtgtgagctgactccagcatgtcaacgcctctgtccctcmtagttgccagaagagtacacttccccgtattagtctttctagatgtgtttcctcggttgcagtattattttagaaattccctactacaatttgtttggttttatgattctcattattatttcctgaaatgaaatgcaatttaatagataaccaatgaagtaaagaagggtggtcaattatccattaaagagcaaactacgaggcagtgaaaggaacacaggattttgagtcagaagaccaagacctgggcatgacacttagtcctattatcttaaatgtatcttttaaattttgacc

SEQ ID NO: 462332 - DNA, 597 bp, Homo sapiens
aaattgaaaacttagatagggaagaaagatagatcaaaatatacatttattacccatgagactaagttagaggacacaggttgtttcaagaaccatgactaacaaacaaactaaacccaagaattaggcggattttaccaccttgttacgggcaacactaaacaatagaagctctcctctctccggctggcatggtggagaatccttttttcctgggccagctagccccgaagagaaaaaaaaggtggaactgatgcagaaatgagcttatttttcccaaattctcaaatcagataaactacccttattcgtcctaagtaaaatgaataaagagttggagaaataatgggaactatattaatcaagttctcctaacatagacatatattgcaatggagtagggagtcagcataggcaagttatactgaaaaataactgtcgctcattttattgtaataggcattcccacatatcacaaataatggaataaaaagattttgataatawtctttatccaagccttttgttcagtaaatggacaaaaagacattacacatagaaacaaaagatgagttaatccagataaaaagaacttca

SEQ ID NO: 462333 - DNA, 471 bp, Homo sapiens
ccttaactttggctctaaaactgtacaaagcctggcccctaattctgctcaggtcttatctcaaattatgctcttccrtagtgtctggattcccttcatattgggcttctttcctcattccccactttccaggcttcctctgagtaacagcttttgcacatgttgtttcctctctccctctcttatcatctagtaaactctgcctcattgttcaaccaaagctcaagtgtcctgttttcagaatagcctcccctaactcctctgagtatctccaatcttccaagtacagggtctgatagcaccgattacttctactgtccagcactgccagagttgtaatatccatttgctttttgaattattcaagcaatgttttttttctctggtccaggctccatgagatcagggaccacgtcacttttgtacaccattgtagccctagagtctcacatatggtagtagaagctgatt

SEQ ID NO: 462334 - DNA, 471 bp, Homo sapiens
ccttaactttggctctaaaactgtacaaagcctggcccctaattctgctcaggtcttatctcaaattatgctcttccgtagtgtctggattcccttcatattgggcttctttcctcattccccactttccaggcttcctctgagtaacagcttttgcacatgttgtttcctctctccctctcttatcatctagtaaactctgcctcattgttcaaccaaagctcaagtgtcctgttttcagaatagcctsccctaactcctctgagtatctccaatcttccaagtacagggtctgatagcaccgattacttctactgtccagcactgccagagttgtaatatccatttgctttttgaattattcaagcaatgttttttttctctggtccaggctccatgagatcagggaccacgtcacttttgtacaccattgtagccctagagtctcacatatggtagtagaagctgatt

SEQ ID NO: 462335 - DNA, 471 bp, Homo sapiens
ccttaactttggctctaaaactgtacaaagcctggcccctaattctgctcaggtcttatctcaaattatgctcttccgtagtgtctggattcccttcatattgggcttctttcctcattccccactttccaggcttcctctgagtaacagcttttgcacatgttgtttcctctctccctctcttatcatctagtaaactctgcctcattgttcaaccaaagctcaagtgtcctgttttcagaatagcctcccctaactcctctgagtatctccaatcttccaagtacagggtctgatagcaccgattacttctactgtccagcactgccagagttgtaatatccatttgctttttgaattattcaagcaatgttttttttctctggtccaggctccatgagatcagggaccacgtcayttttgtacaccattgtagccctagagtctcacatatggtagtagaagctgatt

SEQ ID NO: 462336 - DNA, 611 bp, Homo sapiens
gtaaggtaagaaagatgacatctgtgacaacagggttaggtagtagccaaaaccatgaaagctggcagaactccttgagaacatagatacgattgaatcacgaagatgttcaaggtgagtttgcygagtaggagtgatgtaaagtttgtttaggaagaaaaacgctagagatgtctatggaaatgggtgttgcatttgaaaataaccatattttagtttcgtatagttggttaaataaattataccactttaattcaagtatttctctgagttctgtgtattcactcatcagtgggtcatgtaggatattatgtggagaccaatctccttaacactagagagaaggaagatcggctttaacactaaatacagtgcctgtatataagtgtgttacatacatttatgtgtgatttctataggcttagcatgtgatttggttattatatatgccgaggagaaaaagatcatttatgaatgcttaaattcctaatattacaaaattttaggagagatagggctttagccatcattgtgttacaatccatggaaggtatggctttttatggactcacagctggttagaggcagaagcagacctagagcacaggtat

SEQ ID NO: 462337 - DNA, 495 bp, Homo sapiens
aacctttctacaaaaaaataaaaataattagccaggtgtggttgaatgtgtctgtggtcccagctactggggaagctgaggtgggatgatcacttgagcccaggaggttgaggcttcagtgagctgagttcatgacactgcactccagcctaagcaacagagcgagaccctgcctcaaaataactaactaaataaaataaaataaaaaaaaataaaaacaaacaaaaaaaaamcaacaaggaaaagagagtctattcaaaaaacggttttgggaaaactgaatatccacttgcaaaagaatgaaattagacctttattttacaccataaacaaaaatcaactcaaactaaagacttaaaagtaaggtctgaaattgtgaaagacatagaacaaaacaggggaaaagctttatgcattggtcttggcactgatttcatgaatatgacatcaaaagcataggcaacaaaagtaaaaattgacgagtgggattacatc

SEQ ID NO: 462338 - DNA, 498 bp, Homo sapiens
ttactgacaaaaaaatgtgccagcaggctctctggccagagtttgctggcccctaagtgaccccaggcagacagaggggrtgagatccagggccaaataatgaccttaaataaaaaagagactagagacacacacctgtcaacagaagatggattaacattaactaaaaacttgagcacttagttaaaatatcaattaaatcttttagaattttgaagtcacatttcttctaaaatggaacccaattgtttctaagatggttttttataacaccctaaagcaaaaaaaaaacttacttagctgtgctaaaatgatttggatattttaaattctcaatcacaatcaatctgatattaactcttagaaattcagaaataccactaatgatcacagcaaggacctcaccatttcatgctgcctaaacctgctaaaacacagactctccactgcctgttcgaaaaggaaggtcttatttaaaaagaaggatcacattgtctt

SEQ ID NO: 462339 - DNA, 571 bp, Homo sapiens
gtaatagcaggtatatatctctacagaaatagagatatacatggcaaagtgggtgagttattcactgcaaatcactcattattttctatagtacaaaacataagaataatgtatactatacagagatacagatacatgtgtgtatgttatatgcaagggtggagatctgagggaagaaatatagaaatgtatgagaaaggcagagagacaaagagagagaaactccaatgagaacacagttttaggggaaggagagaaacatggacatagaactaaataaaaattaaatggtgagcttcttttcaggaagaagcttgcaggtgtgagatagccaggattctgtgcaatactgkatgtacaaggttgacagattcccaagagagagagaaggctcagcatagactttcagaaggtaggaaatgaaggatctcattatacagaaccagatagggactgcagcaccaagaaggtgtcctagtgtgaagtctcttcatatataaccagcctcagaggctcactcactcaagagttcactaatataattgattgaaaagggggaaaatgggagttt

SEQ ID NO: 462340 - DNA, 552 bp, Homo sapiens
tattgagaaaatctgaaaattatgaaagagaaaaatacatgtattatgccaacaccagcacaaatgttttgaaaaacttttctttgtatgaaattttacacaggtatactatatcttatgttcttgttcaatatcatatcataagaaattattcacatcgttcaaaactctttataaaaattattttcagagactacatacaattttctctctaaatatgttataatttactaattttcctcatgctgaatatatactgtagattgttgctcatattcaccattcttaataacacttttataaacatcattatgtgcaaaatttctttaggtattgattcttaaaagtggaattaatcagtaagtagttatgaatattttagtctattgatacatattattaaattgctttctagaacattctcacttccattagtattatataaatgaatgactcactgacccacattaaaattcagtacattaaatctttaatattttctrtaggtcaaaaattggtgctcattgttcttttaatttgcatttctttaat

SEQ ID NO: 462341 - DNA, 552 bp, Homo sapiens
tattgagaaaatctgaaaattatgaaagagaaaaatacatgtattatgccaacaccagcacaaatgttttgaaaaacttttctttgtatgaaattttacacaggtatactatatcttatgttcttgttcaatatcatatcataagaaattattcacatcgttcaaaactctttataaaaattattttcagagactacatacaattttctctctaaatatgttataatttactaattttcctcatgctgaatatatactgtagattgttgctcatattcaccattcttaataacacttttataaacatcattatgtgcaaaatttctttaggtattgattcttaaaagtggaattaatcagtaagtagttatgaatattttagtctattgatacatattattaaattgctttctagaacattctcacttccattagtattatataaatgaatgactcactgacccacattaaaattcagtacattaaatctttaatattttctataggtcaaaaattggtkctcattgttcttttaatttgcatttctttaat

SEQ ID NO: 462342 - DNA, 568 bp, Homo sapiens
ttcaggggaaaaaattcaaattatgctgaccttgaggtagcatagagagagaaacagagaaagaagatctgtaagcaggccgtaacaagggaataagaccaaacaaagagaggacaaggagagaatagtgaaattactttcattttttaaatcacagagtaagagaagcaaaatcatcatggaaaatgatcacatagacataaaggctcaggcaaagctgctctgtgtgtgtgctrttgctgctttccctgcctatagcatccacacctatgctacccacattagaattataaatatagatgcaaatgaaatgtagttatggatgatgtcttcaagagccatctgggaagaatttgtgtctagacaaagaatgatgccataaaaaaaaggaatatgacatactataaaaggctaacttgagcctgttgctcgagaaagcatcctgagactggtgatctatagctccttctgataattttggatgacatcagtattaagcaataaattttaaagttatatttccaagctgtctcaaccagctcacttgccagcactgatgagtggaagg

SEQ ID NO: 462343 - DNA, 553 bp, Homo sapiens
ttttttttttaaagagtgttgttcaatggaaaagtttccagcagtgcaggcagtgaagttttaggtgttttagattatagactgggataaaagatcttccagtaaggaagactatgtacattgcatgtgatggattgttttagacttaaaatcttttaacaatacagctgtttctcctgtggtttcctggcagtgatactgagaggaaacaatatgtctcccaggcttggtttcaactttgcctgctattggaataatgayggcaagggaagattccctctattcttcacttatgatctggtgtttcctaaatttcctttatgatttacagtcatgatgaaaagggaaagttagaccatggaagactgcccttgggagaagaatttagctctgagggtcttgtgcttgagtttcaggattctgaccaactgcctcttcttcggtgctccctcttggtgtcagggttgagagctgcaacatgcaattctatctgctcacactgtcctctgaaagttacatcacaaggccagtgggagcatagagaaaaatctgt

SEQ ID NO: 462344 - DNA, 589 bp, Homo sapiens
gactcttggcaattattacagagataaagggctgtcagacaggtgggcaaagaaggctcagaactgtcaccacccactctaccagctctggccctacacctgccattctaccacccagttccagtcttcaagctccaggtaaaaatcagtggaatgaataccaagcaagctgggagaatacccatacactgcctctcctctacagcaagagcaacaggatcagctggatgcaggttcaaatcctgcctctgtcacttactggctaaaggagtcacctacctcctctgggactgttttcccttctataaagcagggaaaataatgatagatcatgataacatcacttgaggacatctgagaatcagrtaaggtaatgtgtgtaaactgcagttccttctaaatgggaagaaccatcaggggcatcattcttccttggctttgggggcagtagaaatgctaccgaccaagccaggatggtagagaatttacatgatgatgactctcattggtaggcctcacttctcatacagcacccaacagcctttttctagttcagaagatgggctgaaggaagggaggccgggctatt

SEQ ID NO: 462345 - DNA, 545 bp, Homo sapiens
ccaggcactattctgagcatcttacacactttaatttaaacttgacaacaatcctatgaggtagactctaaaactgaccacattttagagataaggaaactgagacacagagaagttaaggaatttcccaaagtcacacagccagaaagcggcagagccaggacccaaacccacgcctttgaacagcagagaccatattatgttctgatgcaatcagattcccaatcaatccaacctgtagtctttcattgtcctttgcaccactcataacctgaactaaaaaatattcttgcctttttatgagtccatcaagcatgtgacaatacccactggtactgaaaacaactaaatcaccactagttgcttatgacgtaactggaagtcatcattgagaatgagctttttaaatacagtgcaggcatggtctgtactgaggcttaatgaaccagaaaaagcaaactgcaagaaaaaagttaktttatgacctctctgggaattgagactctatttcctcctttttacattttttgtattcccctcagcac

SEQ ID NO: 462346 - DNA, 620 bp, Homo sapiens
gtgtggtcaagatgctgagtgttgaaggcattcacaagatagggtggagaaagggaggctgagatcaaaacaggctggccaaggttactgaggtggtggcagagaggccagatggttccctgacttttatcaggcagagtgggcaagacccagtgtggagtggagaggcggagaaaccccagacttcctgtcctcttgctggaatgtgcaggcatttaggggaggcgaggagtagacaggagaggggaaacagaagataaataagcaaatacttattaaayacttgtgcggacatggaggggggacctgtcccatctctccctggcctcgcaaaacagtgatacaaaagaaacatatgaaaataatcagaacaaggaaagaggtaaggaaagggctgttttatgctcaggagggggtgaacctgtccagctctagaaatcagggaaggtgtgagagagtagggggtgcttgcattgggccttgatggagagcaaggctgcagaggggagaggaagggcagaagctgtgcagttgttttggggagagtgtggcactcaaaccagatgccacccttggtgacatgtaccatgcgtatctgctgaggactccacagtgcactt

SEQ ID NO: 462347 - DNA, 620 bp, Homo sapiens
gtgtggtcaagatgctgagtgttgaaggcattcacaagatagggtggagaaagggaggctgagatcaaaacaggctggccaaggttactgaggtggtggcagagaggccagatggttccctgacttttatcaggcagagtgggcaagacccagtgtggagtggagaggcggagaaaccccagacttcctgtcctcttgctggaatgtgcaggcatttaggggaggcgaggagtagacaggagaggggaaacagaagataaataagcaaatacttattaaacacttgtgcggacatggaggggggacctgtcccatctctccytggcctcgcaaaacagtgatacaaaagaaacatatgaaaataatcagaacaaggaaagaggtaaggaaagggctgttttatgctcaggagggggtgaacctgtccagctctagaaatcagggaaggtgtgagagagtagggggtgcttgcattgggccttgatggagagcaaggctgcagaggggagaggaagggcagaagctgtgcagttgttttggggagagtgtggcactcaaaccagatgccacccttggtgacatgtaccatgcgtatctgctgaggactccacagtgcactt

SEQ ID NO: 462348 - DNA, 620 bp, Homo sapiens
gtgtggtcaagatgctgagtgttgaaggcattcacaagatagggtggagaaagggaggctgagatcaaaacaggctggccaaggttactgaggtggtggcagagaggccagatggttccctgacttttatcaggcagagtgggcaagacccagtgtggagtggagaggcggagaaaccccagacttcctgtcctcttgctggaatgtgcaggcatttaggggaggcgaggagtagacaggagaggggaaacagaagataaataagcaaatacttattaaacacttgtgcggacatggaggggggacctgtcccatctctccctggcctcgcaaaacagtgatacaaaagaaacatatgaaaataatcagaacaaggaaagaggtaaggaaagggctgttttatgctcaggagggggtgaacctgtccagctctagaaatcagggaaggtgtgagagagtagggggtgcttgcattgggccttgatggagagcaaggctgcagaggggagaggaagggcagaagctgtgcagttgttttggggagagtgtggcacwcaaaccagatgccacccttggtgacatgtaccatgcgtatctgctgaggactccacagtgcactt

SEQ ID NO: 462349 - DNA, 620 bp, Homo sapiens
gtgtggtcaagatgctgagtgttgaaggcattcacaagatagggtggagaaagggaggctgagatcaaaacaggctggccaaggttactgaggtggtggcagagaggccagatggttccctgacttttatcaggcagagtgggcaagacccagtgtggagtggagaggcggagaaaccccagacttcctgtcctcttgctggaatgtgcaggcatttaggggaggcgaggagtagacaggagaggggaaacagaagataaataagcaaatacttattaaacacttgtgcggacatggaggggggacctgtcccatctctccctggcctcgcaaaacagtgatacaaaagaaacatatgaaaataatcagaacaaggaaagaggtaaggaaagggctgttttatgctcaggagggggtgaacctgtccagctctagaaatcagggaaggtgtgagagagtagggggtgcttgcattgggccttgatggagagcaaggctgcagaggggagaggaagggcagaagctgtgcagttgttttggggagagtgtggcactcaaaccagatgccacccttggtgacatgtaccatgcrtatctgctgaggactccacagtgcactt

SEQ ID NO: 462350 - DNA, 537 bp, Homo sapiens
tatacttattcccacaattggatacagaatctatccaacaagttgcataaaatgatggaataataacaaccaccacaattgctagcatttattgagtgcttattatgtgccaagcaccattctaaatcttttacttacagtaattcctttcatttgagcttctcctaaatcatatcaagtccccttaagaactaattttagaaaatcccaaacctggtgggctcaaataactaaatttgattgagtttaagagtccagtctgatgaggcagcacctaaccaaagtagaatgcaagcatataagcagaggaaataagggtcattgaaaaacaagagtgaaggcctcctagtaaggtgatatcatttggtacaggaaattgatctgaagtaagarcttttcaagcgattggttcaatgcttggtcattttccagtaaagaagatgagcctcaccatatgcaatgccagttccctcagttgaaaggaaagctaaaacttgactgccctgaaacagtattttcagaggcagccgaacatac

SEQ ID NO: 462351 - DNA, 539 bp, Homo sapiens
taaaataaaataaaataaaacaaaaagaaaaacaaatttgtctaatttagcgatgttrtcaatagaatatacactgtaaaaatcttgcataaaacaacttaggtagtcattttcctgaaaggaaggcaaacaaatttttatggaactaatatataacaatctatgaattatatatgatatctttggcccatgaacaaaacatccagacatgcataacaatgattaaaatagccatttttcatagttcctggctcttaatcatttaaaacacaccacaactttctatgtattttaaaattttaacgttaaaaaggtatatttgacactgtgggaagatagaacatattttattcaacaatgttgctagcttgatttataacttttaaatatttagacatatggtatgtgaacctctacttgtactcatgccccaagtcctataagtgttaagggtaaccagtacccatcaatgacacaacaaatgaaacctaaatctataaacagaaaccaaacgaaaatatcacgcttgttcctactgt

SEQ ID NO: 462352 - DNA, 612 bp, Homo sapiens
aggagcaagtgagtgtaattatataaatcaaagtactctggaagcaaccatgcattatctatgcattagataatattattgtaaaggagtgaagaagatcagaaaagtttcagatgcagaataatatagattttggatatgaaaggattttttgattcataaataagactgaggagccataaagcagatttatttctctagctttggtatcaggacaaaaagaactgcccaagacytaagatttgctagtaactcacctgggcactgggataagtcactgcccaggattggaacacatgttttcacctttcaaatgattaattacattgaaatccatgcacaagaagtgtttcaagttctagtaacctcctggtaagaatttaatctgaactttggcaaccttgcacactgctaggcacagaaactattcttccagtgaactaatgcttaagaggggattcaaaggctcagtgaactttagaagtagaagggactatagctctaaatttcacattttatatgagaaaaccaaagccccagccacctacatggcctgacttactcaatgtcacatatctgttttgtggcaaagctatctttttaaataataaa

SEQ ID NO: 462353 - DNA, 612 bp, Homo sapiens
aggagcaagtgagtgtaattatataaatcaaagtactctggaagcaaccatgcattatctatgcattagataatattattgtaaaggagtgaagaagatcagaaaagtttcagatgcagaataatatagattttggatatgaaaggattttttgattcataaataagactgaggagccataaagcagatttatttctctagctttggtatcaggacaaaaagaactgcccaagacctaagatttgctagtaactcacctgggcactgggataagtcactgcccaggattggaacacatgttttcacctttcaaatgattaattacattgaaatccatgcacaagaagtgtttcaagttctagtaacctcctggtaagaatttaatctgaactttggcaaccttgcacactgctaggcacagaaactattcttccagtgaactaatgcttaagaggggattcaaaggctcagtgaactttagaagtagaagggactatagctctaaatttcacattttatatgagaaaaccaaagccccagccacytacatggcctgacttactcaatgtcacatatctgttttgtggcaaagctatctttttaaataataaa

SEQ ID NO: 462354 - DNA, 518 bp, Homo sapiens
gatgggcatttggactgataccacattttttgcaatagcaaattgtgctgctataaatatgtgtgtgtaagtatcctttttgtataatgacttcttttcctctgggtaatgggattgctggatcaaatggtagttctatttttagttttttaaggaatctccatgctgttttttccatagtggttgtactagtttatactcccaccagtagtacagaagcgaggaaccaccacttatcaggcttctggaagacgggaatcacgttatcagccaggagctcacattatacgacttctagaggtcattcaacttggagattccctgagtctaggttrtggagaaaagttgtctctggcaccagactaatctgctgcccttcctaggggtggaaatattgctcaatttgattcagactgaaaaggaagtgattacttataacaccttaaagaaaatataagtgactgttttgatcatcttggagaatggaaggcttttctaagcatgacaccaaagattga

SEQ ID NO: 462355 - DNA, 532 bp, Homo sapiens
gcatgcctgtgtgtgttggatgttgctgactgtcatttcacttatctgtgacacacaagtctttcatcttgtttgggtggcatgaagcaaggagagtttcaatgatccaagcatcatattctcacagcctcctacatctggctcaagggtaaaatcaataaattgttttatgatccctttctactgatgaaaaagctgcagctaaggaagggatggtgacttgcctaagctactgggccagtggggctggagccaggcctgcagcccagacatttggagccccagaccaggtttctttccactccaacagctattttctctgctctcctgttaggttgagatttctgctcctgccaagcccatcctacagaacgggggaatggaccctgcagcagatttacagtaggtacccaacaattatcccagatatcagatttggttttttktttgtttgtttgttttttgagatgggttctcactctgttgtccaggctggagtgcggtggggtgatcacagcttatgcagcctcaa

SEQ ID NO: 462356 - DNA, 440 bp, Homo sapiens
  misc_feature (1)...(440): n = A,T,C or G
gaacagagcatcccctcttctctgtgtgttcccctgtgctaggcactgaggaacaagtgncaggaaggaagggacctgctggaacctgcaaactcagaggcaaaaaggtgcagattccagagccaaatggaaattccaatagcccaagtaggcatccagctaatcagagtgaaagaagaggaagaaaaggcccttctgaaggaggggcatgcaggtgaaggagctgggacctggcncaggcatagagggctaagctgatgctggagatggagagctgtttgcttggagtgarctcataggttctaagatgagggctgggatgggagggcagggggtggcatggccttgacccctgggagcccagactaaaatgtctggcatacaattgaagggaatagaagctcctctctggggccttgggcagggaagaaggcagcctc

SEQ ID NO: 462357 - DNA, 534 bp, Homo sapiens
cctacttctacgtgtctgtcacattcagggactaattgggttcctatttcattcacttggcatttgtaaagaactctcgggatgtcttgatatgcaaaataattttatattcaaaattcaggactcctaagccctaaaaataaatattctaaactggtaacccacttaaatatctggagggctaataattgtgtttaaaataattatcatacagcctaggaatcagcttttacttcacaagtmcacactaacatagctaattgaaaactctacatctttatttataatatatgtaaaatggacatcttatcagaatatgtaaaaaactggaatacttaccacctgcccaaccccccacatctggatcaacaacttccctttcctggattcttctctgtaaataagtccatatttttcttgagccaaacacttatagtcatatttgaatctcctcatttcatatctattccacaaaataatcctgttgatgtttccttgaaatttattcaaaaactagtctctacttacagttta

SEQ ID NO: 462358 - DNA, 548 bp, Homo sapiens
tgtatctttgtcctctaatttggtaatctatccttgggtaagactacatcaacccataagataattgtggttttgaaaggaaggggtcatatgaatattgctctcataagacccctctgcttctatgtaaatttktgggtgaaaataaatgcataaataatagggtgacagctaactcttcatttatcaatatgtgtatatatgcatatatgtatgtatatatgactatgtcagaatgagagtgacttaggaactctatttgtctatatattcttccaaatacacttgtgcgtgtgtgtgtgtgttagactgatgaatcagaaaacaagataattaggcttcctttgattgaatggaatgaaatgtgttgtgacaaaatgaccattaaccatcaaactatggttaatgctaatggcaacacaaagatgaaaaaggaagacatttcttttctttccgatggtgtatcacttttccgtgaaactcttgaaactgatctttgaatggtgtgaatgttttaaataaccatcatagaaattgaagtttgtttt

SEQ ID NO: 462359 - DNA, 548 bp, Homo sapiens
tgtatctttgtcctctaatttggtaatctatccttgggtaagactacatcaacccataagataattgtggttttgaaaggaaggggtcatatgaatattgctctcataagacccctctgcttctatgtaaatttgtgggtgaaaataaatgcataaataatagggtgacagctaactcttcatttatcaatatgtgtatatatgcatatatgtatgtatatatgactatgtcagaatgagagtgacttaggaactctatttgtctatatattcttccaaatacacttgtgcrtgtgtgtgtgtgttagactgatgaatcagaaaacaagataattaggcttcctttgattgaatggaatgaaatgtgttgtgacaaaatgaccattaaccatcaaactatggttaatgctaatggcaacacaaagatgaaaaaggaagacatttcttttctttccgatggtgtatcacttttccgtgaaactcttgaaactgatctttgaatggtgtgaatgttttaaataaccatcatagaaattgaagtttgtttt

SEQ ID NO: 462360 - DNA, 521 bp, Homo sapiens
ttcatggggaagcttgaggataatttcaataaaatatataagcaaaatatacccataaacttacttaattcattcccaaaggtgttttaaactaatatttttgattctgggcagatccaattatttttcccttggtaaaaataatgtttactcatgattagatggaagcagaatgagtgaaaactaacagtcactcaaaattcctggggactattaacctcatttactcctcaaaataatatttggttatgataaaraaacagaatgttacaaagaaaaagtgactatttctactttagtatttggcacagtatagtttgagataactcagattaaattgcaaggataacattcaaacaaaatcaattacttcatcctacacaggtttatttttttctcacaatttgtatccatttcagttcaatgtatatggccaggggtgggggtggttagttgattacaggacattcactttatttcactctcattcagagactcaggctgatctggcatccttaaga

SEQ ID NO: 462361 - DNA, 521 bp, Homo sapiens
ttcatggggaagcttgaggataatttcaataaaatatataagcaaaatatacccataaacttacttaattcattcccaaaggtgttttaaactaatatttttgattctgggcagatccaattatttttcccttggtaaaaataatgtttactcatgattagatggaagcagaatgagtgaaaactaacagtcactcaaaattcctggggactattaacctcatttactcctcaaaataatatttggttatgataaaaaaacagaatgttacaaagaaaaagtgactatttctactttartatttggcacagtatagtttgagataactcagattaaattgcaaggataacattcaaacaaaatcaattacttcatcctacacaggtttatttttttctcacaatttgtatccatttcagttcaatgtatatggccaggggtgggggtggttagttgattacaggacattcactttatttcactctcattcagagactcaggctgatctggcatccttaaga

SEQ ID NO: 462362 - DNA, 521 bp, Homo sapiens
ttcatggggaagcttgaggataatttcaataaaatatataagcaaaatatacccataaacttacttaattcattcccaaaggtgttttaaactaatatttttgattctgggcagatccaattatttttcccttggtaaaaataatgtttactcatgattagatggaagcagaatgagtgaaaactaacagtcactcaaaattcctggggactattaacctcatttactcctcaaaataatatttggttatgataaaaaaacagaatgttacaaagaaaaagtgactatttctactttagtatttggcacagtatagtttgagataactcagattaaattgcaaggataacattcaaacaaaatcaattacttcatcctacacaggtttatttttttctcacaatttgtatccatttcagttcaatgtatatggccaggggtgggggtggttagttgattacaggacattcactttatttcaytctcattcagagactcaggctgatctggcatccttaaga

SEQ ID NO: 462363 - DNA, 656 bp, Homo sapiens
catcctacttgaagtgatgacatgtaatgggaatacattctctgatcctttatgactaaagagaaataagttgccaatcagcaacatgctacataagcactcatctaacaaaagtttgggaaaataggtgtaaatatttcctatgttcaaaaaaggagaagaaaaagcaagtaagaaaaatggtagttaaatttcaayaaaaatgttgttcaatatttccttcctaggaaaatactgtctgtaacttttgattacaatgagaaaaaatatttgattttatttgttaattgggctgtacaaaagtctgcttacttattaaatttttctaattttatgacttgatgaatataaattttaaaacaacctgatctattctcagaaatttaattcaagtattgtttattttccaataaaggatgtgaattttcagtgctctcctctgctcttctatatgtcatatttaatttcatttctgttttctatttccttgactgcatttatcagtccagtgcttgatacaggcaaacagccctgacatttaaagcagaagagcttgaataccatgaacttggcattcagaattacattttccggctggaaattgctgaccctaacatctttctaagcattaaaccatttatttagaaaatcttatc

SEQ ID NO: 462364 - DNA, 620 bp, Homo sapiens
taaaaccttatctccacataaatgtgaataaagccagagttttttccaagaaaatgccatgatttgcaacaacaaaaatcaaaacagaaattatacttacctaaatctacgtgatatcctagagccaagaaaattttagtttggactttttcattgtatttattattagtgttctataatagctttactagagaagactctcaatggtgtactctttcaatgtgaagttcaaaagaagaatttctcagttaattctattgattctaaggtgttcttgccaaaaatgaaaaccatagtgactaaagcacacaacaaaacatcttactatttcaggagattatatytgaatcacattttggagtgtatttttaaggataattttgttttatattatcgtagaatacaccactataatcccttcttcaatattgcagttagctattcattttattttgcaataacttaaaattcattactgtaagaacttacatacctatggaatcaaagtgatttcaaataagagggacagaagtgaatagattagagggaggttggcatgtctttctttccccacaaagattcccatgtggtttttcacgatcagagctgaagaccagtgg

SEQ ID NO: 462365 - DNA, 574 bp, Homo sapiens
attatattacaataattgtgcaatctcaattacaactccagatgataaattcaaaacatataaagtaggatattgtgaagaaaccctttattttgaaagtaatgaggtgatagtaattctctaccttatagttgactataattttaattatattcgttaaaaagtgaaagttaaccactagaaagatagcaaagaatatattacattcaaaatactacataaaaattataaatccaactaaagaaaaacataatagtaaagcaaaaatattcaatatttayttttaataaaaagagaaattataaattaagaaagattaaaaaggcccaattatatcaatataaaatataaattaagagcattttgtgtaatactatttgtattaaatcacaatgtttaaggtggtaattaggtttttaaacatctgttttgaagtatttttacattcaatatttaatttttctcttaatagtttcttttttatgctatataagaaaattataaagatggtataatgggtgctcataaacaagtcctgtacattcagaaaatgctgtctggaccattcatttgg

SEQ ID NO: 462366 - DNA, 625 bp, Homo sapiens
gaaaattttaaatgacaagttcattcatatctatatagaaaaaatcaataataactgataatatatattgaaaattcactgtaagtcatgcactcttttgaccactgaatccccataactctaagagaaaaattatcttcattgtaaataatttagaagcaaagaacagagacattaygtaacatgcttgagttaatctagaaagtaagttgcaaagcaagcattcacaaccaagaagattataactatcactctaacatttgtattatttttgctagaatttaggtctagtggatatggcacagactttgaaaacaaatgttatattctttttactgtttggtacaagtacataaaatttattcttatatcttattaaataatggaccattttacaattaagatttttaattcatagtgggtaggagccatgtacctaaccatcatctttgtattgtttataaatggtctgagtatagaaggtattcaatgacttgcctaagatcacagaatcgtttagtaccacagtctgttaataattcagattactctaatttcaaacagaaatggaaagcagaaaaaagcaggggttgcaatcctagtttctgacagaatagacaaagat

SEQ ID NO: 462367 - DNA, 567 bp, Homo sapiens
catgtacctaaccatcatctttgtattgtttataaatggtctgagtatagaaggtattcaatgacttgcctaagatcacagaatcrtttagtaccacagtctgttaataattcagattactctaatttcaaacagaaatggaaagcagaaaaaagcaggggttgcaatcctagtttctgacagaatagacaaagatcaaaaaatgcaatcttttgatctttgatcaaaaagaagggcattgcataatggtaaagggttcaattcaataagaagagctaactatcctaaatatatatgcactcaatacaggagcattcagattcataaaacaaattattaatgacctacaaaaatacttagaccttcatataataatagtggaagtctttaatacgctgctgtctgtattagacataccatcaagacagaaaattgtcaaagatatttaggacttaaattcagctctggaccatgtggacctaatagatatctacaggactcaccacacccaaacaagtgaatatacatttttctcagtgtcacatagcacttattttaaagtttatc

SEQ ID NO: 462368 - DNA, 557 bp, Homo sapiens
tgggggggcaagggtttaaaagctattggataccgtgctcattagcagcatgataggatcagtcataccccaaagctcagcatcatgctatatactcatgtaataagcttgcatatgtaccccctaaatctaaaataaaagttgaaattacaaaaaaataaaatacataaagcaaatatttttaaaaatgtataaaaataaggtttctgtgacatttgaaatagtggcaaataaatacatttagaattatgttttttgaaaaagaaatcagccttttccttttgtgcctgggctgtgttggacgcttacctgcagattatggctcatgtaactttggagccccacagcctgaggggttgagcccctttttatctacactgattgctgtttggagcctccagaaaaagtgagcaacctactccacaggtatcctttgggtttttggacacattgctttcctgacacrgctaccagaaaaacccctgtgtaaagcagttattgccctgctactgttttctcattgaaactgaacatttgacctataaagaccttgtgac

SEQ ID NO: 462369 - DNA, 553 bp, Homo sapiens
ctttaagtggtgactaagccctgagggcttctccttcatgaatgggattaaagatcttrtaagagacttcatgtagcctttggctctcttgctcttctgcctagtgctatataaggatagagcttttctctccttcagaggacatagaaagatgcaatcttggaaacagaaaatgcccctcaccacataactgagcctaccagcaccttgattttggatctcccagcctccaaaatggtgagaaaataaatttatcttctttacctattagccagtctctgatattttgttatagtagtacaaatggattaaaatgcactggcatttattagggttttgttgttttatgtcaacttctgacttatattcctgggtagtaaacccaatctaatgattatttatttcagaggaaataaaagtacagggagacttatccagatgctattttgaatgagtgttaagcaaatccatctcagttgaactatagatttgacattaagaggaagttaatgcaagaacataaggcttaagaagtacacatccacataaaagt

SEQ ID NO: 462370 - DNA, 576 bp, Homo sapiens
aaatttatcttctttacctattagccagtctctgatattttgttatagtagtacaaatggattaaaatgcactggcatttattagggttttgttgttttatgtcaacttctgacttatattcctgggtagtaaacccaatctaatgattatttatttcagaggaaataaaagtacagggagacttatccagatgctattttgaatgagtgttaagcaaatccatctcagttgaactatagatttgacattaagaggaagttaatgcaagaacataaggcttaagaagtacacatccacataaaagtttaatccaatacacttttcctgttactaagaaaaagcaagataaaatacctgtgaaccagtgggcatctagaggttgtgtcccagaggatagcaacatttaacaagacaaaaatctcagtaatcaaatgcaggatctggattgaaggaagaaacacattacgaagacaaatttgaaactaagaagtcggggaaggtgagaatccaaagacagcactgwgccgaaaggcagataagattatgccaacatcaagcatatcttcacattgata

SEQ ID NO: 462371 - DNA, 541 bp, Homo sapiens
gtgagcttttcacattaaagcaaacaactggacagtatttgttaccaatgaaaacaagtgcacttttgagaaaaaattcaagatttaaaatcttgcatcaccattattagcatgactttacctcaatacttaaatacatgcattaggagatcattgattaatcctaaaaatgtggcttttaaatactatatgctaaaatgtgttagtatttggatgacctgyataatgcagtaatcaaatctttcaaaatgatcattacttgatgatgcaaaagcatgaaacagcaaaaaaaatctattctgtatacaaaactgtgtattagtccttttcacactgctataaagatactacacaagactgggtaatttataaaggaaagaggtttaactgatgcacagttcgcatggctggggaggcctcaagaaacttagaatcatgacagaaagggaagcagcacctgcttcacaaggcggcaggagaaagagagagcaggggaacctgccacttataaaaccatcagctctcctgagagttcactcag

SEQ ID NO: 462372 - DNA, 589 bp, Homo sapiens
ttccattatgactagtgggtaatgtcayctcaacccatgaggtgacggtggtgttgctgtttactgtggaatacagtgctgcttctgctttacaccatatcacccattggaaactcctatcacccttgctgatatgtttaaatcattaaaatgataaaattttgctgtgctgaatgctgtaattgatgataatctttctgtcttcacttatgttaaaatcaattaagagagaatgccaagaaacttcttttcctctccaagtttgaccatctttaaataaacaatgaccatgattgcgtgtatttactggggggataaactcatgaaagatgagattcataaaaactctgaattacagaaaccatgctaaatttaatatcaccatttcctccaaaaacatggggctttattattcaggaaagcttttgtgtcagccctgtttcctcagaacacaatttctcccaggtactcattctacaaagggattccaagaggacctggacatttctgaatctcaactgcagacaaaggtactgctgaatccaaggctgtacacatacagaattgaattttagtaatgagctcaata

SEQ ID NO: 462373 - DNA, 579 bp, Homo sapiens
acaatgaccatgattgcgtgtatttactggggggataaactcatgaaagatgagattcataaaaactctgaattacagaaaccatgctaaatttaatatcaccatttcctccaaaaacatggggctttattattcaggaaagcttttgtgtcagccctgtttcctcagaacacaatttctcccaggtactcattctacaaagggattccaagaggacctggacatttctgaatctcaactgcagacaaagrtactgctgaatccaaggctgtacacatacagaattgaattttagtaatgagctcaataacaaaatagaaataaaatttgttaaaaacactaggagtaaatatacaaatatattaataggcactgttctgaataataatagaaagattatatcattcttgaaatttttataactccaatttttctataatggttactaattttataatcatgaaatgttcaaaaaaagatttaatatatagaagagagtgaataagacataaatatcatttaaaatttattcaggatcacactatgagttagagccaatttaaatggttaaaatagaaa

SEQ ID NO: 462374 - DNA, 511 bp, Homo sapiens
catcatgattgcttccttgccccttcctagttcctgttttcttatacagtgttacatttctcccctgctatataaacccctggttttagtggttcagggagatggatttgagattgcgctcccatctctagctgcagcacccgattaaggccttcttacttggcaatacttgattggatttctgtgtggtaagcagcagggcctaractaaacctctggtgttttggtaacaaattcagttgttatatagtaagtgatccattagaaattaatattcttaacacacatttctttgggattaagctttatcagaatacatttctttcattcaaactttataagtaatttttcagctaaaaaatccacaaattacaacgtgttcaaataggtgccaatcttcagaagagataaacatgctcattagtacatatctcaataaataattagggattgatccttgaaatatgattatacttatatgtacctctcccattcaatctattagcaaatt

SEQ ID NO: 462375 - DNA, 624 bp, Homo sapiens
gttcttttatttttgaagtgggtaggattaatatgaatatagtctatggtagctctatagtgatagcgagaaatgcctggaactcaagtacttgtctttggccaagatagggatgaaacatactagacaacggcttatatttgtttaaagtctgaaaattccctactgggatacgtaagttgtcaagtttgttactgaaaatgtatataccgatcattaaaacctrctttggttatagagcaggatattcgttatgctactaatggggtataaaagatcccccagtaaacttgaaccttggcttttgtgactaatgtatcttagaaatatcctgagaattcactgtccaaacacaaaacatattttctataattgagaaagttctctaggagctgcacctgaggcactgggacctctccatatttgcttaagctttctgtctgcagctgaaccatattctttacatttattagaaccttatgtgagtacacactgtaaaatttcatggcattgcaattgtgcccagtataattacttgcaaatatgtacagataagttttgcaattcttgtctcaccattatatttgggtgtatggggacgcataacttgtctttcatttttaa

SEQ ID NO: 462376 - DNA, 456 bp, Homo sapiens
gtaatagaaatgaactctcaggaagaagaaccaggccctaatgaaaacacatttcctttttcagagaactgaaaatagttgtactgcagcaggatcagggactgctatgtgcttactgttcttttatttttgaagtgggtaggattaatatgaatatagtctatggtagctctatagtgatagcgagaaatgcctggaactcaagtacttgtctttggccaagatagggatgaaacatactagacaacggcttatatttgtttaaagtctgaaaattccctactgggatacgtaagttgtcaagtttgttactgaaaatgtatataccgatcattaaaacctgctttggttatagagcaggatattcgtyatgctactaatggggtataaaagatcccccagtaaacttgaaccttggcttttgtgactaatgtatcttagaaatatcctgagaat

SEQ ID NO: 462377 - DNA, 587 bp, Homo sapiens
acttgtctttggccaagatagggatgaaacatactagacaacggcttatatttgtttaaagtctgaaaattccctactgggatacgtaagttgtcaagtttgttactgaaaatgtatataccgatcattaaaacctgctttggttatagagcaggatattcgttatgctactaatggggtataaaagatcccccagtaaacttgaaccttggcttttgtgactaatgtatcttagaaatatcctgagaattcactgtccaaacacaaaacatattttctataattgagaaagttctctaggagctgcacctgaggcactgggacctctccatatttgcttaagctttctgtctgcagctgaaccatattctttacatttattagaaccttatgtgagtacacactgtaaaatttcatggcattgcaattgtgcccagtataattacttgcaaatatgtacagataagttttgcaattcttgtctcaccattatatttgggtgtatggggacrcataacttgtctttcatttttaagtttctggatgaaaagaagccacattcataaagcttcagccacacactcatc

SEQ ID NO: 462378 - DNA, 581 bp, Homo sapiens
agagaaactggatatttatgcaaaagcrtgaaactggacccttattttaccccatgcaaaaattcaaacaaaatgtattcaagacttgaacataagacccaaaactgtaaaactgctagaacacataggaaaaagtttcatggcattggtctaggcagtgaattcacttgatacaacaccaaaagcatagccaagaaagcaaaaatagacaaatcagattacgttaaactaaaaaacttatacagcaaaggaagcaatcaatggggtgaaaaaacaatctatgaaaatctatgaattgtgagaacatatttgcaaattatatatcaaattggggttaatttccaaatgtataagaaaaccctacaactgaatagcaaaaaaactaacaatccaattgaaaaatgtgcaaagggattaaaaagacatttccccaaagacttacagatggcaaacagttacacgaaaagacatccaataagtcacaaatcatcaaggaaatgaaaagcaaaactacagttaaatatcactccacagctactggagtggctgctatgaaaaagacaaaaacaagtgttggtgaa

SEQ ID NO: 462379 - DNA, 581 bp, Homo sapiens
agagaaactggatatttatgcaaaagcatgaaactggacccttattttaccccatgcaaaaattcaaacaaaatgtattcaagacttgaacataagacccaaaactgtaaaactgctagaacacataggaaaaagtttcatggcattggtctaggcagtgaattcacttgatacaacaccaaaagcatagccaagaaagcaaaaatagacaaatcagattacgttaaactaaaaaacttatacagcaaaggaagcaatcaatggggtgaaaaaacaatctatgaaaatctatgaattgtgagaacatatttgcaaattatatatcaaattggggttaatttccaaatgtataagaaaaccctacaactgaatagcaaaaaaactaacaatccaattgaaaaatgtgcaaagggattaaaaagacatttccccaaagacttacagatggcaaacagttacacgaaaagacatccaataagtcrcaaatcatcaaggaaatgaaaagcaaaactacagttaaatatcactccacagctactggagtggctgctatgaaaaagacaaaaacaagtgttggtgaa

SEQ ID NO: 462380 - DNA, 621 bp, Homo sapiens
ctggcatcttaaaatggtctacatcttaggctctaaggtatgacagacaattacaagtcgccttaacgtagtatctccttaaattcattggtatacataatgtggaagaatcatttaaaaattaagtactataatttttattttaaattataagtttatttcttgctatcacataaatatacataatacatgtaactatgtgtgtatatggatatataatatataaatatgtacatctatacagtagggagaagaattcagcatttataaagaattatgttttttgattaatttactttgacacaattgtacatatttatggggtacagtgtgatgtttcaatgcatgtatgcactgtataatgatcaaatcagggaaattatcatatctatccctttaaacattgattttttttctttgtggtgataacattaaccatcttctcttctagctcccttgtaataaaacctacattgttattagctgtagtcacctgactacacaatagatcaccagaactgccgggcaccatggctcacaccracaatcccagcacttttgggggcagaggtgggaggatcacttgagcccaggagtttgagaccaacctggacaacatag

SEQ ID NO: 462381 - DNA, 524 bp, Homo sapiens
atgtctgtttatgtatgcatagacaaacacataaattcaaggtatgcaaatgagtatatcttcagaaacttaccatgcttgtataccagcaaacatccagacctagaatcagaagatatcctgattctattttgccaggcgtcatctcygtcagccatcttgtgccccatttaagatttggacaagaagtcttagtgtccagttccatgtacctgcagacaagctctgctatgtactttagaaccagatttcctctgcctgcaatctaccttctgcccttcactagaaggcacatcttggcttttcctagtgagcccctttattgaattatggtaggcatccgcagagattctagagcccaggctgaggctgtgtgaacatgagctctgaagttaacaagacaatgacattaagctcttgtatttgagagatctggggattaaaatattcatgagagttttgtgagagttgtatgttacagactatgtaaagtgcccagcacaaaactggcactatttaaatat

SEQ ID NO: 462382 - DNA, 524 bp, Homo sapiens
atgtctgtttatgtatgcatagacaaacacataaattcaaggtatgcaaatgagtatatcttcagaaacttaccatgcttgtataccagcaaacatccagacctagaatcagaagatatcctgattctattttgccaggcgtcatctctgtcagccatcttgtgccccatttaagatttggacaagaagtcttagtgtccagttccatgtacctgcagacaagctctgctatgtactttagaaccagatttcctctgcctgcaatctaccttctgcccttcactagaaggcacatctyggcttttcctagtgagcccctttattgaattatggtaggcatccgcagagattctagagcccaggctgaggctgtgtgaacatgagctctgaagttaacaagacaatgacattaagctcttgtatttgagagatctggggattaaaatattcatgagagttttgtgagagttgtatgttacagactatgtaaagtgcccagcacaaaactggcactatttaaatat

SEQ ID NO: 462383 - DNA, 548 bp, Homo sapiens
tagagcccaggctgaggctgtgtgaacatgagctctgaagttaacaagacaatgacattaagctcttgtatttgagagatctggggattaaaatattcatgagagttttgtgagagttgtatgttacagactatgtaaagtgcccagcacaaaactggcactatttaaatattaatcttctccctttctgctactttattttcctgtgtgaggagtgttctctgttcttccacaattctcccaagtatttctgttctttttctataattttccattattttatagaggtggaaaatattttcttaagagggttgacactcaaatgcctcttattcattaaccatcctatatcacctgtctctagcgccatcccactccttgccaaatcacacatagaagttgatgacaaatttatttctatatattttgagtatcactgaaaagcatagtatggtgttgttttrtgaaagagtgaatgtatagacactgatctcttcttctttgaaattttttgatccagaatttatttatttatatatacatatatt

SEQ ID NO: 462384 - DNA, 454 bp, Homo sapiens
ggagctgtaagtccactacatctctttcttttgtaaattgaccaatctcgggtgtgtctttattagcagtgtgaaaaaggactaacactattgtgtacaggagctgttacaggagcatcagtctttttctggtcccttcccagaaattgtgtccaagcagcattcctgaatgcaaatgtacttccatggttagggtacctatttcaaagataattaatccgttctccaaagcactctggaaaccacttcattgcatagtgcgtctatcctacttgtgaaccattgcagtgtttcttacctaaactgcttacatgatagttatgcaatggttttccatattttgctttttactttacattttcatttcttttctactatstaaattttcaattttttattcataatttaattttgaaaatgaggacaggagatatggagtgtgggaatttttaaa

SEQ ID NO: 462385 - DNA, 576 bp, Homo sapiens
gaatatctcagttgccatgattactayagtcaatacatacagatttgtgaagattgagaaacaccatttttataatgttcacccattagagttcagaatctggtgaatcaaacccactgactctttaggaaaggctgagaactgtaaagtagaacattaaaacaataatcacagggatagaatttgggcacattttatctaagtctttttcctgtgtgtacatgtatatatgtaagctggtaatagtgggtagtggcagcagtagtggcctcatactttcactcaattgtattaagtagtagtagcttcatactttcactcaattgtattaagtatcttatacttgccactcacagtactaagcaggtagggaaatagcagcagatactttagccatgttatttgcccttgcagagcttacaatgtaaacatttattatgatagaagatccttaaaagagttatatatctctagattcaaacattaaaactatgcccaatggcaaagaatacggacatcagaaggacagacatcagcctggagctttacgttatacagtaccaattccacgacagt

SEQ ID NO: 462386 - DNA, 574 bp, Homo sapiens
attgtttatggctgaatcctctaaataatctaggatgtcagtctccataaatatatactcaggaaaaataagtagtaatttgtgatcatgtgttaaaataaaaacaatgagacaaattataaagataattggtaacacaaaaagacaaacttgaatattgactgccctagtcatcagaacagtacccactttaaattcattcacttcaagggcctctcctcccccactccccagatttcaatggttagaaataggaactaraaacctcattgtgacatttatgtattattaaatgataacacttaattcatttctttttcaccagcttaattgttaaagatattcattatgcagaaatcttagccccatgatctttagtgggtaaagctattatgcctatccaataagcttagcaacctgttgcattttaattctttcttcatgatagcgaatgttgaataaaattgaaatgctttaatttattatttcaatctagaattcaaaaatatttttaatagagtaaaagggcacccatatgacaggatccacttattataagggagtacctatctag

SEQ ID NO: 462387 - DNA, 286 bp, Homo sapiens
aaattttctgacatccagatgacctaaagtaggtggaaacaagagataatatctactaccgatatcactgtcatagcataaagctgtgttacgtgactagcctrtgtaatgctaagtccagacactgtgaaagtgcctacttgttggagcttgctttcctggggccatggcctcaggttagtggtctctgcctctgtctatctctttccagccatctatactgcagtgtcaaatgagttccccagattcagtagggtcataaatgatcattgctcacacacctccc

SEQ ID NO: 462388 - DNA, 574 bp, Homo sapiens
aggaaagacaagtgtttaaaacagagattggagttatgctgccacaagccaaggactattcagggctactggaagctggaagaggcaaggaaggatcattccttaggggctttagagtgagcacggccctgacaacacctttatctgagacttccagcctgcagaactatagcacaataaatttatgtttttctaagctaccccagtttatggtattttgatacagaatgcctaggaaattaatatagaccccaaaattataaatgtgagtacctacacatttatagatataaagagacaggatatccacccttgtcatcttcttcagaakttgagactttattttttcctattttgagaaaggaagatctctaggtcaaaatgtaagtttcatgggaggtaagaaacatttcattaccctttgaaagggaccgcatggccccaccataaaggaatcctagctataggctctagagctaggctgtgtctcccagttcctgactgtcttattttccttatcttatcaggccactcacttgcagcatctttttacctaagaatcttggtgtttgtt

SEQ ID NO: 462389 - DNA, 578 bp, Homo sapiens
aagtcaattcagagcaggtgcaaccctcagagggaaggcttattcagtaaatatttactgaatggctattgtatgtcattaactgttttaggcttcagagattcaaagaccatacctcaaagagttcagggaagagtggaggagacagacaggtaaacagataatctttgctgatagtaacattatggcaattttttttcagttccaaatataaaacttctttctctctttaaaacatccttgagaatacaggaaaatcaaagtctggcaacagcactgaatgtttgcttttgcctggagaagttttctactaaaagaatgatagaaaggttgaatttggaatacagtcttgattactcattgcatggtatatgtttaamcacaacaggcagatagtgccaagagaggtttgacataattgcttccaccaagtatctgtacataaatccagagtgcagaggctgcaataatgaaaacaaaaccaaaaacacttatttcttatgataagcatagaaaagaaaagcaacaggaagatttctacctaaaatgaaagaagaaatatattttgagctggtcag

SEQ ID NO: 462390 - DNA, 578 bp, Homo sapiens
aagtcaattcagagcaggtgcaaccctcagagggaaggcttattcagtaaatatttactgaatggctattgtatgtcattaactgttttaggcttcagagattcaaagaccatacctcaaagagttcagggaagagtggaggagacagacaggtaaacagataatctttgctgatagtaacattatggcaattttttttcagttccaaatataaaacttctttctctctttaaaacatccttgagaatacaggaaaatcaaagtctggcaacagcactgaatgtttgcttttgcctggagaagttttctactaaaagaatgatagaaaggttgaatttggaatacagtcttgattactcattgcatggtatatgtttaaccacaacaggcagatagtgccaagagaggtttgamataattgcttccaccaagtatctgtacataaatccagagtgcagaggctgcaataatgaaaacaaaaccaaaaacacttatttcttatgataagcatagaaaagaaaagcaacaggaagatttctacctaaaatgaaagaagaaatatattttgagctggtcag

SEQ ID NO: 462391 - DNA, 578 bp, Homo sapiens
aagtcaattcagagcaggtgcaaccctcagagggaaggcttattcagtaaatatttactgaatggctattgtatgtcattaactgttttaggcttcagagattcaaagaccatacctcaaagagttcagggaagagtggaggagacagacaggtaaacagataatctttgctgatagtaacattatggcaattttttttcagttccaaatataaaacttctttctctctttaaaacatccttgagaatacaggaaaatcaaagtctggcaacagcactgaatgtttgcttttgcctggagaagttttctactaaaagaatgatagaaaggttgaatttggaatacagtcttgattactcattgcatggtatatgtttaaccacaacaggcagatagtgccaagagaggtttgacataattgcttccaccaagtatctgtacataaatccagagtgcagaggctgcaataatgaaaacaaaaccaaamacacttatttcttatgataagcatagaaaagaaaagcaacaggaagatttctacctaaaatgaaagaagaaatatattttgagctggtcag

SEQ ID NO: 462392 - DNA, 557 bp, Homo sapiens
aaatgtaacataaccctgataacaaagttagaagtaatgataactaacaatttagcttctaagaagaaacacacaggaaatggatagatctgtgtagatctggaagtgcaaacccctatctagactggaaacaactattactgaattaaaaaccattacattgccaaacaaatatacaaacatgtaactgatacataatcccattttcaacaaattgtttgttgttaacttagtttattaacctgtttgcttataagcaagtacataaagttccccwaataattttaggaagaacataacagtatttcactataagcaaacaataaagtaatgactttgttgaatcctaggcataattatttaattactttttgttttaggctttattgaagcctaaaacaaacaaaaagtattcttggtctggcacaagaataataaattgggacttcataaaaataatatcattatctgtcatgcacactatgatgaactttatatactatatattctatgttgtagatcatctttatgatattgtaggtattatatacagttta

SEQ ID NO: 462393 - DNA, 483 bp, Homo sapiens
aagggtatagttttggggaggggtaaccatttttgtagccataagactattcttttggggtgggattaacttcttttctgcttatataggtaatgttatacattttatctttaaaggggtgaatttctataactcatcctcatgcattaacttgttcctaaaaacctgcataataaaatttcagtttctagtaaatctcagtaaagttttatatcatatatacatttttattttcacatttaagcaccatgggaatagggccacatcaatatgttctctcttactttccagtgtccagctataagctgaggcacagtacactcttaaaaaatatttttgtatgtatgaaaaaatttgtatctatttctttattttttctcatttttaatatcctttgtcttctattatgctcttcataactatctcagackaatgaattatatcacttgttatggttaattttatttataaatttgactggac

SEQ ID NO: 462394 - DNA, 518 bp, Homo sapiens
ttggaaaatgtgcaacatgaccatgtgatagaaaagtaaaacccatttttctatggaggaattcaaggctgaggaaatttacataagtacaaagaagctgaatgttaatagccaacacaatggagaaaataactccaagccatttcagagwccttcatgacacccattcccatcacagacccagaggcctaggagggaaaaatggttttgtcagccaggcccagggccctgcttctcttctcagcctcagaaaatggtgactcatgtcccagctgcttcagctccagacatggctaaaaggggtcaaggtacagcttgcgctatggcttcaggaggtgcaagctccaacccttggtggcttccatgtggtgttggacctgaaggtgtgcagaaggcaagagttgaggtttgagagccttcgtgtagatttcagaggatgtatggaaactcctgaatgtccaggcagaagtctgctgcagggcagagtccttatggataacctctaccagggcaatgca

SEQ ID NO: 462395 - DNA, 434 bp, Homo sapiens
cagcttgcaccatgcacctggaaaagccacaggcattcaatgtcacactgtgaaagcaggcacaggggctgtatcctgcagagccacaggggtggagctacccaaggtcttaggaacccaccccttaatatcagtgtggcttggatgtaatacagagtcaaagaagattattttggagctytaagatttaatgactgccctgctgggtgttggccttgcatacagcctgtagcccctttattttggcttctttctgcctttagcaacaggtttatttacccaatgcctgtacctgcattgtatcttagaagtaactaacttttttgattttacaggttcatgggcagaagggatttgccttgtctcagatgagactttggacttggacttttgagataatgttggaaagtgttaagactttggaactgggttgg

SEQ ID NO: 462396 - DNA, 615 bp, Homo sapiens
agtaccaacccaagatagttagtccttcctgattttggtgagattctatagttcttacatccttcttcttgttttaactatgtacctttattttaaattttaaactaaccctttcaattaaggacacaaatttttctgaattttgacagttatgacttactcttcgatggaccttctattttgtttagcctgctagccaaaagttctccaaatgtctaatagtggagaaattaagctcttatgggcaataggcatagccttcagcttaatgaatcagacaagactaggtgaggtctcaagatatatttaattgcattatgaaggagaaaacacacaaaaaatgtcctccatttatgattatcttccctaaacgctttattatgtgacaatgtttattcatgtattcattaatttgactaatacttaatgagttcttaaaggccatgcacatttctaagcagtgaatgagacatgcaaagtccttgctttcatgaggataacagaaaacaaacaagtcaataaataaatacttaatgttaaaacaagtagtgaaaaatgctwtgaaatatactgaaataaatatgtatacttcattatgcactgttatattaattc

SEQ ID NO: 462397 - DNA, 671 bp, Homo sapiens
  misc_feature (1)...(671): n = A,T,C or G
agctaattagtatgagtaaaggtgttagccagagtgtaggccatagctaatgtgcactttcagtacaaaaaatcctagagaggtcatctaaaaagacatttattaaccaagtcccaaagagctaggattaaccaactcctgttctattgcaatgtagatggatttttgatgtcaagtgagtaccagggatccaggaaagaccttaatggtagtgtgacaggtatggacctgtgaraattgtttttacttgtaagcctttagaagtatacagcttcactaaataatacagcaaacattcccattaaaaaactttgaaaactttggtcattattaggtcaaatgtgtgcannnnnnnnnnnnnnnnnnnnnnnnnnnnnnnnnnnnnnnnnnnnnnnnnnnnnnnnnnnnnnnnnnnnnnnnnnnnnnnnnnnnnnnnnnnnnnnnnnnnaacattattattcaattctaaaaaaaaaccaatgcattttaaaaattgaggtaaaatttatacaacataaaattagcttttgaaatttaaaattcagtagtattaacaaaattgtgcaaccaccccctatatctataacaagttccaaaatattattatcatttcaaaataaaacccctcactcggggggtaatcatttcctatacctaccttctctcagtac

SEQ ID NO: 462398 - DNA, 506 bp, Homo sapiens
aattagcaatgttttagagtcctcaagaaaaacaaaattcatagattaattatatattagatattgatatctataaaatagtagattatataattaaataattatgtattacaaatataaatattaatataatcatatatgtgtgataaattatatattggattgtgtgattatgaaagctataatatttatatattatatattggatatatgtgatatataattggattatgtgattatgaaagctaagaaatcccaagatctgaagagctacagctggccaactggagaccaaaaagggttaatggtgtagttccaatgtgagtccaaaagcctgagaacaagaattsttgatctaagttcaaatagtattcggagtctgaaggcaagagaagactaatgtcccactttgaagacaataccacagagagggagaattcttctttactcagctttttgttctatttaggacttcagtagattggatgaggcccacccacattaaa

SEQ ID NO: 462399 - DNA, 501 bp, Homo sapiens
caatctggaaaaagataatcctcttagagaatcaatccagtcgagaaaattgaacatcatacaatacagtgcctccaggataatattaagaagaaattgaggtgaagaaataatgaaaatataaagcaaatttattttatgtgagtgataaacatgagtttccttattaaatcacttacaaaaacaatcactaaagaaataaccaatgaaagtgaggttattgagtagttaaagcacactaaggatgaacattgttttatttggttaatggcattgaaagtcaaaaatctaggtgaagaatataataaagatgacattaaaatttttgaagtgaaaaatacatgacgtttttaagaacgagtgacactgaaaattcagtagaatgacacttcataatttgggtactattayattcacagcctgaaattctaaataaaggtaaatatctatattatgtaattgattaaagttattttaagaatgtaaaatctcagaaaagtt

SEQ ID NO: 462400 - DNA, 573 bp, Homo sapiens
atttcattctttttccaagtgtcatttaggagaaggttaattccatattattgtgttgttttgagaaatcttatttatattgatctcaactcttatttcactgtggttgaagaatgtggttgttacgatttttttaaatttgttgagaattgcttwatggttgagtgtacagttgaccttagaatacgtgccaagcacaaatgaaaaaaatatactgttgctgttcagtagggcattttgtggatgcttattagagtcttttggccatatgttgagtttggtacctttaataccttggagtttaatatctttattagtttcttgccttgataatccacctaacactgttagtggggtgttgaagtctaccactgttattgtgtggttaattaagtctcctcgtaggtctctaagaacttgttttatgaatctgggtgcgccaatcttgggttcatatatatataggatagttaagtattcttattaaattaactctattattatgcaatgcccttctttatcacctctgattgttgttggtttaaattatgtttgttggaaataaaaataaac

SEQ ID NO: 462401 - DNA, 573 bp, Homo sapiens
atttcattctttttccaagtgtcatttaggagaaggttaattccatattattgtgttgttttgagaaatcttatttatattgatctcaactcttatttcactgtggttgaagaatgtggttgttacgatttttttaaatttgttgagaattgcttaatggttgagtgtacagytgaccttagaatacgtgccaagcacaaatgaaaaaaatatactgttgctgttcagtagggcattttgtggatgcttattagagtcttttggccatatgttgagtttggtacctttaataccttggagtttaatatctttattagtttcttgccttgataatccacctaacactgttagtggggtgttgaagtctaccactgttattgtgtggttaattaagtctcctcgtaggtctctaagaacttgttttatgaatctgggtgcgccaatcttgggttcatatatatataggatagttaagtattcttattaaattaactctattattatgcaatgcccttctttatcacctctgattgttgttggtttaaattatgtttgttggaaataaaaataaac

SEQ ID NO: 462402 - DNA, 573 bp, Homo sapiens
atttcattctttttccaagtgtcatttaggagaaggttaattccatattattgtgttgttttgagaaatcttatttatattgatctcaactcttatttcactgtggttgaagaatgtggttgttacgatttttttaaatttgttgagaattgcttaatggttgagtgtacagttgaccttagaatacgtgccaagcacaaatgaaaaaaatatactgttgctgttcagtagggcattttgtggatgcttattagagtcttttggccatatgttgagtttggtacctttaataccttggagtttaatatctttattagtttcttgccttgataatccacctaacactgttagtggggtgttgaagtctaccactgttattgtgtggttaattaagtctcctcrtaggtctctaagaacttgttttatgaatctgggtgcgccaatcttgggttcatatatatataggatagttaagtattcttattaaattaactctattattatgcaatgcccttctttatcacctctgattgttgttggtttaaattatgtttgttggaaataaaaataaac

SEQ ID NO: 462403 - DNA, 573 bp, Homo sapiens
atttcattctttttccaagtgtcatttaggagaaggttaattccatattattgtgttgttttgagaaatcttatttatattgatctcaactcttatttcactgtggttgaagaatgtggttgttacgatttttttaaatttgttgagaattgcttaatggttgagtgtacagttgaccttagaatacgtgccaagcacaaatgaaaaaaatatactgttgctgttcagtagggcattttgtggatgcttattagagtcttttggccatatgttgagtttggtacctttaataccttggagtttaatatctttattagtttcttgccttgataatccacctaacactgttagtggggtgttgaagtctaccactgttattgtgtggttaattaagtctcctcgtaggtctctaagaacttgttttatgaatctgggtgygccaatcttgggttcatatatatataggatagttaagtattcttattaaattaactctattattatgcaatgcccttctttatcacctctgattgttgttggtttaaattatgtttgttggaaataaaaataaac

SEQ ID NO: 462404 - DNA, 585 bp, Homo sapiens
acttggcatactgctaatcattagagtacagggcattgtgaatgatataattttttttagtgagcaggttaattcctgtctggaataggcatttttccaagcaaggtttttatcccaggaaaaactaaaaagctgttttagcctaagacacagtgcagcttcctgacctggaatttctttattttatgagatctgcctaccaaattatgttttcctctttccttcttatgcctcccccagaaagtgacctgacagattcctgaactaaagcttatattcatatatttttttcaatcctgtactctcagagtcctagtaagaacttgtatgtactgtaagaagtggtactatccaaatgtatgcctttcgatacttctgaaattttcatgttttcaggcctggacacaaaaataaacctttcttgtatatcttctaccacagcaatggaacaactctttagtttttcctttctcctttttwtttttctgctttattttcaagtttctagctgggtaacaattctaaggttcactgaatttcaggtgttcttggtctctacttcccaatcatatttttattttttcc

SEQ ID NO: 462405 - DNA, 585 bp, Homo sapiens
acttggcatactgctaatcattagagtacagggcattgtgaatgatataattttttttagtgagcaggttaattcctgtctggaataggcatttttccaagcaaggtttttatcccaggaaaaactaaaaagctgttttagcctaagacacagtgcagcttcctgacctggaatttctttattttatgagatctgcctaccaaattatgttttcctctttccttcttatgcctcccccagaaagtgacctgacagattcctgaactaaagcttatattcatatatttttttcaatcctgtactctcagagtcctagtaagaacttgtatgtactgtaagaagtggtactatccaaatgtatgcctttcgatacttctgaaattttcatgttttcaggcctggacacaaaaataaacctttcttgtatatcttctaccacagcaatggaacaactctttagtttttcctttctcctttttttttttctgctttattttcaagtttctagctgggtaacaattctaaggttcacygaatttcaggtgttcttggtctctacttcccaatcatatttttattttttcc

SEQ ID NO: 462406 - DNA, 534 bp, Homo sapiens
tttgatgatgggagagactactgagaagatctctcaactgccttcaaggcattttccccattgtcttggctgttaaactttggatcctaagtacttatgcaaatttatgcagccagcttgaattcctcatcagaaaatgggatcttcttttttaccacatggccaggttgcaaatttttcaaacttttatgctctgctttccctttacatataagtttcagtttcagatcatctctttgttcacacacataagcttatgatgttagaagcagagagattacatcttgaatgctttgctgcttaraactttcttctgccagataccctaaatcatctctctcaattcaaagttccacagatctctacagctggggcacaatgcctctaacgtctttgttaatgtgtaacaaaagtgacatttgctccagtccccagtaagttcctcataaccatctgagaacacctcacctgggcctcactgtctatatcactaccagcatgttggtcagaaccattcaacaagtctctaggaag

SEQ ID NO: 462407 - DNA, 644 bp, Homo sapiens
cccttcacattccaccatgagtaaaaacttctggagacctccacggaagccaagctgatgtwttggtattgtgcttatacagcctgcagaactgtggaccaaataaacctattttctttataaattactcagccttagatattcctttatagcaatgcaaatggactaacacaacattaatggtaatagaataagattctatgttgacaatcaaggtagatacaagagaaataccaagctcagtcatctttggaaggaaatgatgtgtacctagatgcacaaacctcacacaagagattgttggtgatggtttttgtttcactgggggaagggctactattagagtcaatattctagactctctcagcaccttcatttactcctacacagagaagaagaaagattaattaatatattatgagagtctgagagaaggcatgctcctcagcccatttcttctttcctctttcttgcttaagggattgttgaccacaaaagtttacattccagtcttcttattcaaattttacaggaacagggtcatataaagaagtcacaagtttgcacaccacattctggcctcaagaggtaaaaaacttcattctgggagccacattaacaagccccttagcttaaagccatat

SEQ ID NO: 462408 - DNA, 550 bp, Homo sapiens
aagaagttgtgagattttatacacacatacacacaaataatatttattcatagaaaaaagaaaatcctggcatttgtgatgatatgtgtgaaaatagagggcattatgttaaatgaaataagccagtcagagaaggacaaatactatacagtgtcatttatatgtgtgtattagtcagggttcttaaaggggacagaaataattggatagatgaatatatgaaggggcatatattaggaktattgactcatatgatcccaaggtgaagtcccacaataggctgtctgcaaactgaggaatcaggaagccagtgcgagtaccaaaacctcaaaagtaggaaagccaagagtgcagccttcagtctgtggctgaaggcctgaaagcccctggtgaatcactggtgtaagaccaagagtccaaaagctgcagaacttgggagtctgatgttcgacagcaggaagcatccaacactgaagaaagacagaagaagactcagccaatctagtccttcgatgttcttctgcctgttttcatcctagctgtgttgggg

SEQ ID NO: 462409 - DNA, 603 bp, Homo sapiens
cacatgttaatccctcctttggcaatatcctcacagacacaccaggaacaatactttgcatccttcaatccaatcaagttgacagtcaacattaaccatcaaaatgtggtatctttaaaaaagtcaaaatgaagagtataatggtggttgccagtggcagggtttgggaggaatagggagatgttgtttatcaaaaaatataaaatgtaagttataagatgaatatgttctgagggtctgatgtaaagcagggtgattatagttaataatagtgtattacatacagccatgcaccacagaaggacatttcagtcaacaacaaattgcatatatgttggtggctccataaaccacaaagccataaaaaagaacaaagtaatatttttgtcagcaacatggatggtgctgaaggccattatcctaagcaagttaatgtaggaaaaaaacacaaatactgcagattctcacttacaagtaggagctaaacattgagtacawctgaatacagagaagaaaacaaaatactgagcatacttgagagtggagccggggaggagagtgaagattgaaaaactacctgtcgagtattatgctgattacctg

SEQ ID NO: 462410 - DNA, 575 bp, Homo sapiens
tattaataataatgtgttcagtaagtaaatttattgaataacaatcattattaccattatcattttgtcaaatacttttacatcttgactcaagaaaaatgtttcttttaattgtcctmaaaaaatcacttccatgttctttacatgttttgtaacagtcataagatgtgtgaatatgtttttttgataaatctttcaatattttatttaaagagccactctaagtgttctgcattctatatgctaatataaaatatttaattatatccttttattgatttttaataatctatatttcaaaatttgggaggtattctactctttaaataatacattattttagctttcaaaatttatgaaattctgcatattatgtgttcttggttgtcatctttctccatctctctgggaggctctgtggcagctattaatgattgccctgtatggaaagaaaatggcaagtagtgggtttttctgaccctgggatccatcgatttatggagcatggctccttggatattgtcacataagctatggaactatctgaggaactcttctgagtataaaacagagat

SEQ ID NO: 462411 - DNA, 575 bp, Homo sapiens
tattaataataatgtgttcagtaagtaaatttattgaataacaatcattattaccattatcattttgtcaaatacttttacatcttgactcaagaaaaatgtttcttttaattgtcctcaaaaaatcacttccatgttctttacatgttttgtaacagtcataagatgtgtgaatatgtttttttgataaatctttcaatattttatttaaagagccactctaagtgttctgcattctatatgctaatataaaatatttaattatatccttttattgatttttaataatctatatttcaaamtttgggaggtattctactctttaaataatacattattttagctttcaaaatttatgaaattctgcatattatgtgttcttggttgtcatctttctccatctctctgggaggctctgtggcagctattaatgattgccctgtatggaaagaaaatggcaagtagtgggtttttctgaccctgggatccatcgatttatggagcatggctccttggatattgtcacataagctatggaactatctgaggaactcttctgagtataaaacagagat

SEQ ID NO: 462412 - DNA, 575 bp, Homo sapiens
tattaataataatgtgttcagtaagtaaatttattgaataacaatcattattaccattatcattttgtcaaatacttttacatcttgactcaagaaaaatgtttcttttaattgtcctcaaaaaatcacttccatgttctttacatgttttgtaacagtcataagatgtgtgaatatgtttttttgataaatctttcaatattttatttaaagagccactctaagtgttctgcattctatatgctaatataaaatatttaattatatccttttattgatttttaataatctatatttcaaaatttgggaggtattctactctttaaataatacattatttyagctttcaaaatttatgaaattctgcatattatgtgttcttggttgtcatctttctccatctctctgggaggctctgtggcagctattaatgattgccctgtatggaaagaaaatggcaagtagtgggtttttctgaccctgggatccatcgatttatggagcatggctccttggatattgtcacataagctatggaactatctgaggaactcttctgagtataaaacagagat

SEQ ID NO: 462413 - DNA, 640 bp, Homo sapiens
agtcttgaacttgtcttgcctggcttttccagtgtctccttcacctctacggtagagcttcctagtaagtaaaatcttcgaatcctgagtccacagtgatcaactgcttctgtgctgtctcagataagcattgtaagcaatattgtctttcagatgcacagatcataatgacaaaagcccttttttggcagacaaaagagggaataaaaaggaatatgatgagtatttgattccagaaggactgcctactcatcacccatacagtgtggcaaaaggcttgaccctgaggtacatctcatgaaaggaacttggaagaaatacatctacacctggcagagatgtctaactggacaaaatgcaagacagaaagtacayaagaaaatggcttttgttaacagtcctgttaaaagtagacctctaaaactaaaggctggggcaactcgagaaaaattctcctctagaagccttcttaagcttcttgactaaatgggcagatattagattaactcatgaaatcacttacttaaaaaaaattgactactcaaacaactatacaggtaggtagaagccatggctggttgattacagaatgcagaggatatcctattaaagagtgaagaccttttatagagaaatggtt

SEQ ID NO: 462414 - DNA, 533 bp, Homo sapiens
caaggcaagaactgatagactttcaagagaaacagacaaatctaatctacaatagagcagactgtatatttgtcctctcttaaaaattaaaaaaaacaagaaattattaagtccatagaagaattgaacaacactaattaaccaatttgatctaaaagacatttaaattagaacacttcactatcaagagctgaatatatagtcyttttaagtgtgcacaagtgtgaaatccttagtggtgaaagactgaaaaatctccctctaagatcagaaaaaagacaaaagatatctgtatttatcccctctattcaacattgtactggaagttctagcaagcagtgcactaaggcaagaaaaagaaatttacaatttacaggcaaccagtaaaaacaggaattaaatacatccagtttaaaaaagaaaaaagcctccttttttttttttttttttttctagcacaaagtaccatcgtttaggtaaaaaaaaagtcataaagtgtgtgaatgtataatcaatgagtttagagagattat

SEQ ID NO: 462415 - DNA, 605 bp, Homo sapiens
acacaaaataaaacaatataaattgtgacaacaaaaatataaatggtgagaaatgaataaaagtttacagtatttgtatgaaactagagtgaaactattaccagcttaaaatcatctactataactacaagaagtttgatggaagccccatggtaaccacaaggcaaaaataaactataacgratatgctataacaagaaaaagaaaggaatcaaagcatagcactacataaaatcaccaatcacaaaggaagacaataaaagaggaagaatgaaagaaaggacctacaaaacccacagaaaacaattaacaaaatggcaagagtaaatccttacctatcaacagtaaccttgaatataaatggctcaactctcccatcaaacattataaagtgtctgaatgaataaggaaaaaaaattttcaactatatgctacctatgaaagaccaattttaactttaagtacacacattggttcaagggggacggatggttgaaaatattccacccatatattaaccaaaagagaaccagagtggctatacttaaatcagtaaaatatattttgaggcaaaaattgtcacaagaaacaaaatcattttttaa

SEQ ID NO: 462416 - DNA, 605 bp, Homo sapiens
acacaaaataaaacaatataaattgtgacaacaaaaatataaatggtgagaaatgaataaaagtttacagtatttgtatgaaactagagtgaaactattaccagcttaaaatcatctactataactacaagaagtttgatggaagccccatggtaaccacaaggcaaaaataaactataacgaatatgctataacaagaaaaagaaaggaatcaaagcatagcactacataaaatcaccaatcacaaaggaagacaataaaagaggaagaatgaaagaaaggacctacaaaacycacagaaaacaattaacaaaatggcaagagtaaatccttacctatcaacagtaaccttgaatataaatggctcaactctcccatcaaacattataaagtgtctgaatgaataaggaaaaaaaattttcaactatatgctacctatgaaagaccaattttaactttaagtacacacattggttcaagggggacggatggttgaaaatattccacccatatattaaccaaaagagaaccagagtggctatacttaaatcagtaaaatatattttgaggcaaaaattgtcacaagaaacaaaatcattttttaa

SEQ ID NO: 462417 - DNA, 586 bp, Homo sapiens
caatgatcatccttttttatatgtctcttttaccttgtctgaatattcctgtagagtaaatgcctagaagaggaatagctagtgaaaaggacatgtgcattttaaattttgaccaatattgctgaattactttcctaaaaaaggcagctgacgtatccctcacctttaaaacagcaaactayacaactctcagacctttgtctccgaatctgtgcatctttatattggatgcaaatcacgtgttgattggctggttttttttcttcctctgccttttttgcttattttcttttgggatatttgcttttttacttcttgactttcaaaactctttgctggttaataaatctaactcatagaccatgcaacgtgttagaaatatttttttctaatatgtcatttgtattttgactttcatttatggcacgtttgccacataagagtttaaattgatatgtgtctaaatttttcactgtttttcacttttggatttcaggtttgtgtttgcttagaaagtttttccccacttcgagtcaggcaaataatgtaaaaattttcatttagctattgggcagcttagaagcca

SEQ ID NO: 462418 - DNA, 394 bp, Homo sapiens
gtagtgtattctgaaccccatcactctctccctccctttctccctccttctctgccctgcccactgagccctgagccctccaggttctctggggacagactttcccaggcataggaggattcgttttcctgcatagcattataagcacctgtcartttcactatctggctataagaacacagagctatatttgttgaaaaataggaagcttggggtcaaggatgaaaaaagagtggagccttatcctaggtcctgtggtggctgctgtttgggtgctccaggggtcccccagaaagcctcccagatcctctccaccaactgaaatgctgaggatatcctatatttatttgttgctttcttgggggtgagtgggtgctttagaggggaccttata

SEQ ID NO: 462419 - DNA, 394 bp, Homo sapiens
gtagtgtattctgaaccccatcactctctccctccctttctccctccttctctgccctgcccactgagccctgagccctccaggttctctggggacagactttcccaggcataggaggattcgttttcctgcatagcattataagcacctgtcagtttcactatctggctataagaacacagagctatatttgttgaaaaataggaagcttggggtcaaggatgaaaaaagagtggagccttatcctaggtcctgtggtggctgctgtttgggtgctccaggggtcccccagaaagcctcccagatcctctccaccaaytgaaatgctgaggatatcctatatttatttgttgctttcttgggggtgagtgggtgctttagaggggaccttata

SEQ ID NO: 462420 - DNA, 394 bp, Homo sapiens
gtagtgtattctgaaccccatcactctctccctccctttctccctccttctctgccctgcccactgagccctgagccctccaggttctctggggacagactttcccaggcataggaggattcgttttcctgcatagcattataagcacctgtcagtttcactatctggctataagaacacagagctatatttgttgaaaaataggaagcttggggtcaaggatgaaaaaagagtggagccttatcctaggtcctgtggtggctgctgtttgggtgctccaggggtcccccagaaagcctcccagatcctctccaccaactgaaatgctgaggatrtcctatatttatttgttgctttcttgggggtgagtgggtgctttagaggggaccttata

SEQ ID NO: 462421 - DNA, 394 bp, Homo sapiens
gtagtgtattctgaaccccatcactctctccctccctttctccctccttctctgccctgcccactgagccctgagccctccaggttctctggggacagactttcccaggcataggaggattcgttttcctgcatagcattataagcacctgtcagtttcactatctggctataagaacacagagctatatttgttgaaaaataggaagcttggggtcaaggatgaaaaaagagtggagccttatcctaggtcctgtggtggctgctgtttgggtgctccaggggtcccccagaaagcctcccagatcctctccaccaactgaaatgctgaggatatcctayatttatttgttgctttcttgggggtgagtgggtgctttagaggggaccttata

SEQ ID NO: 462422 - DNA, 629 bp, Homo sapiens
acatgtgaaatatattctttgtgttgtgggcaggcatttgtttgaagtaaatattctttttgtagataatattttaaaaagaaagacaaaaccatatcgcattcctgaaatgtatttaccaagcatgtattttggaaaacagcccaaaggaacatatttaaggcagtgattttaatactaaactaaggaaatagtttgatgcatcagctaagctcatggatgggggtaatcacatctggtttacctcaagccasaggagaaggagtgagacttgacaatgtaacaaccattatgaggctcaagtagcgtttttggcttgtaagcatgtatgtgtgctgtgttcaattttatgttttaaatttttttaaaaaacttaaatactgctatagccccaaaatatgtaaaatatgtaaacagttggcttgatggccataagggaacacctgtccttttttttttttttttttactgtgtagcctgtgactttcactgcaggaattaaatatttttgtggataggcaaatgtacttttgtggataggtattgctgatgccttattacacagccgaaggaaataaggatctgggtaagcagttgagtcacggcaaagagtaccgtatccaaggtgg

SEQ ID NO: 462423 - DNA, 536 bp, Homo sapiens
tgtccttttttttttttttttttactgtgtagcctgtgactttcactgcaggaattaaatatttttgtggataggcaaatgtacttttgtggataggtattgctgatgccttattacacagccgaaggaaataaggatctgggtaagcagttgagtcacggcaaagagtaccgtatccaaggtggaggttcatgctagagctacaggtactaacccctcccctgcaccactgatccctagcaagggtggaagtaactgatgacttctctgcacagcccccagcacaatgtctgaaagagagacctaaagggtaactgcctgttttctcagattaatcttagaatcctagcagtacttsttacttcagtttggagatttttcttattctatttcttcacactcttacagacttcacatagcccctccctttagaataactcttgacagcattttaagaaataggctatttaaatcatcttgatccagtgactcaacccatggtgtaacccgtctgctcaaatttgtggcaaatctcc

SEQ ID NO: 462424 - DNA, 606 bp, Homo sapiens
gataatagttaaccattgtcgagtacccattatttccttgactccttatagacactctgtgagggaagtaatagtattgtcccaattttcagaggaggaaatgaggtgtagagatgctagttatcttacccaagctcagttgactgtgctggtaagttgtgaagttaacctargttagcctgagttcacaggctatgctagattaacttcagctagccttgcttttaaccacctacactgacagcctttcaattgtaagaggagctttgggtttttgctttgaaagtagaaacaagtatctagtgataataatatgcctaataattatcctgcacaaaataaataatccagccacttatcaccacctctaaggcaccttctcatcctgtcgttttaaggttttgttcttttggttctgtccccagccaggttttcttttccctccacatgcctggtgtggtgtgagtaaagcatctgccattttgattatggcacacttgctacctcttcttaaaacattcgttctcatccctagtattgtgacattctatcatatctctgatttttaaaaggacattggtgaatttccagaaaaaaaattttcca

SEQ ID NO: 462425 - DNA, 606 bp, Homo sapiens
gataatagttaaccattgtcgagtacccattatttccttgactccttatagacactctgtgagggaagtaatagtattgtcccaattttcagaggaggaaatgaggtgtagagatgctagttatcttacccaagctcagttgactgtgctggtaagttgtgaagttaacctaggttagcctgagttcacaggctatgctagattaacttcagctagccttgcttttaaccacytacactgacagcctttcaattgtaagaggagctttgggtttttgctttgaaagtagaaacaagtatctagtgataataatatgcctaataattatcctgcacaaaataaataatccagccacttatcaccacctctaaggcaccttctcatcctgtcgttttaaggttttgttcttttggttctgtccccagccaggttttcttttccctccacatgcctggtgtggtgtgagtaaagcatctgccattttgattatggcacacttgctacctcttcttaaaacattcgttctcatccctagtattgtgacattctatcatatctctgatttttaaaaggacattggtgaatttccagaaaaaaaattttcca

SEQ ID NO: 462426 - DNA, 569 bp, Homo sapiens
gtcatctacacctctttggccttgaccttggacattcggcccagccaccttccactccacttttttttctcatagattcaccgttttcatcctgcccatattctcccagcatccagccaatacctagttttcccagcatctagccccagttcctagttctgctgcccctgctctaggctggtcagttatatagcgttgcttccctgcaggtgaggtggcatgtgacaggrtagggtaggtctgacacccctgcactctctctacccacaccgtgaaaaatagtgagacaacagcattgcattcttcattttgaaagaggtttgaatgtttttatttgtggaaggtagatgtcatgaagagttgcataattaaactagtacagaggaaaaactggcagagaagtgagttgcagggctaggtttacatacaggatgacaaacctgtctctaaagatcccgggaactgttgtcacatggtgacagcttatgatggtggctgaggacactgctctttacctttgtgtctcttgtctcgtctctgaatctcaatacctgtaattaagaaggagc

SEQ ID NO: 462427 - DNA, 463 bp, Homo sapiens
aagctctgttcagtgggcactggtgggattgactaaagggtgcctgggacatgaaccagctttaaaaaaaatacaaacaaggccaggtgcaatagctcacatctgtaatccaaacacttcgggaggccgagatgggcagatcacctgacgacaggaatttgagaccagcctggcgaatatagtgaaaccccgtctctaccaaaaatacaaaagttagccaggcatggtgttgcatgcctatagtcccagctactactcaggaggctgarccaggagaatcacttgaagcccagaggcggaggttgcagtgagccatactgcacttcagccttttgagactccatctcaaaaaaataaaaaataaaaaataaaagccaaacataatatttgtacatatttatggggaacagcttatattttgatacatgcatacagtgtataatgatcacatcagggtatttag

SEQ ID NO: 462428 - DNA, 554 bp, Homo sapiens
aaaaagagaacactagattagaaagacagatagggaaaatagatatccctaaacaacggcagatgcactaagatacaaatcatcttatatttctctaggtcatttctctaatttttttttcctcattccttagcctgtagcattcaagcgtacttgtttttcagctccaaggcacaaacttcaaatgcttatacttgctcgagtttgatgacatccaggtacaagtctagcattttgctctttggtggaaaagcaaattcgttatcctctgcttaggcaaaatgttttagactgagacttctttcactttcagcatatccatcaaacactgagacattgtgggatttaaggaggcagggaaccttaggtgtttttacttcatgaacttgtatrccacttgaattttggatgtgtttgcaattatttttataagaaaaattagtatgtggttaagatttgtaaatgaacttaggaattattgtaaaaaatcgaaagtttaatgtttttaaccattttatacaatgctaaggaatgtctatagataaatacacata

SEQ ID NO: 462429 - DNA, 314 bp, Homo sapiens
gaatctcatatctatctcgtaaaacatgagattttactgtttctggttaatagaggtactgaaaagtgaatgagtggctggccagtaagagaaacagacagcaatggcatgtgtctcttctagcascagataactttgcagcatggataacctaaaatcatcagcaatgcattcactgataagacctcacaattctcatgaattcatcccttaattctcatgaatttacaattcttactcttcatttgccatattaattatcggaccatagagtctttctttaacccttcattgtttactaattaagtcaatta

SEQ ID NO: 462430 - DNA, 529 bp, Homo sapiens
ctgggaacagtttccagattatggcacagtgatctgacatccaagcacaaaacagctctcctgctacacagaggagggagacatcagctttcaaggtggcttcagtggctggaggttgcaagacatgaggcacagagaaatacatgtgaggaaaaataaatcrggcagaaatctgtgtcgaatttcccccaaagtttttggtgatggctgggctgcaaatgtacaagacctgactatggccaggtgcagtggctcacgtctataaacccagcactttgggaggccgaggtagctgaatcacctgaagtcaggtgatcgagaccagctcggccaacattgcaaaacccagtctctactaaaaatacaaaaataagccaggcatggtggtggggacttgtaattccagctacttgggaggctgaggcaagagaatcgcttgaactcaggaggtggaggttgcactgagacaagactgcaccactgcactccagcctgggtgacaagaacaaaactccatctcaaaaaaaaa

SEQ ID NO: 462431 - DNA, 529 bp, Homo sapiens
ctgggaacagtttccagattatggcacagtgatctgacatccaagcacaaaacagctctcctgctacacagaggagggagacatcagctttcaaggtggcttcagtggctggaggttgcaagacatgaggcacagagaaatacatgtgaggaaaaataaatcaggcagaaatctgtgtcgaatttcccccaaagtttttggtgatggctgggctgcaaatgtacaagacctgactatggccaggtgcagtggctcacgtctataaacccagcactttgggaggccgaggtagstgaatcacctgaagtcaggtgatcgagaccagctcggccaacattgcaaaacccagtctctactaaaaatacaaaaataagccaggcatggtggtggggacttgtaattccagctacttgggaggctgaggcaagagaatcgcttgaactcaggaggtggaggttgcactgagacaagactgcaccactgcactccagcctgggtgacaagaacaaaactccatctcaaaaaaaaa

SEQ ID NO: 462432 - DNA, 563 bp, Homo sapiens
ttgcataataaccattctgactgttgggagatgatgtctccttgtggttttgatttgcattaccctaatgattagtgatattgagctttttttcatacacttgttggcctcatttatgtcttcttttgaaaaacgtctgttcatgccctttgcccactttttaatgggtttgyttttctcttgtacgtttgtttaagtttcttatagatgctggatattaggcctttgtcagatgcatagtttgcaaatattttctcccattctgtaggttgtctatttactcggttgatagtttttttgttttgttttgttttgttttttgtttgtttatgctgcgcagaagctcttaatttaattagatacaatttgtcagtttttacttttgtggcgattgcttctggtgtcttgtcatgaaatctttgtccattcctatgtttcaggtgatattgcttaggttatcttccagggttttcagttttgggttttacatttaagtctttaatccgtcttgattctatttagtctttaatctgtttttgcatatggtgtaaggacagggtcca

SEQ ID NO: 462433 - DNA, 516 bp, Homo sapiens
tgaataatataaagttgggtcatttaatttttaatccaatatgacaatctctgtcttttaataatgtattataccatttatatttaatgcagttgttgatcttaataaaaatataccatttttctagttttctacttgtctcatctattctttggttttttcttcctctttttctgcctcctaatatattgagtactttatgattccacttttatgttcactattaacttattatttatagctctgtaaaaaaaagacattagtcatttccttagaggtcataatatacatttgtgattaatcacagcctgtcttcaaataatattatataatttcacatrtcatgtaatgacttcataaccatgtactcttaattgctcatgtccatcttctgtactatggttgctctggcaaccatactacataaggcttttttaaagaagttcactgcacacaatatacagaatgctaaaacacaatgaattgctacttatttgttttaaagaaataatttgc

SEQ ID NO: 462434 - DNA, 577 bp, Homo sapiens
agagggtagagagagagagagacttagccaagtccgtrgacctgttcagttgaggttagatgagggattggtgtggttacaaacagcatgttcaggttgcataaacattattggatcatttaataaatggaatgtgtttgccttgaaaactttagattgtatcatgtcaattcatgatcatcacagtgcctcaatatctagggtgtccgtgtctcccagttagctcaaagggctgtatattaaatagggttatatacataaaatcctatatcccacttgttgtctcattgaaagttttgagatgtttatcttgagcagcctcttcctctcctcttttcatgacatttaaatatctggtgaaaatcagtttgttgttttggcatataatataaaacatcgagagaataagaaaacaacccaaacttggttagccatagagtcaggggtaagaatggtaagggaagagtccgtcccatcacatcagaaaaatgtcaatttttcaaactaccaatctccttgactccagaaattctgatgtacacccagtgtgatataattccacctcccatctgccccc

SEQ ID NO: 462435 - DNA, 602 bp, Homo sapiens
ccaaggcaattccttggaaaccttcaggtctactgagcatatctaaaatcaagttccccaaggaagttgaagcatttgaagaaaaagtctctgccattgttcatctaaaaatacctgtgtcagttcatgtggaaaatggtctaatagagctgtggaatatcatgatctagccgatgaggcctctctatgatattgtcaccacagtgcatagtagaattagtggtattacattttcctcatctgtgaaatgggaataataatacatacctgtgacttcatagagatractgaatatcattcactaaaatgaatataaaagcacattgcaaacaatgaaatgttaaatcatctttgttctttctcctttctgcttttgacaacaggagtcaaaaagtggggcctactgatttagatgaaatgtaacttttatagaattagtagaaagtaaccacagacacatttttctcttcttttcaaatgattagggacacagtaaaaaaaaaaagttcataagatgtctgcaaaagtcagttcaatgttttttctcttctcctggaagtcaccaaaaacctaatgtaagatgaaagcaaagaaggtaaaat

SEQ ID NO: 462436 - DNA, 601 bp, Homo sapiens
aacatcagcaccttaagtaaagcaccggcaaaagcacatgtcttaaaattaaggagcgatgttaaagtacagaaaccgtatttcttgcttgcaaaaacgggtgtgagaacttggatgagaagagctggtcttagaaaccatttggcatctggcttgattcagaaaatgtaggcagagctacacaaagaatcatccagagaaaccatgtaaggagttagcagtcacagagatgtaaagartctctggaatgggaaacttctttagtccagagactgttctgggtcctctcctttgcctaccctctcatccccaccctacacatgtgtaaatatctgctccagagaaattcatctcattctataacaagtaagaaaaaaaaaaaagtagcccagaatcaactcaaagatatcataagaaaaaaaaacctaggggaaggaggagggaagcaatatttattaacagaaaaagaaaatgcataaaaagtaaccatggtacagaagaaaatggtaacaaaatgtttttttccataaatttaaaccaattgaagacagtttctaggaaggaagaacaaaagcagcaatatgagaactcagatgatgag

SEQ ID NO: 462437 - DNA, 601 bp, Homo sapiens
aacatcagcaccttaagtaaagcaccggcaaaagcacatgtcttaaaattaaggagcgatgttaaagtacagaaaccgtatttcttgcttgcaaaaacgggtgtgagaacttggatgagaagagctggtcttagaaaccatttggcatctggcttgattcagaaaatgtaggcagagctacacaaagaatcatccagagaaaccatgtaaggagttagcagtcacagagatgtaaagagtctctggaatgggaaacttstttagtccagagactgttctgggtcctctcctttgcctaccctctcatccccaccctacacatgtgtaaatatctgctccagagaaattcatctcattctataacaagtaagaaaaaaaaaaaagtagcccagaatcaactcaaagatatcataagaaaaaaaaacctaggggaaggaggagggaagcaatatttattaacagaaaaagaaaatgcataaaaagtaaccatggtacagaagaaaatggtaacaaaatgtttttttccataaatttaaaccaattgaagacagtttctaggaaggaagaacaaaagcagcaatatgagaactcagatgatgag

SEQ ID NO: 462438 - DNA, 566 bp, Homo sapiens
aacataccagaactgaaaggatactcacttgaataaaatattagaggatgtcttcgcaaagcaagggacgatgacagaaattatggtgaaagtactgttggtacaaacggaaaatacttaactgatgagcagatcaacagatgtggagattggggtgagaggaaggaaaggaaatgttgtttgctctgctaatgcagaggtaccacaaatgctaaaaattgggaaargagaaaaaagtgaaggtagagttactgattctatcatctacgatcgcaaggagttaaaggatatcatttaaagacaagaagtgtggtaataaaagttctttttctttaaataaaagtatttaagagtacaaaactgaacactaaaaagtacttctgacaaaaacagaatggtggaagagagaagggagggagagtaacatgaaatttagtgatccaatcaatggtttaggagactaaaggtattatataataatataaaaaaggaagttttaataccaattaaaatccttgtacataaaaggaattcaacttcaacaaagcaaagcaaaacataatgaa

SEQ ID NO: 462439 - DNA, 566 bp, Homo sapiens
aacataccagaactgaaaggatactcacttgaataaaatattagaggatgtcttcgcaaagcaagggacgatgacagaaattatggtgaaagtactgttggtacaaacggaaaatacttaactgatgagcagatcaacagatgtggagattggggtgagaggaaggaaaggaaatgttgtttgctctgctaatgcagaggtaccacaaatgctaaaaattgggaaaggagaaaaaagtgaaggtagagttactgattctatcatctacgatcgcaaggagttaaaggatatcatttaaagacaagaagtgtggtaataaaagttctttttctttaaataaaagtatttaagagtacaaaactgaacactaaaaagtacttctgacaaaaacagaatggtggaagagagaagggagggagagtaacatgaaatttagtgatccaatcaatggtttaggagactaaaggtattatataataatataaaaaaggaagttttaataccaattaaaatccttgtacwtaaaaggaattcaacttcaacaaagcaaagcaaaacataatgaa

SEQ ID NO: 462440 - DNA, 587 bp, Homo sapiens
atgcaatctattgcctttgcagtctggcttattttacttacaaaaatgtgcttaagagtcatccattttgttgcatgaatcagaagtttgttctttttattgttgaggagtactccattctatagatgcaccacagtttgtgtatccattcacttgttaaggggcatattgactgtttccagctttttggcaattacaaaaaatgctgatataaaattttatctacaggtttttgtgtaaacatgagttttcatttcacttaggtaaataactaaaactaggatcactgggtcatattgtaaatgtatgtttaacctaataagaaattgccgaaatattgtccaaagtggctgtactatttggcattccaacagcaatcaatgagyatttttattgctctgcattctcactagtatttggcactgtcagtttctttttttaaaaaaacgtttaaccatgctaataggtgtgtggtaatatcttatggttttaattttttcttccctagagactaatgatgctgagcatcttttcatatgcttttttgccatctctatgtcttgcttggtgaagtctctggatatttt

SEQ ID NO: 462441 - DNA, 488 bp, Homo sapiens
tgctacttctgccagtctctccatcttacccttccatgaggcttatgtacagaatgcctatttactgctgaccttctccagtatggcagtgccattcctatgtgctaagaatgtatacaccgggcatatcttgatccaagttttaataaccatacgttctgatcctataaattacacattatkcattctaaaatttcgtagagatctaggagtgctctgtgtcctaaaatgtatcagtgtttccaaactgggggtgcagaatctttaggggcacacaacctgtctcttccactgttgctcttctctttccttattgttacaactgtttccccccctctaacatgtccttattctcatgtttagatatcctttgccctccccttccatccttgttagtttatcttctgggagaaattttaaaactctcaatacttgttattattggtaatgataaatagggaaaacctgtcacaccttctgaagttgtg

SEQ ID NO: 462442 - DNA, 598 bp, Homo sapiens
ttttaacagtcaggcccctctgctgcaggtctgctggagtttgcgggaggtccactgtaraccctgttttcctgggtatcaccagaacagcaaagattgctgcctatttcttcctttggaagctccatcccagagaggcaccttccagatgccagccagagctctcctgtatgaggtgtctgtcgacccctgctgggaggtgtctcccagtcaggagacacagggttcagggacccacttgaagaggcagtctgtcccttatcagagctcaagtgctgtactgggagatctgctgctctcttcagagccggcaggcagaaacgtttaagtctgctgaagctgcatccacagcccccccttcccccaggtgctctgtcccagggagatatgagtttgatctataagcctctgactggggctgctgcctttctttcagtgatgccctgcccagagaggaggaatccagagaggcaatctggctacagcagctttgccaagctgcagtgtgctccgcccagtttgaacttcttggtggcttccgctgtgaggggaaaactgcctactcatgcctaagtaatggtggactcccttcccctca

SEQ ID NO: 462443 - DNA, 598 bp, Homo sapiens
ttttaacagtcaggcccctctgctgcaggtctgctggagtttgcgggaggtccactgtagaccctgttttcctgggtatcaccagaacagcaaagattgctgcctatttcttcctttggaagctccatcccagagaggcaccttccagatgccagccagagctctcctgtatgaggtgtctgtcgacccctgctgggaggtgtctcccagtcaggagacacagggttcagggacccacttgaagaggcagtctgtcccttatcagagctcaagtgctgtactgggagatctgctgctctcttcagagccggcaggcagaaacgtttaagtctgctgaagctgcatccacagcccccscttcccccaggtgctctgtcccagggagatatgagtttgatctataagcctctgactggggctgctgcctttctttcagtgatgccctgcccagagaggaggaatccagagaggcaatctggctacagcagctttgccaagctgcagtgtgctccgcccagtttgaacttcttggtggcttccgctgtgaggggaaaactgcctactcatgcctaagtaatggtggactcccttcccctca

SEQ ID NO: 462444 - DNA, 536 bp, Homo sapiens
caaacataaccattttggagagttttttgcatttttcctcaatgagaatatattcaaatattacttctgtagtttaaaaataggtcaatctagttttaaagtatgcttttcctataacttttaggtytactcagtataagaaatttaaatgtatgttctctactgtcatcaagttctctttcaccacctcttccttcttttctattgtactaatagaaaagatgaaatatctgcagagaagacattgggagagcctggtgaaaccattgtcatttcaacaggtaagcttagatctaatttctttgcttctcaactttcattcaaatcatcatgatagcatgttatttataaaacaattcctaattaaagataatgtttataatgtactttctcaaaactagcttatatttctaactttataacataatttaaatttattgcatacaacttggaaaatacacgaaaagaataaaggtaaaaccaaaccattcaatatcttacagtttggaaacaaccatcatgaacatttactgcct

SEQ ID NO: 462445 - DNA, 543 bp, Homo sapiens
  misc_feature (1)...(543): n = A,T,C or G
nctctgtttctgtgacacaaaaccaaccacagagaacccccctgtgatgatgctacagcttgagctgggattagaatcttttgtctatgcctctgccccatcctcactagagaygaggtgagagatcaggaacttaggatcacttgagtccaaggatgacaggccacagtgacaaagtctgtttgttacagatttcagtgaaataaaaagagctgatagttgttggagctaatgaaagcacccttgagtaaggcaattagaccagatcagatgctgttctccagtcctgcataaattgtaatgttgttactgaactgaacttttaaagattctttgggtcacttttatgagtttgatatttttggtttatataagtatttgaaaagaggaggtgaaaatttaatgagaatgaattgatagttggaagacttgctacaaaatagagtatatttaataaaagactggaaatttttttgaggcaggaaatctctaagatgatgacaaaatgagtgtaacctacttgatgatgaattggctgccatc

SEQ ID NO: 462446 - DNA, 564 bp, Homo sapiens
tatgccattgcgcaatcaatttctggacctaaatgtgttggtacaataccagctatattgaygtaagggtattcttcagagtcatcccaagctagtttctggcttgtcactggaacccaagctctacctctgtacccggtgcctgcccactggaatgtaaggtcctcagtttcagcagcccagcttgggttgagacaacatctctgctttttttttttttttttttttttgagacagagttctgctctttcgcccagcctggagtgaagtggtgcaatctcagctcactgcaacctctcccccaccaccccatcaagggttcaagtgattctcctgcctcagcctcctgagtagctgggattataggcacctgccaccatgcctggtcaatttttgtattttttttttagtggagatggagttttgcattgttggctaggctagtctcgaactcctaatctcaggtgatcccctggcctcagcttcccaaagtgctaggattacaggctctgcttcttttttaattttacctagtaccaagcacaaactgtggaagaagtcaat

SEQ ID NO: 462447 - DNA, 570 bp, Homo sapiens
catatcccatggttgcgagctgagggaacagctttgtctttttgtccaaatctgtctggagtggagtttctgccaagctgagttgggattgggggtggggatgyagcgaggaagattgcaaggattttaggagttgtatgcagggagacagggagtagaacatagctcaaatgtcatggactcttgctgtttttaccaagatttagtaggtttaaaaaataaataaataaagatggcttcttttgctatatgtgcttaagacaatttccagacgctttaaatgtgtttgtttttccaaatagttttttttcttcttaacgagttatgcttgtttcccaggagactgggttcagagctcctcacactgccatcttgtaagttggtaatatttcacaaagctgatcacaaattcctttttgaagtttttctttctgattggcccatgttaacatcacacatctaaattcacattttttatcccataggctttaaatacattttttcccccaaatttctgtctctcgacccatcctattcttagaactccacttgtatatatcctgctgctta

SEQ ID NO: 462448 - DNA, 622 bp, Homo sapiens
catctctttatcacccaaactcaacatatctgtttgcaaacatgaaagactcctgtggaaccctttgggctgggtttctgctgtcttctttctgatcactagatggcactccattcatattacttcacagacaaggaagcccaacacagtggattatttgaattgcagccgaatttatagccttagaagaaaagagcataataacagtggaagtgatttagaaagatactggaaagatgaggggagcaaaggaagtggtttttcagtaatatttacacagaaacaacagggaggtgtttataaacgtatcttttctgtacatctgttctgagtagggaaggagtttcccagctaggttagatctccaaattcagcctaggtggaagtgaaccaaaatgtttcaagtagtaggtggcccatcaccctcagacagaggatgaaagcggacttccctgctgcactcaacaacccatctraaaatagtacctgcttaagaaatgtcctctaatagtcattttataaatgaaaactggtcacaggctgtgtcttatactggacactgggagcacacaacacacactctcaacacgctatttactcagtggcaatgtgtctggaatta

SEQ ID NO: 462449 - DNA, 616 bp, Homo sapiens
ctcacacttatttctagtttcccacttgagatggaaccactatacacagcctcttgtgttttcttgcagtggtattttatacacatgtgagtggaagtttgaatgtaaggggtcctgagtgtaatcataaagcaactttatttgtcttccactgttcctttcaatttgccttggacaggagttttcttcccatatcccagataaaaatatgggtaacgcccatgacttcasatcacagcttatacaaattttatgatggcttttagcaacaaaatacagacttgatttagatcgcagaatgtgcagttccttggcataatcaaagctaccatcatccagtcatttccaggtaggaagggacatgaggatggcacagtctttcttgctctcttcctccctcatgcgttgactgatgtttctgatgtccttggctttggagagcaggaagattctttgttgactgtcacggtggtaagggggccttgggctttcagagcatggcacgtgttcctagttgattctctggagagctgcctttccacaccctcagagactctgttctccttgccagccttgtctctctggcgcttgtcttgatgagggctgctgtgtcttt

SEQ ID NO: 462450 - DNA, 564 bp, Homo sapiens
ccaggcaatatacggagacaataaaacacaagttccaggatcagaggtcccagatttaattcttagcacttccctctgatgggttgaatgactttgatcaagtcarttaatcattgagttcagttttttttttacctgtaaattggggataattagagcgccacctcaaaaggttgtagtgacaaataaatgaggataaattgtgagtagtgctcggcatctaatatgcccgaaataaatgttaaaaactcatcttgttactattaggttggtgtacaagtaatcgtggttttgcaattattaatactattatttagttaaaagcactcaacgtgaagcaatatttggagaagatgaattttaaaaactaaattcacactgccaaggggtcaactgtacaaatttaagtttcaggctccaaaataaagccatcacagctctcccaggtcccccacaaaaccctctgcccattaaaattccttcattggggtgcttctatttttcgggagccctggattgcctcagagggtttggggagcctcagagagtttggggacagtcatt

SEQ ID NO: 462451 - DNA, 564 bp, Homo sapiens
ccaggcaatatacggagacaataaaacacaagttccaggatcagaggtcccagatttaattcttagcacttccctctgatgggttgaatgactttgatcaagtcaattaatcattgagttcagttttttttttacctgtaaattggggataattagagcgccacctcaaaaggttgtagtgacaaataaatgaggataaattgtgagtagtgctcggcatctaatatgccckaaataaatgttaaaaactcatcttgttactattaggttggtgtacaagtaatcgtggttttgcaattattaatactattatttagttaaaagcactcaacgtgaagcaatatttggagaagatgaattttaaaaactaaattcacactgccaaggggtcaactgtacaaatttaagtttcaggctccaaaataaagccatcacagctctcccaggtcccccacaaaaccctctgcccattaaaattccttcattggggtgcttctatttttcgggagccctggattgcctcagagggtttggggagcctcagagagtttggggacagtcatt

SEQ ID NO: 462452 - DNA, 458 bp, Homo sapiens
gaaacagaggctcttctacaatgctgagagactccataaatttccatgtgcactcacatctatagggaaagataaggaagacagacagtttggaggaaagaaacactataggtaagaagttaaaacttagattgtgagatatgaaatgctatttaccagaaaaaataaaattaccttatacaggaaaattccaagatttcttaccagctgctataagtgaggatasagcctccagattaggacgagagaaattatagaaagaggaaaagtctacatttgtaacacatccttcatttatagtgtattaattttagataatgctgtgctttcataactcattcttttgagttattaataatggctcctcttaaaatacaaagagattttatgggaggcattgaatgtaaagctatgctaagtatcaagaccatgatatgaatcaggttattgtggctcat

SEQ ID NO: 462453 - DNA, 490 bp, Homo sapiens
gtggtttgtgaggaaagagggctgctgggttggagaacagactaaggggcagctctcctcaccagcccgtgggaagggctgtatgttgggcttggccaccctgcagtgctgtccagaccagagtctgatatcatgactagtataagacagatcctggagcctctatctccaggggccagcctttttttttttttttttttttttttgkctcctatttcttttcctctgtgtgttggccttaaaaatgtattatataatttgtcttaggccaaaaccatagtttgctttggagctggaggcactgactctgctcagggtaaatgcttctactcatggtcctagataggagagagtgtcggggctacttgctgcacacagcctgacgtgccattctcctttccctttccatgcttcctttgccccccaccattttttttcttttcttcttcccttctcctgtctcttcttccccgactgtacaggcacccat

SEQ ID NO: 462454 - DNA, 499 bp, Homo sapiens
tggtggaatctttagggttttctaggtatagaatcgtatcatcagcacagagaaaatatgacttccctttttcccagttgggtgccttttatttgtttctcttgcctgactgctctggctaggacttccttaattttcatttttaaaatataatgccacattttcctcccaaagttattgtaatatttttacactcctacaagcatcgtataagggttattcatgttccatatcctggccagcacttaggattcagacttcaatttttgtcagttaaaggatataaaagagcatttcattgtaggcctaaatcgtgttgccctgatgattggtgttgtgcatcttcgtgtttctatgtttccccttcttgtaaaaaccstgttttatcttcatcctttttttttttggtcaattgtctttttatatttattcatggaagctctttgtgtattaaggatgctaattgtgttagttatctcttactgtgtaacatagctgg

SEQ ID NO: 462455 - DNA, 449 bp, Homo sapiens
ctcactaattcattcttctgcttgatccattctgctattagagcactccaatgtatttttcagtatgccaaatacatttttcagctccataattattgcttgattctttttaattatttcaatctcataattaaatttatctgatggaattctgagttccttctyggtgttatcttgaatttatttgagttttctcaacatagctatgttgaatcctctgtttgaaagggcacatatctctatttctcctgggttggtacttgttgcctttcgagttcatttgctgagggcatgttttcctcaatgatgttgattctagtagatgttcttcagtgtctggacattaaaaagttaggtattatatttattgtagccttcattgtctgggcttatttgtagcaatccttttttgaaaggctttctggttatttgaaaggactttggtgttg

SEQ ID NO: 462456 - DNA, 579 bp, Homo sapiens
ttgtgatccttgtggccttgtattggtatctgtgcatttgaagtagacacttcttccagtctttacagactggcaaggaaagcccttcaccagacagcttgtccagagattctgaccaggttatccattggggtttgcagtgggcttgccacgggagtcctcaggcaggctggcctgctgcctaggtcagtgggttcatgggcctagtgcctaagtccacaggggtcaatctgatgtctttttttgtaggggcaagcctggagcctgggtctactggggagggcctggacattgggtccatatgaatgagcctcgtacctgagttcatgtaggagggcttacatgaactctagtccctagtagcctgggactactagggctggcctgcagcctgacttatgggggccttcctggcactggggtggcccagagcaggcctggagctgtgagggctggtctgatattagaatgagcctgargcctgaggccacaggctacaggggctagtttggcagcgacatgggcctggatgctgggtccatgggggccagagagaggtctggggacatgaggactggc

SEQ ID NO: 462457 - DNA, 528 bp, Homo sapiens
tctttttctattgtgctccatccaataattgtgaaccctctcactcttggtagtagaattaatcctaaccacatccacccccaataacagagcctgcccatagcttccttctgggttttccttagggttagctttaagggttccttaggtgatctatacacttcccattcatccttttcccttccatctggggattcttttaccagtmtcttgactcgagtgtaatgtgtccaccgcccgccccccggccccacccagctgttcataaggctgtctcagtgatcaggagcacttgaaagggaccttcccagcatgggtggagcttgtcttctttttgagtcttaattaacactgagtcaccaggctgaaagtggtgaaccatgaactcaagaggtggggtttgagtcagaagtcctttcaacctaaggaatgacagtgtggaggataggtccagtatataatttcttaaaaattggtctttggtttccacactaggaaggtcagtagtcctacctaaatacgggagtt

SEQ ID NO: 462458 - DNA, 592 bp, Homo sapiens
gtttattttttttcttttagagatgaggatgaaatatgccatttaagaagagagtatgaaccaagtactgaacaaagtacatgcagcccagtaggctgtttcatgatagttcagtaatttcttcttactaataaataatatcattaaatctaggcacaattaattcataatatctttcttaacttgactcgttttaccagtgaatatgttagaacyattatttgagcctccaaatttgaaaaatttgtgcaacaattaaagtaattcttacttttttataatattatttgtattgtatttctgcctttggagatacatgaaataatatttataatattaatagcaattaacagtcattgaatttttattttgaaattcaatatgtaattttgttttgtatttaatctttgttatacaaagatttccatgtttaagcctcaaagtaggaatttaaaccacaacttctataatatttggtctatcaacacaccaagtagcaataaagtcaagtcataagataggccagtgcatttatgacttacatacatataacatcaaatactgtttgttaagaaaattttaccattaaaag

SEQ ID NO: 462459 - DNA, 592 bp, Homo sapiens
gtttattttttttcttttagagatgaggatgaaatatgccatttaagaagagagtatgaaccaagtactgaacaaagtacatgcagcccagtaggctgtttcatgatagttcagtaatttcttcttactaataaataatatcattaaatctaggcacaattaattcataatatctttcttaacttgactcgttttaccagtgaatatgttagaactattatttgagcctccaaatttgaaaaatttgtgcaacaattaaagtaattcttacttttttataatattatttgtattgtatttctgcctttggagatacatgaaataatatttataatattaatagcaattaacagtcattgaatttttattttgaaattcaatatgtaattttgttttgtatttaatctttgttatacaaagatttccatgtttaagcctcaaagtaggaatttaaaccacaacttctataatatttggtctatcaacacaccaagtagcaataaagtcaagtcataagataggccagtgcatttatgacttacatacatataayatcaaatactgtttgttaagaaaattttaccattaaaag

SEQ ID NO: 462460 - DNA, 554 bp, Homo sapiens
gtcccttcagctcagtttcagaattctactggttttaactgacttatacttctcacatttcttcttatttctagcatcatcctctgtattacgcagcttcctaactagtctcctcractaatactttttcccattgcagtccatcctgcatacaattagatacattttcctacacccagttttgattatgcatttctcttttcaatataccctttatatgctaaacaaatattgattgagcatatctggtgtttcaaactcttttctgagcagtggtgacactgcagtgagtaaagatagtgaaatcgctgctctcacagagcttatattttactatgtttacgtgaatggagagacaaaaagtaaacaaataagaaattgctatacagtagcttaaagtaccaactgatatgagataaaaatagacaaatgattagatggctattttaaactggttaatcagggaaagcttcactgcagaggtgacttttgagataaatggtagatggcaaaaagtcacaatttcaaggataagtattaaaatatgaaacata

SEQ ID NO: 462461 - DNA, 595 bp, Homo sapiens
tgattgagcatatctggtgtttcaaactcttttctgagcagtggtgacactgcagtgagtaaagatagtgaaatcgctgctctcacagagcttatattttactatgtttacgtgaatggagagacaaaaagtaaacaaataagaaattgctatacagtagcttaaagtaccaactgatatgagataaaaatagacaaatgattagatggctattttaaactggttaatcagggaaagcttcactgcagaggtgamttttgagataaatggtagatggcaaaaagtcacaatttcaaggataagtattaaaatatgaaacatagctagtgcaaaagtcgaaagacagatataagcttgttgtgtttgaagaccagcaataaggccaatgttgagtaaatgattaaacaaaggaaaagaaattttcaagatgaggtcaaagatgtataatcttgcagggccttctaggccatggtatggggtatttggatttttttccaagtgcaataagtagtagggaaattaatgatagagagatagggaagaaccaggaagaagcagattttgaggcagaagtaaaatgtttcgttttcacatg

SEQ ID NO: 462462 - DNA, 595 bp, Homo sapiens
tgattgagcatatctggtgtttcaaactcttttctgagcagtggtgacactgcagtgagtaaagatagtgaaatcgctgctctcacagagcttatattttactatgtttacgtgaatggagagacaaaaagtaaacaaataagaaattgctatacagtagcttaaagtaccaactgatatgagataaaaatagacaaatgattagatggctattttaaactggttaatcagggaaagcttcactgcagaggtgacytttgagataaatggtagatggcaaaaagtcacaatttcaaggataagtattaaaatatgaaacatagctagtgcaaaagtcgaaagacagatataagcttgttgtgtttgaagaccagcaataaggccaatgttgagtaaatgattaaacaaaggaaaagaaattttcaagatgaggtcaaagatgtataatcttgcagggccttctaggccatggtatggggtatttggatttttttccaagtgcaataagtagtagggaaattaatgatagagagatagggaagaaccaggaagaagcagattttgaggcagaagtaaaatgtttcgttttcacatg

SEQ ID NO: 462463 - DNA, 591 bp, Homo sapiens
agtatgaggtttttttttttcacgttaccctcaataaatgggtttaaccacaatacaaatcttataatccacctcttcaatcccactggcagtgggacaaatccactagctttagaggtaagccttcaaatatacttctactgacaggttgaagtttgttttaggaaaaatcaargttctacaatcctttgcatttattggagttttcagtttccatggtttccaagagttcactgaaattaggctttccatgtttagaagtcatgataggggctttggtaaattccttttctctaacctagattatgtttaagatctgtgtattgctattcctggatgagtattgggagctattgaatggtcaacacagctcttcacctgcatacctcctctacagaaccaagggtatatacgaggaatttcaaggcaatctatatgaagtcaaactagggttgttttctgggatcataaaataataacattacaatttgtatttgtagtgaagaactgccttcaaagggattaatggggaagtctacatttgaggttctctggcctttggtaaggaggggagtgccctgataaaataac

SEQ ID NO: 462464 - DNA, 591 bp, Homo sapiens
agtatgaggtttttttttttcacgttaccctcaataaatgggtttaaccacaatacaaatcttataatccacctcttcaatcccactggcagtgggacaaatccactagctttagaggtaagccttcaaatatacttctactgacaggttgaagtttgttttaggaaaaatcaaagttctacaatcctttgcatttattggagttttcagtttccatggtttccaagagttcactgaaattaggctttccatgtttagaagtcatgataggggctttggtaaattccttttctctaacctagattatgtttaagatctgtgtattgctattcctggatgagtattgggagctattgaatggtcaacacagctcttcacctgcatacctcctctacagaaccaagggtatatacgaggaatttcaaggcaatctatatgaagtcaaactagggttgttttctgggatcataaaataataacattacaatttgtatttgtagtgaagarctgccttcaaagggattaatggggaagtctacatttgaggttctctggcctttggtaaggaggggagtgccctgataaaataac

SEQ ID NO: 462465 - DNA, 597 bp, Homo sapiens
aaacaattaactcaagtcatttgcttcatggtaaaagacaaagctagagccaaatccaaatactgtggtatcagtgcagtcaggggaacaaagattcctttaagtgaaacaccgtcattcaatcaaagcagaaatagttttggagaaatagacaataagagtggaaggagaagagactctctaggactaagagtgacttgaaatattccacagtaaagtctgtctctattgtgagttttgagtcagaaagtcactttgcttccaagattcattacttaatacctaatgtatacagctttattgtttacaaaagtgcatttgcacttaagttgtacagacatgctgtaagctaggtattatgtgtattaataatagctaatacttatttagcagttcagaatttgccaaattccatctatctytttttcattttcttcattcctcttacaatttttgaagatgagaaaaagagtctcaaaaagttaaagtattataatttggccaaaatcacaggactagtaacagcaaaaactaggtattaagcagtcttctgactataggtcctctttctatgtagtacctcctgttcctcatatt

SEQ ID NO: 462466 - DNA, 602 bp, Homo sapiens
gaacgtcccactttgtaagctctactgtgctgaaaatagwctttaaacatatatgttcaaacatagttgttgaccaaatgactgactagagtaatcaatatttactagcttcagaactgtaaagcttctataaaggactatatacacaatctatttgaatcttattgactatcataaaatgaaagtgattgatgtggaataatctgacttgcttcataaactaaatcagtgtttgtccaactattctctacagcacctttgggcttccacagaggtggtgcaggaatctctctccttagcagtgggaaatgggaagtaaatagagttttctcctccccactttaccttcacccaacactgctccattttgtatattggcctttcctataagactttactcagagaaagttttcactatttaggaaaagttttgaggtcacttggggttccaccactggaacactctgattttatatttgtttcacatgaaatcctctttacctgataactaggtaaataagctgttgtggttaagctgaatttacggtagcacaaagtacgtttcagataattttatatcaggagctactccaacacttcac

SEQ ID NO: 462467 - DNA, 602 bp, Homo sapiens
gaacgtcccactttgtaagctctactgtgctgaaaatagtctttaaacatatatgttcaaacatagttgttgaccaaatgactgactagagtaatcaatayttactagcttcagaactgtaaagcttctataaaggactatatacacaatctatttgaatcttattgactatcataaaatgaaagtgattgatgtggaataatctgacttgcttcataaactaaatcagtgtttgtccaactattctctacagcacctttgggcttccacagaggtggtgcaggaatctctctccttagcagtgggaaatgggaagtaaatagagttttctcctccccactttaccttcacccaacactgctccattttgtatattggcctttcctataagactttactcagagaaagttttcactatttaggaaaagttttgaggtcacttggggttccaccactggaacactctgattttatatttgtttcacatgaaatcctctttacctgataactaggtaaataagctgttgtggttaagctgaatttacggtagcacaaagtacgtttcagataattttatatcaggagctactccaacacttcac

SEQ ID NO: 462468 - DNA, 622 bp, Homo sapiens
ctttccctttaatttgtctatttgtgttcctttacttcttatatttggtgtgatttctccccctgttaaatcctctttgctttcaactttcttaatagttattttaaaacctaggttttgtttaagatgacaagtcaatccaagagactgttacaaagacagtttaatatctacatcatagtcatatatacaatagatgctttataattattcaagaagggaagtacaatttatctccctataaggttgtctctctgtcccccacaattttaacttaaaaacaatgaaagctgattctaatctcttgctctgagaatattttaagaactagatctggagattagtggtaaatgacaccagtactaagatctccatgatttggtgactcagagaccctttgggttcacggctgtatagagaacatggagatttagtctcagttacagaaggaattctcattgacctcatgtctcacatgctcaggtcatcaaaggaacagactaggccttactttatacctggcccaaataatsaaactttcacagtaatgataaatattaggctttgttcaatattttaatatatccccttcccattatgttaaaaactcactttccagaag

SEQ ID NO: 462469 - DNA, 641 bp, Homo sapiens
tattaatgagcagctcaaaaagacgcctttcattcagaagaatgttggttcttctgattatctcccttttaaaaaagcttttcctttgttcacatgctgttctaagccagggatagtcaatgccacaagtcaatgcttgagaacagttaggggtccagggcatctggagcgtgacataagaattcttaaggttcagaaggaaaaatgcaaagcagaatgcagtgcaatcttctattaatttataatttgcctttggccatccttggccccacccagtatccctcgccaattgaattagtaaacttcaaattaggttatttacttggtgaattatccacagtggctgaaacattattcccatcaaagaagatgtaaataccaactgaaggaacaagccaggacaaatatggaatcagacatagaatttatgcgtatacaygtctgtttttgcctcagtcattgtgatgtatttagttttgtcttcgaccaatttgcaaagacaaaaaagaaaatatattattatatcttagaaaaattgaatgcatgaataacattctatttgctctaacttagcatcttattgagaaacatataaaggagaatttaaaacaaaaaatacatgtaaatcattattaggaaaa

SEQ ID NO: 462470 - DNA, 482 bp, Homo sapiens
aggtcatttgcaactttctaaaccaatccctgggcaaggggaaagatttactgtgagtggcttcagctaattaagatctaacacacagtrgctggggataggagcatctctaagcacaacctctaggagagaggttgaacagtgaaataaaataaggagtcagcaaggaagaaaaaaaatatatggcccaaagtggtaatagttgaaatgatagctttgcctaagcaaacaatagtgcctgctactgaccttatgttgttaacgtgaggggtaatatcatatactgattaagagttaaggtgcagtttaagatagtcctagattcgaatctagaatctgatttatatcagctctgtgttcttgagaaaaattagctaatttatctatacccaagttttttcatatgtgcaatgggaataatattaagacttaactcatgggttgtcatgaggattagattaggaatttgtttaaagtgcata

SEQ ID NO: 462471 - DNA, 482 bp, Homo sapiens
aggtcatttgcaactttctaaaccaatccctgggcaaggggaaagatttactgtgagtggcttcagctaattaagatctaacacacagtggctggggataggagcatctctaagcacaacctctaggagagaggttgaacagtgaaataaaataaggagtcagcaaggaagaaaaaaaatatatggcccaaagtggtaatagttgaaatgatagctttgcctaagcaaacaatagtgcctgctactgaccttatgttgttaacgtgaggggtaatatcatatactgattaagagttaaggtgcagtttaagatagtcctagattcgaatctagaatctgatttatatcarctctgtgttcttgagaaaaattagctaatttatctatacccaagttttttcatatgtgcaatgggaataatattaagacttaactcatgggttgtcatgaggattagattaggaatttgtttaaagtgcata

SEQ ID NO: 462472 - DNA, 575 bp, Homo sapiens
tattagtattaagaagtgctactgatttttgtatgttagttttgtatcctgaaactttactgaagccatttatcaggtctaggagtcttttggaggaatctttagggttttctagatatgaaatcatatggtcagtgaacagagataatttgacttcctcttttcccatttagatgccttttatttctttctcttgcctaaytgctctgtctacaacttccagtattatgttgaataggagtggtgagaatagacattcttgttttgtactagttcttggggaaaatgtttccaacttttgccctttcagtatgatgttgggtaatagtttgtcatagatggctcttactattttgaagtaagtttcttcaatgcctcatttgttgaggatttttatcatgaagggatgtttgattttatcaagtgccttttctgtgtctattgagatgataatttgttcttggttgtcaattctgtttaggtggtggatcatatttattggtttccatatgttgaaccatccttgcatcccaggaataaagtccattttgttgtggtgatttatccttttgatg

SEQ ID NO: 462473 - DNA, 552 bp, Homo sapiens
ttatataatgcccttatttgtcccttattactgttgttggtttaaaatttgttttatatgatacaagaatagcaacccttgctcttttttcatttttcatttgcttgacagatctttctccatcctgttactttgagcctaaggggtcaaagtaaacccatcacatgcaagatgggtctcttgaatatagcataaagttgggtctcgatttttatccaatttgcaactctatgtcttttragagaagcaattaggcctttatgttcaaagttaatattgatatgtaagactttgttcctgtcatagtgttgcagctagttgctctacagtctcaattgtatagttgctttatagggtttgtgggctttgtacttacatgtgcttttgtggtagcaagtattgtgttttcatttccaaaaataaacaatggagaaaggacatcctaatcaataaatggtgctggaaaaactggctagccatattcagaagaataaaactggacgtttacctctcactgcatacaaaacttaattcaagatgggttaaagacaa

SEQ ID NO: 462474 - DNA, 645 bp, Homo sapiens
catgtgcttttgtggtagcaagtattgtgttttcatttccaaaaataaacaatggagaaaggacatcctaatcaataaatggtgctggaaaaactggctagccatattcagaagaataaaactggacgtttacctctcactgcatacaaaacttaattcaagatgggttaaagacaagtgtaagaccttaaactataaaagccctaygagaagacctggttaaaaactcttcgggaattgacctaggcaaataatttatgattaagacctcaaaggcaaatggaacaaaaacaaaaattaacaagtgggacttaatcaaactaaagagcttctacacagcaaaagaaactatcaacagagtaaacagacaacctacagaatgtggaaaaatgttaaaaaattatgcatccaacaaaagattaatatcttaacttaaatcaccaccaacaagaaaataaccccattaaaaagtaggcaaagcacatgaagagacacttcttaaaagaagacatacaagtggccaagaaacatgaaaaaatgcctaacattactaatcatcagagaaatgcaaattaaagccaccatgagatgccatctgacaccagtcagaatggctattattaaaaagtcaaaaactaacacatg

SEQ ID NO: 462475 - DNA, 645 bp, Homo sapiens
catgtgcttttgtggtagcaagtattgtgttttcatttccaaaaataaacaatggagaaaggacatcctaatcaataaatggtgctggaaaaactggctagccatattcagaagaataaaactggacgtttacctctcactgcatacaaaacttaattcaagatgggttaaagacaagtgtaagaccttaaactataaaagccctatgagaagacctggttaaaaactcttckggaattgacctaggcaaataatttatgattaagacctcaaaggcaaatggaacaaaaacaaaaattaacaagtgggacttaatcaaactaaagagcttctacacagcaaaagaaactatcaacagagtaaacagacaacctacagaatgtggaaaaatgttaaaaaattatgcatccaacaaaagattaatatcttaacttaaatcaccaccaacaagaaaataaccccattaaaaagtaggcaaagcacatgaagagacacttcttaaaagaagacatacaagtggccaagaaacatgaaaaaatgcctaacattactaatcatcagagaaatgcaaattaaagccaccatgagatgccatctgacaccagtcagaatggctattattaaaaagtcaaaaactaacacatg

SEQ ID NO: 462476 - DNA, 500 bp, Homo sapiens
tgaggaataagggaggtgaacaatggctgaacaactacctacgttcactttttgggtgatggattcagtagcccaaacccaagcattatgcaatatattcatgtaacctgcacatgtgccccctgaaactaaaattttaaaaatagtaagaagaaagaataagctttggttccatattaaaagtatgacaataaatgtgtattttatatattaaattaaaacaaaatattgaactataatatgtatttttaatgagttctttcttttgcaaattttaaaaattaaccaactgaatctaggtcttgatcaactgagatggctttgtaatagctgaagaaggtattccccaagcttctgggaatactgttgggccaagagcagacagcacagcccttagctgtcagcctcactctggggatttgccttggctgaagacggctgccttgctcaaagtcatgtgccccttccactkggcagaaagagaccaacgactagttgct

SEQ ID NO: 462477 - DNA, 530 bp, Homo sapiens
tctgaaagtgcccaaatggaagctatgagtatgtgtacaatgcttagcagggataatattgctaagaattaacactgctttgcttgttttatagtttggaggagactttgtttgttttcaataccagcatctaaaagaagaaaakaataacaagaaagttctggagtaaagtccctaaatgaggagaagataggagtactgacagtatcagtttggagcagaatataataactttggaccttccagataacctgaacaaggtaaacaacaccccttagcaacacaacttagcaaggcttcttcagcttcctggttcaggttaggagatttgggagttgtcctagtaatcagagtatagttgaggaccattactgtccacaagaaaagtaattttcatgggtaggatttggcaactcttcttgccatcccatccctgtgtaagagacaaaatagcaattccctacaattttacctactgcagaagctataaatgaattcctaagtacatcctgcaaagaactaaaccaaag

SEQ ID NO: 462478 - DNA, 594 bp, Homo sapiens
tagaagtggaagttgtaagaatatccatgaattaaaaatcagattggcttcactctgctttttaggaggcaaaggggcaaaaaaaaaaaaaaaaaaaaaacacagacaaaaacaaaaaacagttctttagtcaaccagaagtcggttcaattagaactttctcaattaraaatggagcagtagctctagaaaaaaaacagaagactgtgtggcaagaaaaaaagaaagctacagatgaattttggttaatgagtagaaacctaacagaactcaggtgatgggtcagtgcaaggacctataaatgaccttgctatgctcagtaagcagagaagttcaggaaatctgtgaagcctctgaactggagaaaaaaaagatagaatattgtcaagaaatggtagagagagaaaactaaatgcctgagcagagttaaattaagtcaagctggagtcagcatatcatctctgtgcctataaattatctctaggcatctagggtctcacagtgtggctgagcagcttctaccctaaaggagtaaatttctctgttgaaatttaggagaaagatttaggcctcatattgtaatcttcagaagag

SEQ ID NO: 462479 - DNA, 594 bp, Homo sapiens
tagaagtggaagttgtaagaatatccatgaattaaaaatcagattggcttcactctgctttttaggaggcaaaggggcaaaaaaaaaaaaaaaaaaaaaacacagacaaaaacaaaaaacagttctttagtcaaccagaagtcggttcaattagaactttctcaattagaaatggagcagtagctctaraaaaaaaacagaagactgtgtggcaagaaaaaaagaaagctacagatgaattttggttaatgagtagaaacctaacagaactcaggtgatgggtcagtgcaaggacctataaatgaccttgctatgctcagtaagcagagaagttcaggaaatctgtgaagcctctgaactggagaaaaaaaagatagaatattgtcaagaaatggtagagagagaaaactaaatgcctgagcagagttaaattaagtcaagctggagtcagcatatcatctctgtgcctataaattatctctaggcatctagggtctcacagtgtggctgagcagcttctaccctaaaggagtaaatttctctgttgaaatttaggagaaagatttaggcctcatattgtaatcttcagaagag

SEQ ID NO: 462480 - DNA, 594 bp, Homo sapiens
tagaagtggaagttgtaagaatatccatgaattaaaaatcagattggcttcactctgctttttaggaggcaaaggggcaaaaaaaaaaaaaaaaaaaaaacacagacaaaaacaaaaaacagttctttagtcaaccagaagtcggttcaattagaactttctcaattagaaatggagcagtagctctagaaaaaaaacagaagactgtgtggcaagaaaaaaagaaagctacagatgaattttggttaatgagtagaaacctaacagaactcaggtgatgggtcagtgcaaggacctataaatgaccttgctatgctcagtaagcagagaagttcaggaaatctgtgaagcctctgaactggagaaaaaaaagatagaatattgtyaagaaatggtagagagagaaaactaaatgcctgagcagagttaaattaagtcaagctggagtcagcatatcatctctgtgcctataaattatctctaggcatctagggtctcacagtgtggctgagcagcttctaccctaaaggagtaaatttctctgttgaaatttaggagaaagatttaggcctcatattgtaatcttcagaagag

SEQ ID NO: 462481 - DNA, 596 bp, Homo sapiens
caatgtgcctctttcagaaacgcaaatgtcaacacttgtcacctcacttttttccagctgatatgtgaataattaatctttcaatgtgtccacaccctgaaggaagtcacaagaaggattccctactcaaataaagaagagttagagtacataagtgatagtgctgagataagtctccaagtccattttcagcacttaaacatgaatggcaatacatatatagtaagtggtttggtttkgttttgttgatggaaattctaaggacaaagtcttgttcactctgccatctgtgcagaaataatggagatatctattctagttgttctggcagataacacattaaagtcatatagaaaatgggatgactggaggaatgaaaaactttacacaaatattataggcctccttttaaaattagctttagaaaaaacagaaaatttgtaatgttaactaagaaagcaagcacaaaagagaagaaagaaaaggttaaaaaaaacatatttagaagtgagggaaaagcacaggcaaaggttattttttgttttaaatgtagtggagaaaagagaccaaaaaaaatgatgagatataacaaagag

SEQ ID NO: 462482 - DNA, 596 bp, Homo sapiens
caatgtgcctctttcagaaacgcaaatgtcaacacttgtcacctcacttttttccagctgatatgtgaataattaatctttcaatgtgtccacaccctgaaggaagtcacaagaaggattccctactcaaataaagaagagttagagtacataagtgatagtgctgagataagtctccaagtccattttcagcacttaaacatgaatggcaatacatatatagtaagtggtttggttttgttttgttgatggaaattctaaggacaaagtcttgttcactctgycatctgtgcagaaataatggagatatctattctagttgttctggcagataacacattaaagtcatatagaaaatgggatgactggaggaatgaaaaactttacacaaatattataggcctccttttaaaattagctttagaaaaaacagaaaatttgtaatgttaactaagaaagcaagcacaaaagagaagaaagaaaaggttaaaaaaaacatatttagaagtgagggaaaagcacaggcaaaggttattttttgttttaaatgtagtggagaaaagagaccaaaaaaaatgatgagatataacaaagag

SEQ ID NO: 462483 - DNA, 574 bp, Homo sapiens
cttgagctgggaggtggaggttgcagtgagtgagctgagatcgttccactgcactccggcttaggtgacagagtgagaccctgtctcaaaaaaaaaaagaaaagaaaaccaaaaaaccaaagtttacwttcacgaatgaaactggtgtctgcttttttccccctctcctttttatcgtatttggtaacaagtagaagattaaaaagttagttggggggacagatcttttaaaataagaaagcaaatgactattcatcttcttcaggtatttttataaaaaatttagagaaggagtcccaaatatgtacttctgtcaactgactggggctcattggcttgatctgtgtagtagtgctctttttttaaaaaaacagtgaccatcttaacaaatattatgtttaattttggaagagtgttttgttgattatgtaggacattttgtcctacactacacattttatcagacactaagcaaatattaatgcaagttaattgagaatattgtctgacacattttagtgctgcaaaatttaaaatttgatgttttaaaatgcatttatagatgtaaatgtct

SEQ ID NO: 462484 - DNA, 574 bp, Homo sapiens
cttgagctgggaggtggaggttgcagtgagtgagctgagatcgttccactgcactccggcttaggtgacagagtgagaccctgtctcaaaaaaaaaaagaaaagaaaaccaaaaaaccaaagtttacattcacgaatgaaactggtgtctgyttttttccccctctcctttttatcgtatttggtaacaagtagaagattaaaaagttagttggggggacagatcttttaaaataagaaagcaaatgactattcatcttcttcaggtatttttataaaaaatttagagaaggagtcccaaatatgtacttctgtcaactgactggggctcattggcttgatctgtgtagtagtgctctttttttaaaaaaacagtgaccatcttaacaaatattatgtttaattttggaagagtgttttgttgattatgtaggacattttgtcctacactacacattttatcagacactaagcaaatattaatgcaagttaattgagaatattgtctgacacattttagtgctgcaaaatttaaaatttgatgttttaaaatgcatttatagatgtaaatgtct

SEQ ID NO: 462485 - DNA, 574 bp, Homo sapiens
cttgagctgggaggtggaggttgcagtgagtgagctgagatcgttccactgcactccggcttaggtgacagagtgagaccctgtctcaaaaaaaaaaagaaaagaaaaccaaaaaaccaaagtttacattcacgaatgaaactggtgtctgcttttttccccctctcctttttatcrtatttggtaacaagtagaagattaaaaagttagttggggggacagatcttttaaaataagaaagcaaatgactattcatcttcttcaggtatttttataaaaaatttagagaaggagtcccaaatatgtacttctgtcaactgactggggctcattggcttgatctgtgtagtagtgctctttttttaaaaaaacagtgaccatcttaacaaatattatgtttaattttggaagagtgttttgttgattatgtaggacattttgtcctacactacacattttatcagacactaagcaaatattaatgcaagttaattgagaatattgtctgacacattttagtgctgcaaaatttaaaatttgatgttttaaaatgcatttatagatgtaaatgtct

SEQ ID NO: 462486 - DNA, 534 bp, Homo sapiens
taactaacacacggttcattttctttttaaatctttttttctacttctttcattttggataatttatattgctaagcctataaattcactaaacttttggttttttcttcagtgcttggtctgctgttaatactactttgtgtgtttttcatctctgacactgtagttttcatccctaaaagttctatttggttctcttatattttccakttctcttaatataatgttcaatctttcttctgctatttttagcatgtagagtttaagtattttaatgttcttgtctggtaattactacatctttatccattctgattggtttatcagttctgattgattgatcaattttgatgaactgattttttttttttttttgagatggagtctcactctgttgtccaggctggagtgcagtggcgcaatctctgctcactgcaagctctgcctcctgggttcatgctattagaagccaggaatcgttaattctaccttgttggatgttgaatattttgtattctaaaagtatcatgagtt

SEQ ID NO: 462487 - DNA, 534 bp, Homo sapiens
taactaacacacggttcattttctttttaaatctttttttctacttctttcattttggataatttatattgctaagcctataaattcactaaacttttggttttttcttcagtgcttggtctgctgttaatactactttgtgtgtttttcatctctgacactgtagttttcatccctaaaagttctatttggttctcttatattttccagttctcytaatataatgttcaatctttcttctgctatttttagcatgtagagtttaagtattttaatgttcttgtctggtaattactacatctttatccattctgattggtttatcagttctgattgattgatcaattttgatgaactgattttttttttttttttgagatggagtctcactctgttgtccaggctggagtgcagtggcgcaatctctgctcactgcaagctctgcctcctgggttcatgctattagaagccaggaatcgttaattctaccttgttggatgttgaatattttgtattctaaaagtatcatgagtt

SEQ ID NO: 462488 - DNA, 534 bp, Homo sapiens
taactaacacacggttcattttctttttaaatctttttttctacttctttcattttggataatttatattgctaagcctataaattcactaaacttttggttttttcttcagtgcttggtctgctgttaatactactttgtgtgtttttcatctctgacactgtagttttcatccctaaaagttctatttggttctcttatattttccagttctcttaatataatgttcaatctttcttctgctatttttagcatgtagagtttaagtattttaatgttcttgtctggtaattactacatctttatccattctgattggtttatcagttctgattgattgatcaattttgatgaactgattttttttttttttttgagatggagtctcactctgttgtccaggctggagtgcagtggcgcaatctctgctcactgcaagctcygcctcctgggttcatgctattagaagccaggaatcgttaattctaccttgttggatgttgaatattttgtattctaaaagtatcatgagtt

SEQ ID NO: 462489 - DNA, 476 bp, Homo sapiens
aacttcaatttcttggctttcccttaactgactatattatttcatactactctttttgttggaatactcttcacctccaactttcatagctggagttcctactttccaaagtcaatggcgttttctctttttaactttcgttgtacaakaattaaattggactggataaattcctatgcattcctcgtgtcccaatataaatattagtttctctgtgaaatcattactattcaaggaagagcgagttgcatcctcctgtattatccaaacatatgcttattcataactatgaatattataccacacatcaagctgtgtcacaaatatagcttatgtgagaagtactgtggtatattgatgatagcttgttatccagagtcagccctagttacctcacaggagttttatatcagatgatataggtacgtacccagcctattatatgtgttttgttaagtattaaggacttccacatc

SEQ ID NO: 462490 - DNA, 457 bp, Homo sapiens
ccaaaaccaactcagaatctctatcttcaagaagactgcaagcttctagatgtaaggccttcttcgttaaactcagaaaatcaccctctcaactcttctcaataattgcttatttcaaggtttgtaagaaactatcgggatgtgttgcatgtgtactttaaatgaattctgtttaataaaccatggcactactacataaaatattctgagggttttatccactataatatcccttttaaatccaattaaaatgattgctttggaaattgctaaatttatagattctcactgtcagtgttactaagattattatttaatgaaaagaacaaaatattttttaaggcacattcttttaaaaawtttttttagttttatttttaactgacataataactgcatctacttgtgaggtataaggttgtttcaatacatgtatatatcacagaatgatctgata

SEQ ID NO: 462491 - DNA, 569 bp, Homo sapiens
atttattcacctctttctctgaacaccccagtgatatcataactaagatatctcttctacagtgtcctaagattacatcttattcattcaagtgactctccttgttttcaatttaaattttacagcccagatttaaagtcccaggaaaataatgctaattaggccatcttgattcagatggtcactggattaaaataaaccatcatcaaagaggaagaatcagattgtgccaacagggctattatggacccacccccatgctgctatggattagccaagtgatgagaggagtagtcaggaaggagaaaaatatgagagacggaacaacactctaatatgtctacaaaaataaaatatatattcaaaaatctaccagaaaatggaatttaatgcttttcaggtctctagattaaatattaattcattcgtatacattaaagagaagaaacaataaatgtaaagattttatastttttactatattagaattttaattctgttccagcctgggcaacatagcaagattccactgctacaaaataatttttttaattagccagtcatagtgc

SEQ ID NO: 462492 - DNA, 582 bp, Homo sapiens
agttctggtgaagtcaaagatcaggaatttttgctacataatgatctattctcaagcactacacatacaggaaatagaagagctattggcttagtctgcttagtgttgttctaaagaaatagctgagactgggtaatttataaagaaaagaaatttatgtagcccatagttttgctgactggaactggaacattcaagattgagcatctggtgagggcctcaggctgcttccactagctggaaggtgaaggaaagccagagtgtgcagagatcagatgtacagagagcaaccaagacaaagaaggaggaggtgctaagctctttttaacaaccagctcttatgggaaataataaagtgaaacctcactcagcaccaagagagaacattaatctgttcatgcaggatgtgtcccatgacctaggacccacctcccagcattgccacactaggaattaaatttcaacatgatatttgcagagaacaaacatccaaacaatagcaactattgtcttaatytactataagaaatatttgaaaatactgttttcctctggctacacatttttttgataagaaatgga

SEQ ID NO: 462493 - DNA, 536 bp, Homo sapiens
agaagttgatatttgatcccaaatctatagatctcaaagtccaagtccctttcctattcaaaaattgagaaccctatatgtatcagagaacatgtacgtatataaatgtgttctatatgaacacagaatatacacatattcttagatgattattcatacacatatcttaggacattttgatgactatgctcagcagtatgaggagaacaaatgctgtattggccctttctctgctcaacctactcactgctttgaaaaactaagaggcatacaattctgaaaaaaatggagacacgtttaagagagaaatggcattaggacagattaagagtaggttaaatgactctagttgctcttctgagattttcatagtactgaaacaatcgtccctggagaaagtaaatattgaatatggcatttattagacagaagtaagggattttcacaaggactcttttagaggaaaaaacatcaccatttggcgaaattmtggatatctctgaaaaaaataaaaagttgtttgctactatttgcca

SEQ ID NO: 462494 - DNA, 577 bp, Homo sapiens
gtggcagtgagcaactaatggtggaatggaatggtttaaccacctcaacctgaggatggcttcatgaaagggtggatgccaaaaccaggagtcaactgttgggggtggattactaagaggtaggaaacaaaatgctccaaagcccagaagaaaattgctctagcctggagacccaaacactggcasaaagaaatattcacatgagcaggggtcccactgacacagtagttgggcaggaagatgtgtgaagggaatctgcctgtagagaagccaggaattcttttcacccagaaaatgtttaagcttatttttcaaattatatacttgatgtaaactttttgtaaaaaacttggaaaatacagaaataaattttaaaaactaaaattatttataattctcattacccagatataaccacaattgatattttgctgtatctcctctaagtctttttataaaagttccaatgtttattgtttattatattttgaagtattttatatatactattttgcgtgctactttgtttttctcttaacattgcatggagatcatcttcccattaagcattcactgc

SEQ ID NO: 462495 - DNA, 573 bp, Homo sapiens
ttttctatttcataaagcccttagcatactgttactgtgaacatttgcgtctctctctcatattctgaaaggcacttttgatttaatacatgggcttgtgttatagttgccttgcacttgaacataaggatgatttataagggtttcttacaagtgtgtgctgtgcaatccaaaagggctgacctttggtcactctwaaaattgggaagaaattagctcattaaaaggcaataccatatcccttattcagctgtcatgaatttcaacttgaaatataatatatttcaagcctaaacttgtattctattgaagcatgattttgatatcacattccatactattccaacagtagttcaatatgttttgtgtaattctattaaatttcaccctaatatttctcataatagcaaagattcagttatactggaagaaaaatcatgtcctcttacttaaagtttcatcatgaatttctctcattatattactaagtctacatgtggccattagcccagtttctcaataccactattacaaatgagttctactgtataacatcattagctatacacatta

SEQ ID NO: 462496 - DNA, 636 bp, Homo sapiens
caaacctctttttgtaataatgagctgggagcaatactcgctcactcaatgggatttgagagaggcgtataaacatgaaaaaaacaaaattcggaaaaaaaacttacctattatttcacaagttaagcatcaagatagaaagcagaatttcatatgtttcctaagtgttgttttaaaattttttaattaacacctggatccgaatagagcatttaaaaacaagtttaaaagaccaaatgaatgactttgactggttaccataamaaattacctttaataatgaggcctataaaattgttttcatcttcaaagtactttaaagctttaattaattattgcaagactcctgtgcaataaataattaggtattattattgctccatttattgatgggaaaatgaaagataattgtttaagaattttctccaatttatttaggtcagctacaatgttaaatatctaattcctttcagaataatttttaaaaaatgtataacctgagttaagaatgctttttatgaaatatattttgtgaagtttggtaacagaaacctcaagtaatttctaatatcagagctacaaataacaaactctcctgtttctaccaaatattaaatcatacttccatcttcagta

SEQ ID NO: 462497 - DNA, 567 bp, Homo sapiens
tgtcctactcaatagaataatcctgaataacaataacattttttgttcagtatgattttaacaatcattcattataattaaagtggcttgaaaatcttatttaccctggaacaaagaaaatgtttagaaaaaactaaatgagtgattacttttggcatgaagaacagttgcccttttgctcccctcgcaactcattcttacatccaaagcaaggtttgataatttgacaaaaaaaaaaaaaaaaaaaacaagtmcaaaaggaattctatgaagctacctctttttatcaccaacttaaaacttcacttctaaaggcccagtgactactgtattcattattcaatgaacttgtaatttctaacaatgagtccaaatttataaggcaggccacttgcttttcccaggaagcttgccataatgaaattacctttcaaattacactgttattattcaatagtactaaaacactcctactacgagcactaatttgcacaaactaccattgcacttggcactgataaaaatacaaatatattttagaatgacatttgaatttggaaatatacc

SEQ ID NO: 462498 - DNA, 634 bp, Homo sapiens
ctcattgctcaattaaactccttcaaatttaattcagctgaagtttttcttttatcaccacacaagcccatgggaaagcactgactcagaaaatacctgagaagaccttaagtatatacctcattctgatccttgacacagagatagcttaaaacactcaaattaaaaaaaaaatcaataaacaataaattgtaaccaaaaaacagcaaacacagggaaagggaggagaatctggcttctagagttaccactttattaggttcaaatatgcagttttcaaaaaaaaaaatcacagggcattcagagaaatggaaactatggctcactcaaaggaaacaaaaataaatcaaccaaaactgtccctgagtaacacagatggaagatccactagacaaagtctttgaaacaactgccttaaatatattttcaaaactaaaggaagatgttaaaaaaatcaagaaaatgataaatgaacaaaatagaaatataaagataccaaaacctaaaaagaaaccaaaaataaattctggaaatgrtaagtatgataactgaaacaaaaaattccctagagagattcaaaggcaggttttaagaggcaaaagaatcagtgacacttgaagataagacaatggaa

SEQ ID NO: 462499 - DNA, 583 bp, Homo sapiens
aaaaacacaccaatcagcgctctgtagctagagttttgtaaaaccaatcagcacactgtaaaatggaccaatcagtgctctgtaaagtgaaccaatcagcactctgtaaaatggaccaatcagcaggatatgggtggggacaaataagggaataaaagctgggcaccccagccagcagcggcaacccgctcaggtccccttccgtgctggggaatgtttgttattttgctcttcacaataaatattactgctgctcactctttgggtccgtgccatctttaagagctgtatcactcactgckaaggtccgcagctccattcttgaagtcagggagaccacaaacccaccaggaggaaccaactccagacacaatatattaagtcaccaattctcgatggattataaaagataaatattatgcaaattgtcttctctgatcacaacaggatgaaattagaactcagtaacacaagtaaaattagaaacttcacaaatttgtggaaattgcacagcacactcctttttcctttttttcgtgttagacaagtaatgtgcctatgctgtaacaaccaggtttgaggg

SEQ ID NO: 462500 - DNA, 583 bp, Homo sapiens
aaaaacacaccaatcagcgctctgtagctagagttttgtaaaaccaatcagcacactgtaaaatggaccaatcagtgctctgtaaagtgaaccaatcagcactctgtaaaatggaccaatcagcaggatatgggtggggacaaataagggaataaaagctgggcaccccagccagcagcggcaacccgctcaggtccccttccgtgctggggaatgtttgttattttgctcttcacaataaatattactgctgctcactctttgggtccgtgccatctttaagagctgtatcactcactgctaaggtccgcagctccattcttgaagtcagggasaccacaaacccaccaggaggaaccaactccagacacaatatattaagtcaccaattctcgatggattataaaagataaatattatgcaaattgtcttctctgatcacaacaggatgaaattagaactcagtaacacaagtaaaattagaaacttcacaaatttgtggaaattgcacagcacactcctttttcctttttttcgtgttagacaagtaatgtgcctatgctgtaacaaccaggtttgaggg

SEQ ID NO: 462501 - DNA, 583 bp, Homo sapiens
aaaaacacaccaatcagcgctctgtagctagagttttgtaaaaccaatcagcacactgtaaaatggaccaatcagtgctctgtaaagtgaaccaatcagcactctgtaaaatggaccaatcagcaggatatgggtggggacaaataagggaataaaagctgggcaccccagccagcagcggcaacccgctcaggtccccttccgtgctggggaatgtttgttattttgctcttcacaataaatattactgctgctcactctttgggtccgtgccatctttaagagctgtatcactcactgctaaggtccgcagctccattcttgaagtcagggagaccacaaacccaccaggaggaaccaactccagacacaatatattaagtcaccaattctcgatggattataaaagataaatattatgcaaattgtcttctctgatcacaacaggatgaaattagaactcagtaacacaagtaaaattagaaacttcacaaatttgtggaaattgcacagcacactcctttttcctttttttcgtgttagasaagtaatgtgcctatgctgtaacaaccaggtttgaggg

SEQ ID NO: 462502 - DNA, 562 bp, Homo sapiens
tggggaatgtttgttattttgctcttcacaataaatattactgctgctcactctttgggtccgtgccatctttaagagctgtatcactcactgctaaggtccgcagctccattcttgaagtcagggagaccacaaacccaccaggaggaaccaactccagacacaatatattaagtcaccaattctcgatggattataaaagataaatattatgcaaattgtcttctctgatcacaacaggatgaaattagaactcagtaacacaagtaaaattagaaacttcacaaatttgtggaaattgcacagcacactcctttttcctttttttcgtgttagacaagtaatgtgcctatgctgtaacaaccaggtttgagggaggtgcatctcatccasgtgaatgaaaacccaatcatcaggcttgtgaactacaaaaggatcatacagcacagtcttcaacaaccaatggatcaaagaaatcacaaaagaaattagaatataattagagacaaatgaaaaatgaaactacatcacacgaaaacttatggtacacagcaaaagtggt

SEQ ID NO: 462503 - DNA, 562 bp, Homo sapiens
tggggaatgtttgttattttgctcttcacaataaatattactgctgctcactctttgggtccgtgccatctttaagagctgtatcactcactgctaaggtccgcagctccattcttgaagtcagggagaccacaaacccaccaggaggaaccaactccagacacaatatattaagtcaccaattctcgatggattataaaagataaatattatgcaaattgtcttctctgatcacaacaggatgaaattagaactcagtaacacaagtaaaattagaaacttcacaaatttgtggaaattgcacagcacactcctttttcctttttttcgtgttagacaagtaatgtgcctatgctgtaacaaccaggtttgagggaggtgcatctcatccacgtgaatgaaaacccaatcatcaggcttgtgaactacaaaaggatcatacagcacagtcttcaacaaccaatggatcaaagaaatcacaaaagaaattagaatataattagagacaaatgaaaaatgaaactacatcacacsaaaacttatggtacacagcaaaagtggt

SEQ ID NO: 462504 - DNA, 572 bp, Homo sapiens
ttgcaataaatttttgccaggtcctatatttgccattgtgcttatgaatttgtcccagaaaactgactacttgaatacaaagaccaaattcttttctgcatcctccacaatacttagccacatctcccagactaagctgaattaatagtcatttatgcattcacatacagataattttttcctaaaaatgacaagagtttgtttacttagataaaaataggtctagagattatatataggtgcacatatgcacagatatgtgcctaaatcatgaaaattgtcacttgcctgatcttcataaggtactgtcatttggaacctcttattctaccacctacagtgtgccctttttatccaaacacgaaaacattgttcttccccattgcgggctaattacgccatctgtttaaccacagtactattaatgttaactccttaacatttccacatgtactgccctcaaacaccttatamtgtcaaatatacaaatagtagagaaggcaagaaaatcagtctcccaatttgtattctcaactgtctctactgggtcaacactatggtctccataggga

SEQ ID NO: 462505 - DNA, 596 bp, Homo sapiens
gacaaacctgtgaaccaaatctagtctgccacctgatttcatctattcagttttactgggacaaaatcatgccccttcttttctgcattatttgtggcagcagtgtgaacaacagcagaattggrtagttgttgcatgagacaacagtattgcctgcaaattctaaaatatgtatttcttcttttattttaaaatttttcaaacacctgatataattcacagtccatattcaattgccaagtttctccataatgtcctttttaagtataatttccagtctaggattcaacccaggatcctgcatggcatttagtttcaactcacatctctaaatctcctttaatgcaaaacagttcttcagccttttttctctttcatgacactgccatgaaagaatataggccaggtatttttttagacaatttctctatttggatttgtctgatatttcctcatgatgagattcaggtaatgcattcttcaccagaatgctacaaaagtggttttgtgttcttatagtatcatacctgaaagcacatgatatctgtctgcctcccctcagtgatattaattttgacattcagtttttccactat

SEQ ID NO: 462506 - DNA, 596 bp, Homo sapiens
gacaaacctgtgaaccaaatctagtctgccacctgatttcatctattcagttttactgggacaaaatcatgccccttcttttctgcattatttgtggcagcagtgtgaacaacagcagaattggatagttgttgcatgagacaacagtattgcctgcaaattctaaaatatgtatttcttcttttattttaaaatttttcaaacacctgatataattcacagtccatattcaattgccaagtttctccataatgtcctttttaagtataatttccagtctaggattcaacccaggatcctgcatggcatttagtttcaactcacatctctaaatctcctttaatgcaaaacagttcttcagccttttttctctttcatgacactgccatgaaagaatataggccaggtatttttttagacaatttctctatttggatttgtctgatatttcctcatgatgagattcaggtaatgcattcttcaccagaatgctacaaaagtggttttgtgttcttatagtatcatamctgaaagcacatgatatctgtctgcctcccctcagtgatattaattttgacattcagtttttccactat

SEQ ID NO: 462507 - DNA, 557 bp, Homo sapiens
tatccacaaatcacagcatcaagtggatgaaaacagacatttgcagtctgtctttaagatttcttgtattgggacagtgatatctttggggataaatggaggacacatcttgctgataacatctatctcaattcaaaacatgggtggttaatatagaaatgttagtggttcctaacaggagcaaaascaatagatagctttgattttctcacattcccagtgggacacaaaggctttttgtgtctcaggattatgtgctgataaagaatgcggaaagaatgtttatgaggaagcagacaaaagcagcctggctccggtgtatccacacttggcagctgtaatgcagtttcggctacaccaataatttccaattatttttacctgcagtcaattctcaagctagaagactgtggtgagaatatgagattaatttagacaggctcaggcactcatgtgaacaccaaaatctgccactaaaacaaacatcaggcttacattaatctatcattttttttctcttgttaccttttcaatcgcccttcatgatcctggccagg

SEQ ID NO: 462508 - DNA, 456 bp, Homo sapiens
tcttatggcaactgtggcttgtgaccaaaattcttgctggggtttgcaaatgaagcaagttaatacctgttcataagtaggaactagtgactcattggatctgagtggagagcttgacatagaatcatcctacaactcccagaagtaatttgtcacttaatgccactgatgccccaaagtgtgatagtcaaatctatggggacacactagaaacaaatgtaagattttgtccccatttcaaagtctgtatgaatttccagtcttggttgattagattctttcattcaacattaattatggcaggatatctagggacagggcaaagtagtagtcaggagaagagctaaaactgaggagaaacacattttaawatgtcagggaaatggatacacataggtatcaagagaatggacataaatattgcaagctgggagttgcaaaggccccagcaaacag

SEQ ID NO: 462509 - DNA, 538 bp, Homo sapiens
aaatgacaggaactaattgcctcttcatctgtgttttcacagcaggttgtttgtacctccattgtgcctatcatttttacatttmttcctagttttttttctttacatagcattctctctgtttgctgtactcgccattagatggtaacttatgcttttggaggataatatcctgcatgctatcttggtacaggggtgtacaggcaatgcccaatatagagcattataaataggaagaaagggatggaagacgcagagaggaattgccatactagaaaggtatgggttagtacaatgttagtggaagtgggggtggggggaaagtgggtaattggatgagctggagtatgggaaaatggaggttgagggttaagagaaaagaaaaggagacgatgatgtcagaccatttacaaaacctggtttcaaattcactcatattttctgtgattattgctgagagttttgcagaatctgctgcttcaatttgtcttgaagtcatttaggccaactttgcaatttattccactgctaaataatt

SEQ ID NO: 462510 - DNA, 567 bp, Homo sapiens
gttttacataattttaaatcctcacaatatcctttaagatgaggatcatctccattttacaaactaaggcctcgaggggttaagtaataacttgtcccaagtggctatatgagtcactggtagagtcaagattcgttaatgaatgtacacaaatgtttaaagattagacatttctttggttgcatcttggcagaaaatgtaacccagactggttgcaacaaaaggtgaatttatttgtctctcctaactacagttcaggtggagcttgatttagaagttgacgtaattccactgagacatgatgtttctctgcctgcttagtttagttctagggtattccaggagcttcttargctccatatagaggcacgatggctgtggcagctcccaccgaacaagatcccaggttcaagtcccttaaggaaatgtgaattatctgctggttgcacctgataaggctctaaggtttacagtgcttgaatccactgatcttgtttccaaccattgaatctaaggctctgactgaggggaagttagtgtgctgattggcttggcccagggtttgta

SEQ ID NO: 462511 - DNA, 486 bp, Homo sapiens
caaaaatccagtaatactagaaacaaatagatttcctcagtaacaaggcaagagctccactccactcctcctaccataccatcagctactggaagccctgctctgagaaaaatcattctcagaatctcctaaggtcacaatgaaagattctggaggcaggggacacagggattggaatgtgggagtctaacatttatgggatactcacaggcattatctcagctaatcctcacaaccacccaaacttttactcaactccatacataggagactggggctcaaagtagctaaatggctgccagagtcctggtgagacaggagaatggcacaaccctgctgaccaaaacaggatctaggaccccctagctgtccccatccctcattaacataagacactccyaccagtgccatgacagtgtacaaatgtcttggcaatgaccaggaagttgctacctctttcctagaaaactctaaaaacccactcct

SEQ ID NO: 462512 - DNA, 572 bp, Homo sapiens
  misc_feature (1)...(572): n = A,T,C or G
tctgtcctttatgtacactatatacacagataagtaaaacaaaatgcacagacataatgattcatcttgcctcgctgtaaacaggatggcatagagctctctgcacctccccctcctctctcctcccctgaaccactgcacaaacacaatgagtattactcaacaggtgatttggccattccccccmaaaaatatttcctatgaattgtaacaaaaaggtatttacaaaatgtgattttgctacctctaattttaacatatcaggcacttcagaacatctaaaaagaagagacatttcaaaaaagcttagcattgtcaactatatacacagtagtgaggaataaaatgcacacaaaacaatggatagaatatgaaaatgtcttctaaatatgaccagtctagcatagaaccttcttctcttccttctcaggtcttccagctccatgtcatctaacccacttaacaaacgtggacgtatcgcttccaanggaggtaatatctnctccatttccaaaagtcatctccagaagacatgtattttctatgatttcttttaaacaaatgagaattta

SEQ ID NO: 462513 - DNA, 480 bp, Homo sapiens
attgttggggggacaaaatgaatgctgtgaaatgccatacatatgctggaagtggaccacaaattaagctytaaggtttaggaagaaaatgacaatcagtaaccaagacccagggtgtctgtaagtgaaaaaaaaaaaaaaaaaaaaaaaaaaaaaatcagttgctagaaaaaggactattcttccttcctgataccaagtccatagaaaacgttattccttggaacaacataaagagaaaagaacaaaacagaagttatataatcctcagaaatatccttaaaataacacagcagagaatttgatagggtttcttttttaaatcagattattcaatagaagccagtcatagttcaccaaagtgctatttaggaaaagcattgctccagggtggccacgtagatacagtttaagtacacagctctctgatggtctggttgattccaagagaagatttttgagcaaaggctacccaaagtg

SEQ ID NO: 462514 - DNA, 519 bp, Homo sapiens
cctgctcaggctttgccttctgccatgagtaaaagctcccttaggcctccccagaagcagatcccacgctgcttcttgtacagcctacagaaccatgaaccaattaaacctctttctttataaattacccagtctcaggtattttttatagcagagtgaaaatggacttacaccccacatttctctgcagctatacctcctgattgaatccctgcacatttagttctgtcttggagtctgcttcctgaaggacccatactaacacactcccttgagttgaaataatgttttccctctctgagtccccagagtgcctcttcagcacctctctcatgacaggtaacggtctaccttaagcygccattactgtcttatttcctacactggactggaagcttctctcaaggctctaagcctgaatcattttttaattcttctctacatctggcagatgtcaataaatatttgttgactaaatgcataggtaaataaagatgtaagatgaggcaacacagtgag

SEQ ID NO: 462515 - DNA, 571 bp, Homo sapiens
ctctgggccatgattgggtctgaattcaagaagccttcccagcagtgtacagggcctggtccaggtacccctttgccagatggttaaatcctcagtcacagaagtgtggcaccatatcaatgagctctccactgcccaggcttatccttcttcctccctggtcttcacaacctccctcacgatccattcccaggcacattctacccagtccctgtcagtatccgtgaggcaggccctgcagcactcaggagaataactcctttcttccagtagcagggacaatgcttttctgctcagcccaggctgtgtaaagatgccagttactggcataaagctatgagggaaggcaagagagatcatggggaaagtacacatcatctcacaaggcatctggccctggggaggkctacaaggtctccaggcaatgggacagtgccctcccctatcaagcagggaacccccaccctcacccctgccagtcccagaaggcctcatcacaggctctagtttccactccttccctaacagggtcctgactgtagcagagaagacctaccaggaccttgtgcct

SEQ ID NO: 462516 - DNA, 527 bp, Homo sapiens
actaatttgcattcccaccaacagtgtataagaatacccttctctctgcatccatgccaacatctgttgttttctgacttttaatcatagccattctgactggtataagataatatctcattgtggcttcaatttgcacttctctgatgattagtgatattaagcatttttaaaatgtttgttggcaactttatgtcttcttttaagaaatgtctgtccatgtcctttgaccaatatttaatggggttgtttttctcttgctgagttatttgggttcattgtagattctggatattagttctttgtcgaaggtatgacttgcaaatgttttctctcattctgtaggttgtctgcttactctgttatttcttttgctgtgaacaggctttttggtttaattaagtcccacctgtgtacttttgttcttgttttattttcttttggggtcttagtcataaattctttgcctaagccaatgtccagaatagtttttcctargttttctttcaggattttaagtttcacat

SEQ ID NO: 462517 - DNA, 583 bp, Homo sapiens
ctcacacctgtaatctcagcgctttgagaggtcaagaccagagggttgcttgaggccaggagtttgactccagccgaaaaacatagcaagaccttgtctgtataaaaaaaattttaaaaatagccaggtgtggtggcatgtacttgtagtcccagctactggggaagctgaggtaggaggatcttttgggctcaggaagtcaagactgcagtgagctgagaaggaagtcaaggctgagtgagccactgcactccagctgggtgacagagtgagaccctgtttcaaacaggggaaaagaaaaaaaagttctgccagctaattattcctcaggtaattgcaaatgcagatgcagcgagatattcttttacatctaccagattagcaaaaattaagaatgctgatgataccaagtgtgggagaggatgtgaaactacaggaattatttcacattcctaatgagcatgtaaattyttataaacagtttggtataaacaatgtgtcattttgttgtaaaggcaaacatgcatataaccaggacctagcagtttcactcctgggtatagtattctagatctgggtgttt

SEQ ID NO: 462518 - DNA, 519 bp, Homo sapiens
attacagttttttaaagtttggaaaccaatgccctgtagtgtaactctttgacatacatacctggagaaatgtagaatgttcataattcacaagagcaaaaaactgcagacaactcaaatgcccattgccaggaatatggataagtaaattgtggagcattaacacaattgtctattacacaacaatgaaaaggaatgaactatattgctacatgcagcaatgtgagtgaatcccagaaacacaatattgagagaaaagagctggtcacagaagactaaaatagtatgttatttttataaaacccccaaccagcaaaactaaacaaaacaacatatgccrtatgtggcaaaacttttttttttttttttttttgagatggagtttcactcttgttgcccaggctggagtgcaatggtgtggtcttggctcactgcaacctctgcctcccaggtacaagcgattctcctgcctcagcctcctgagtcgctggaattacaggcacctgccaccacgcccgg

SEQ ID NO: 462519 - DNA, 513 bp, Homo sapiens
gtgtagtgatgcacgcctgtagtcccagctattcaagaggctgatgcaggaggatcgcttgagtctgggaggtcaaggctccagagagctatcgttgtgcyactgcactccagcctgggtgagagagggagacctagtctcaaaaaaaaaaaaagctgggggaacacagacacacgcacaagcagaataccatgtgacaatggaggcagagaccaggtgatgcgacagaagccaaggagcaccaaagactgccagcaaaccagcaaaccaccagaagtgagaagagaggcctggaacagattctccttctcagccctcggaaagacccaaccctgccaacaccctcatcttggacttctcgtctccagaactgtgagacaacaaattttggttgttctaatgtcaccggccaggtccaggtccgttctgcctgtgcacagtaaatcaatcactgtgacacgggttttgcaaaagagaaaagatttgtgaggctgccaagcaaggaggtgggag

SEQ ID NO: 462520 - DNA, 513 bp, Homo sapiens
gtgtagtgatgcacgcctgtagtcccagctattcaagaggctgatgcaggaggatcgcttgagtctgggaggtcaaggctccagagagctatcgttgtgctactgcactccagcctgggtgagagagggagacctagtctcaaaaaaaaaaaaagctgggggaacacagacacacgcacaagcagaataccatgtgacaatggaggcagagaccaggtgatgcgacagaagccaaggagcaccaaagactgccagcaaaccagcaaaccaccagaagtgagaagagagrcctggaacagattctccttctcagccctcggaaagacccaaccctgccaacaccctcatcttggacttctcgtctccagaactgtgagacaacaaattttggttgttctaatgtcaccggccaggtccaggtccgttctgcctgtgcacagtaaatcaatcactgtgacacgggttttgcaaaagagaaaagatttgtgaggctgccaagcaaggaggtgggag

SEQ ID NO: 462521 - DNA, 558 bp, Homo sapiens
tgacgactcatcacctcttagatggtgcatacagaagtgraggagttaaaatgttagcagtgaaactgtcaaacagtacacagggggaaaaaaaagaaacttccatccaaagactctaaaagatgctagattctgtaatgttattttctctgattttcttactgtgcatgtaaagcatgtttatttacagctaagtctccctgctaaagcatgggtttgaaaatgagaaattctaggctgggcatggtggcttacacctgtaatcccagcactttgggaggctgaggcagatggatcatctgagatcaggagttcaagaccagcctggcccacatggtgaaaccccgtctctactaaaaaaatacaaaattagccggcgtggtggtgggcgcctgtaatcccagctactcaggaggctgaggcaggagaatcacttgaacccaggaggtggaggttgcagtgagccgagatcgcaccactgcattccagcctggtcaacaagactgacactccatctccaaaaaaaaagaaaatgagaaaatctagctattttttcct

SEQ ID NO: 462522 - DNA, 558 bp, Homo sapiens
tgacgactcatcacctcttagatggtgcatacagaagtgaaggagttaaaatgttagcagtgaaactgtcaaacagtacacagggggaaaaaaaagaaacttccatccaaagactctaaaagatgctagattctgtaatgttattttctctgattttcttactgtgcatgtaaagcatgtttatttacagctaagtctccctgctaaagcatggktttgaaaatgagaaattctaggctgggcatggtggcttacacctgtaatcccagcactttgggaggctgaggcagatggatcatctgagatcaggagttcaagaccagcctggcccacatggtgaaaccccgtctctactaaaaaaatacaaaattagccggcgtggtggtgggcgcctgtaatcccagctactcaggaggctgaggcaggagaatcacttgaacccaggaggtggaggttgcagtgagccgagatcgcaccactgcattccagcctggtcaacaagactgacactccatctccaaaaaaaaagaaaatgagaaaatctagctattttttcct

SEQ ID NO: 462523 - DNA, 437 bp, Homo sapiens
tcagtattttgatgtcctagagacttgagttgcctctttttgtgagggttgggagttctctgaartaagcaaaactatgtttgaaagtattaagatcataatgctgttgcaataatgaaaacctctactgatacatgtattaaatgaatattttaaaactagcctgttccacaggatggagtattaattagttttgaaatggagcagacatttcagcttacttaactcttctcagcaaataaaactgatgtcccacccacaccttcaccttccaggacttcccgctgtctctgaactcagcttgttatgtgaggttcctaaggaaccattccacaaaactgtttgcaatatacacttgaggattactacagttcaagtattgagatctagtctaattaaaataagacatcagaatagagggaaggatggaaagaagt

SEQ ID NO: 462524 - DNA, 602 bp, Homo sapiens
gactctgcaagaactaataaaatcaaagcagtaaaaacaaaaggcttaacacttcaaataggggaactatttgcaaatgtctaaaatgacacaccaatatgtgaaaattttcaatgctgatgagcattagttttcaacaacaggaaaagtcattgagccagtagatggctgccagccaagaagcacttgtagattttatattattctttccacactgcattacctaactattgtgataacacggaaaatgtaccaatgataaatgaactcaaaatatttcaatgtggttccttctacaaataataatttatgccagaagcaaatgttatctggtgagttctaggtctctctcattaacaggctgtctgatwtaggaaaattacttttttctcttcaggcttcatttagtttatttatcaaaggggaccataatgactgctaatttgcaggggtattgtaaaacgcaaatgtttttgcagtctagatatataccccatggggaacagctcacacggactaccatataaatgactgtaccaaacaatgtttacaatgaaatctttatgatatttatttagattgccaagcctaagtaacagaca

SEQ ID NO: 462525 - DNA, 614 bp, Homo sapiens
tctagtctaattaaaataagacatcagaatagagggaaggatggaaagaagtaaggaggcatcttactctctgatgttcagttcttcaaccaggactctagagactgctctttgcgaatatatcaaagctaattttaaacttgaaagttttccattttaatgaatgtgagatcataaactagaagacttaaaaaatctttatagatataaacatgtttaactctataaataactttattatgctttgctgaagaaaatacttatgatgcagaactgacttcaatttctagctttagcactaaaaaaagacggagtactcttctgttacttggactgggactttggacaattcacttaagcttttggtccacagtttaatcaatgcaatggggagattggattacctaaggatttaactctgtcccatttaaatttctgtgattctgagttgtgtgcaattacaytgctctatttgtcattctggcctttgttattaagattgtttaaaaggtcattatgtgcttaatgacttttaacatatttaaatgttattattagagaaatagttatggttcttcaaagttgaagataactaaatataatattgttttaaa

SEQ ID NO: 462526 - DNA, 575 bp, Homo sapiens
aataaaattattttgataagatttcaaattaatgttttgggctaattctaacccttggaattgattttttttcacttaaattagatacttggcaaattagaatcttcatgtgaggtattcacaatccaatgctatgaasaatcttttagcagagccatataaaacatacagaactcttttatacatatgtgtcctgtggaatagccattcttttgaagggttagatacttagaagtgaggcattaggttgttttatttcctatttcagtttccatagccttgatatgtgaccttaggcagtaacttaacttctgtgtcatcattatttagactttctctaaaactccgcaaaattatcttaacatagcaaattctttgttttttttatgccttgtaattgatcattaaacacaatagctacttgaccatatgaataaaataaaataaaaaaacaggttataggagaggaacattctaagcaattatacatattctaattctaataataaaacattctaataattttaaggaatgatacgtgtaagaatgtatatgaatgtaaaagtatgcatgta

SEQ ID NO: 462527 - DNA, 621 bp, Homo sapiens
agtcacctgcaatcctatgtttattgcagccttattcacaataacaagatcayggaatcaacttaagcgtccatcaatggatgattggataaagaaaatatggtgcatatacaccatggaatactatgtagccataaaaaatgaaattatgtcctttgcaggaacatggatgcagctagaggccattttcctaagtgaattaatgcaaaaacagaaaatcaaatgctgactgttctcagctataagtgggagctcaagagtgggcacacatggacataaagatggaaacaacagacactgggcactccaagagtctggatggagggagggaaggagggagggggaagggctgcaaatctacttcttggatgctatgttcactatttgggtgacgagttcaactgaagcccaaactccagaatcactcaatatgcccatgtagcaaacccgcatatgtaacccccgtgaatctaaaaagaaaaaaaaaaaaagaaagaaattgatccagtgcacatgcacacacacacacacacatcacctgggagccaaaaaagaaaagaagatgggtcacaaaccgaagtgtagggaaattaattacagtgatatgtcttatgtcttata

SEQ ID NO: 462528 - DNA, 621 bp, Homo sapiens
agtcacctgcaatcctatgtttattgcagccttattcacaataacaagatcacggaatcaacttaagcgtccatcaatggatgattggataaagaaaatatggtgcatatacaccatggaatactatgtagccataaaaaatgaaattatgtcctttgcaggaacatggatgcagctagaggccattttcctaagtgaattaatgcaaaaacagaaaatcaaatgctgactgttytcagctataagtgggagctcaagagtgggcacacatggacataaagatggaaacaacagacactgggcactccaagagtctggatggagggagggaaggagggagggggaagggctgcaaatctacttcttggatgctatgttcactatttgggtgacgagttcaactgaagcccaaactccagaatcactcaatatgcccatgtagcaaacccgcatatgtaacccccgtgaatctaaaaagaaaaaaaaaaaaagaaagaaattgatccagtgcacatgcacacacacacacacacatcacctgggagccaaaaaagaaaagaagatgggtcacaaaccgaagtgtagggaaattaattacagtgatatgtcttatgtcttata

SEQ ID NO: 462529 - DNA, 621 bp, Homo sapiens
agtcacctgcaatcctatgtttattgcagccttattcacaataacaagatcacggaatcaacttaagcgtccatcaatggatgattggataaagaaaatatggtgcatatacaccatggaatactatgtagccataaaaaatgaaattatgtcctttgcaggaacatggatgcagctagaggccattttcctaagtgaattaatgcaaaaacagaaaatcaaatgctgactgttctcagctataagtgggagctcaasagtgggcacacatggacataaagatggaaacaacagacactgggcactccaagagtctggatggagggagggaaggagggagggggaagggctgcaaatctacttcttggatgctatgttcactatttgggtgacgagttcaactgaagcccaaactccagaatcactcaatatgcccatgtagcaaacccgcatatgtaacccccgtgaatctaaaaagaaaaaaaaaaaaagaaagaaattgatccagtgcacatgcacacacacacacacacatcacctgggagccaaaaaagaaaagaagatgggtcacaaaccgaagtgtagggaaattaattacagtgatatgtcttatgtcttata

SEQ ID NO: 462530 - DNA, 621 bp, Homo sapiens
agtcacctgcaatcctatgtttattgcagccttattcacaataacaagatcacggaatcaacttaagcgtccatcaatggatgattggataaagaaaatatggtgcatatacaccatggaatactatgtagccataaaaaatgaaattatgtcctttgcaggaacatggatgcagctagaggccattttcctaagtgaattaatgcaaaaacagaaaatcaaatgctgactgttctcagctataagtgggagctcaagagtgggcacacatggacataaagatggaaacaacagacactgggcactccaagagtctggatggagggagggaaggagggagggggaagggctgcaaatctacttcttggatgctatgttcactatttgggtgacgagttcaactgaagcccaaactccagaatcactcaatatgcccatgtagcaaaccygcatatgtaacccccgtgaatctaaaaagaaaaaaaaaaaaagaaagaaattgatccagtgcacatgcacacacacacacacacatcacctgggagccaaaaaagaaaagaagatgggtcacaaaccgaagtgtagggaaattaattacagtgatatgtcttatgtcttata

SEQ ID NO: 462531 - DNA, 608 bp, Homo sapiens
ggtaaaactttagcaatatgagttaacattgtgaagcaggcatgaatttcaaagtaggaacaataaaagtgaagaattaaaaaagagcaaaatttgaaaccttgacaaaagcagatcttaaaagggaaaagcaactgatgcagaagtgtttggaaattgagggtaaaaaaatagtcttcagtttattcattaaaaaaatggaacaagcttcctattttcatctttaatcttctgtgtgttctttgtaagcagtattacgtctttgcaaattaattttcatctttctcctgtgaaaagatgaatcccttattttaacttaaattatttaggttaaaatttaacttggaacataactttatcaatgtagaaatcaaatatttgcatgaaaaaattaaagaatattgttaaatataacaatatataagaatatttgggctctttgtacagtttctcatgttaaaattagataaacaggatgaaatgatttatctaactagaaaaaattagrtaaaagttgtaagctagacaacagtttcactccgtgatttatccaaccttctttaacctgagttggaccttttattttcttccttctccacaagtctact

SEQ ID NO: 462532 - DNA, 513 bp, Homo sapiens
agccatgagtggtagcacatgcctgtagtcccagctacccrggaggctgaagtgggaggattgcttgagcccaggatgcagaggctgcagcaagctgtaattgcaccactacattccagcatgggtggcagggcaagaccctgtctctaaaaaaaaacaaaaccaaccacccaaagaaacaaaaattgaatgtaagtcaactcatttctccagttaaaagacacagaatggctaaatagataaagaaacatgacccagccatatgctacctacgaaaatgtacttcacctataaagacacacatacactgaaattgaagggatggaaaaagattacatgcaagtggaaaccaaaaaaaaagcaggagtaactatgcttatatcagataaaatagactatagactacaagttaaagactgtaataaaagacaaagtcactatatcatgataaaggggtcaattcagcaacagaataaaacaattataaacatctatgcccccaataccacagca

SEQ ID NO: 462533 - DNA, 595 bp, Homo sapiens
ctgcatggacatttgggcttagatttcatcaggccgtgccatttttagcagcaatggtgtctcacattcctctcaagcctaatggagccaaaacagaacttttgatcctgctaccaaaacctactccccatctcagtaagcggcactgtcacccacttccttatgctgaaaaactcaggtgtcatccttgactcccctttcctttcttcgccacatccaaacctcctggttccccaacaactcccatgccatctaacacagtgattgcctttctatacaaatcttctttcgagagagagacagggtctcaggctgtcactgaggcaggagtgcagtggtgcacacagctcactgcagtctcaacctcctgggatcaagcaattctcctgccttaaccttccaagtagctgggaccacaggtgcccaccaccatgcccggccaatttaaattttgtgtgtgtgtgtgtgtgtgtgtgtgtgtgtgtgtgtggagatggagtcttgctttgttgtcyaagttggtctcaaactcctgggctcaagtgatcgttctgcctctgcctcccaaagtgctgggattacaggcatgagccac

SEQ ID NO: 462534 - DNA, 573 bp, Homo sapiens
tggccacagtggctcctagaagacttctctttggacttggtcctggagggatgacacacatcttaggtttttgtccctctagcttctcctaaaaccaccttctccagcttctggtccctatgcccttgggttaagatggctctgtctcttcctatcacttctcatgtggctccttctgaattcccacagacactagagtctgccacaataatcaatggggaaggacagcctctgcttaaattgaccccaaggtgggtagaagaccaagggtttaaggggrcattccttctgtgacctataatgctgaagaaagctagaactagatgagaatgtgttcatagaaaagcatgggatgtagttgtaggcatgtacagagtacgcttggtcaaggtgtccatgctgagaatagcactgtttggctaggggacttggacagatgccaaagcaaggggcctgggaatcttagaataagagacaaacaagtccatagcatagccttatttctgttagtatcttcatgcttctgaagcctgaaaatctcccaagagggtagctcttaagtttctggaacct

SEQ ID NO: 462535 - DNA, 619 bp, Homo sapiens
tctaggaggaactaagtcttagtctgtattctaggaactgattttacctggattgtcctattagaaccttttctaactcctaggaaccatatagataagaacactcccttatattgacttgctaagtctgctagatactgaatggctggattacttagatctttggaaagtgccttttccttcttcacatatgaatgtaggaagacacttgggtagatttttctgaagtcctaagataaaagctagttgatcatggtataatcctaaatacactgttagactcagttagcttacttctagcttagttttttatatccatgtgtataagtgaaatgggcttaagacactacttctggctgggagttgtgactyccgtagtggtgaaagaatcattctgccacaaatcaagtctgcaagctctaccttctggaatgactgggacacaaccaggcctggaaataatttcttccaactcctcacacaagcccaggattgactttacccatcgtggtgatcttcctgtcagcagagctgatgtgtccaagtcaggctgattccagagcacttcccctggcaccccccaacacccacacccctcccacctcaggggttgtctggc

SEQ ID NO: 462536 - DNA, 547 bp, Homo sapiens
ctttttaggggaaagaatggctaaggttccagaatggtccctctgtttgtcaaggcttggattctaggcctggttaaacctcccttttgctgtgtaacctcaggcaagttgcccagcccaccttctcctatctaggctttggtcatcccatctgtaacaacagtagattggccaaggtcagacagggacactgcccctccctgtccctgccacatgggtgggagttgcctctcctgaaggccatccctgcccctcaacatggctgactcagcctttgcccagtggtaggggacaggctgcctgccggagggtgctaagaagttaattaaaccctccagaagccatttgttaacaggggagcgatggtatattcaataccagccaaaggttggtggaaagtaatgagtctttctttagctgtgaataatgtgttccctcccctyggcaaccccccagctctgaaggatggtcctggggaagccatggctcatcttaatggcctgggcactgtggggcctagcaagccagtcttaccagcaatcatcac

SEQ ID NO: 462537 - DNA, 593 bp, Homo sapiens
cccagggatgtctgtttccagctgtattagcccattttcacactgctgataaagatatacctgagactgggcaatttacaaaagaaagaggtttaattgacttacagttccatgtggctggggaagcctcacaatcatggaagaaagcaaggaggaccaagtcatgtcttacatagatggcagcaggcaaagagagagagctcatgcggggaaactccctcttatagaaccatcagatcttgtgagacccatctactatcacaagaacagcatgggaaagacctgcccccatgatcaatcacctcccactgggtccctcccacaacatgtggggattcaagatgagatttggatggagacacagccaaaccattctgcccctggctcctcccaaatctcatgtsctcacatttcaaaaccaatcatgccttcccaaaagtcccccagagtcttaattcatttcagcattaactcaatattccacaggcctaaatctcatctgagacaaggtaaggcaagtcccttctacctatgagtctgtaaaatcaaaagcaagttagttacttcttagatacaatggggatacaggcatt

SEQ ID NO: 462538 - DNA, 582 bp, Homo sapiens
ctctgcttcccatttaattataagttccaaccttaggtcatttctttgctcttatatctgattgtaggctattagaagcagccacattgtttcttaaatgccttgctacttagaaatttgttctgccagataccttaagttcagccttctacaaagccctaggacatggacacaaggcagccaagctctttgctagggcataacaagtgtgacctttactccagttcccaataaattccttcatttccatctgagaagccatcagcctggacttcactgtccataccactatcagcattttggtcataactgcttacaaatctctaagaagttccaaaagtttcctcgccttcctgtcttcttctgagccctccaaattattccaacctctgctgcttccacaccttcaggtatctttatatcaataccctactccttggtatcagttttctatgttaggccattttgggtcactcaaaaggaatacctgaggstgggtaatttatgaagaaaagaggtttcttttggctcacagttctacaggctacatgagaagcatggtactggcatctgcttctggta

SEQ ID NO: 462539 - DNA, 554 bp, Homo sapiens
agaatggctaatatatggctggcgtatttgttcatgcctttaaattcacaccttctgttcaaataagcagagtccagtagtaattctcaccggaaggctgcaaaagtgtgggaagggatatcactttaaggggctccatttatgatataagaagccattgtggcatgttgttaattttatgcacatggtggactgttgaaaagcaaggagcacttgtggggagccggaaaaagatctccsgagatcgctctactaggtgattgagtgtccatgcctggtgcttttcagcagtcaggactagtttgatatgcgagctacatgctacacactactttaaccttttgaatcaacttagtagctccagctttctcgtaattctttagtatacctcataaaccagttttaagatgccagaagatttttatccaataaggctatattgatacataatgcaatatttttcaactgccttgtgtaatgtttttagggtttcaacattttaattttttaaaaaaataaaatgaaccccaaaaatattttatcatattcagatt

SEQ ID NO: 462540 - DNA, 589 bp, Homo sapiens
acccagccatggcttatggtcatcttgtgaaactcggtgaagaaaaccaaaggacttacgtaaggctatcagctagaaaaggaaaggaattgctcctaagatcagatkggaggaaaaaggagagaaataggaagagaagaagagaggtgaagggatgggggagacagagagagagtaagggagagagagaatgagaaagagaaatgaaccatgcacttcaggattagtgggcaagtgtagctggaaaaatttcagatcctttattgggctcaagcaaaaactcctttaaatattctgtttcatcttgtgtttgcctgagattcgtggctacagaaaagcaagtcaatatcagtatggatgtgtgtatttcctggggaaaggtcagatttgttcatctattattgttacctgtgttagtttgctagaatttccattaaaaagtactacagagtgggttgcttcaacaacaaacatttatttctcatggttctgaaggccagaagtgtgagatcaaggtgttgatgggcttgtgtcttctgagggctgggagacagaatctgtttcatgcctctcttttaacttctggtag

SEQ ID NO: 462541 - DNA, 552 bp, Homo sapiens
agaaaaaacaatcctaaaattcatatggaactaaaaaagagcctgcctagccaaagcaagactaagcaaaaacacaatactggctgtatcacattacccaacttcaaattaaactgcaaggctatagttacccagcatggtactggtataaaaataggamtgtagaccaatggagcagaatagagaacccagaaataaaatcaaatacaaccaactgatcttcatcaaaacaagcaaaaacatgaagtggggaaaggccaccctgttcaacaaatggtgaacaaatggataattggcaagccacatgtagaagaatgaaactggatgctcatctctcaccttatacaaaagtaaattcaagatggatcaaatacttaaatctaagacataataccataaaaattctagaagataatatcaggaaaactcttttagacattggcttgggcaaagaatatatgactaagaaccccaaagcaaatgcaacaaaaacaaaaataaatgaatgagacctaactaaattaaaaagtttctgcacagtaaaaagaaata

SEQ ID NO: 462542 - DNA, 582 bp, Homo sapiens
ttttttctgcttatttccctattccttattcttctgtcatccctattacgcatatgttacaacttttggaattatcccacagtctttggtaatctattctttttttcatcattttccyctgcatttcaatttggaaagttgccattgacatatctttcaattaagtgattcttttctcagccacattgactctactgatgagccacagaaggcattcttcaattatgttatggcatgtttgttttcaatcaattctcttatatatttccttcaagtctccatccttctgcttatctcatccatatgtacatgcatgttatctacctttttttattagagcccataagatatttatcatagttattttaaattttttgtctaataatttcaacatttcaacctcacatctatacaaaaactaactcaaaatggatgaaagaccaaaatgtaaaagctaaaactaaaatatccttagcagaaaatgtaggtgtaaatctctgtgaccttgtattagtcaatgatttcttagttatgataccaaaaacataagcagcaacaacaaaaaaatagataatttgactt

SEQ ID NO: 462543 - DNA, 567 bp, Homo sapiens
tgttatctacctttttttattagagcccataagatatttatcatagttattttaaattttttgtctaataatttcaacatttcaacctcacatctatacaaaaactaactcaaaatggatgaaagaccaaaatgtaaaagctaaaactaaaatatccttagcagaaaatgtaggtgtaaatctctgtgaccttgtattagtcaatgatttcttagttatgataccaaaaacataagcagcaacaacaaaaaaatagataatttgactttatcaaaattgaaaactttgtgctcccaaggtcactttcaagaaattgatgtcatacctatattcatagaggcaatattcaaaataggcaaaagatggaaacacccaacagtacatcaacacatgaatggatatgaaaaatgtggtatatacatgcaagggaatatcagtttttttaaagaaaaagaaattctggcacaatctacaaaatagatgaatcctgaggacgttatcctacgtgaaataggccagtcacaaaaaggcaaacactgtatgwctccacttatattacatacctag

SEQ ID NO: 462544 - DNA, 557 bp, Homo sapiens
aaaaaatcacaaattgatgaaattgcctgggtttttgtcttgagccactgggtagataccgctggcaattgctaagatggaaaagcctcttagggagagcatgtggattaaacaggattggatgaaagttactacttcctgaagtaaacggtttcattagtaacctgtaactgaaatgtaatcaatttaagacttttctgtttctaagaaatatattttatcatagtaccaaaaattatagctatcctaattaaaatgatggaagaagccaattagacatgatatacacttgtttgtcacaagtactgagagatactgaatctaaattaaaacattatatataattaacaagtggtgctctgttccatttttgccgtcttgcttcccatgcaaaattttaaaatttttgggtaaagataaggacatagactcacatctttctttgaytcctctagtatctgacagagtataacactgtcaatacatagtgatgaatgactggatgactgcctatcatgtgtgttgtgtacatgtgcgcatttggattagactgacag

SEQ ID NO: 462545 - DNA, 557 bp, Homo sapiens
aaaaaatcacaaattgatgaaattgcctgggtttttgtcttgagccactgggtagataccgctggcaattgctaagatggaaaagcctcttagggagagcatgtggattaaacaggattggatgaaagttactacttcctgaagtaaacggtttcattagtaacctgtaactgaaatgtaatcaatttaagacttttctgtttctaagaaatatattttatcatagtaccaaaaattatagctatcctaattaaaatgatggaagaagccaattagacatgatatacacttgtttgtcacaagtactgagagatactgaatctaaattaaaacattatatataattaacaagtggtgctctgttccatttttgccgtcttgcttcccatgcaaaattttaaaatttttgggtaaagataaggacatagactcacatctttctttgactcctctagtatctgacagagtataacactgtcaatacatagtgatgaatgackggatgactgcctatcatgtgtgttgtgtacatgtgcgcatttggattagactgacag

SEQ ID NO: 462546 - DNA, 521 bp, Homo sapiens
tcattagtaacctgtaactgaaatgtaatcaatttaagacttttctgtttctaagaaatatattttatcatagtaccaaaaattatagctatcctaattaaaatgatggaagaagccaattagacatgatatacacttgtttgtcacaagtactgagagatactgaatctaaattaaaacattatatataattaacaagtggtgctctgttccatttttgccgtcttgcttcccatgcaaaattttaaaatttttgggtaaagataaggacatagactcacatctttctttgactcctctagtatctgacagagtataacactgtcaatacatagtgatgaatgactggatgactgcctatcatgtgtgttgtgtacatgtgcgcatttggattagactgacagtgtgtaaacaaattacctttggaaacacaacatatttgaaattacattactaattattgttatcatatttaataataatgatataagtayctgaaagaggctataagtctttaaaac

SEQ ID NO: 462547 - DNA, 581 bp, Homo sapiens
tgttttataaacagtctaatataaaatcttcaacttataccacgttgcagaagcataggatcaaaggccacaaacctggttggtttaatggagcacactgaaacccaggttttccaacatctggaaaaggatttctccacgacactatgctgccatatgggtggattcagtttcagagttaaactagattatttatccaccaaaacgctaccacggctattacgaacaaatgtcaccttacaaattcttccctcagccatcagaaataatgatccctattgaataccaagtcattgtagaagctcttgtagaagattgttagatttcagaaacttgtgaaaattttctgtgtcctgatgtccttgacataagckaaaaaaactttcaaaagtctaattgtttttttttccatttactccacataaacacgtgtgcacacacgcacacacatacacatttacaaacatccttctactattcaaccatgtctcagtttagagaaaaacattgcagacatttaaatttgggcaaccattctagtacatatagtaatggtcaatttcctgtaatgctaagttatt

SEQ ID NO: 462548 - DNA, 583 bp, Homo sapiens
tcaggagaactcacctgggcattgattcaacaagaaatgttggtaggcgccttctattttccacattttgatatctcagtgaatgacttgcatataaagaggcccagcagctgttttttatcattcaccaatgtgcttgtcatttcaacttcaggttcctctgactcacctctggaggcttagaaataatacttctttccatgcttcaaattatttgagattataatttttaaaaatctgaataatgtaactgataaatatgcttagatacgaaggggttgatttcagaaggtattctaaaactatcaccaacatcacaggtcatgataggccttatttaaaacttgaatcatgtcttgagaaaccaacaactatgatataaacaacgaaaagcagaacacaatcaataagtcttttttaaggtaagataaaatrtttcgtgaaacaaagcttgttaaatattgtataaatggagaaatttgaaagtgatatgaaatatagtaagtgctagtaagaacaggaacttgtagaactttcatgcaatgctgctaagcgtgtaaattggtacaactactttgaaagt

SEQ ID NO: 462549 - DNA, 561 bp, Homo sapiens
gaagtattaaataaagtctttcttgcctgtttagagttgttgggtgcaagttttgctttgatattaatcagcagcagctccaaaagkattgataagatattcttaatcaataatggtgctttattaaataaagtgcaaagataataaagcaaataccaatcttgttctataatatagagtgtagacaaaagaggcatgatagtatagtgcagaagatacaagggtttggagttgggagatatggaattctaattatgcccctgaatgacaagttcatacatagcataaggcagggcttcagtgtgtacctctgagattattcttccctgtgcacattcagcagaattcgaggaagaataggaataataaacatatacaattaactcactaggtagactgtatattaatagtagaaagaatatagatagatagatagatagatagtttcagaatgtgccagaaatataattattatagcacctagttatatgggatggacatataatgacccttcagtagcctatggttagaaatcccacagaatggaaatcacaaaaccaa

SEQ ID NO: 462550 - DNA, 572 bp, Homo sapiens
aatctaaccaactagaataaggtgaattttgttttgttttgttttgtttttgtgttttttgagatggagtctcactctgtcccaggctggagtacactggtgcgatcactgctcactacagcctccgcctactgagttcaagtgattctcctgcytcagcctcccgagtagctgggattacaggtgcctgccaccgtgcctggtgactttttgtatttttagtacagacggggtttcaccatcttggccaggctggtcttgaactcctgacctcatgatccacccacctctgcttctcaaagtactggaattacaagtgtgagccaccgcgcctggccaggtgaagttttaaaaatcagagggaaataaaataagtatctaaatctgtcttctatggctcattggctgtgggatataataaattattaactctctgtgttggttatatcattagcaaaataatgataataacctacttaaatgaagttatgagtgaaaaatcagtgaaagattgaaaactgctttatagacaccaagtattctaacaaataataatgatagtaataaagatt

SEQ ID NO: 462551 - DNA, 646 bp, Homo sapiens
ttttaacttttgtaaaccaaaaagtatctgagacaagtttcaatcaattgagaagtttattttgccaaggttaaggacatgcccgtggcacagcctcaggagggcctgagaatatgcrccaaggtggctgggttatggcatgattttgtacattttattgggacagatgatgcaagcagacatcaactgatatatgtaaggtatacattgatttggtccagaaatgtggaacaactggaagcaggagcttctaggtcataggtagattcaaagattttctgactggcaaatggttgaaagagttaaattattatgtcaaggcttggaatcaatataaaggaatgtctgggttaaggtaaggggttgtggatatcaaggttcttattatgcagatgaggacttcaggtagcaggcttcaaagagaatagattgtaaatgtttgttagaggtaaaaaggtgccagactgttaattattcttaattattctctcctagttcaggagaaaggcctgaaaagggaaggagaattttcagtgaatgtagatttttccctacaagagacagctttgcagtgccacttaaaaatatctcaaggaaatatagttttgtgtaaaatactttgattaatttcagggcctgctatctg

SEQ ID NO: 462552 - DNA, 522 bp, Homo sapiens
  misc_feature (1)...(522): n = A,T,C or G
aaattaggcacaataaagagaatataaggagtacttatagtatggaaggtgcagatttaaagatcaatatcattagacaaacttggtgaagattaaactggtaggaaaaatgttcctctgtcatcagcaagcttttattcaaatgttattttctcttacagtttcaagtagttgtatgtgtcatttctatacacaatgatgtccatagacagagaaaggacccctggatgtcttgtgtttctttcttggggataaacaatccccctttagatgtcctcaggagatctctttcaagtttctatgggcatgattaggccacatgttcatgcagcaggaaggatctcaaagtacagggctgtactcaggtctcctgaagatctcactcctcccagtagctanatatgtgtcaaactccatggtgccaygtttattcagagtaagttaataatacatgatgagaatgaggttggctgtatattttaacctcaaaaacatactatgacaagtggaaatatcttgagg

SEQ ID NO: 462553 - DNA, 563 bp, Homo sapiens
tgatgctacagttctataggccttcattgttgacctttgcttggaggacaggctgggtgctttagaagaatgtccrtaaaattacaacaccaaatatgattcagatatgatgatgtaaactagatggaatacaggtagaccctaataggtagattcaaggcctggtttaaatgctgtgtgaattcttgtgtggaattaggctactcaggatagagtctgtttaaatgacatatggcatttacaatatctcattgtaaattatcccactggctaaatttaaagtaatatgttagaaatagaaatgaatgttagaacccataagtagagaaaaaatgagaccagctacatacctcaagattctgaaaaaggacaactacagaaatactagtaacccaatgtaaaatgtgggagcaattataactgtaatatgtcgatttcataatgcacatgtcaagtaaatacaacgagacattgggttgtagcagagaaagaagtttaattgtaggactactaaatgaggagctggaaggaaatctcaactctgtctctccaaggagtttgga

SEQ ID NO: 462554 - DNA, 562 bp, Homo sapiens
aactatacaaattaggcattgctctcctacttattttgcarattctacacatgagattttacatttctttttcggagtggtgtacatatataattttaagattcaaatgcattttctctcttcaagatgaccaacatatagtctatttactgtgttcgaggtacaatgtgacagatgtatttaatgtgcaaaaagattactgaatatggaaggagagacatgggatatcagtttaatctaccatttgggcaagttattaaaaccctgatactcacatcaatgacttgtaaaattgggcttaatatgtattcttattggctactatataaagtagctttagaaattttaaacgtgcatcaaatctacaatgttaacactgtaataatttaggggaatattttttactcaaagaatgaatttttcaccttgtgctataatgtctaaaaagattcatttgacatctttccttttgctaggaatctattatttaaatttgaaggcacttcctataagagtgcttgagtaatttaaatgagttactttcatatactgtgacaggtct

SEQ ID NO: 462555 - DNA, 562 bp, Homo sapiens
aactatacaaattaggcattgctctcctacttattttgcagattctacacatgagattttacatttctttttcggagtggtgtacatatataattttaagattcaaatgcattttctctcttcaagatgaccaacatatagtctatttactgtgttcgaggtacaatgtgacagatgtatttaatgtgcaaaaagattactgaatatggaaggagagacatgggatatcagtttaatctaccatttgggcaagttattaaaaccctgatactcacatcaatgacttgtaaaattgggcttaatatgtattcttattggctaytatataaagtagctttagaaattttaaacgtgcatcaaatctacaatgttaacactgtaataatttaggggaatattttttactcaaagaatgaatttttcaccttgtgctataatgtctaaaaagattcatttgacatctttccttttgctaggaatctattatttaaatttgaaggcacttcctataagagtgcttgagtaatttaaatgagttactttcatatactgtgacaggtct

SEQ ID NO: 462556 - DNA, 608 bp, Homo sapiens
tcaaacatcccctagaacccaatgcatcaaccaaactacaaaataacattgtatgtgacacatggtaagatgtctttcaatcatcctataatttttaaaaagatacgtgccctgaagtcagcattataaggtctaaatatgttttaatcctcaaatgaatagaaggccttgatgaatacctaaaagtggcaagaaattgttggaaatgmagttttgatccctaagtactctctctccaacaatggacccaaaaaagatctgttgaagattagtttgcttttcattgtgctttttaagaaacacatatatgcatacacttacagataatttcattgttcctaaaaggattggcatacaaagtcaatcaaagatgagtggggtaaagtgttctcagttgaggtaagcctcagcttccctgactcataggcaggagaacagaagcttggcttagcttagcagaagtgtattccataaaaaactgtatcaccctctaccttctgaggatgtcagctacacagaaaaaaagcagtgaatattttgactttttatgaaacaactttatatagctgtgattcttattcctcatcaacagtgtgcctgattgtttc

SEQ ID NO: 462557 - DNA, 440 bp, Homo sapiens
atatctcacttttgttattattttcacattgctctagtatataaactttggaaaaaaagatattctatttatagcattctgtttttaatagtggtactttcatttataaaatataataattcttaattactgaaaatgccaaatcctagaaagcatagcgttcttaagtgtgatgttaacatcgttcttgaaccattgttggccaaagattcatttgatgaatccagtttttctgaaatagatgatttggatgatttagatgagtttgatgttagttctgtttagaaataactcctagaacaatatttatattttatttctacattgaaagtcaatcatatttgcttcatcctcaacgaatgtgttcaygtaaagttaaatgaatgctggcagtgagctgcacttcttcataaatgggaaaagggttaaacgatacacca

SEQ ID NO: 462558 - DNA, 533 bp, Homo sapiens
ccaagcctagttagtactttgttatccttgaggtccaggaggtctttgttcataaagccgtaagcatggagaaacgtaaaattactcatggagcatcatcttcttaaaaaagtttctatgagraggtcatattagtgcaatgaattataaacatattgacattgcatttacattatgaaataataaagtgtaatataaacatagaaaataataaatatttcagaaacacagaatctgtaattaaaacaaaatgaaatatatgtcaacaatacacttcaatcatttccagtccatatgattggcaatagatacatattcccagttacatcttattcatattcaaagaaaagtacaaatacaaaaatttggaaaataggcaaaagttatgaaggtgaatctcagaataagaaacataaatgtcctttaaaaaataagacataagcaaaattactagtaggctgaaaatgaaaattaaaacaaaattcaaacacttcactattacaacacaaaacaaaaatttaaactattgataa

SEQ ID NO: 462559 - DNA, 433 bp, Homo sapiens
tttttttttttttacagcaatttcagatacacattaaacttaagaggaaagtgcagaggtttcccatataccctctacccctacacatgtaaagcttcccccattaccaacaattcctaccagaatactatatttgtgacaattgatgaacctacaytgatgcatcataatcactccaagccaatagtttacattagggttcactcttcgtgttgtgcattctatagtttcgggaaaatgtgtaacaaaatgtatcctacattaaagcaccatagagaataccatcacagccttaccagtcctccgtgttctgcctatttattcctcccttcctcccaacccctagcaaccactgatctttttactgtctttataactttgtatttttcagtatgggacatagttgaagtcataaagcacatagccttttcag

SEQ ID NO: 462560 - DNA, 590 bp, Homo sapiens
ggttttcaatttaagttcttcrtgtctatttacgcactgactctagtatgcataagctctttgtctttatccttttaaagatttagttgatatttaacctaagggagaagttctgtgattttatgggaatgatagaattaaactgcttcccacaaagtccctacaggtataagacaaaaaaggatgcacttggagaatatatctcaggaggatccattgttacatcctgtggaaaataacagagaaccagactaattgaaattaaaatgcccgctgtcattgtgatagataagtatcaaaacacattcccagaataaaatatggagagaatgatagaagaatgttcacataataaaaagaaagttgatgaaatcctaagcacctgggcacattaaatatagtatcacatttttatcatgagcttctctctgtaattaaaattttaaacctctgataagcttaaacactaaaatgtttttcaaaatttctcttttattttcattttttaaatcaggtattaagatattctgattaattaaatattttttatgtcatatattaaatataaatactcgaagagaatgctcctt

SEQ ID NO: 462561 - DNA, 579 bp, Homo sapiens
ttagatggtgtacttatctctttgtcatcacaaagaactaatagccaccacaatattcatagtgattattatagattggcaataaaaagttattttttctttagtttatatttttaaatttttttataattaaaacatgttgcttatgttaaaagaaaattttgagttttcaaatgtatgattcatagtaatgagcatttatcagaactttaatcacataattttatattgtawaaaactatgagtcatgatagagctctattaaaataaatgaaataaaacatttcattgataaaaaatgttcaaatgtataattcagattaaatatttaaataatgttataactattaaatgcatgtatctcatatgtatatatatccataagcctaataagaacagttaaaatttaataccaactacttttctgaaaccgtgccaaaaatattataatttctttgtacatttgcactgtaaaatttgcttggttatagaaacaaatgattaaaatttaatatgtaatatattcacgtagcaaaatgtaaaacaactacctaggttctccagctgaggccttgtaaa

SEQ ID NO: 462562 - DNA, 542 bp, Homo sapiens
tcccctctgcttttattttcaggaacagattacagaaattggtatcattttttccttaaagatctggtacagttcaccagtgaaattattttgatctaatgtttttgtttcttgaagattatttttattaaactcatttatttaatatatagatatgcctattstgattacttatttctccttatttcagtttgtgtctttcaagcattagtccatttcatctgtttttagatacatacatgttaaggattcttatgtgtttttggaaatttaacagtaatatgatttggctgtgtccctacccaaatctcatcttaaattgtaactcccacaattcccatgtttcatgagaggaactcggtgggaggttgaattatggaagtgggtctttactgtgctattctcatgatagtgaataagtcacaaaagatctgatggttttaaaaatggaagtttccccacacaagatctctctttgcctgccaccatccgtgtaagacatgacttgctcctccttgccttctgccctgattgtgaggcct

SEQ ID NO: 462563 - DNA, 624 bp, Homo sapiens
aggaaatgcataaaatttgaacataaataatttgtttctatacaaaggtgacataaatatctacaaggattaacaaccaatctatttgtaaatatcttctagatcaaataagtwtaccaacattgcagaatatgaggtcaacacacacacacacacacacacacatatatcctgtatatgtgtatatatatacattctgtatatgtgtataaatatataaaatacataatacatatattatagatgtatgtatattatacatacatattacatacgtatgtgtatgtatctataaagatgtgctgtgacataaaacaaaaaacccaaaagatacataatatacacacacaaacacatacatatatgcacgtataatgtattataacaatgagcaattgaaattaaaatttaaagtacaaattttcaaaagcaagagaaagcatgaaaaatgtaggtataaaactaacacaatatttttactacctgtatgttgaaaactacaaaacactgatgaaagtaatcaaagaagatctaaataaatgggaagttatataaataaaatggaaaattgtttaagtcttagaatgcatagtattttaagatgtcaattgtaaacaaattaaa

SEQ ID NO: 462564 - DNA, 552 bp, Homo sapiens
tcctgctgtgttccgccaacagccctgagtttatatgcaggcagcctgcacaaaaggctgagatcttgctgcaggctacaagtctctcctcttgagaaagcaagcaggctctcagacctctcctgctggctgcagctcctgtgcttatatctgcacttgtcatttgctcccctggattctgctcaggaaaattcaygctcaatcaaaatattacaagttcagctagaagtttcctttaccctgtggcttctccccagttctgctgagtaccttcccctaggacccttttgaggtaaagccagggatggcttcccttggttcaagctggggactgggagttcctacagggctcttcccactgcttcttctgattttatattttgcttggctccctaaatccatttcagctctaggtaaaattaaattcttctcccatgatctgaattttcaggttccccaatagggatatgtgttcagaggcatacttttccccctctcgcactttgggaactccgtttttcatctgtctcacagactttgcagcagcaagcc

SEQ ID NO: 462565 - DNA, 538 bp, Homo sapiens
cctggctagctgccacctcctcccaccttttgcagtcctaactggcaggactcattatgtaaggaggagatacagaaacctcaactgccattgctgaaggacttttagcctttgtttcctgaatacaaaaaataaaaataaaaaattgtcctgacctacaacggttggtgccaaccaaaggaccaacatcctttctttaatgagggggcagaaatatagactcttatgtacaaagagaatggtaattgaaaagatctctgactcactgaaataatcagcttagggatgtgtgaatgctcccccaaaatgctgccttgttacaaaatcaatgccattaagaaataaattgtgctacatgtaagtttcagaggattaacacagagatattgataaccgcccattcgacatgtcatgattgagctatgtgcaaggccatgtgaataataccattaatttaatcccatttacctrtttttaagtaacactgttcagccccaaaatgcctggggactgatagcagagtaaaaattaataatta

SEQ ID NO: 462566 - DNA, 617 bp, Homo sapiens
  misc_feature (1)...(617): n = A,T,C or G
tcccaccagcagtgtgaaagtgttcccttttctctgcatccatgccaatatctattattttttgatatctaaattatgactattcttgcaggtgtaaggtggtatctcattgtggttttaatttgtctttccctgataattagtgatgttgagcattttttcatatttttcttggccatttgtatatcttcttttgagaattgtctactcatgtcctttgcccactatttgatgggattattattattttttcttgcagatttgtttgagttccttgtagrttctggatattagttcttagttagatatatagtttgcaaatgttttctcctactctgtggattgtttttttcactctgctggttatttcttttgctgtgcagaaggcttttaaatcaagtcgttctttaaaatgaaaatagcttttgaggggaaaggggtgggaagtgggacaccatacactagtttttggtcagaaaaatgatttagtgtatcagttccagtaaacaatgatggtgtagacattggatactgagcagattacctgagtccaaattctttgtgcaaattctttagcctttatgtttctccattntattatactgacatgaggataa

SEQ ID NO: 462567 - DNA, 530 bp, Homo sapiens
gaaaaaaaaacatgaagaaaactatatcaagacacatcataattgaattttaagaactagtgttaaagagaatgtccaaaagcaatgagagaaaatcaacagcagaattttaagaagcgttaaaggaaggtttttttgcacaaaaggaaaatgatgccaaatggacatttggatttataccaaaaaataaaagaaatttctggaaatggtaaatatgtagataaatataaaaaaagttaaattgaaatatctaaaagggataatttattgtttaaagcaaaaataatagtaatacattgtgaggtttacaacatatatagaaacaaaatgtagggcaacaatagcataaaatctgggagagcagaaatagaaatatactgttgtaaggggcttatattttacacgaagtggtaaaatattacttgaaagtagactatataaattaaaggtgtgtastataaactctaaagcaacaaatgaaaaaaatgaaacaaggaggtattgctaatatgctaataaagaagataaag

SEQ ID NO: 462568 - DNA, 529 bp, Homo sapiens
cttttccagcttttagaggctacctgcattccttggcttgtggccccatcctccgtcttcactccaacctctgcttccgtcatcacacctcttctctgactttggccctcttgccttcttcttgtaaaggccattgcaattacactgggctcacctggataatccaggataatctctccacctcaggatctttcatcacatctataacgtctcctttgctgtgttagataacatgtctacaggrttgggggattagaatgtaggcatctttgtggggcagggtggggatgggggtgcattattctatccaccacagatactgagccagaactaaaacacaggtccctggctcccagttcatgaggtgcttctcctgttagcatgaagaaagggctatatcaggtagtgatcacctcaaagcacagcacaactgaccaacccccaaactcaggggcttgaaaccataagtgtttatttggacacaaacctacaggttgctgggtggttcttttcatctcccctggccttg

SEQ ID NO: 462569 - DNA, 509 bp, Homo sapiens
gtggactgtgtctgcgggatggttccagctcctggagggaggactgggctggccagcctcctgccccctctgctgggctgctgggagcaccgtggacatgcctccccaactyggcagcttctaggagatggggagggcaaggagttcagcacagcctcaccgggcactttggtgtggctcttgaccttttcctgggtgtacgtactgaacagaaatgctgaaacaaactgggttgctgtggcctgtgttctctcttctccctctccagcccatgtgactccctcaggctctgctgggacgcgttcagacctagctctgccacaatcctgctgctctttcagcagatctgttcatggccaccaccaagcctgaggactgggcagagcatgggagcatcctgtggggacaggatgggcgtgagggggcagggtggtgggttagagtgggcaagggttgacgggttcaggtggggttcagagtcaaaggctctcgccagcaactactacatt

SEQ ID NO: 462570 - DNA, 528 bp, Homo sapiens
agatgtttaattgacaaatacccttgaccatatagtttcacatgggcagatagcgtggggagatgtaatgggggcagcgctgagacagtggggtgagagagmagcattggacgcttgggttactctggaagctaactctgggtcactatgagtaggggaaatgagacttccctctctccacccatctgggctgcaggctgatccaggagacaggatcagggctgggaaaggggaggtgcatgttagcctaggtttctgtagttgcccacatgtgagctagtgcttccaatatgaaagagaaagggttctgggatgtctgcctttggggctccttgcccctttctgcctgccatggtgcctgggaagccacaggctagctcatcatctactccttctctcttagatgtccagtggcatgagccagttgattgggctgaaggaaaagggcctgccacaaattgcccgcctcctgcaatctggcaactctgatgtggtgcggtccggagcctccctcctgagcaacatgtc

SEQ ID NO: 462571 - DNA, 528 bp, Homo sapiens
agatgtttaattgacaaatacccttgaccatatagtttcacatgggcagatagcgtggggagatgtaatgggggcagcgctgagacagtggggtgagagagcagcattggacgcttgggttactctggaagctaactctgggtcactatragtaggggaaatgagacttccctctctccacccatctgggctgcaggctgatccaggagacaggatcagggctgggaaaggggaggtgcatgttagcctaggtttctgtagttgcccacatgtgagctagtgcttccaatatgaaagagaaagggttctgggatgtctgcctttggggctccttgcccctttctgcctgccatggtgcctgggaagccacaggctagctcatcatctactccttctctcttagatgtccagtggcatgagccagttgattgggctgaaggaaaagggcctgccacaaattgcccgcctcctgcaatctggcaactctgatgtggtgcggtccggagcctccctcctgagcaacatgtc

SEQ ID NO: 462572 - DNA, 592 bp, Homo sapiens
gaggctgagggaagcagaagccaggatctgagcagagggagtgaagggcagacagtgttctagctcatcgggtcacctgctgggcctcagagctgatgccctgggagagagtggggttcagccttccccggggctccttcctttcttttggctcctggaaactctggaatatttcctgggagcctgagagtttgggggccatgccttgaggataatggagtgcaagagttctgggggcagtggtggggtgacccacctgggaaagggaggcatcccatccctcctgtgacatggggcagtggggactgtgaagaaggtgaggaggcctcatgcagccttgagtgagagtcaccctcatgcacttgagagcctctttcttccccttctgacaggggcatagatcctggagtaggattctccccaactcagactctttctggtcccggggagtgacrgacataggccaaccctaggcaaccccagccctgtggtccccacacacgtaacacctggggaggcctccagccctgctgctcacaggatttctgccagtcagaagagtgcaggaaacaaaggccaggaggaagagaag

SEQ ID NO: 462573 - DNA, 602 bp, Homo sapiens
cctctctgtccatctcagccaggctgtcatcctgtgaaatctctatctgctttcctcttggccaggaccctacaggatcagactggcatccctgcaggtcgctctttcctctcccaggtcccagtcgagcatcccacagttgctctggggcatgcctgtccagttgtcttccactgtcccctctgtgctcctttccttccctgctgctccccagtcctccagcctgaagcmgactggacccagcctcccagcctcctgctttcctccagcattcatcactgttgctgtctctgccacgatcttgctgttgtttttctgggaggcccaaccctgattctgagctctctccctgtagatggggcctctctgcaaggcttctggcccagcctccctctctgtgggattgattttccctgggaagagtggctctgcttccctctgctactggaaagccctcgccctcctgtccagggccccaggctgagtcagctgtccctttgtcccccatcaaggagtagccatgtctgccaaggccatccctgtctgggctggctatgtgctggagcccagaagccggcccagccccttcaagggagcccccc

SEQ ID NO: 462574 - DNA, 416 bp, Homo sapiens
gagtttggagtaagaaatttgagtgtttcagtctaaagacaggaaagtccyattagaatctagttataccctgaagaaagaagcaattccactcatccaaaagatgggctgcccagctgaacaacctatcactcctctacaataactggaaataactacagtaaaaaaacaacagcatacatataaaaataaaaagcaaatgcaaaaaaatataagcccagaatcaatgagcacactgataaaagcagcaagctcaaaaaataaaagagctaactcttgtgaatacacagtttataagaacaaataaacaaaaaacattcacaaaggataattaatattctcaaaggataagagagcatatcacatctatgaaataaaagaagctattatgtaaaagaactagttcaaggtcttaa

SEQ ID NO: 462575 - DNA, 584 bp, Homo sapiens
acagcatacatataaaaataaaaagcaaatgcaaaaaaatataagcccagaatcaatgagcacactgataaaagcagcaagctcaaaaaataaaagagctaactcttgtgaatacacagtttataagaacaaataaacaaaaaacattcacaaaggataattaatattctcaaaggataagagagcatatcacatctatgaaataaaagaagctattatgtaaaagaactagttcaaggtcttaaaaatgaaaaagatatgatctttgaaacaaactcaagagactggctgaataccagaataaatactgatgaagagcaaattagcaacctcaaagactaaactaaggagttctcccagaacacaatgtaaacagaaatgtgatgaaaaatgtgaaataaaagtttagagtataaaggaaakatccaaagtttcaatgtttatacaataagcatttaggaaggagagaacagaaaaaataggaggaggggtggaagataaaaattaatttaactataataaaaaaccatttaacagagctaaaataaaacacatctatatcatgaaagagcccactgaacaat

SEQ ID NO: 462576 - DNA, 513 bp, Homo sapiens
gcctaagtgaagtttaaaaacaggcttcagtgggagcaaagtgacttgaaagaaccttaactgcttgctaaaacaaagctcaacagtctttggaggaagacaacaaaatccaaacactcaataagatagcatcacaatgcctgtcattcaattaaaaattactagacatgccaaaggacagaaaatgtgcagataatcaggagagaatctatgaaytgacaccagtgcagaagtaacagagatgatggagttagtagacaaaaacattaaagcaaatattatgactacatacaaatatttatagaaaaacatgaacataataaagagagaaatggaagaaatttagatgaacccagtggaattccagggataaaaaaatataatatttgaagtaaaaattttactgaatgggatgaacgtcagattctatattgtacaaaaaagacctaagaatagaatttgtctaaaataaaacacaaagagttgtgaggctaaaaaaaaaattagagcctc

SEQ ID NO: 462577 - DNA, 513 bp, Homo sapiens
gcctaagtgaagtttaaaaacaggcttcagtgggagcaaagtgacttgaaagaaccttaactgcttgctaaaacaaagctcaacagtctttggaggaagacaacaaaatccaaacactcaataagatagcatcacaatgcctgtcattcaattaaaaattactagacatgccaaaggacagaaaatgtgcagataatcaggagagaatctatgaattgacaycagtgcagaagtaacagagatgatggagttagtagacaaaaacattaaagcaaatattatgactacatacaaatatttatagaaaaacatgaacataataaagagagaaatggaagaaatttagatgaacccagtggaattccagggataaaaaaatataatatttgaagtaaaaattttactgaatgggatgaacgtcagattctatattgtacaaaaaagacctaagaatagaatttgtctaaaataaaacacaaagagttgtgaggctaaaaaaaaaattagagcctc

SEQ ID NO: 462578 - DNA, 599 bp, Homo sapiens
atagccttgcggcctaccatgtcagaaatgagaagtagttccataaggctggaaggcatatgggctttggtggcagtgagtggagaaggtgctttggtcaaacatcaggctacataggtttgaaagagtcaactcatgaagaatcttgcttgcccttcatgctggatgtccatggtttattactttagctrcccattagaatcacctagaaattttttagaaatctggtggagtactgaagccaaaaacaaccatctagactgttttaggcccactatcccagtgagaaaattgaaaattagtcaaaatatattttaaaaatctgtttgaaacatctgagagccacaaagagggtgaaaatttggagagccaagatcctcaaagagggagaaagccaggagtaatgagctgacatttcggaaaaatttttcacttgaggattcactgccagtttcaaaaccagtgcctgagagattgagaatggaagggttttccatagtcttataaaactggggctaaggaggtggtgaaaattggagtggaaatcccaccaaggtggagtggacctggtaaataccgactggatttcatttgggact

SEQ ID NO: 462579 - DNA, 546 bp, Homo sapiens
tcaacttctcccaacaaagagacttctatctcactttatcaaaaagttgagccacccacaaatgagaaagcacattgaaaaagtctgatgccaatgaaatgcgaggcatttaaattattagtattggtatattaagatgccwatgttatttctgttaccttcttattaatctgtactgtttcacaacttgtcccaaatggtatccccaactctctggcattttgcatttcatgggtgaaatggaaatgcagatgatatcagcagtgatggaatgaaatgaactttttatacagctgaaaaatcaccctgagctactgaaatataagagcatacatacatcatagtcaagttgtcaaagggggatatttcacagctatgacctcacagccataaaatataagctgtataacatgtaaggaaacccaagacaacttttccagattttctttttttactagtaagattaccacatggaaaataactttaacaagttataataatctaattaaaggaatacttagaattgcatagaccttttcattttca

SEQ ID NO: 462580 - DNA, 455 bp, Homo sapiens
ggagggaagccgtgattcaatctaggccatgatatatcagtttataaagcagagcagactaacagaccttgctattaaggaacgaagtggggttaggggttgtctgtgctgacagatggcacagccccgcagcacacttgctctccattttcttccctgtttggcaacaaatgctaagatgcttagcactgggcaaaagctatgctattaatcttgtcttttctcattgaggcttctcatctttccaaaagatgacatttctagaatcgtaagtgcaataaacttaaggtcatagagcacagctcttaaaaagacagtttcatgagctgtaaaaagtaatcatggtttgtcaagtcagcagatctctccccttccgccttctaactgtcactaatgctttttggagagagcacasttttgttcttttacttttcagagttgttgaagggggagaa

SEQ ID NO: 462581 - DNA, 559 bp, Homo sapiens
ccgtgtgttcaatttgctgccacatggtttaaattatctatgtatttattaagggcgctaaataggcagcttaatttagggagaggggtcatttaagttgagaaaaatcatgtttaatccctcaactcactacaggttgattgtgctttttaaacgcatatagcctcagctaacaaaattccccatgataagaagttcccctgtctgcttctaaatttgtcagctgccaataacaatggaaacttgttaagctcctggcttcaggcccagctgctctgggcgtcttccagaattagagatttgtcagttactttctctttatgttgccagtgtgcttgcctgcaatttgggggtcagctctctgttcctggcatatcatgtgtttgttacattactatagagtggaaaccaaagggccagsgtatcagagcttctttgcttgtataagtctgctttggtttttttctctggatgggcgtaaagcaggtctgaagggaaccatgaggaagacatgattagatgtaaaaggctggaaatttgaacatttactggctatttg

SEQ ID NO: 462582 - DNA, 593 bp, Homo sapiens
agcttgtgtcactttgcacaagctcagccaggtacttgaggtactcactaactcccagggagttgtagccgaccaggggttgccacctgaccctgcctgcctcagaggtcttccttctaaaggcttgctgccccctgttgtgaagtgtaggtgcacattttctgactgcactgtctagcacttgaaatgtgtgtagtccaaatgaactgcaagtgtaaaatacacaccagattttgaaaacttagtatataaaacgagtgtaaaatagctctttggtatttttatatttttatacattaaatgacaatgtyctggatgtattcgattaaataaaatacattattaaagtttgcttcaccttttttgcttttttgatgtgaatcctagaaaatttaatatggcaaatgtgactcacatcctattttattggaacaatgctgctttacagtattcaacgtaagcaggcttattcttacttttagaagcaacaaacttattctccaaaatatgatcgtatctaattttagaggacaaaaaggctataagttagaaaataatcataatgatgatattaataataacaacggccaaca

SEQ ID NO: 462583 - DNA, 585 bp, Homo sapiens
tgtaatcccagctgcttgggaggctgaggcaagagaataacctgaacccaggaggcagaggttgcagtgagccaagattgtgccactgcactgcagcctgagcgacagagtgagactccatctagataaaaaaacaaaaaacaaaaaacataaccacatcgtatagaaaatgggccatataattaaagtatgggtagtaaaattcacttggaaaaattaatcaatgtgcataaaatcctagtgaaaatggtggtcataacatgtacctaatatatccttataattaaaatgatagaattaataaaaattctgagttaaaattgtataaagagatattgcatgtcctgaaagtcagtgcagttacaagttattaaagtaatttagttttaaagcctagttttctgaaatacaggtttaaaattttaatttaggtatcygtgtacatttaccatcactactgcataggaatagtcttgaaggatagcccctaacagataccagaggttgcctctggggagggatgtagatccacgtgagataaaggttatgaaggaagaattttcgttttatattttgtataaggta

SEQ ID NO: 462584 - DNA, 548 bp, Homo sapiens
acatctattccttcccgtcgttagattgtttgcttattattgtattacaaactagaatggacacacctggaaggcaggaatttttctttggtcaccactctgctctcaggacagtgcctgaccaaaagtcagaatttaataatatttgtaaaagaatgaatgagccttgacttcaacatttcttttgagacatcacagtgacctgcatttaacctttaaggmaataagactattcctcctcggctgcatacttgtcataattgtcagattttgttctctgaggatcttatgagtcactgttgtctgcggaaaattgtggggatcctagactaataccttcacacaagatcatccagtctagtccttgacttaagacagatgccctatcgagttgccatccttaacttacagttggagttctcattttattctacctgaactaattttctttctgatagaatattgttgatgacttcatggtctccacgctgtccttttttcccccattggtctctctcaatgaggggctgaacccgccagcaggtaga

SEQ ID NO: 462585 - DNA, 576 bp, Homo sapiens
gtggggtggggggcagggggctgctttggtacagcaaagctatgtgtctrtttgaacaaagggaaaagaaaaatgatttcattgtccatgaagtgtcttcaagaaaaataaatcatggggaggtctgggacaagggcttccaaacctggttttgcagagtcccctttggggacaagaagtggagatggggaagagaggagaaggggggcaagaaaaggttgactggggcaacttcagcatccctctcccgaccagagaaactccactttcaggaaaacacgaattatttcattttattcaaacaactgtgtgtataggtgtataggtgtatagatattttccaggctcattatttgatatcagtgctctaaatattgtcatctaacaccaaatgcaatgtaaagtttttgagaaaaatcaattgcatttctaagaaattggcaaaatgaccattctcctatctcctaatattactgttactacagagaatggagcaaagtctagattatttaaaaattgaaagtaataaaactttttttctaggtatgggtaactgcactggctattgagagatca

SEQ ID NO: 462586 - DNA, 618 bp, Homo sapiens
cttggctctttgagcgattgcatatgcagtggtgaccatctcagcttttgatttcagatgaactcagttatgaagctgggtacacgccattaccaaccataatgatatgcatttacacattttgctttttgacctatttctttatgaatatggctcatctactagtaactgttatatccatgctgctattgttagtgtacctgtgcttatgctggcaaaaatatgtatgttattattgcrtatcttattgtgcaaagtggcctatgaagttttctgtggtgtttctacgtgtttctcaagttagttcccctttaaagtgtgaataaatatattttaaggaatattttaatatttttttccagaacgatatttttaagatttcgatatttttggggtttcaacatttgagattacaatgttggagattgtgtcttttgggattgtgattggctctcagtggagagaagtcctgcagctcttagcaccttcatagaggcatcttacaatgccaccctcatcttcagggagtttgtcctccctcaccttttatattttgagccttaaagtctctgtttttgcagaatatttgagtagcttgatcacctggttaaaaccctc

SEQ ID NO: 462587 - DNA, 618 bp, Homo sapiens
cttggctctttgagcgattgcatatgcagtggtgaccatctcagcttttgatttcagatgaactcagttatgaagctgggtacacgccattaccaaccataatgatatgcatttacacattttgctttttgacctatttctttatgaatatggctcatctactagtaactgttatatccatgctgctattgttagtgtacctgtgcttatgctggcaaaaatatgtatgttattattgcgtatcttattgtgcaaagtggcctatgaagttttctgtggtgtttctacgtgtttctcaagttagttcccctttaaagtgtgaataaatatattttaaggaatattttaatatttttttccagaacgatatttttaagatttcgatatttttgggrtttcaacatttgagattacaatgttggagattgtgtcttttgggattgtgattggctctcagtggagagaagtcctgcagctcttagcaccttcatagaggcatcttacaatgccaccctcatcttcagggagtttgtcctccctcaccttttatattttgagccttaaagtctctgtttttgcagaatatttgagtagcttgatcacctggttaaaaccctc

SEQ ID NO: 462588 - DNA, 556 bp, Homo sapiens
actgtatttattatttcaggaaataggaactaggagtcatctatggactattggtgggagggagacttttcactatacatgcttgcatatccacactataaatagattacctattcagagtaaatgaatcacatttacgctttcagttgctaaataaagtatgtatatggatttccartgggatgattaggcattatcctcatagggatgttctgagagccttcatggcatcctattaagtaccaactatgggccaggcactgagctaggtgcattgcccagattacagctggtcatgtgaggtaagcattaatatgcacattttacagataggaaaaccaaggttcagatagaaccacacagtaataagtggtagagctgatattcatacccaagtctgcctgagcctgaattctatgacattaaagaacatttcaaaaataagaaataggtgattctctctagagaatgtgtacaaggtgtgactagaaagtgagccttttatggaacacaattcttgggatgtttgagcttctgctcttctctgacttcgctg

SEQ ID NO: 462589 - DNA, 564 bp, Homo sapiens
ttcagagtaaatgaatcacatttacgctttcagttgctaaataaagtatgtatatggatttccaatgggatgattaggcattatcctcatagggatgttctgagagccttcatggcatcctattaagtaccaactatgggccaggcactgagctaggtgcattgcccagattacagctggtcatgtgaggtaagcattaatatgcmcattttacagataggaaaaccaaggttcagatagaaccacacagtaataagtggtagagctgatattcatacccaagtctgcctgagcctgaattctatgacattaaagaacatttcaaaaataagaaataggtgattctctctagagaatgtgtacaaggtgtgactagaaagtgagccttttatggaacacaattcttgggatgtttgagcttctgctcttctctgacttcgctggcatggctcaggctatggctccagggaagcccacagagcaagagctctgtgccccgggcgagggctggagaggcaaactcctccatgacaaagagtagacgccagccggggcatggagtcc

SEQ ID NO: 462590 - DNA, 453 bp, Homo sapiens
atgggagaaaaacagcacaaaaagcctgaggtttggtgacaaaaagaaatcaagaacaaagtagcaggagagaagtcttttagagtttttcagacaaagaggaactggccgaacatgatgcagagaggaaggcggtctcagagcagcctcttgagactctataatgcaaacattctgtttatttaacaactttgttcccagaagttcaaattctcactctgcctacattcaattctgtccgtattctacaaggcaactggtatttcttcacaccccttgccctgctgggagaatcacaaaagacccgtcctctctcttctctgtgccctggatcttgtagacatatccagtagggttttgagacctggggaggayagacgactatgagaatgagatcaataaagcagccaggcttgggtgtggaggttaacagagtgtgaggggattgaagga

SEQ ID NO: 462591 - DNA, 453 bp, Homo sapiens
atgggagaaaaacagcacaaaaagcctgaggtttggtgacaaaaagaaatcaagaacaaagtagcaggagagaagtcttttagagtttttcagacaaagaggaactggccgaacatgatgcagagaggaaggcggtctcagagcagcctcttgagactctataatgcaaacattctgtttatttaacaactttgttcccagaagttcaaattctcactctgcctacattcaattctgtccgtattctacaaggcaactggtatttcttcacaccccttgccctgctgggagaatcacaaaagacccgtcctctctcttctctgtgccctggatcttgtagacatatccagtagggttttgagacctggggaggacagacgactatgagaatgagatcaataaagcagccaggcttgrgtgtggaggttaacagagtgtgaggggattgaagga

SEQ ID NO: 462592 - DNA, 539 bp, Homo sapiens
tggtatgataaaacaggaactatttccaaggtattaatttagtccttgctattttgagtttggctagaatcctctaatgagaaaacaaaataattctggtcatggtgttaagctgaaacttgagcatcaaatcttgaatcttcatttgttatgaatgatttgtagttttacactaactccaaaacaccatttctgaagctactagaaattccaactaccatatatgacaatgtatccaagtgcaagaaataaaataaaggcctaaagaaaagagttgacaaatctattctttaaygaaaattgtgttactactgtaacatcaaagtatcgaaaaacaagcatatatcttgcttaaaaggttcaatctaaaaatgttttgcttctgctaaaagggagaaatctaggaagtcataatgttaagcgattgatattgttcccaaattgtgagattacagaaagcactactagctaatctgaatgcaacctacatgaattggttaataagatggtaagattttaaaccattgaaactacaaaat

SEQ ID NO: 462593 - DNA, 539 bp, Homo sapiens
tggtatgataaaacaggaactatttccaaggtattaatttagtccttgctattttgagtttggctagaatcctctaatgagaaaacaaaataattctggtcatggtgttaagctgaaacttgagcatcaaatcttgaatcttcatttgttatgaatgatttgtagttttacactaactccaaaacaccatttctgaagctactagaaattccaactaccatatatgacaatgtatccaagtgcaagaaataaaataaaggcctaaagaaaagagttgacaaatctattctttaatgaaaattgtgttactactgtaacatcaaagyatcgaaaaacaagcatatatcttgcttaaaaggttcaatctaaaaatgttttgcttctgctaaaagggagaaatctaggaagtcataatgttaagcgattgatattgttcccaaattgtgagattacagaaagcactactagctaatctgaatgcaacctacatgaattggttaataagatggtaagattttaaaccattgaaactacaaaat

SEQ ID NO: 462594 - DNA, 569 bp, Homo sapiens
gcgtttggttttccgtccttgtgacagtttgctcagaatgatggtttccagcttcatccaygtctctacaaatgacatgaactcatccttttttatgatggcatagtattccgtggtgtatatgtgccacattttcttttatatatatatatatttttataatttcaacttttactttagattcagggggcatatgtgcaggtttttttacatgagtatattgtgtgacactgaggtttgacatcacaaaggtagtaagcatagtacccaataggtagtttttcaacccttatccactccctctctccccactctaatagtccccagagtctatgattcccatctttatgttcatgtttacccagtgtttagttcccgtttataaatgagaacacgcagtatttggttttctgttcctgcatttgttcacttggggtaatggcctccggctgcatccacgttgttgcaaaggaaataattttattctcctttatggctgtgtagtattccatggtgtatatgtacctcattttctttatccaatccaccattgatgaacacctaggttg

SEQ ID NO: 462595 - DNA, 569 bp, Homo sapiens
gcgtttggttttccgtccttgtgacagtttgctcagaatgatggtttccagcttcatccacgtcyctacaaatgacatgaactcatccttttttatgatggcatagtattccgtggtgtatatgtgccacattttcttttatatatatatatatttttataatttcaacttttactttagattcagggggcatatgtgcaggtttttttacatgagtatattgtgtgacactgaggtttgacatcacaaaggtagtaagcatagtacccaataggtagtttttcaacccttatccactccctctctccccactctaatagtccccagagtctatgattcccatctttatgttcatgtttacccagtgtttagttcccgtttataaatgagaacacgcagtatttggttttctgttcctgcatttgttcacttggggtaatggcctccggctgcatccacgttgttgcaaaggaaataattttattctcctttatggctgtgtagtattccatggtgtatatgtacctcattttctttatccaatccaccattgatgaacacctaggttg

SEQ ID NO: 462596 - DNA, 569 bp, Homo sapiens
gcgtttggttttccgtccttgtgacagtttgctcagaatgatggtttccagcttcatccacgtctctacaaatgacatgaactcatccttttttatgatggcatagtattccgtggtgtatatgtgccacattttcttttatatatatatatatttttataatttcaacttttactttagattcagggggcatatgtgcaggtttttttacatgagtatattgtgtgacactgaggtwtgacatcacaaaggtagtaagcatagtacccaataggtagtttttcaacccttatccactccctctctccccactctaatagtccccagagtctatgattcccatctttatgttcatgtttacccagtgtttagttcccgtttataaatgagaacacgcagtatttggttttctgttcctgcatttgttcacttggggtaatggcctccggctgcatccacgttgttgcaaaggaaataattttattctcctttatggctgtgtagtattccatggtgtatatgtacctcattttctttatccaatccaccattgatgaacacctaggttg

SEQ ID NO: 462597 - DNA, 610 bp, Homo sapiens
ttaaataaattttgagcaactagcatataccaggcactgtgctaggcactggaaatccagtggtgcacagaataaacactccctgctctcactaacagttaacatttagggtgtcccatcttctgagtcccatatggcctagacctcattaggtatctaccagaatttaaaaccttctaattccagaacaattaccacgcctctcatttgtaaagcacactatacttaaagcttaaattaccttgttgatcctagaaatacattttattggcactagaataaaggattgtttgcttagttatcatcttgttccaatactgtgctctgtggagctcycgaaagtggaaaggaagaggaaagcaacaggttaactattcccagccccgcagtccttctcttcaatcagaagagcatatctctgtctcttttaggtataggcatagtatgaaatttcctttgaaaaggaggtcccttttacttttttaaaagtaagcagctttgaaacccactgacagaaaacaacttcctcctttgggatataaagaaaccaagacacagaaaggaaagtgactccagatggccttttactgagttacccgcaaagccaggt

SEQ ID NO: 462598 - DNA, 610 bp, Homo sapiens
ttaaataaattttgagcaactagcatataccaggcactgtgctaggcactggaaatccagtggtgcacagaataaacactccctgctctcactaacagttaacatttagggtgtcccatcttctgagtcccatatggcctagacctcattaggtatctaccagaatttaaaaccttctaattccagaacaattaccacgcctctcatttgtaaagcacactatacttaaagcttaaattaccttgttgatcctagaaatacattttattggcactagaataaaggattgtttgcttagttatcatcttgttccaatactgtgctctgtggagctctcgraagtggaaaggaagaggaaagcaacaggttaactattcccagccccgcagtccttctcttcaatcagaagagcatatctctgtctcttttaggtataggcatagtatgaaatttcctttgaaaaggaggtcccttttacttttttaaaagtaagcagctttgaaacccactgacagaaaacaacttcctcctttgggatataaagaaaccaagacacagaaaggaaagtgactccagatggccttttactgagttacccgcaaagccaggt

SEQ ID NO: 462599 - DNA, 569 bp, Homo sapiens
gcgtttggttttccgtccttgtgacagtttgctcagaatgatggtttccagcttcatccacgtctctacaaatgacatgaactcatccttttttatgatggcatagtattccgtggtgtatatgtgccacattttcttttatatatatatatatttttataatttcaacttttactttagattcagggggcatatgtgcaggtttttttacatgagtatattgtgtgacactgaggtttgacatcacaaaggtagtaagcatagtacccaataggtagtttttcaacccttatccactccctctctccccactctaatagtccccagagtctatgattcccatctttatgttcatgtttacccagtgtttagttcccrtttataaatgagaacacgcagtatttggttttctgttcctgcatttgttcacttggggtaatggcctccggctgcatccacgttgttgcaaaggaaataattttattctcctttatggctgtgtagtattccatggtgtatatgtacctcattttctttatccaatccaccattgatgaacacctaggttg

SEQ ID NO: 462600 - DNA, 591 bp, Homo sapiens
aactcatcattaactcaacttgacctgaggttctcagtatggatggcaaagctcatgttaatgtgctaatcatctgccacactagtctccttcctgggctattcctgcttccactatattttgtatacacaattaggatgatccctataaagctgaagttagataccatcacttctctgctcaaaacttttccgtggctttacatcccagtcattaccatggcttacaaggctccacacagtctgatccctgcctacagcgttggtctcacttcctacaattctctccctcgcttgctccacttactcatctcagccacatgggattgttgctgctctttgactgtgccaagcacactcstgccccattcgcttctccccttgtgctagagctctttccccaacatcttcccatggtttaccttgaacttcctgcacaatgtcattcctcagagaggccttcctggagtactctatataaaatagccctcaaagagggcttctcttaaggccccttctcatgaccctatagtttcatcctcttcttacccactttattgcttttcatagcacttgtttgttagctagttta

SEQ ID NO: 462601 - DNA, 579 bp, Homo sapiens
ccctggcaattgttcatgctggggccccaagctccttttatatcttcagatggagggaaggtgtgcttttggcagggaggaagtagtcagtgtgaaattggagaaaggcattcagtcttccaagtggacacagtgtccccgcgcacggctggcaagcagggtgcaggctgatttcagccagctcggcccctcagggatagtgtgtaaggtgcccctggcccctggggttacctggctttgctatgaggatctctggctgctctggagagagttaaaagtgtcttagcttttggaatgcttgctatagatttgcccatattaracctaaaaagagcaagcgtgtcagcgctggagcaatgagagtatgtagagttggcaggctggccagggggctgcatcacccctgcgagttcagaggcatttctcatcaatgcccgctcagcaaaaagacgctgaatctcaaccctggcacattgaaaatttctttgaaattctccagcccaaacagctcttagatatgcaaagcataattgacagaaacttgaagctagaagcctccttgaaaggccacctatgcca

SEQ ID NO: 462602 - DNA, 579 bp, Homo sapiens
ccctggcaattgttcatgctggggccccaagctccttttatatcttcagatggagggaaggtgtgcttttggcagggaggaagtagtcagtgtgaaattggagaaaggcattcagtcttccaagtggacacagtgtccccgcgcacggctggcaagcagggtgcaggctgatttcagccagctcggcccctcagggatagtgtgtaaggtgcccctggcccctggggttacctggctttgctatgaggatctctggctgctctggagagagttaaaagtgtcttagcttttggaatgcttgctatagatttgcccatattagacctaaaaagagcaagcgtgtcagcgctggagcaatgagagtatgtagagttggcaggctggccagggggctgcatcacccctgcgagttcagaggcatttctcatcaatgcccrctcagcaaaaagacgctgaatctcaaccctggcacattgaaaatttctttgaaattctccagcccaaacagctcttagatatgcaaagcataattgacagaaacttgaagctagaagcctccttgaaaggccacctatgcca

SEQ ID NO: 462603 - DNA, 423 bp, Homo sapiens
tctcccagggttggtgagatcctcctgttaaccacagcattctcccttaccagttggccaaaagaagtgtgtgggacgtctattgggcggtcaccactctcccctgccagggacagtatcttctggcttctgcatatcagatcatatctccaatcagatgcctgattcctgactagggcctttatttcttccagacattccagtgggttggcagaagtcaccatgttgcctgtaggaacttcrgtcttaggcccagcctttgtcttttctgtggccactcctgacctccctttatcagttgctttcttggaggaatatttaatagagaagagccagggacccccaggctcaggggctccatctgccttgtctctcagagcctcagctacctctcttggctgccagtttggcctcttgtcagta

SEQ ID NO: 462604 - DNA, 533 bp, Homo sapiens
tggtgcaagaaccatgttttgttaacttctctatttctcatacctagcaacacagagtagaaactaaatggacataatagtccttgttctccaaatgaaattttcttcatgccacctgcttaaaaatagagacaaaaccaaaaccaaattttaatactgacagtgttccctaaattgctgaagaactagatttcattatcttcaacaaattcaatagaagttgtccatacctttgaagttagcaayttaagcctttgcctctccaagtcccaatggtacctctatgttcaggctaacttggtctcagtgtcagccttcatggacagcttggatgatacaggcaaggtggtatatcacagtggataaggctcgggcttcaggccagggctagatttgagttccgactctgccactcacaaccttgtaactttggcaaggtgctaatctctctaagtccagtttccaagtctatgaaatgaggatgatactattacctaccttatagagtcattgtgaagaataatttttaaaat

SEQ ID NO: 462605 - DNA, 579 bp, Homo sapiens
catttgttctttatttttatatgatttgttgrtagagttttcccaaatataattaataagcaagaaaggagagcagttaaattaattaattcacctttatatttgtttaatagaagaaccaaaatttggtttttaaaaaggtgttttatgccagtaatgatgtggaaatctgcaggtatcttaagctcatcagagggaatatcttaagacaattttaaaatgcttgggtcctgaaaagaaatgtcaaacgtagtgcaatcatagctcactgcagccttgaactcttgggctcaagcaagcctcctgcctcagcctctggaacaactaagactacaggcatgtgctactacactgggataattattttttaatttaatttaattttgtagagatgggggtctcactatcttgccaagctggtctcgaactcctggcctcaagcaatcctcccacataagcctcccaaactgctgggataacaggcttgagtcactgtgccaggccctgactattattttttaaacactaagtttaaaagttttcactgattatttaaaataataaaaagtaacaaagagg

SEQ ID NO: 462606 - DNA, 579 bp, Homo sapiens
catttgttctttatttttatatgatttgttggtagagttttcccaratataattaataagcaagaaaggagagcagttaaattaattaattcacctttatatttgtttaatagaagaaccaaaatttggtttttaaaaaggtgttttatgccagtaatgatgtggaaatctgcaggtatcttaagctcatcagagggaatatcttaagacaattttaaaatgcttgggtcctgaaaagaaatgtcaaacgtagtgcaatcatagctcactgcagccttgaactcttgggctcaagcaagcctcctgcctcagcctctggaacaactaagactacaggcatgtgctactacactgggataattattttttaatttaatttaattttgtagagatgggggtctcactatcttgccaagctggtctcgaactcctggcctcaagcaatcctcccacataagcctcccaaactgctgggataacaggcttgagtcactgtgccaggccctgactattattttttaaacactaagtttaaaagttttcactgattatttaaaataataaaaagtaacaaagagg

SEQ ID NO: 462607 - DNA, 546 bp, Homo sapiens
tcaaccagtgcagaagttactgcaggtcagagtgtggctgccagtgatgacatgctaaacttggccaagccccctttcgtgtgcatgaggtagggctggagagagcagtgcagagtgctccagagactggtagagctggggactgggtgtggattgatccctcactggggttcagaactgtgtggcacagcacccggcaaatcagctgtgaatggcatacattcaggttacagttgatgccaagatggagctttaagcttggaaaagtgtaacttttggggaaggaaggaaagattgtggaaagaatgaaaaaggwggaggagagagaaaagaaaagaaaacatattatgctttctgtgctggatgcatacattttctcatttaaccttcagcacacccagtgaggtgagtattgttattacccctaggacaggcatgatgtaaatgggaaggacagtggtcaagacacttgcccactccacatagcaacgattctcactcctgcctgcaggtgtgctcggtggagcgggaagagggcaggttgga

SEQ ID NO: 462608 - DNA, 567 bp, Homo sapiens
cagggagtggtggcttcactgaggatatgctacttgaactgaaacataggtgatgagaaggagtcaggcaatgttccggcagaagagcattccaggatagggtcagtagccagcgcaaaggcctgggatgggaatgagcttggcatgctgggatgagtaagtaggctggctggagtggctggaacacagtaaaggagagctgygtacgaggggaaggggccaggtcatgttgggccttgacagcatggctttcagttcaagtgcactgggaagccactgcagacttcccagcaggggagggacgtgatgtgatttgtcctgcctgctgaatatagagcctctgaaaagaagcagagactggcatggaggtggtgccatggatgaagagccggatggtggcactggactggaatctggtgttgcaagtgggagagagactcaagtgcatgttcaaggctttgctcagggattgaaagaagtaagggagaagttaaagctgactcctgagttttagcttcagcaagtggatggatatggatgctgtttcctagatggggcaagctggaa

SEQ ID NO: 462609 - DNA, 567 bp, Homo sapiens
cagggagtggtggcttcactgaggatatgctacttgaactgaaacataggtgatgagaaggagtcaggcaatgttccggcagaagagcattccaggatagggtcagtagccagcgcaaaggcctgggatgggaatgagcttggcatgctgggatgagtaagtaggctggctggagtggctggaacacagtaaaggagagctgcgtacgaggggaaggggccaggtcatgttgggccttgacagcmtggctttcagttcaagtgcactgggaagccactgcagacttcccagcaggggagggacgtgatgtgatttgtcctgcctgctgaatatagagcctctgaaaagaagcagagactggcatggaggtggtgccatggatgaagagccggatggtggcactggactggaatctggtgttgcaagtgggagagagactcaagtgcatgttcaaggctttgctcagggattgaaagaagtaagggagaagttaaagctgactcctgagttttagcttcagcaagtggatggatatggatgctgtttcctagatggggcaagctggaa

SEQ ID NO: 462610 - DNA, 567 bp, Homo sapiens
cagggagtggtggcttcactgaggatatgctacttgaactgaaacataggtgatgagaaggagtcaggcaatgttccggcagaagagcattccaggatagggtcagtagccagcgcaaaggcctgggatgggaatgagcttggcatgctgggatgagtaagtaggctggctggagtggctggaacacagtaaaggagagctgcgtacgaggggaaggggccaggtcatgttgggccttgacagcatggctttcagttcaagtgcactgggaagccactgcagacttcccagcaggggagggacgtgatgtgatttgtcctgcctgctgaatatagagcctctgaaaagaagcagagactggcatggaggtggtgccatggatgaagagccggatggtggcactggactggaatcyggtgttgcaagtgggagagagactcaagtgcatgttcaaggctttgctcagggattgaaagaagtaagggagaagttaaagctgactcctgagttttagcttcagcaagtggatggatatggatgctgtttcctagatggggcaagctggaa

SEQ ID NO: 462611 - DNA, 444 bp, Homo sapiens
gcttcatttagggtctttaatagtatgaaaaatctctgtgaatttcataataaaaagataaagaattttactataactttctaaatttgaaaggaaaacctggtaaataaatagcagattgttagaaatagtttaactcaacaaatgatccagaaccactactaagaaagaataatggcatggtcttcttgttcctttgttttaaatcaatcgttattagtgcctatgaccagaacagtagggcaatttttatgaaaaagcacagaaaagatgatttaatttaattccattttcaaactatttaacagtactagataaaataatattaaaaagcaaattaatgtgccagaatcctcacagagtctaggagctagaaatactaaactacacaagaaagagtataacacaccwtggcaggcacagtacattgcctggccaatatgg

SEQ ID NO: 462612 - DNA, 568 bp, Homo sapiens
attacatactgtataagtgaattgaaatatcactctgtaccccgtaaatatgtacaagtataatgttatgcttatacttgtatgcattatacaagtataatgttatgccaattaaaaacaataataattttaaagcagagaaaataccaagtatagctgaggatgtagagaacactggtgaatgctgaagttaatatacaatggtgcaatgtttatgaaaaacatggcagttcctcaaaaaatgaaacacagacttaacatatgatttagattttcacttctggaaatatacacccaaaagaaaatagaaactcaaaaagatagtgttagtgtaaccattttcatagcaactttatttaaaatagctaaatgttggaagcaacccaaatgcccattgacacagttgaatggtaaacaaaatgtgacctgtacatacaatggaatattattcaactttaaaaaggaaggaaactctgacgcatggtacaatatggygcaacactgaaaacattatcccaactgaaataagccaatcacaaacagataaatatggtataattccacttat

SEQ ID NO: 462613 - DNA, 568 bp, Homo sapiens
attacatactgtataagtgaattgaaatatcactctgtaccccgtaaatatgtacaagtataatgttatgcttatacttgtatgcattatacaagtataatgttatgccaattaaaaacaataataattttaaagcagagaaaataccaagtatagctgaggatgtagagaacactggtgaatgctgaagttaatatacaatggtgcaatgtttatgaaaaacatggcagttcctcaaaaaatgaaacacagacttaacatatgatttagattttcacttctggaaatatacacccaaaagaaaatagaaactcaaaaagatagtgttagtgtaaccattttcatagcaactttatttaaaatagctaaatgttggaagcaacccaaatgcccattgacacagttgaatggtaaacaaaatgtgacctgtacatacaatggaatattattcaactttaaaaaggaaggaaactctgacgcatggtacaatatggcgcaacactgaaaacattatyccaactgaaataagccaatcacaaacagataaatatggtataattccacttat

SEQ ID NO: 462614 - DNA, 635 bp, Homo sapiens
gcaggtatacaaaaagattacctacaatagtcttgctggccttccactcgacgaaatgtttcaccattaaattcagccctttgaggcaacccatatcttcctaaaatagtttctgcactgtgttctagccmatcacatgccagcattgaaaccatccccacagggttaacaaaaattgcatgctgggttctggacagaggtatagttataattaagcattagtcaggctgaactttggccgatttcctcattgctaaaagtcacatagcaatagatactgaccattgccatcccaattgttcctataaataaaatttctgacactaaggtcataagactgttaaagaattgattttcatcttcattgttcctaaagacaggatctctgatattagaatcaaaacaaaggcttttgtgtaaggattgcttaagatgtttctcagaccgtgaattgcagcaatcactttgaagacatctatagagggatgggattagcatgagaacacagtttctgcatctccctatcccatgaactcaccctgcactcttccttctactaatcaatgatctctacacttcagcctactcccaaacccttagaaattctaactctgaattccttggggaggtggatt

SEQ ID NO: 462615 - DNA, 635 bp, Homo sapiens
gcaggtatacaaaaagattacctacaatagtcttgctggccttccactcgacgaaatgtttcaccattaaattcagccctttgaggcaacccatatcttcctaaaatagtttctgcactgtgttctagcccatcacatgccagcattgaaaccatccccacagggttaacaaaaattgcatgctgggttctggacagaggtatagttataattaagcattagtcaggctgaactttggccgatttcctcattgctaaaagtcacatagcaatagatactgaccattgccatcccaattgttcctataaataaaatttctgacactaaggtcataagactrttaaagaattgattttcatcttcattgttcctaaagacaggatctctgatattagaatcaaaacaaaggcttttgtgtaaggattgcttaagatgtttctcagaccgtgaattgcagcaatcactttgaagacatctatagagggatgggattagcatgagaacacagtttctgcatctccctatcccatgaactcaccctgcactcttccttctactaatcaatgatctctacacttcagcctactcccaaacccttagaaattctaactctgaattccttggggaggtggatt

SEQ ID NO: 462616 - DNA, 635 bp, Homo sapiens
gcaggtatacaaaaagattacctacaatagtcttgctggccttccactcgacgaaatgtttcaccattaaattcagccctttgaggcaacccatatcttcctaaaatagtttctgcactgtgttctagcccatcacatgccagcattgaaaccatccccacagggttaacaaaaattgcatgctgggttctggacagaggtatagttataattaagcattagtcaggctgaactttggccgatttcctcattgctaaaagtcacatagcaatagatactgaccattgccatcccaattgttcctataaataaaatttctgacactaaggtcataagactgttaaagaattgattttcatcttcattgttcctaaagacaggatctctgatattagaatcaaaacaaaggcttttgtgtaaggattgcttaagatgtttctcagaccgtgaattgcagcaatcactttgaagacmtctatagagggatgggattagcatgagaacacagtttctgcatctccctatcccatgaactcaccctgcactcttccttctactaatcaatgatctctacacttcagcctactcccaaacccttagaaattctaactctgaattccttggggaggtggatt

SEQ ID NO: 462617 - DNA, 577 bp, Homo sapiens
gtaactatgaatgaacatttgttgcgatatattttccatttcttgccccygagaaagtctgggaagagtaacattccccaaacaatgaaacagctagcttctagattttggttttccagtatcaacttccactaaaatgaacctcaactccttggaaaatttttaaattccagacttggagcaggagaagtacaatataatcctgaattttagaacgaaaaaatataatttggtaccaaaacataagaaataagttcaaagaatgattcaaataatgatatgggacttgtcaaagagacacaaaatccagttaaaggaggttttcactggcaaaatctggaataatttgagcaggaaaataaataacaataatgatggattataacacactgaaaaaaataaaaagctatgagtctatactgataagaataaatcaatgccttgtaattttcatgtggaagatgtttacacagtttcacaatgccttaacattaaattctaattacttacaaaagaagagagaatggttttatggtggagatgtctggaaggtactaataaatcaaataacggatac

SEQ ID NO: 462618 - DNA, 577 bp, Homo sapiens
gtaactatgaatgaacatttgttgcgatatattttccatttcttgcccctgagaaagtctgggaagagtaacattccccaaacaatgaaacagctagcttctagattttggttttccagtatcaacttccactaaaatgaacctcaactccttggaaaatttttaaattccagacttggagcaggagaagtacaatataatcctgaattttagaacgaaaaaatataatttggtaccaaaacataagaaataagttcaaagaatgattcaaataatgatatgggacttgtcaaagagacacaaaatccagttaaaggaggttttcactggcaaaatctggaataatttgagcaggaaaataaataacaataatgatggattataacacactgaaaaaaataaraagctatgagtctatactgataagaataaatcaatgccttgtaattttcatgtggaagatgtttacacagtttcacaatgccttaacattaaattctaattacttacaaaagaagagagaatggttttatggtggagatgtctggaaggtactaataaatcaaataacggatac

SEQ ID NO: 462619 - DNA, 577 bp, Homo sapiens
gtaactatgaatgaacatttgttgcgatatattttccatttcttgcccctgagaaagtctgggaagagtaacattccccaaacaatgaaacagctagcttctagattttggttttccagtatcaacttccactaaaatgaacctcaactccttggaaaatttttaaattccagacttggagcaggagaagtacaatataatcctgaattttagaacgaaaaaatataatttggtaccaaaacataagaaataagttcaaagaatgattcaaataatgatatgggacttgtcaaagagacacaaaatccagttaaaggaggttttcactggcaaaatctggaataatttgagcaggaaaataaataacaataatgatggattataacacactgaaaaaaataaaaarctatgagtctatactgataagaataaatcaatgccttgtaattttcatgtggaagatgtttacacagtttcacaatgccttaacattaaattctaattacttacaaaagaagagagaatggttttatggtggagatgtctggaaggtactaataaatcaaataacggatac

SEQ ID NO: 462620 - DNA, 548 bp, Homo sapiens
  misc_feature (1)...(548): n = A,T,C or G
ggtctgtagttttcaaaattgataagtccacgaaattaaagtctgggaaattttcagattgaagaacactacaaacatgacaactaaatgcaaccgtttattctaaactgggyaattatgttatagcaggtattattgatatattttttgtttgtttgtttgtgacagggtcaccctgtcaacccaggcttgatcaaggttcaccgtagctttgacttcctgggctcaagggatcctcctgtctcagcctaccaagtagctgggactacagatgtgccatcacatctagctaatttatttttattttttgtagagattgggtcttgctatgttgcccaggctggtcccaaactcttggactcaagcaatcctcctgcctcagcctcccaaactgctgggattccaggtgtgagccaccatgcccagcctgaatcctaaaaaattctgaaggttaantaanaaaaatgtatcgatatcaatttcctgagtttgatggtttagtagtgttaagtaagaaaatatccctgtttttgaaaaatatatctaag

SEQ ID NO: 462621 - DNA, 548 bp, Homo sapiens
  misc_feature (1)...(548): n = A,T,C or G
ggtctgtagttttcaaaattgataagtccacgaaattaaagtctgggaaattttcagattgaagaacactacaaacatgacaactaaatgcaaccgtttattctaaactgggcaattatgttatagcaggtattattgatatattttttgtttgtttgtttgtgacagggtcaccctgtcaacccaggcttgatcaaggttcaccgtagctttgacttcctgggctcaagggatcctcctgtctcagcctaccaagtagctgggactacagatgtgccatcacatctagctaatttatttttattttttgtagagattgggtcttgctatgttgcccaggctggtcccaaactcttggactcaagcaatcctcctgcctcagcctcccaaactgctgggattccaggtgtgagccaccatgcccagcctgaatcctaaaaaattctgaaggttaantaanaaaaatgtatcgatatcaatttcctgagtttgatggyttagtagtgttaagtaagaaaatatccctgtttttgaaaaatatatctaag

SEQ ID NO: 462622 - DNA, 583 bp, Homo sapiens
ctcaaactcccgacctcatgtgatctgcccgccttggcatcccaatgtgctgggattacaggcataagccaccacacccggccctctttcatactttaaaaaacaaaaacaataacactgtaccttgttgtcctccgtattggttgccctttcagtttcaaatttaggcttytgtcttcagaagcaaagagttttgtcaaggctttttgcctcttcccttgtggctgctgctaccttcttccaggcctgtaccaggtaggtggttttatcctgccttttactcattgctcagactaacttctgtgtgccttatggagtttcatgatgaatagcacaagggtgcctacaaaatctccaacatgtctgcagctctcatgttaagttacaatcagtcttcagcaataaactgaaagttgtaacggagattttcttacttttgaaacagacatattaatcccatcaaaaaaattttaaaatcaacatagaaatcaatatttctagtcttaaaacttgaaaagtacatttgttttatctgagttctttcctctggaaaagaccctcaggactctcaaaaggtatcaaa

SEQ ID NO: 462623 - DNA, 583 bp, Homo sapiens
ctcaaactcccgacctcatgtgatctgcccgccttggcatcccaatgtgctgggattacaggcataagccaccacacccggccctctttcatactttaaaaaacaaaaacaataacactgtaccttgttgtcctccgtattggttgccctttcagtttcaaatttaggcttttgtcttcagaagcaaagagttttgtcaaggctttttgcctcttcccttgtggctgctgctaccttcttccaggcctgtaccaggtaggtggttttatcctgccttttactcattgctcagactaacttctgtgtrccttatggagtttcatgatgaatagcacaagggtgcctacaaaatctccaacatgtctgcagctctcatgttaagttacaatcagtcttcagcaataaactgaaagttgtaacggagattttcttacttttgaaacagacatattaatcccatcaaaaaaattttaaaatcaacatagaaatcaatatttctagtcttaaaacttgaaaagtacatttgttttatctgagttctttcctctggaaaagaccctcaggactctcaaaaggtatcaaa

SEQ ID NO: 462624 - DNA, 595 bp, Homo sapiens
ccaggccctgcatttgctttctacccctcctgagagcctgttttcccatacatggttacattccttccctgctatataaacctctacgtttagtcagtcagggagatggatttgagactgacttcccatttcctctgctactgcccccgattaaagccttcttccttggcaataattgctgtcttagtgattggctttctgtactgcaagcagcaggaccaagactgaacccctgagttttagtaacagattttggttccctgwcagaaacctgttgcttgtggctcagctgtcatgggctgggagtttcagaagtcctcctgagcagtgttgtgggtccagacaacaagatctgctgctctcaatttgggaaattttaaaggaatttcctcttgcaggctaacaagcccagctgactgacagagggaagcactctgagtattttagtatggacacttagaggcttgtttgtaattgtgtgtcgtgtgtgtgtccaggcaagtgagtgtgttttgtggctaccagatagtgcaatctgcttctctgaaattggaaaattctgaaggaatttccatttacaggttgaaaaagccca

SEQ ID NO: 462625 - DNA, 561 bp, Homo sapiens
ggtgctgtttggctccagtgttctttggagtctggggaagtttggtcatcaaaaattaaactgtcatggaaacggctttaccaaaaagtttagttcacacccttcgctgggtagcctactggggtgaaacaaatatgtagccatgtaaactggtgagtttgtatggctatctcatggctacagttctgagataaaagccactggatctttgtttttatgtgtgtatacattctatatgtatttatgtatgtacatttattatgttaaatgttgtatctaccaaatcggcttataaatgaaagatcacttataaattaagtaagcctraagtatttttcaagtccccatgacataagtaaacctttaataaacaatctggctttaaaattattgataaaatataaatagaagtatcttcagaattgtcagaatgcatcttggtctggtttatgtttgtctctgctagatattttgaggtaccagggtttggcatagaaggttataaaatgataactccagccaaaaggaactaatcttggtttatgtctcttatttgacaaa

SEQ ID NO: 462626 - DNA, 537 bp, Homo sapiens
aagtgattctcctgcctcagcctcccaagtagctgggattacaggcacacaccaccacgcccggctaatttttgtatttttagtagagacagggtttcaccacgttggccaggatggtctcgatctcctgacctcgtgattccgacacctccacctcccaaagtgatgggattacaggcgtgagccaccgcgcctgaccaatttgctctatttatctaaagtttgtaagctacctttktcaagcctccaaaaattaataaaggacaccagctatttaaaatttggttggttttgcttaactctgattatctagagagccacaagagctttaatgttcctagcaaaaaaaaaaaaaaaaagacttttttctacaagttctgaacagaggtagtaccttatttattttgttatttgaaaaggtggatgataattaaaatgtttaaatggtgtttatttccaaggttattcagtctaatcaataattggagttgattttcatatattttctttcagataatgaggaaacactgtgacatg

SEQ ID NO: 462627 - DNA, 281 bp, Homo sapiens
tcacaacagggcgcccccctctacttggcctgctacactcaacctcttgcaggagggaacatgtgagcaagtgagtgtgggacctggcaagccagtctgggcaccgacacgggcacaaactctgtgcatgtcccacggccagaccagacgtgaatatgtgagtgtgggatctagccggttgctctgggtgctagctggagcaagctccatacgggacccatggcagcrcccaggtgtgggtgcctgcaacgccgaagccccagagggggtgttacagtgct

SEQ ID NO: 462628 - DNA, 421 bp, Homo sapiens
atatattatttagatgtcttgtttgagtccacagaagctgggtgctttcatttaagagtttgtgtctaaatgtaaatttcagtgctgtaaggttactcaaaaggtttccaaaagtaaaagtaaaatttaccctttggggtttgaaaataattgattcttgaaaagctggagcttttgtacaaataataactattaaggccacaaaataagtctttaaatgataactggaactaaattattagctgctattaggcacttttgtgtttaataaaagtaaaaagcaaaatgaaatggctttgggtaagtcctcccagaggatgaaatgtgaaagtaagccggtagataacttcggacattttgctgaaaaaataaagggaaagagagagagwgaatgaataaagatgagaattaagaaaaatta

SEQ ID NO: 462629 - DNA, 612 bp, Homo sapiens
atatacaatagtatacatagttaatataaaaatgttataaattaacccacagcaaacaaagtataataacatttaagatcaagagaaaagggttaggaaaaagggttaatgaatcagttcgtggagagcaacatgcacaaaaacacaatgtcctgccttggccctgtacagcccatcagcatcagcatcttgcaaggaaatgtctttgatgttggcagagccttagcctggggttgccaggtgcttatcacaagtgacagcaagacrttgtctattaaaatgtatgtttttagctgatgaagtcctgctatttttatggccacagaatcctctggtgaggattgatagtggaagaatgtgcttggttatgtccttatctggttggatgcagtctttattgattaggcaaaacatattgtctgtgttggcatggtgcctattgaaatgtaagatggagcctttttctaatacggagttacttgtgtaaggggtgctgttagaaacagaagtatcttgattattaggaaagaagatcacaaaaaaatgtcatggaagtttaacaagattcaatatagaaagtttagaacaccaaaggagaaagccatgaaaaca

SEQ ID NO: 462630 - DNA, 612 bp, Homo sapiens
atatacaatagtatacatagttaatataaaaatgttataaattaacccacagcaaacaaagtataataacatttaagatcaagagaaaagggttaggaaaaagggttaatgaatcagttcgtggagagcaacatgcacaaaaacacaatgtcctgccttggccctgtacagcccatcagcatcagcatcttgcaaggaaatgtctttgatgttggcagagccttagcctggggttgccaggtgcttatcacaagtgacagcaagacattgtctattaaaatgtatgtttttagctgatgaagtcctgctatttttatggccacwgaatcctctggtgaggattgatagtggaagaatgtgcttggttatgtccttatctggttggatgcagtctttattgattaggcaaaacatattgtctgtgttggcatggtgcctattgaaatgtaagatggagcctttttctaatacggagttacttgtgtaaggggtgctgttagaaacagaagtatcttgattattaggaaagaagatcacaaaaaaatgtcatggaagtttaacaagattcaatatagaaagtttagaacaccaaaggagaaagccatgaaaaca

SEQ ID NO: 462631 - DNA, 535 bp, Homo sapiens
ttctctggagaacactgattaatagaggtagaggtatattttaaaaattctgttttttccaaaaagacaagaacgttttatttatttattaaagccaagatgaacagtcagctatagaaaaataaatacatttttaaaactaaaygttcatcaacccatatgaaaacatgtgtactggtagaagtattgtcagagactccgcagggtctcgggatgctggtgagacctcagccccagctggttcccagacccttgacataattgcaagaaagaattcagggataagtcagaatgaagcaaaaggcaagaaatcttattgcaaaacaaaagtatacactgaagagagaaggcaggcatgctcatgagaatgagtcacaccacagagtttgggtttctcattttatgggtgttcctttaattagagggtgaaataatcactcagtattctggaacaatgggggatttcagggatgcccctcattgctgtcctctttctcccttatttgggcttgcccagaagatttatggacatgtc

SEQ ID NO: 462632 - DNA, 446 bp, Homo sapiens
ctactataactatccttcattgctatatttctctcacaccccattcccaattcattagtatattctatttaaaaatacacaaaaatctgactatgtctcactactttttcactaccaccacactggtctattcacggttgcctgaattctaattaytgtcatagtctcaactggtgtttcttctgctgttgctcacttacagattattttcaacacagaagaccgaagcttacgtttttttcaaatggtaaagaaaatgtaaatgaattaacattttcaaagtggtatataccgttaatactatacagaactacattattttgtcttgagtgtattgaaggcacagtggctcatacttttaattccagcgactaaggaggctgaagcaggaggattacttgaggcctggagtttgagagtacatgaaaatggtgttgtatagtgac

SEQ ID NO: 462633 - DNA, 597 bp, Homo sapiens
atgagactccacaactttaaaggagataactgaattatgaacagtaataataaatatagaactaatctagatagtggtgaaacttttcattgtggtcataaaagggaaaaagtataacaaattatgaaataaaaaggaaaaaggaaaaagtcattatcaattgattcttttggtttcaagccataatagcaactctggtcacttaaagaatatacaacatttcttgtaagctatagggaatcagcttcaatgataaggcaagaaacaggaaataacctattctatgatgaaggcacagcactaaaatgagtaaatcctaagatactcaccttgggaaaattctccctccccccaacacacacatrtattttaaaggcatcagcaacataaaaattactagcaaaggcttataaactcaagctattcacttaaaaatcagtaattctgagttgatgttagtaatttctctggtataccacccattccagatctcagattggtcaaggaatcttgcttcttctagggatccaaatttccccctagagaccggagcccttcattaatgagcctccatgagaccccgtgcaatagtcttct

SEQ ID NO: 462634 - DNA, 636 bp, Homo sapiens
ccaaaatttttagcacttcctctctccaccatccagacaatatggtagttaataagaaaaaaaattgaagaaacataaaatataggccataatattattaaaattaagatgactggcaaatgtcagttagtgtaattaaaagcctaatttacactcaatatgaataatatttatcagattatttattcatttagcaaactacattattgaatttgacatgtattatgtaccaggacaatattgtatattataaaacctattcattagttgtctctttaagaacagattattctgttttgaggatcgttctrctaatcaaagtattatgctggagagcagaaagaatgcatatgtcatttgcaaataaatgattagcaattctcaattccccacaatagaaaagtagttaatattatcacatagttattatactatgcaaggaaagagtgactccatctgggacaatcatcagcatctttgcaactatttacacaaattcagtaaaaaaggtagaggacttccaacattttcctttagagagatataatgactggcattatcaccgactgggatatcttttttcaaatgattattgatctggtttggatctgtgtccctatccaaatcttatgttga

SEQ ID NO: 462635 - DNA, 636 bp, Homo sapiens
ccaaaatttttagcacttcctctctccaccatccagacaatatggtagttaataagaaaaaaaattgaagaaacataaaatataggccataatattattaaaattaagatgactggcaaatgtcagttagtgtaattaaaagcctaatttacactcaatatgaataatatttatcagattatttattcatttagcaaactacattattgaatttgacatgtattatgtaccaggacaatattgtatattataaaacctattcattagttgtctctttaagaacagattattctgttttgaggatcgttctgctaatcaaagtattatgctggagagcagaaagaatgcatatgtcatttgcaaataaatgattagcaattctcaattccccacaatagaaaagtagttaatattatcacatagytattatactatgcaaggaaagagtgactccatctgggacaatcatcagcatctttgcaactatttacacaaattcagtaaaaaaggtagaggacttccaacattttcctttagagagatataatgactggcattatcaccgactgggatatcttttttcaaatgattattgatctggtttggatctgtgtccctatccaaatcttatgttga

SEQ ID NO: 462636 - DNA, 580 bp, Homo sapiens
atgttggccagactggtcttgaggtcctgacctcaggtgttccaccctcctctgcctcccaaagtgcagggattacaggcatgagcaactgcgccyggcctatttgtaaaattttaagaagttctgcccaacttaaatgataagaaacagtggatatgaagaatgaaaaatataggaaaggagaaaaccaagttgtaattattttccaataatctgtttgcagtttatgctgctatgtaatattatatagtgatttcacttttgttttttaaagaagacttactgtttcaggacaatctattccaatagctatgatataaaatcttaattattcctttataatgaacagtttgtagtgtttataggcttttttttacatagtccattgatttatctttgttttgtggaaatcaacattatattgcttacgttactgtaactccataggtcttcacactgtctattggtgggttcaattgttattctttttatttctaaaaattgtgttcagtttttacatacatagtactttatttgaaattttaaatcctttcataaaattcaaaataaacatccacaa

SEQ ID NO: 462637 - DNA, 435 bp, Homo sapiens
tggaaaatctgggacctagaactgtgtgtttagcctgagtatacaactaatatgaaggaaaacatccttttttagatatgcggcacttcaggatacrcacttttttataatctttctgaaatatggatgcattcagcaaaacatcaacaaaaattaattaaaaactgattaaaaaagagcatcagtgtgctctggtgatatttagggtctggttgcgattgcttacaactgtagagtaattgagatatcttagtagcagtacaagatacacatttgaagatctacttagaggaaattcaaagatcaaagatgtctgcctatatttagtgaggctcaatctgtggtcaagtgtccatttttcttaagacctgaggtaaaaacatcgtgggagaaaaaaaaaataagcttttgagactttgctttttagtatcttct

SEQ ID NO: 462638 - DNA, 588 bp, Homo sapiens
agtgacccttcgttttattgatataccaagctaaaatagttaaaatcagtagcagtgctgacatttgagcacaggaatgtgtcctttctccagagcttatgcacaatatgtcattacttcattaagaatgacaaggaatctactcttctgcaaatatctttaattatgtttttcacctacgagtgtcaatatctctgtatacccctaactatgcagtgctggtgatctagcatctrcagccctgattacagtcctattgtaaatggagcagaatatgttaaatgtttattgggaacacagcagggattttagctctttgtggatgtgtatgctctagattataaataaatccctgcatagcacaacacagcaacataacaacactcagccctctcagtgaccttaaatgaaaagccccaggcatctctacccagttacttactcattccatttgatagcattctggctgatagaatgaaagaggaaaaagctttatctgtatactccacgaaaatattataaatgaaaagtagagaaaacatgactgtactgggagtgaaataatggtgaatgatccttccactgaaa

SEQ ID NO: 462639 - DNA, 580 bp, Homo sapiens
atactatcgtaaaacctaagattagccttttgagatgtcttttcatgtttttgcatttctgacaaccagatggctccatgtggcctgttgtggcccccacccaggaagtgactcagcacaagagaacagcttcgacatcctatgagggtcatttcaaaaccaactaatcagtgctcccaactcactggccccytgcccaccaaattatccttaaaaactccaggccccaaattctcaaggagactgatttgaataataataaaacttgtgtctcctgtgcagccagctctgagtgaattaaactttatctcttgcaaatcaaaatgtatctgacaagtctcaatcaatttagtaagtttatttttccaagtttgaggatgcactgtgacacagcctcagaagctgctgacgacatatgcccaaggtcatcagggtacagcttgcttttatacattttaaggacacataatacagcaatcagtacatgcaagatttacaacggcagaacaacttgaggtgctggcttccaagtcataggcaaatttgaacatattctgattggcaattggttgaaacagtt

SEQ ID NO: 462640 - DNA, 567 bp, Homo sapiens
acacacacacacacacacacatatccctctgttgatttccaaaatatttactcaaatttaatttcttaaatattataattttgcccatctcattacattttagtgctacttacctggtagagttggcaatcagatctatttgactggctaatccatcccttaatgtgcctctctttggggtagaagagtgatacaacactattttagcagtgggatttaaggctttttcaccaaggctagagactagccttgggagtagtgaaccctagagccagcaaacgagtccctaagagccctggggtaggcctcatgtttttttcttcagtccttgtattattattcagagggaagccagggaatctagtacttgatatacattaagtaagaggatgaagaaaggcagcacagagacagggaagtgaggatagcatcctttccaatgactttgcctyggtgactaaatgatgttggaggcttagtgaagtgtggactctgaggtaccactatatatcctttcattcaacagatatttattgagctctcactatgtgtcaggcactgttctag

SEQ ID NO: 462641 - DNA, 559 bp, Homo sapiens
gctaccatgcctcttggccaagcattaagcagcagaggcatttgctcttagtctgaagcaatcagagtcctttggcctgacaggtgggaccttgcccaaggagtctgaagacatccaggagagaaccctatgctcccacattcaaaagacaaattagtggtacaccctgccagcatttctggctcattcctcataatccctagagatgggctacagaaaacaggaatggcatccatagatatgctgagagaattaataccatgaaaagggggcagttcactcaacaaatatactgatargaaacagaatataagagccaatagagaagttttttgttgagaagtataatcaatatattcagagtatacaaagtatagacaaaaaataaataagacaaaaatcttgggaatcaaaactatgatactcaaaaaaaaggatttcagagaaagaaaacattgagattggaggtaggaaaataatcaaagaaataatacaaaaacatcttagagtagttaacaaaagtaagtgatcagatcaaaagagccacagcataccaagc

SEQ ID NO: 462642 - DNA, 633 bp, Homo sapiens
acattcttggaatgattgagactttataatatgaagtctctcatccaggaggatgtcatgtccctccaatttattcatgtcttgtccttcaataacactcccttttccttcatatggttcttgtgacccttctattaagtttttccttgagagattgacagttctgtagactatgacaagctagcctgggctcaggtctccttcccttgagctgaactctagagaaaccacaaaagtgaaagggatcccaatacaaaaaaaagtagggggaaatacttgggaagaacagaggtgacagaacaccaatgtgatagaaaaaaaggttagggcaaaaggaaaacaggtcctacaactggggaagggactgggaaaccactttctaactgagtcttttattgtctttcccacattgccctgagaggattattattcattctatcaaagtgggttggtgagaaaaactgcatcccagcccagcaccagcaccagcctgagttacatcagggagactstagctggggtgaaatgcttataagaagaagttcacagagtctggccaattactgagcatcctcttctcctcccttcctctcttgcctcacccatataagaatcggtcgcaacagaggagga

SEQ ID NO: 462643 - DNA, 574 bp, Homo sapiens
gccttctttagctctgcagtcaggatcacaaaggaattgtctgactctgggaaaacacaaaaccctttttgttcacatctgtaggatagaaagcagagagaaaaaaggtcatcagttaagcttgtcaggccacaaagatgtattcctcgcaatgtaccaagagattggacttagaaaccacagcctgaactctgccccaggccacaacctctcacccatgctggcccttttccctaacttggctttgcacagtcatatttacaggacaagatctcagccatcagcggaagcaatgcctccctgtctgagggaaagcactgggaagctgatgaaaaccaggaaacatggaaaactccatgtttagagaccaggaaactccgtgttccctccctgctatyggtgtgcctggaatttggatcattctcttgaaaaaaagtatcagtggctgagattctgggtttgcacatctgagatccctctgtttcaagtctgccccacctcgacctcatatgtgcagcagtcaggatgtctcagctggtaaatgattttccaaaattgcccccttggagccatg

SEQ ID NO: 462644 - DNA, 454 bp, Homo sapiens
ttgatgcaggacttcttctggcagggttctgatataaagttctatagaagaggggaaaaaaggatatcacccagtttatgtgcttaagactaattataaatagaaaccaaacacatacagtgaagtacaaatagacaaaaatttattactctacctgggtratgtttcatcaaacgctccaaaagtgattcctgcgttactacaatctgagctgtattcatatcagatatagcacagcaaagaacttcacccaaaggtacgaactgagattgagttattggattcatttgcactggaaagacatcacctaaattggagatttaaaaaaaagggggagggggttgataaatttgatatagtataaaatgtttggaattagtgaaacaaaaataaagactaataggtagaattgcaattctttcatcagtctttactcagaatctgttaacatgac

SEQ ID NO: 462645 - DNA, 554 bp, Homo sapiens
catgctgctgataaaaacatatctgagactgggaaatttacaaaagaaagtggtttaatggacttacaattccatatggctggggaagcctcacaatcatagtrgaaggtgaaaggcacatctcacatggtggcagacaggggaagagagcttgcgcagggaaactccccctttttaaaatcatcagatctcatgagatccactcaccaccacaagaacagcacaggaaagacgcacccccatgatccaaccacttcccaccacgtccctgccatgacacgtgggaattgtgggagttacaattcaagatgagatttgggtagggacacagccaaaccacatcaatggaatactgtttggccattaaaaagaatgaaataatgccatttccagcaacatagataaaactggaggtcattatgttacacgaagtaagccaggcacagggagacaaatattgcatgttctcactcatatgtggtagctaaaattgttgctcaaatggaggtagagagtaggatggtagaaactagaagctgggaaggatgtgcata

SEQ ID NO: 462646 - DNA, 583 bp, Homo sapiens
gagtgtcaacatcatgttagttttacatacacgtaaaaggctaggtataatttaagggatgttggaaagcccttgtggccctatttcctcaccacttataactttcttattcaagtatcatattattgaaattccactattagggatttytttcttagggttagactctctgctctcttttaaaatggaaacagccctgcaaagagtaacacgttgtcattaagatttcaatatgaaggtcttcattagttcttttcattccctcagagcagaggttctcccaagagtatagagtgcctgagcgagaaggggaaaaggtactctggaagaagaaagaagagggagattcttgccaagaagcctctgcctgcttctggctttgagtttgagccagcacccaactccagacatttgaattactaaccgattagatgcctgcaccttctattgaagagggtgtagactaagagatgtgttttctttctgcacaaaggtttcacttgaaaataaatcactatccattgtaagactccaaatccatacattggcctagtctaattctctctctaaatcaggtcttaat

SEQ ID NO: 462647 - DNA, 583 bp, Homo sapiens
gagtgtcaacatcatgttagttttacatacacgtaaaaggctaggtataatttaagggatgttggaaagcccttgtggccctatttcctcaccacttataactttcttattcaagtatcatattattgaaattccactattagggatttctttyttagggttagactctctgctctcttttaaaatggaaacagccctgcaaagagtaacacgttgtcattaagatttcaatatgaaggtcttcattagttcttttcattccctcagagcagaggttctcccaagagtatagagtgcctgagcgagaaggggaaaaggtactctggaagaagaaagaagagggagattcttgccaagaagcctctgcctgcttctggctttgagtttgagccagcacccaactccagacatttgaattactaaccgattagatgcctgcaccttctattgaagagggtgtagactaagagatgtgttttctttctgcacaaaggtttcacttgaaaataaatcactatccattgtaagactccaaatccatacattggcctagtctaattctctctctaaatcaggtcttaat

SEQ ID NO: 462648 - DNA, 553 bp, Homo sapiens
tggtgccttcatgttcatttgcagacatgtgcagagtggcaaaaactttgagtagtctgatataaaccttctcagctgaggtggaacaaggtgatgttctaccttcttgtttgcggctctcatcctgtaaacaagtattctttttttggtgtattgattttcatgtttttccaatttttgtactttttgttggtaaatctatgttaaggtaaacatgaatttaaactgatgtttccaactctattctagcctctccacttgctcatctgtgaccatccatttcaacagcaagaaacttggctcttaccatctgctattcatttacttaattgttcaattctagtatactgtacatgtacagcagtatcagaattgttaacccataccccatgggaaacaactaatagagyatggtgctcctgtgcagttccttttgccttaactcttacagtccccactcacctccaaagttacttatctcagcacccttttccccttcacagctttcactaatactcttgaacatccttaactgttccatcactccctattc

SEQ ID NO: 462649 - DNA, 605 bp, Homo sapiens
tgtacaacatggttgtctgtctctcagatttgtctcctagccaagaccaccatggrctcttgactcagtgctgtgaataggaggcatgcacataaaacctaagagcactggttcatgcaaaactccataagacacctaggcaccagtattgctgcttaagtgtggctctaacagaatcaaacctgaataacaaagtcagtcatttagttaccaatatgggttgtacacccatggtgttcacagtccagtgcttggttttctgctgagtaagaaacatgagtttttatcagcaagggaatacagtataggggaagaacatagtctttatttaatggtgtcgaggaggaagagaagaaaagtacagcattagacagaagcatgcatggccagaaagcatctaaatgtttatagactgcatatagtcctgttatcagagattcatcttccatatcttcccaatgggactattaatacctaccttgcagggttgttgggtagattaaataaaaaaatatatataaatggatataaaatgtcttgttcagttcctgttaacccaagagcactgataaatggaagatattattcttattggttggagtaat

SEQ ID NO: 462650 - DNA, 593 bp, Homo sapiens
aaatgatattttggaggggccaggggcagaatgatatggcttggatttttgtccccacccaaatcccgtggttaattgtaatttccaatgttagaggtggggcctggttggaggtaattggatcatggaggcagtttctaatggtttagcaccatctctctagtgctatcatgagatatgsttgtttaaaaggatgtagcacctcccctcttgctctcttcctgctctagccatgtaagatgtgcctgcctcctttgccttctgccatgattgtaagtttcctgaggcctctgcagacatgcttcctgtacagcctgtggaagcatgagccaattaaaccacttttctttataaattaccaagtttcgtttatttctttatagcagtgcatgaacaaactaatatactccttaaagttggttttggtgactctcctctgccgtcttgtagcacccttgacttacccgtatttcagcactcatcataaattaattataattgcctgcttagttaattgcctctctagcttgattgtgaactccttgaaagcaaggactctttttttttttttttttcttatcattatattctca

SEQ ID NO: 462651 - DNA, 583 bp, Homo sapiens
agtattttaagtgtgttccaaaactacaccaagatcgccctcagattctcttctctattcctgagggtggtgcagatgaagaagagagtacttcctttggagtgatcagggaaggcttcacagggaagtggaatttgaggtagatttagaaaaacagatacgacttttgctaggtgattgtggagaaagcatttttaaaccccaggaacagtatgagcaaagacatagaggtaaggttgattgtacattgaatgtttggggtagagctaatagtttagtgtcattaggasagaggattgatataggcatgtaaagggagacaaatatagaaagctaggtaggggccctgaggtaggatactttgaatggcatgctaaagggtatggatttgatttcatgggctctgaggagtatttttcttatatttatcatgcattaaagacttattaatcatgtaaaaggattggactatcttgaaaacacaatatgttttttttttcctgagaatatatcttagaaatggtattataaataagggactaaaaatgatttactttacaaacgtgtatttttgcagacaaca

SEQ ID NO: 462652 - DNA, 667 bp, Homo sapiens
atgggaattgtttgttttgttcagctgataggtaaaaacccagtgctgtgtataccataagaaggtagaaacctgcttagaacacaacccaaggataggacagaagttacacagagagaaacagactaagctctaatgaaattacttgaggtcctgagcatagctatgcctagagcaaactccaatactgggctttgtaatgatatgactttgaggaagggaggtgtgcaaaagatttcctatagcttaacaccctttgaattagtttgcattcagttgaagagtaggaaatgctaagtgttctaaggagttaatgatgagcaccttaacctaaatgcagtgcaaaatataaggagataatgatagcaccaagtgaacaaagaataacattttttctctaagaaagaacctatatttataaaatgttgtccccaccaacacctggcatgtgacatgatattctgcttttataacacccctaccaagaataagagcctctttattcatacttctatgagtcatcatcaccaaactgttagtgtttgtgctgataaaaaccctcctaggaaccctgaatgctttgtttgttttgtttcagacagatttyccccccctgcaatttctcttattgacatgccagcagtgttagagacagatgggcgtgatt

SEQ ID NO: 462653 - DNA, 476 bp, Homo sapiens
tcagaaacatacctgtcaggagtggttagwcccttaagaaaaactgcatgaaaaccaagaaccacaggaatggctaggaacaaaacaaggactacattcaaaatttagctcagcttagataccacagttaatgaattcccaaatggaacgtgttggtgggtggggggcagacaccatccagtctctaatgacattcaggtatctgcaaatgctttccttgtgttcccataaaagcaaacagggaagtgaatctgaaaaccaaaataaggctagtaaattcttgaaaagagacagttctttttccttggagacaaaccaaattatgcatttgcttctctcaccaacaacatactctggctcaaacatttttaaaagaaggctgctgaacatctgctgagcaattaatgggatgcaacagcatgttgtaatggtccctgggaaggtattagcaatcctgcttatgagacatgaaatgt

SEQ ID NO: 462654 - DNA, 597 bp, Homo sapiens
tgtttctaaagctatcagatttagacaaggtgtttgaaattaagtttggtgtggaaataagaggaagtacattaacctagctaattctttttcaattttatgctagaagaatayaaattatttttatcaaaattagtgttcatagtactggttctttgatgtcaatatcagctcagctgccctcccaaagcacaaagtcagtgcaggggctcagaggtttgtatttcccactcaattatctccaagaaagatatataaagacatatttgcacgagtctaagatatatttgcataagtctatatctctaaggaagatatataaatatatatttgcatgagtctaagacaccagatcaagggaaagaaactgagggccatctgcttttcatattttattctagtgggcaataggctttagaatggcagctaatttctcattgtagtccacagggcacacttgctattaaatgaaaatggtaaactggtatatagaaaatattcagtaaatcataggtaatgtcttatctaaacttcaaatcagacctattgaagaaggtgttattattcttattttgtagataatggaatggagactca

SEQ ID NO: 462655 - DNA, 587 bp, Homo sapiens
gagaagtgcttcttgtttgtcaaatccctttcagccaaataaccacttaactaatctcaaattgaatatcttatttaagattttgaattatcctttctctccagagagctgctgttgaatattgtaatagcattatccagagaaatatttcttatcctcttgactgaaggaaagggggaaaaaacctgtttcgttatatcactgagtagattgaaatctgggaaaatgaacaagctgacatttttaagccaaagascattagtaggaggcagaagtggctttcatcactgcatacaaatcctagtcctgagctcaccgaaaagaaaagagaagtttggtcttttgctacctagactaatttgatgattcctgctgagagtgactgggatgacagcatatcatagggaaaagagaaacagacctgtctccttcacttactacctttgtgatcttcgataatttacttaaatactttgaactgcagttcaaatggcatcttagacattcctgaaatagtacctgactttttgccattaaggcctattttaattgaaattatatcaaaaaaacatattgcaaaattaact

SEQ ID NO: 462656 - DNA, 578 bp, Homo sapiens
taagtaacaaaggagattgagtccttcgaaggggcctcagggaacttacagatcaggtgagaatatyagatatagacatagtaagaagagaaaatgtctatagaatcatttaactgggtacagtgttattttcaggcctcttcctgctgtaaataatagactaccaatgcaaactgacttaggcctaaagggtttttatgagcacacctgcatccaggattttgcaaagtatcgtctggaaagtaactccacccctcggttctgtttcactctttgtctctagaatggcttctagaaacttagttctttcagcttagtaactgcagcagaagaagggtatctttctcagtaattcccttcctaaatgggctgtccattttcctacctgtcctgctagtcacttgtgctaaaatagaaaggactttctctaaaccctagtgataaataacactagtaagcctggcttggattatgtgcagttgctaacccatctctgtgaccagcaggaagaaattatctgacaagacctaggttgtctgtctagctcagtcttagggtgggtcagcaccatcccaacc

SEQ ID NO: 462657 - DNA, 571 bp, Homo sapiens
tgtatcatattactgcatttaggctaaatatagtatctttattctaagaggtcataggcccatcaaaaagttatattacagaagggaataatggacaaatagtcatctctgtcaaatatataaatcctgatataagagaaaatattttttaagcaatctatgaaacatttactaaaactgagtacatatttatttaaaatactgatagattttccaaaatagaaataaaaatggtattctctgaatgatattcaatacaatgaaaacattatatcaaatgatagagtatcaaataatagaacatctcttctaactttaaaagtaaatcaaaattttaattgcagtaatgaaaacacaatttcactgaccagctaaagcaaagcttattgaaaatagagtagctttaaatacttatattgttgaattaataataagaaatacyttttaaaatgggaaaatttaaaacaaggagatagctggagtggctcattaatatcaggtaaagtagacttaaaacagaacttaaattattgatttaagaaagctttttgctgattgatttgacaacttt

SEQ ID NO: 462658 - DNA, 594 bp, Homo sapiens
caatcaacaagggactgaatacaacaaaagactgacctccctgctagcaagaggcaactctgccagctgatattcttcacgcttgtactgcaacatcatctctatcctgccagtcctcyctacagattttggaattgccagtctccttaatcatgtaagctaattccttaaaataaacctctttcgaatatacatcctgttggttctgtttctctgaagaatacaaaactaacatacaaccttaaaggccaaaaaaactatatgtataaaacaaaaaggataaatatcctaaatatataaaatgttttgcaaattaataggcaaaaataaccccaaatgctacaggaaaatgaatagaaaaatactgggggaaaaagaaaaatacatctaaaaaaagcaacggataaaaataattagaagtgctctagttttcaaagacttattgtttaaaaaagcaaaacaaaagattggcaaagactgaaaaaagtgggaacacccagtattgtttaaaagggaaatcagtattcacaacctattgcttaaaatataaattgctatgctattttctaggaacatactagaaatttagttata

SEQ ID NO: 462659 - DNA, 529 bp, Homo sapiens
atgtagatcattgtgtctctgcatgcccaatctgtctcttcactatatagccagactgtccctcctggcatctacaagcccatgcctccctattcaatcagaaggacatacaatgaggggaaagaaagaatttttaaaaagacaaaattttttcacaattcagcacagctctaatctgacatgacaaggccaagtccatcttttcacactgacaattacttaaagggcatcgatgccatggcaccattaaagtaatagcaaagatgrattgtacgacattgtggatcaatgtgctaagtgttgttcaacttgttcaatgaaataaagcattgaatcattaaccttaccaatgtcaatgtatagtcactatcaaattccactaaatgaacatccacgaccctcattaaaaagtgcactttgaagcaactaatatattaataccttattggccaataagaaaaggagaagctctccagggcagggtaaagaatctggacagaagctaagaacatttgatggagagcggaag

SEQ ID NO: 462660 - DNA, 561 bp, Homo sapiens
ctgggtcttcaagcgtctgtggaggtgataggagccactgaagaaaaagaagggcaaggagaagcaggaatctgatctctttccctactctttccagagcagctctacttgcatatattgtgtattaggcttctgcataacagctcattggaaaaataaaccccacwgctacacaagacaaaacaaacaagcaaacaaataaatttggaacaaaaactctgaaacttgtaatcccccaaattcaataatatttaacatcaaaatgtactagctgaaaagtgataaatgcagtccatcatttagtctttgtatctaccgactgtcaatcagactgatttttcccttctaacaaggcttctgattatcttggcaccatgtagaaagaacttcattgtgtctccaccatcagaacatgcattaatgcctcatggtctgatgataagctccccagagtagggtgagaacatttgaaagggagccaagcatagtgggtgaggaagggaagggttctccagaggaggggtaatggtggctaaagaggcagaggtgccaatgcagagt

SEQ ID NO: 462661 - DNA, 618 bp, Homo sapiens
aaattctcattatttctttaagatatatttttgggagtagaattgtgacatttaaaaagtcaaaatgtatgactttttaaattaaaaaaaaattttaaacataatacttcccacctccctccccacttggccactagcctctctagctccatgattacattatatatttttgcatcttcttagtgcagagtcttgtgccttttatttagaaagcccttagcaaatgtttgatgatggcgataacaataaagaaaaagaaatataagataaaagggtaggttgtgaggaggaaagaattgcatcttrcagttgaaagtggcagataaaatagtccttaaatgcaggttattttacgtcagacaacttgagttcatagtactgcacttgccttctttttgaccttggtcaaattacagtgctaataattcctaactcagaggtttgcagaaagcactaaatgagaaaagatgtataaagcttatagcacatgcctggcacatacaagcattgaataaacatggctgttactattattactattattagctgatttctggagtccaagggaaaggcgaccatttctttaagatgtttataatgtatgagagttatatagga

SEQ ID NO: 462662 - DNA, 618 bp, Homo sapiens
aaattctcattatttctttaagatatatttttgggagtagaattgtgacatttaaaaagtcaaaatgtatgactttttaaattaaaaaaaaattttaaacataatacttcccacctccctccccacttggccactagcctctctagctccatgattacattatatatttttgcatcttcttagtgcagagtcttgtgccttttatttagaaagcccttagcaaatgtttgatgatggcgataacaataaagaaaaagaaatataagataaaagggtaggttgtgaggaggaaagaattgcatcttacagttgaaagtggcagataaaatagtccttaaatgcaggttattttacgtcagacaacttgagttcatagtactgcacttgccytctttttgaccttggtcaaattacagtgctaataattcctaactcagaggtttgcagaaagcactaaatgagaaaagatgtataaagcttatagcacatgcctggcacatacaagcattgaataaacatggctgttactattattactattattagctgatttctggagtccaagggaaaggcgaccatttctttaagatgtttataatgtatgagagttatatagga

SEQ ID NO: 462663 - DNA, 589 bp, Homo sapiens
tcagctgtggttttttgtggttgttgctgctgttagaaaaaacgagcagtgatctcaaaggtggaagtttccccatagtgatagcaattgtgtgtccactcgctgtcccatgggagaatctgagcaaggctgagaatactgctggggctggcatagctcccatcagtgaagatgtccctgtgctatcaagagcaatcagggtggagggaaagacataaatcctactgtttcttgtaggcagagtggggaattggggcagggggagggaaaaggaggttgcactctaaatgatttttaattattttctgactcactacatcattaggaagacaggaaaactcttaagacttaagacacagtgatctaatgtcattgactttcacatatattttatgagttatgaaatatgatgaagctgggagagaaaagcttttcaaatatgataagactagagaatatccaacccacttataaaaaggatcaaattgtggactcagggtttgcaaaagccaagtttcaagatacycacaggtgggtttggccttaaagcttcctaccccaaacctactatgagggtgttctaatcccc

SEQ ID NO: 462664 - DNA, 624 bp, Homo sapiens
gagttattagtaatggcatgcaagagtgtatgctgtgttccagctttggacttagaataaactaggcatagrtgtaaagtactggaataagaggggtcaaatatcctcatgagatgcatatggtggaaggaatagcaacactgtctattagaattggtgttggaagtctccctctctagagtcggttcagacataggcttgatgcaagcacaaagaggggatgctagaaagaaagaacaacttcaggcatcacaggtttcatgtcatttacattctttggctattcttgtccttcccaaccataccattatcaaagacctaggaatcttttaataccattaatgtcttaataaaaaaatctttcaaataataataatgccaaaacaaaactgtcatttatttgagcaccttttattccccaaaatcaatgagtgatttatttttatttcttatattctgacgacaactctaacagacaggcattctgctcttattttactgatagagaatctaaggaatacaaagcttaagtaactttcccagtgtcacttagcaagtagtaaaaccagaattggaaccagctctgtttgaccccagagacaatgctgttaaccaggatactac

SEQ ID NO: 462665 - DNA, 459 bp, Homo sapiens
gagtcaatgcctcagggactcagcaaactttcgctaaagtaacagttcattaaaaggttattataatgcaataaatgttgattatttggagtgatcatagaaatttttgaagtagataggagagtggtatgaaaagaaggcttactatgatgtgtatagcctacattgcttacagaagactggttatggctaataaaaaatggaaaaataaagacwcatatccagttagaagaaaaattaacaataatagccaccaattattgaaaaatcactatgtgccaatcacagcgtcaatcactctataaaccccatctgctttagcacaaaaattctgtgccctaggcaatatttttaattcccttttcaatcaaggaaactaagcttaggttaaattgtttgccaaaatcacataggtcatatgttatggtgccagaataacaaactcagttttaaacatgt

SEQ ID NO: 462666 - DNA, 587 bp, Homo sapiens
tttcaatttgggatgatgaaaaagtcctggagtggtaatgattgcacaataatgtaaatgtacttaggaccaatgaactgtatrcttaaaaatggttaaaatgataaactttacgttatgtatattttaacacaactaaaaagaaagagtagttggccaagcataaaattagaagttgaatacaggttctctgagtgttgtgagcaagtgggagagacccaccttttttcactcaaaggataatccaactaatcatttaaaaaagaccagcattaggaaaacaagctacaggtatgtggttgcagatttttatgcaatgacccactttattaaaacagaggctgggactaacaaaatgattttaagaatttagtagcagattcattaatttatccccccaagaaatgtcaccttccatatggcacataaccagctctggtcccagcatgacctcagagtaaagggcactgtataattgggattaagaaattgaatagcaagactaaatacacggacaactttcttcacagtgggagtcctttgactctggcactgggtacctcagggagcatgcaatattgttttct

SEQ ID NO: 462667 - DNA, 573 bp, Homo sapiens
cccagagaagcaaatgcgtaaaaccaacgaggttttttgcagctctcaaagcaagcctattttggctcccttctcttcttccttccattttctcaccctgtgtttcagagcacttagtaccttcttattttctttcctctttctaccaaacccagccaagatttgatctcgctgagrtagtgagatcgctgtaacgtttctctgtggccacagacagaaattaaataaatccctcaggtgagtttcagttgtccgtaagtgtctcctcagtagcccctgatacaatatgcccttgcctgatgaggatgaagtacaaagtaggaggtgttttattttaaaactcatattatccttcccacaacctcctaagtatactatatttgatttctcatttttaaaatggtgagactggggtgaaaaaaatgaagtaatgtgtgtaggtgacacaattggcatgacagatttgaggcttgaaatcaccagtccggctgtagatctccgtgcttagctacctgtgacactgcttctcagggctgtggtcacatgtatccagagcacaacctcccaaaatca

SEQ ID NO: 462668 - DNA, 651 bp, Homo sapiens
tcccatctccaataaaacaaacaacaggtgtctcttcttctgagtggattatgaacccatttcaccctaaagggactgatatcactaaagatgtatcagcagagaatggatgaccactcatgtaggatgctgagagagggaaaatcatacattttttttctgactggctttgaccttccaagctgtaaggaacgatctattcctacagacccagcaccattagtttctgaaataaagggccctctccccatataaattggaacccactccccaaataaattgtgtcaattgtgtctagaacaaacttcactgccaggtgccccctggacactgggctgcaayccccttactgtccccaactatgcatgggcagcatctctgtgtccttctagtctggtccttgcttcttcattccatttccaacatccccttggaagctctaaccctagcccaactgaccagaaacttccccttagtttacccttgccagccctttccctggagctagacctggctttacagcctcaacacaaacttgaacagatcttcttgaaaacaacctacatatctacaaatacaagaatcattgcctctacaagaaggccctctacagtgccatgttctcatggccttggattttactccagtcta

SEQ ID NO: 462669 - DNA, 572 bp, Homo sapiens
ggggagcttttgttctcttgtatcccaaatgcaacactagaggttagggaagaggtgttaaatagactcttaacttgttgattgatttagatttaagaccaggcagtcaaagatcttgagtcamcttccctattttatcacagatcttttggggggaagatcttatgtaagttactgagaccagaatgatgaagttaagatattggctccctacaggatgtgccattctataaaaagggactattcacagagcagacattgacattttgggcctggctggtcagcatttaatggaactcttgtaggctgctgcaaaggaggctgtgactgtcagtctgtttactgtggaatctggctgatcttctctaacaagacttactgaaacattcgttgattcttgtgttgcttcaatgttctaatagaaaaactgtcctgacttggtaagctcagggagaaaaaggctaactctatgaaggataaagccacttgccctacccatgacttgtttttgtatggcccgtaaatgaaaaatgatttctacatttttaaaagattgtagaaagcaaaacaaa

SEQ ID NO: 462670 - DNA, 561 bp, Homo sapiens
taatagtcaattttaatatagtcaattatcttttaaagaagtttcttaaagaaagaaaatcttacatatttatccatttacttatccattccattgtgtagattgatrttttggtcagatatcattttatttttgtctgagtaatatcctgtagcatttcttatgagtttgctggtaatgaattctgtccatgttgttgtctgtgaaaatctctatttcacctttatttttgaaagatttttttttctggacttagaatcgtggactggtggtttgtttgttttttaatttttgtatgttaaagatgttgctccactctcttgcttgccttgttaatgataagacatttgttgtcatctttctttccttccctatatataattttttcccctgtggatacttttaagattttttttttaacattggttttaaaaaactttaattataatgtgctttggtgtaattttcttcatgtattttgtgcttggggtttgctgagcttcttagatctgtgggttcatagtgtttttttcagatttggaacttttttgccattatttc

SEQ ID NO: 462671 - DNA, 466 bp, Homo sapiens
tttgaggtcagagtctggcctgtagaattctagcccaattttacattaacrtttttaagacttccaggcaaatgaatactcatgtgcacgcaggggttagatatgcacacgagtgctccagaaatgaaggtaaagtaacgtggaaggattgacgtttgtaacttcaaagtcaagggaattcaaagctaagccccaaagagctgtggtgagtcaccaaggctgcacaggattaagatacataagatagcccctcacccaggaataaaaaacagcactttcagccgaggcaacctgggaaaaatttgttctggaacaagatcatcccagatgcttctccaagcctcccaacaagtaagagatgtgcccactgaagcaagactttctctggaagtagcaggttgctggacgcggggagttgctaatggagactattttgcggcctcataattcaggatattggcaagag

SEQ ID NO: 462672 - DNA, 575 bp, Homo sapiens
gtgccacagtaaactcacagaggtatctcaggatatttttaagtttctaaggaaatacagtgatatctgacatctatcagacactgtgcaaaatgatagctagaagtagtccacaattctaacattagatcactcagcatttctttcggggagatcatggttttgcaaagctagattattggttgttgtgagaaaaagacaagcactgtgcaaaaatcaaggtgaaacaggaaatgggatagtgtttttctaattccacagtttgagacatcgtgcagtgcccaatagcacatctatcccattagcaagtaattgttgttattcaagaaggaaactaaatgctatttctctttcaatttatgtgtattattattatttttaaatggctagagtgttgttaagacataaatacccacggagttttttggacctaactacttaataaatagaactgttaggtatttcttttggcctataggactgtgaaaacactttcctaaaacattaaggatgccatgaatggaaaaggtttgggaamctctgctagaaagtaccctgaagatgctttcacattg

SEQ ID NO: 462673 - DNA, 526 bp, Homo sapiens
ttcaccccacagttggcttctgtctctgtgagcaaactgctggtttaacatttttaacatgctttgggatccagggatcgagaaagtaagattgtcattcttctcaccttcttgcattctgcatacctgcttttgatacttttgatatgactgagggggtggaaggagggaaggtaatgacagagaaaatactaagtgccgtaattcaccaaacctattattttccaattttacgcttctctttcacactactcccaataatttcacataatctcccaatattattcatatgtagcaattgttaaaagctcccataccttagcatctccacctctcctctaacgtttgtcatggtaatgtcacatacctctcctttcagacgtagttactattatcttctcaccttcccccacctgatcccatcctgaataacatgtctcttgatgaggttatagaaaccacatctgtttttctcttacaagtagatctcaatagcmctcattaagacaggcctttgcccatccta

SEQ ID NO: 462674 - DNA, 567 bp, Homo sapiens
acaggaaaaggaagacagaaagaagagaagggaggaaggaagaaaaaatgaaggaagaaacatatggactaatggaagaaaaatgcaggaacaggtaagtagtggtgacctctgagcagttctgggtaattgtttttcctttttctttaggattttctatgtcatcaaattttctaaaggaatcctgcattgcttataaatagaaycagaaaacacaaactgtattaaaactaaaattgcttatcaaaatgtcgtattttcaagcagtattttcaaaaatataacatcttagagggaaagagtaggcaagtgatagggtggagaaactggttgataactgggaaaataaaatttttatattcaggaaattccctgctaatatagaagtggtagctattttttagtgggtaatatcccattcctgggaccaggtagaagaaaatttttggtgtccactttgagcatgttgccactcctattccttgaatgacaacgttgccacatccacctcctctaccacactatctccactatcaccactagcttcgccaccacctccaatgcctt

SEQ ID NO: 462675 - DNA, 567 bp, Homo sapiens
acaggaaaaggaagacagaaagaagagaagggaggaaggaagaaaaaatgaaggaagaaacatatggactaatggaagaaaaatgcaggaacaggtaagtagtggtgacctctgagcagttctgggtaattgtttttcctttttctttaggattttctatgtcatcaaattttctaaaggaatcctgcattgcttataaatagaaccagaaaacacaaactgtattaaaactaaaattgcttatcaaaatgtcgtattttcaagcagtattttcaaaaatataacatcttagagggaaagagtaggcaagtgatagggtggagaaactggttgataactgggaaaataaaatttttatattcaggaaattccctgctaatatagaagtggtagctattttttagtgggtaatatcccattcctgggaccaggtagaagaaaatttttggtgtccactttgagcatgttgccactcctattccttgaatgacaacgttgccayatccacctcctctaccacactatctccactatcaccactagcttcgccaccacctccaatgcctt

SEQ ID NO: 462676 - DNA, 584 bp, Homo sapiens
atatgtaaatgcatttaaaaagcagttagccccagtgacaaacttaccaatacagtataagagaaagccctcagatggtaaccactgaggtatctgccagaaagaaaatctgtttgtaagctggagtgcttttcagagagtcgaatcattcaaggaatcagaaaattgcctaggtctgggagccatgaatgagagaccatggaaatccaagaaaaaaacagaagaagcaaatgtgatttttttttcattgtcccctctaacagmtctcaaggctggttatacagcagctggatgggtaggtctcacatgcttaaagagatcttgtgctttcatctctctggctcaaactgaccacctagtctatgagtcactgggatggagagaaacttagcttgctgccctctttggtggaggaagccctgctcctccgcccagaagcagggagactttgagaacgtgtgtgtgtgtgtgtgtgtgtgtgtgtgtgtgtgtgtgtgtgtgattacatttttactccttctcctcagggataaagaggtgacttagggtcctctctcagttctagtataggcagcatgatgggg

SEQ ID NO: 462677 - DNA, 592 bp, Homo sapiens
cactaccagcagcagcggaaatgaacacatcatattaattaagtaaacaagaggacaagggatagtggctgaggctgggaggttcacactgcagattctatggcctccaagaacagagccagtcggtaactatgaaacaagggggaacttatctgaaaatgtggagttagaagcactagaggaagttggagaagacaccagttacaagacaccatagggaatttcccttttgtactcaggtagagattttaggggactgaatcttcccattattcttcaaatggtaagagaaygattaaataactgttgtttccttatgtacaaagatacatgacctactgataggaccgtcagggtcctgtaaagagacattttctttggcactgaaggaaactgttctactttcctacaagagcaacatggtattccagtgatattcaattttttatttcccctacccctgactaaagaaaccattgtacccagagatctccacttttctttctttgtgtgagatatccatttttgaggatagtttgtgaactcaagtcattttgatacctggaagttgtgcttttttattttgcttgag

SEQ ID NO: 462678 - DNA, 505 bp, Homo sapiens
cacatttgtaatcttatttagatactccttggtatactgatattacctttcattgtttcatggatggttgccttgcatcctctaccagccagaaaattcccttagggtaagaattgtacctcgtacctccctattgcctactgggttcttacacagaataggaaataattaatcaggacttgttgatggaatatggatattgaaaacagaaatcggggtctcccttctgtgtgccagctggctacaatacaagctgggtgaaaagtaatcctgcttccaccctcactctgttcccatcttgagcagcaytgctgctttgggtcctgggggagcccatgctggagcactgccccccatgcataccagccttcaggagacttttgcacagctccagagaatactggattaaaaaataataataataaaaaataagacaagccatgtcaggggatataggtctagctacaaccagccatgcttcctgccccatcctccagcgagctgg

SEQ ID NO: 462679 - DNA, 542 bp, Homo sapiens
gaagcaaggccaaaggaagctgcacatgtcttggatgagctaaggacctgctgctaatccttgccagggtctctggcacccaggaaagagctttgggagaatacgggaacagggacaggttggttgttgcacccacagtgagataacacagaggctcttaatgcagagaggccaaagcctttcctaaatgcctttgcagacggatttgatcaaacagagtctagctggagctgtaataaccctgaccctctacacccctggaaggatttygttccaggcaatgtaggctgcccaaacacacagagcgtgagttatgcattctacaaaattagttcataaatcctgaaatgggcttttgaaaaaaaagaaaaacaaagcaaatcaagatgaataaatattaatgaatcacctcctctctgtggcaagaggaacatgaggcagagctaataactgtcaacaaataacatcgacattgaatatttcatggagctgtgggggtggacctcagagatggggtcagtcacccacatgtgcagtgggca

SEQ ID NO: 462680 - DNA, 527 bp, Homo sapiens
tgcacactcagctgctcattccacagttgctggtctggttcagggttacattagcctaagcatgcttggtattgacttagttgcatgctattgcgtctccagctccttttgtcagcggatgatttgtcccaagagagtcacaagagagtgagaactgcccaccagctttgaaattaaaaaaaaagaagctatttctttggaggtaaataaaatgacagggactaagaagccacagacctaggttctagcccagaatctctgacctcttccctcatggcagaatttcttcgtaaactgctttcccttctggcaaagcagtgttagcaccgttatgtaaacagcamccagccagagtgcccagggtaccatggaaagagcagagcctcaggaggtacacaggattggtcttattctggcaccctgacacttattggatgtgtgaccaagagcaaatcagtgttaccgtctctgagctttctcagttgtgcaatgacgaggtaaaagtacttacctttgagggttgtgag

SEQ ID NO: 462681 - DNA, 567 bp, Homo sapiens
cgaacaataagaacaagatggtttgcytacaaaattacaatttttaatccaatcaaggagccaaacactctcccaaaaaacataatgaaacaaaattcaaaaaaatcacatggccctcctaggagagaagagacacatgatgatttttatcactatagaatggactctctcttggttctcatttcttcagactcaaactggaactacatatgggctctcctgagtctccagtttgctggctgcaaatctcgggacttctcagcctccatgattgcacgagtcagttaattgactcatatatatatacgagtctgtttgcatgattatataaatatatatatattctattggttctgtttgcatggttacgtgagttatttatatatttttaaataaatattatttatatattatatttatatgttatttaaatatataagtatttaaatattaaacatagatataatgtatatataatcatgcaaatggaacccatagaacatatatatatatatatatatcctatatagtcaggagaatcctggctactgcagattttggtaccaa

SEQ ID NO: 462682 - DNA, 567 bp, Homo sapiens
cgaacaataagaacaagatggtttgcctacaaaattacaatttttaatccaatcaaggagccaaacactctcccaaaaaacataatgaaacaaaattcaaaaaaatcacatggccctcytaggagagaagagacacatgatgatttttatcactatagaatggactctctcttggttctcatttcttcagactcaaactggaactacatatgggctctcctgagtctccagtttgctggctgcaaatctcgggacttctcagcctccatgattgcacgagtcagttaattgactcatatatatatacgagtctgtttgcatgattatataaatatatatatattctattggttctgtttgcatggttacgtgagttatttatatatttttaaataaatattatttatatattatatttatatgttatttaaatatataagtatttaaatattaaacatagatataatgtatatataatcatgcaaatggaacccatagaacatatatatatatatatatatcctatatagtcaggagaatcctggctactgcagattttggtaccaa

SEQ ID NO: 462683 - DNA, 567 bp, Homo sapiens
cgaacaataagaacaagatggtttgcctacaaaattacaatttttaatccaatcaaggagccaaacactctcccaaaaaacataatgaaacaaaattcaaaaaaatcacatggccctcctaggagagaagagacacatgatgatttttatcactatagaatggactctctcttggttctcatttcttcagactcaaactggaactacatatgggctctcytgagtctccagtttgctggctgcaaatctcgggacttctcagcctccatgattgcacgagtcagttaattgactcatatatatatacgagtctgtttgcatgattatataaatatatatatattctattggttctgtttgcatggttacgtgagttatttatatatttttaaataaatattatttatatattatatttatatgttatttaaatatataagtatttaaatattaaacatagatataatgtatatataatcatgcaaatggaacccatagaacatatatatatatatatatatcctatatagtcaggagaatcctggctactgcagattttggtaccaa

SEQ ID NO: 462684 - DNA, 551 bp, Homo sapiens
caacattatttctcaggccccagcaatggaaaccacatgccaaaataagaaccatccgatcaggagtgtagtggcactgcttccaagtggagctgcaaccttaggtaagtcatttcccatttctgaatctcaactcctctctactsaacaaagatgaccaaaccgctcttcagatatatgtgaaatactttgcaagctatacagtataggaagaaagcaaaatgaatggagggttttttttccctttctaaaatcccaaattaacttacaccacaggctctccctgcataaaagcatgaaggcaggttggccaaactaagggtttttgtgcctgagagacactcaggactgagttatggtctggacaacacttcaagtgaagaaagtttatcttcttaccagctgagggcatgaaagaaggtttctcacctctctttgtgcaattttttttgccttgatatctctaaatacctccaaccatgccccagaaggctcatgctattcccctgtaacctatcccccaaaactccactgctttattcaaccaaacc

SEQ ID NO: 462685 - DNA, 583 bp, Homo sapiens
gcttcaacagtctgtaataataartagaacagttaccacagaattagagtaagagaatttcaagttaatcactggctcacacagacgagagatgccaagtgacatgctgagaaggcatatgtaagaaatcagaataagtgattgctgatgaatcctaaaagaagaagccaccataagtcagtacacaggaagagaggcttgatggaaccactgtttgagtcagaagattcaagtgtgtatgggagttggagtggctgtagtaaggttctcaaggagggcatgctaggtctaacattatatgtgtcctctgcagataaccttcatctgcatctcacacacttgaacatcggtgcaataaagaaaggctgtaataccaacaaggtttccaaggaaaccaactctaagaactttgcaaacttctttaagtgctgaatgtcttttcatacctacttgctgctctgtatttgtttcttagggctgggtggcttaacaacagaaatttatttctcacagttctgaaggctagtaagtccaagatcaagattttcgccaacaatttagttcctggttagggcctgattcc

SEQ ID NO: 462686 - DNA, 561 bp, Homo sapiens
gaagaacatttagagcctcacttgcaagacacaagaaacatgagatgcccataaggaattacctcccaacaatagccatgaaggtggaaagcagagagttcagacaatagctttaaatctcctccctttgtattgtcccctttccagcctttttcttacacgtatgatcatcagagaaaaagaaagaagcaaagccaaggcaatgaaaataactcatttttctgctgttggtgggtttgagtaacttcycattctcgcacccaccataccctgatgctgaagttaaaaatggaagaggctattctgagtgagccaaaatacatttagcttttgggtttctacactgacttaccattgtggacacaaatacactctgagtgctctcatgatctagaagttcctaaacttcagttgcccccaaaatgtaaagtactaagacccaaaagcaatgcacaatttaagaagcattaacatcaaagaaactagacaggaaataataatattgtcactaataataacaatattgataaaatagttattattgagtggttataatatact

SEQ ID NO: 462687 - DNA, 561 bp, Homo sapiens
gaagaacatttagagcctcacttgcaagacacaagaaacatgagatgcccataaggaattacctcccaacaatagccatgaaggtggaaagcagagagttcagacaatagctttaaatctcctccctttgtattgtcccctttccagcctttttcttacacgtatgatcatcagagaaaaagaaagaagcaaagccaaggcaatgaaaataactcatttttctgctgttggtgggtttgagtaacttcccattctcgcacccaccataccctgatgctgaagttaaaaatggaagaggctattctgagtgagccaaaatacatttagcttttgggtttctacactgacttaccattgtggacacaaatacactctgagtgctctcatgatctagaagttcctaaacttcagttgcccccaaaatgtaaagtactaagacccaaaagsaatgcacaatttaagaagcattaacatcaaagaaactagacaggaaataataatattgtcactaataataacaatattgataaaatagttattattgagtggttataatatact

SEQ ID NO: 462688 - DNA, 579 bp, Homo sapiens
cagagtgggaacttgtggtgccttttccaggcctacccatggccacccatggaccaatcggtgcacacttcctcccctctgtggccctgtaggggctaaaagagctgtaacacaaacagggctgaaatatgccccttgcttgccacattgtggacaaagaggagagaagagctgtggccctttgaggaccccagacctaggcgtcccctaagccagggctgtgactccctttggggccctaaggttcctggagtctccaagcttctggatgccaccatgttccccagtgccagmagtggaagctgcttgtggcgtgcctggtctggccgcagcctcacagagagccggtgcctttgctggcacctggagctgcccaccctgctacagcaaaaggcatgtctgactctgcacagtggccggaccccatgctcgctcacacacccctcactattccatgcctgactctcccttggcaggtgtgggactcaggctggtaatgtgagccaagcacagcttgccaggccaagtgagcaaaacaagctcaatgggccttagcaaaactcaggcaaaggtgccacc

SEQ ID NO: 462689 - DNA, 573 bp, Homo sapiens
cacacattagacatatttttattttaaaattgctattaccacaggccagagcataaataatacaacagacctcttttggggggcaaaagattccacgttcttctataggaataaagaaccacgggtcacaaccttgaaagactcggyaaacttaaagtcatctcatttttagtgatagacagtgaatgtccaggttaatttcctcttgccctccaggaaggcagacagtgcactgaaatactgcattttcaggacgatcacacgctgtttccgagtagaatcatcctgatcatacccttcctacagcaggtgttttccctactacataggcctcccaaagtgctgggattacaggcatgagccaccacacccagcctacatcaaattgcttcttaatatcaagttgtcctggttgagttgaaggctccatccttgtccacaaatctttgagtatctggtgtgaagttacaggaagatagagtactaggatttttaaaaaagaatagatttttctctcattctctctccctcttttaaatctgggcaccagaggggccaactatccaggcctta

SEQ ID NO: 462690 - DNA, 583 bp, Homo sapiens
tattattatttagtattaccttcttatgcctgtaatgtattattgtttttgccttcccagaatgtttgcccttctgtctgtaacagtatttctatttattttccaggcagtcttagtggtgctaacaatcaagtggcttgccttgttctgacctgagtgttcgccaaacactccccaggctacaacagccgcgctcccctctgaaatcaggacacaagaattgaaagaaactggaacagatacatcacttacccctggcatccagaaccccagagcatccttcccacaaattggttataacaaattaccacaaactcagtggcttaaaagagcaccaattaggggtctagcatccaaaatatataaagagctcttttttcatacatatccatactatataaagatctctcacaacaacaaaaagataaccagcccaattttttaaaaaaggtcaaaaaatggaaatttcctcaataaagatatatagtcaacaagcayatgaaaaaatgcttgacatcattagtcattagagaaatgaaaatacaattcagagtgaggtgctacttcactcccactaataaag

SEQ ID NO: 462691 - DNA, 584 bp, Homo sapiens
ttttactctattaactgcaacaaaatttttttaaaaagtccattgttggttatttctaaaataaacatggaagttaaaacctgtacatatatttttatatatttgactgattatttcctctaggtatagtcctgtttgctgaactgataagtgaggtagtatttacatttaaatttytgaaaaatgttgccaggtcgccctcctgaaaggttgaaccaatttacacttcttgagtcacgtgtgatctctcccacccctgccactggccctgggcactatcagactttaaaatctttaccaacctatttggtggaaagtggtatctagttgttttaatttgtgtgagttgattatatgtaagctgtacctgtttccctacgtttataggtcatatatactgcttctttagtgaactgagatgtaagcagcatggtagatttgaaacatcacgggatccacattcagccctatttggactatgagatcccacattcctgaacagaggtgactgcattaggagtaagcacttgatacagactgaggtaagcagtttcccttttccaagaatttggagttgcgaccaa

SEQ ID NO: 462692 - DNA, 564 bp, Homo sapiens
tctgattttcccacacttaaaaaaaaaaaagtaatcccttgattgcactctccttggttaatccatgtgagagcaatctgtttcccattggaaacttgagtgagacaattgtgctctggcacacttgaccccaagartcctgactgacatatgaggattttccagaactcttcagatttgtgatctcctttgattccctcaacacctaaggctggtggcagaaggctggaccaggtctcctgcatccctactaggtgcacagcctcaaagaggggcccatgcagtgcaaccacaggctttgctgtagaaacacgtgtcaggccttggccagagtcaaggatactctcagggctggaaggagctttttcatgatggagccgaatactgagaatgggatccagagaaaataaatgaacaaggaaaagctgttatgcattaatgtaatcaaactgcatgatttatttgcttaatggctgctgaaaagtcgtctggcatttaaccattcccttctcaaatcctgtgtgaatcctttaaaattcaacctatgagataatctaacagaga

SEQ ID NO: 462693 - DNA, 659 bp, Homo sapiens
actcgaagctatcaagcttgtcagttggaaaaatgtcctttttcctagtctctctccattgtgaaaggggccccacgctcaatttgaaagtgtaatggtttggctgttgtctctaaaaggtgaaaggacttgaaggayttatcaagcataatgagaagccctctcctgagtttataactagaaactctttcttagagtggaagacattagacttggccttggccctaccagatttgctcaagtttctgggcaatgatagggccttctccgtgtgcatgggagagcagcccacattgaataagtccatgctcactctaaacacctgtttttgtttcaagcaaggagagactcatgttgtctaggaacactgtgggcccttgggaacaggaaataagtgagcagtattttgtgtaaaatgtggggaattaaatgaagcctttcctgttgcctcgctcatttcaccttttacaagaaaccatctctgaccacttccaaacagtcgcactttccaccccttgcttggcactggttacagaatgctatagggtggagctgtttgccatgtctcaagctcatcttagactatttgctgctgttgccacatcttttatatttgcattctccacatcacttggcacagtccagcagtacagagctga

SEQ ID NO: 462694 - DNA, 575 bp, Homo sapiens
ttctaatcttaaggtccatgggaaatattttatagagaaaaaaaaaaaacaataacaacaaacttacttctagcaaaaatgccatttttagatgattcaataaattcagctcctcaaatgctcccttctctcccataaatagttgtatgaagggtaaataattaaacataaagcaaaaatacagcagcagtgggcctataggcagttgggtacaagtaaggttttgggctttcttggggtctaggcagagagaacagtgcagagcttttgctgcttttcttggagttcttggatgaattctgggaagcagcrgactgggaagagctttccacccactgagtgtgttgagtctccctgatcatccagagagtaggcaggaactgaggtggactaagtgatttctgtcattgatggtggtagagttgaagatttggaagagatagaatcttccaggtgcagcagcaagaagcatgcctagttctatatcacaggcccatcgagatagaagggatgaatactaaaagcatgttattctccttatcttttgttgctaatggtcaaaataggttttaaaa

SEQ ID NO: 462695 - DNA, 470 bp, Homo sapiens
tttttaagattatttcttaatgtggttagataaattctcaatataactaattatcagagaagagcatttaaatacgtgcaagrtgttattgtcatttctccttcctaacaagtatttctgattttagaaaaagtcctgtgagcttatacttgttctatatactaaatatttgattcaggtttaaatttaaaaatgatcagttatacttgattgaaacagaagtataagcttttaaacttaatctagattcaggtagctacaaattagtgaacaataatgttttatctaatataaggatatatatgtgtgtgtgtgtatatatatatataaattcacacacacacatacatatttgaatcaatttgaatgcatgtcactaaatatgatcattagtaattcgcataaaagaaaaagataatagtttatttactcaaatattaataaaattcactctgggaaaacccacagta

SEQ ID NO: 462696 - DNA, 587 bp, Homo sapiens
caacccccctctacccttcctatgcacaaaccttttgacacattggggattctatcttacagaaataaaatctccagtgtgtaaggatttatacataatgtgtttatcacagctagattaggaggaagaaagaaaaatgcatgtataaccaaaagtgaatggctacataatcatggtacatcctaaactattaggaacaactaaaaacaatcggttataaaaaatccatcagtggctgccctttatataagtgtggagtattggttttgtgtgtgtatacatgtgtgttttaatgactgtacattagttataaatctttttataaaatatggagtgttgtttgtgtatcgtgtgtatatgtgttacakgttataagtatgtatatatgttatatgttataagttatatgtccataactttttatccaagtttgcctttttgctctccagattagctttactttcaaggagtgaattattctacgctgtacatgttcgtctctgtttgattaagcatagagcaacttgtggaataatatatatcaaatcgttaatgttgcttacttctggtagaggaatttcacaggt

SEQ ID NO: 462697 - DNA, 525 bp, Homo sapiens
agccccccgtgtctattgttgccatctttatgtttacgagtatctgacgtttagctcccacttacacatgagatcatgtggtatttggttttctgttcctgcattaatttgcttaggacaatggcctccagctctatccatgatgctgcagaggatatatttcattcattttcatggttgtgtagtattccaaggtgtatattaccacatttcctttattcagcccaccattgatgggcacccaggttgattccatgtctttgctgttgtgaacagtgctgcaatgaacatatgagtgcatgtgtgtttttggtggaatgatttattttcttttggatatatatccagtaatgggattgctgagtcacatagtarttgttttttctttgaaagatctccaaactcttttccacagtggcttaactaatttacattcccaccgacaatatatgtgttaccctttttctgtagccttgccagcatctgttattttttgactttttaataatatacattttgactggt

SEQ ID NO: 462698 - DNA, 555 bp, Homo sapiens
  misc_feature (1)...(555): n = A,T,C or G
aacacactttacctatgaagatacacatagaccaaaaataaagggatggaaaaagatattccatgccaatgaaaaccaaaaaagagcaggaatagctatatttatatcagncaaaatagatttcaagacaaacatatgacataaatctcaagagacaaaggaggtcattatgtaatgataaagggatcaattcagcaaaaggatatgacaattgtaaatatatatgtacctaacactggagcactcatatatacraaacaaatattattagagctaaagagagaaatcgatttcaatactataatagtttgagatttcaacagcccactttcaacattagacagatctttcagacagaaaatcaacaaagaaacatcagatataatcttcactatagaacaaatagacttaatagatatttatgggacaattcatccaatgattgcagaatacacatttttctcctcagtatatgaatcattctcaaggatagatcatatgttaagtcacaaaacaagtcctaaaacattcaaaaaattgaaataatatcaagca

SEQ ID NO: 462699 - DNA, 541 bp, Homo sapiens
attgtgggttttttctgtttgttttcagagaaattttttctgtttatttggctagtgacctgatttccaattgagaaactctccaccagactccgtctctttctgctgtatactggagctcttatcacagtgaaaaatacagtccacacgtatgtgttttcacacatgccaacatagctgttgtgtattcctaactttagaaaataacttaatgtcatatgacaaaatttgaattagaattcctaaacttgaaaataactttcagcataagttctycaaattcacttctataaattacagtgttgcaatatgttttatcagcaatttaaattcttatcagagtcaggtatacaaagtaaagtacattctaaagaagtttagctactctttactcactgccttttccccttcttccctcacttaaaggtaatttaaaaattttgttttctccataaattgttaccataaacagatatgtatatgtattaacagtatattctcttctatccttaggtaattgttgtcacactacacaatttta

SEQ ID NO: 462700 - DNA, 541 bp, Homo sapiens
attgtgggttttttctgtttgttttcagagaaattttttctgtttatttggctagtgacctgatttccaattgagaaactctccaccagactccgtctctttctgctgtatactggagctcttatcacagtgaaaaatacagtccacacgtatgtgttttcacacatgccaacatagctgttgtgtattcctaactttagaaaataacttaatgtcatatgacaaaatttgaattagaattcctaaacttgaaaataactttcagcataagttctccaaattcacttctataaattacagtgttgcaatatgttttatcagcaatttaaattcttatcagagtcaggtatacaaagtaaagtacattctaaagaagtttagctactctttactcactgccttttccccttcttccctcacttaaaggtaatttaaaaattttgttttctccataaattgttaccrtaaacagatatgtatatgtattaacagtatattctcttctatccttaggtaattgttgtcacactacacaatttta

SEQ ID NO: 462701 - DNA, 546 bp, Homo sapiens
gaggtttttgaaaagctaaacaaaattgacaaacctttagccagactaactaagaaaaaaagagggaagatccaaaaaaataaaagtcaataatgaaagagaagacattagaactgatactgcagaaattcaaaggtaattagtggctactatgagcagctatatgccaagaaatagggaaatctagaggagattgacaattcttggacacatacaacctaccaagattgaaccatgaagaaatccaaaaccttaacaaaccagtaacaggtaatgagacagaagccagaataaagttctcccggtaaagaaaagcccaggacctagtggcttcattactgaattttaccaacatttaaagaagaactaatgccaatcctactaaaactattctgaaaaatagaggaggagggaatactatcaaactcattctatgaggccaatattaccctgayaccaaaacaggacaaagacacagcacaaaaagaaaactataggccaagacctctgatgaacactgatgcaaaaatcctcaagaaaatacca

SEQ ID NO: 462702 - DNA, 569 bp, Homo sapiens
cctaaacctcccttcttttaaacaaccagttattttactttaggacaagaatttaccatacaggatccttttttatataaaatctctttctttataatcttctttgtatagctagggggcatggtaaattccacatrtccccaggccttatctagaatttaatggctttagggtaggtagattgaacaattttcaaaagtcaaagaaacagtttgaccttaaagcatttagcaaatctgatatctgaccttaatttagaccaaatgtctacatttttaagatgttttattttaccaataatctttaaaactgtctttatttccaaaatattactaaagtcatgtgaacaaagaggcataaaatattctatttttctgctgaaatacttcatttaaaggcttatatttctaagccaattaatcagagcccttttacatataaacatacaacacatataaatatagagacagacagaagattcagcacttgtaagattttcatttgccagtttcttaattggatgactggcttgaggatggagtccttggaagaatggggacaggaaaggg

SEQ ID NO: 462703 - DNA, 569 bp, Homo sapiens
cctaaacctcccttcttttaaacaaccagttattttactttaggacaagaatttaccatacaggatccttttttatataaaatctctttctttataatcttctttgtatagctagggggcatggtaaattccacatatccccaggccttatctagaatttaatggctttagggtaggtagattgaacaattttcaaaagtcaaagaaacagtttgaccttaaagcatttagcaaatctgatatctgaccttaatttagaccaaatgtctacatttttaagaygttttattttaccaataatctttaaaactgtctttatttccaaaatattactaaagtcatgtgaacaaagaggcataaaatattctatttttctgctgaaatacttcatttaaaggcttatatttctaagccaattaatcagagcccttttacatataaacatacaacacatataaatatagagacagacagaagattcagcacttgtaagattttcatttgccagtttcttaattggatgactggcttgaggatggagtccttggaagaatggggacaggaaaggg

SEQ ID NO: 462704 - DNA, 569 bp, Homo sapiens
cctaaacctcccttcttttaaacaaccagttattttactttaggacaagaatttaccatacaggatccttttttatataaaatctctttctttataatcttctttgtatagctagggggcatggtaaattccacatatccccaggccttatctagaatttaatggctttagggtaggtagattgaacaattttcaaaagtcaaagaaacagtttgaccttaaagcatttagcaaatctgatatctgaccttaatttagaccaaatgtctacatttttaagatgttttattttaccaataatctttaaaactgtctttatttccaaaatattactaaagtcatgtgaacaaagaggcatwaaatattctatttttctgctgaaatacttcatttaaaggcttatatttctaagccaattaatcagagcccttttacatataaacatacaacacatataaatatagagacagacagaagattcagcacttgtaagattttcatttgccagtttcttaattggatgactggcttgaggatggagtccttggaagaatggggacaggaaaggg

SEQ ID NO: 462705 - DNA, 616 bp, Homo sapiens
gtttaaactttttttaaacaataaatccaataaacataatctcaagacagactcatatgaccatacagaaaagtgtgtcatctatttttcaatcctgtgtagttacttggatgtgaaatattaacaatggcccaaaaatattttcctgaagattgtgtttatataatgtcatcaccaatattttggtctttttgatctctgctaaatgtcaagatttcctttgtaaagtgtcgatcttctaagtagtttctttaagacaattctccgctttaactgattttctttgttgtgaaacacagtagagatttggcaatcaaccattttacttgatctaggtagacagccaagtcagatggcccatgcctagaagctctccattttgaacttttgtcagcattgattaaaagaatcaaataccttgtagttatctatgatgatacaagtaaaaaactaggctgctgacttctgagtattcctgagyctacaattgtaaaattgtagactccattgtaaaatttgtattttttcatcaatctgacaaggcacaaatatgtgccagatatacaaaagcaatgtttctagaaaacagctatcatggatcagaataactgaattt

SEQ ID NO: 462706 - DNA, 463 bp, Homo sapiens
  misc_feature (1)...(463): n = A,T,C or G
ataccaaccagttacagccaggaaactttcaaaaactaatacatgaaattcttagaagagcttataaatagctatgttcatttcattttagtcattttatattcgcctgtgagagagagaataaactgagaaattctataagcaatgtcattcaagtgcctgaaataatcaatgcatgctggcaaaagttacagaaagaatttgtgaatttatgcatccaacaaatgtttatggggaaccaatttcattttggacaraattttctgccttcatggattnctantaaagagtagaataaacacataagtaaaatttaataggttgaataatggtaaaagtttaataaagcttagtaaaatgaagtatcaatagtgtgtccattagtttactattgccacaaaattgtcacatttcagcaatacgtatttattgctcatgtgtctgagatctgtcaactatgctg

SEQ ID NO: 462707 - DNA, 607 bp, Homo sapiens
tgggtttgcctatcctgcatgcaatgcttctgccaagactaccatccatggactcacagaatgacttatgcactgacatggtatcccacatagcattgtctttgaccaaggyactcactttatgtctaaagaaaagcagcagtaagctcatgctcatggataaaacaggaaaaaccatgttccccatcatcctaaacagctggattgatagaatggtggaatggccttttaagtcactattacaatgtcaagtaattgacaatactttgcagggctgggcaaaagttctccagaaggctgtgtattctctgaatcagcttccaatatatggtactgttcctctcatagacaggatttacgggtccaggaatcaaggagtggaagtggaagtgacaccactcaccatctactctagtgacctactaactaaatttttgcttcctgttctcgtgacattacgttctgctggccaagaggtgttagttccagaaggaggaacactgccaccaggatacacgacaatgattccattaaattagaagttaagattgcgacctggacactttgggctcctcctaagtcaataggctaagaagggagttacagt

SEQ ID NO: 462708 - DNA, 604 bp, Homo sapiens
cttgttgctgcatattccagaagggaagaatgctgtgtctttacatggtggaaggcggaaggtcaagtgaggttaaagctgccagaagactctaagtccttaatcccattcaaagaaagttttcatggcttaatcacctcttaagggctccacattttagcattatcacattggtaacacctgaattttggaagagacctattcaaaccatagcaatgtttaagtgaaactctttaattaaaatataattaaattattatataatttatttaataaattaattatataattatattttaagtttcacttaaacatgaataatatataaatatacatatttatatacatgtttataagtaaacatataaacaataaacatatacatatacagataaatgcataaatcttaagtgtataactggataaatattcacaaaatgaacaggactgctgaattaaatcaggactttgaatcaaagaattaattgtcygggcctctttcattcattacccgtaactttccccaaaagtaaccgtgattatgactcttatgataaaagattattctgcctattttattttaaattttacataaatagagtaa

SEQ ID NO: 462709 - DNA, 495 bp, Homo sapiens
ttggttccaactgaaaataacgttttacttttatgtagtcaaaaatgaaagagatcacttctataagatttatctaaataaatatttgtgttcatatacatatgcacatatatatgttttagaagattaatacygtaatataaaaatgggcaatagactttgaaactttaattgtgcttgatgcattataaggaatctattaattctatactatactaattttataatcaccatctaactgttattgcttactgtttccactagtttataacatggctttttggataattcttatgtaaaaataacttgtctgtctgcttctcaaacttcttatatttttatcttgtatatttgaatacacaaaacgatgttaaaggtagaggaaaaacaaatctttgttttttcttttattttattgaaaatgtctctgtggtcttttcgttatgtatggatgctagattttgtttagaaaagtgttaaggaaataagcattag

SEQ ID NO: 462710 - DNA, 573 bp, Homo sapiens
tttctgcccgctctcccacttacctcagcactgctccagctgctctgcattagctctgagctccacgccactggtaacctagcaccaccattgtctctcttcagccaccatcatgattatctatccagacctcatcagccacagtgagatttacaagaaccaggagatcacaaaagggccgtgcctggaggtggaggggaagatagtcagtaggacagaggataacaytgatggctcgctcattggtagaaacgcctctactgaagtccccgagggtgaagaaacccaaagcacagttatcactggtgttgatgtcatgcactatcacttacaggaaacaagcttcacaaaagaagcctgtaagaaatgcataacatattacatgaaatcaaatcaatcaaaggcaaacatgaagaacagagatcagaaagagtaaaacctttcatgaaaggggttgctgaacaaatcaagcacatccttgcaatttcaaaatctaccagttctttattggtgaaaacaagaatcttgacagcgttgttgctctactggactactgtgaggacactgtgatcc

SEQ ID NO: 462711 - DNA, 576 bp, Homo sapiens
ttttatttttctactcccactctgtgccactctatcctgtagactcattttacaaaagcagcaaaatctaagtctcacaggtaatcccatctctccagattagatgagctggaagcaacttcttggccctgacatgttgtgcagaggcacacagccaacctttgaaagaacaaatgggggaaatttggaaatagagaaagagtgatgtctcatgactgttactatgatttagattaacacatctttggcstgggccccggaagttggattttcttacaaggtggacatgtatcaacacagagcctgcagaacacgtaactgtacaaggcatacagtgaccaggaagggcaaagactcgctagtaggcaacactttatcctagggcacataagtatcagagaaagaggacagagcagtcctggagtctttcaagttgggtcagatcaccatagattttgaacaaaattagtatcttggagtttatgatgactgggttatgaatgcacctattaggaaaatagcctataatttttagaaaccagaagcaattgacgattatggatgttttagtatttt

SEQ ID NO: 462712 - DNA, 545 bp, Homo sapiens
aacaatacacattcctttggatcagacaagattgcacacgtacrgttctgccacagagccatgatgtctcttctatcctctatgatcatatagcctggggaggcctggacattggacacctgcagaaactcacactggcccactgtgctgatgactgcttgctaattagagcagataggcaagatatggcaagtatgttggatgctatagtaagacccatgcactctatgaggtgggagataaattccatgataatttagaggccaccacatcaataaaagttataagatccagcagtctgggaatgccaggacatccctccaaagttaaagacacattactgcttcttacacctcccgccatgaaggaggcatagcacctgagaagccatggagacaacatccttcatacctagccatatagtattatggtatttcctaggactgctgtaaccaatcaccacaaacggggggcttaaagcaacagacacctgctctcccatggttgtggaggccagaagtctaaaatcaaggtgttggcaaggc

SEQ ID NO: 462713 - DNA, 466 bp, Homo sapiens
aaatgctctagggaaggatccttccgttcagcttctagaggctcctggcatttcttggtttgtagaagcagcactccaatctctgcccccatcttcatgtgacctttcccttgtgtatttctgtatgtttcagatctccctttcccatcttcatgtgaccttttccttgtgtatttctatatgtttcaggtctccctttcctttttcttataaaggcatttgtcattatattaggacccaccctacatccagaatgatctcatctcaagattcataatttaatgacatctgtaaagactattttagggtcacattcacaggtactagaggttaggacttggatacctcttttgcatggagcggacagtttaatccattataccaagaaaagcaaagggatgtcagctttgagtggagtgagaycaagatgtggaacaaggaagtgtcacttagccatacaaccttg

SEQ ID NO: 462714 - DNA, 585 bp, Homo sapiens
tatgagccagagcctgctgaaattattccacctggccgatcctcagcctgcttatccctccttacctgttccttcctgctgaaaccccagagaagcctctggccacagtttgtccccttcctctaccttccaaccagcctggtgctttcattgcccccatgacacggcacgcccctcctctttggaaccgtgtgtaataagctgcctcttcagtggtagtcttctcctggtctgttggccttacatacccgaataacaataaaactcacatgttaaaacacaggtatttccagccagagacatcaaagaccaggaattcatttcttggggaagataggcttattttctcgcaaaccagctgtgttttaaaaagtaacagggaacaataggattccaaattttcaaraataaaatagtttatcaagttggcaattttacgtacatacatacacgcccacacatggagctgcaagagcctgtcgtcggaacatagactctctcatcaatgttgtgggaatgtgagtaagaacaacttttccggaactgtatttggtatgactatttgaagctttaaaaaactgcatc

SEQ ID NO: 462715 - DNA, 574 bp, Homo sapiens
caaacagcaaaaagaacattggtccgtgaccattagcgtagcaggtcctgatgaaggaattcccctcaatgagaaatgaggcaggcccccaaccaaggacagaaaggaggaacagtgtcagggcattgtcatccacaaatagctatgtatatttttttcttaccaaacaattcctaatctttcagacttccacatcatattggaaagaacagtatgtcttttctggctccacagttttctctgtgaatttgcacaagctccctctctgttctgtatcaaggtggactacccgagctcagtcaagtagtagctccatttgcaaaaagtgtgctcaaaaccagatgcaggactgttgctagggcagattcatgaatcctcaggtacatggtatccatttggtggatgtattttstattcctatcagaaaaaaaatggatcaggcaccatttgtattcacatgaaaaagacaacaatatgcattcatatttttgccccagaaccatgttagctttcctgctctctgtattagtccaaggaaatatggaccattggacatcctacaaaacattatgtt

SEQ ID NO: 462716 - DNA, 546 bp, Homo sapiens
aattgcatcctgggcttgtggttagaacatcctgccgcaaggcaggaagaagagcagaacagaaaatgcccaaactcacacaagtgccagaaacccatgctcaatgtctttgggctgacctatgctcattacaatagtaaaccctgggtggaaatttaagatcataatgaggcatggcatgtatataccagcatgtagagctcctgtgcatgcaggctggagaaaccacttgtaatatgcttaatatcaacaccccttcccaccctttcatgaataatcatgtaatactcccataaagggaatttccccagtatcagtcagtgctatctcacctttgagcagctcgctctgatccactgtcagagtatacttttgctttacagtaacttttacattggactctctactcacattcttttgtgcagtaaagtcaagaactgaaccagcccactagcaacaaaaacatctgctttctgtgttttagaagtagragcctgataataactttatcttaccctaatatctactgataatgaaataacttaa

SEQ ID NO: 462717 - DNA, 595 bp, Homo sapiens
aaaatcactgactcagcgcaatgcgttacaaaagagtaaatttcaaaagttctttgtttatgcctatcccagagagcaagattctcctttaagaagtaaaagctaggtagaaagtgaataaatgaaatattatgccacttgttttgaaagcctcatatttatacattccttaatttgtttttcactcaccatatctcaatggctaatgccacggatagaaaaattcatcattatttccagtttcttaatagggtcctctagcatctgacaaccagagaatcataattgcctatgttgctaactagtatgagtttagatattctgttagccaggcaactacttaaagcaaacttgcgagctataaacaattttctttggaaatatctgcggtgactgatttagcattgtttgtttgttttcgtttaagaaactccactgagaactctgggttctgaaatacgtaactgtttgaaagcttccttgattttctaaatgccatttgccttctgagagtcaaagggcaaacttgaatataayaatattcaagttattttttaacagattatctaaaagcctgaacggagtaaggttatac

SEQ ID NO: 462718 - DNA, 588 bp, Homo sapiens
tgttaaatagttttaatagcacccctgcatccatgcatcgatttttccattcagctgcatattaagcacttactgtgtctcagatgttgggccaggtgctggagatacactagtgaacaagtgttcacctgcctttgcagaatgtatagtgtagagtagggtttctcaatcttgtcaccgttgacattttgggccaacaattctttgtcacgaggagttttcttgtggattgtagaatgttcaggagcatccctggcctctgcccctagagactaatagtttacttcccagttttaacagccaaaaatgtgttcagacattgccaattgtgcccttatgggggcaaaatcacctccccacycccatcacattgagaggataaacagtattatcaaacaaatgatcacaaaaataaaaatactgttgaacaatataaagatgctctggagaaaacaagcaggctaccatgagcgagaatgaagggagactgactttgggttcaactatgaagcaaggtcacgtggatgaagggacacttaatccaaggcctaagggacaagaaggagccagtcacatgagggacaaggg

SEQ ID NO: 462719 - DNA, 588 bp, Homo sapiens
tgttaaatagttttaatagcacccctgcatccatgcatcgatttttccattcagctgcatattaagcacttactgtgtctcagatgttgggccaggtgctggagatacactagtgaacaagtgttcacctgcctttgcagaatgtatagtgtagagtagggtttctcaatcttgtcaccgttgacattttgggccaacaattctttgtcacgaggagttttcttgtggattgtagaatgttcaggagcatccctggcctctgcccctagagactaatagtttacttcccagttttaacagccaaaaatgtgttcagacattgccaattgtgcccttatgggggcaaaatcacctccccactcccaycacattgagaggataaacagtattatcaaacaaatgatcacaaaaataaaaatactgttgaacaatataaagatgctctggagaaaacaagcaggctaccatgagcgagaatgaagggagactgactttgggttcaactatgaagcaaggtcacgtggatgaagggacacttaatccaaggcctaagggacaagaaggagccagtcacatgagggacaaggg

SEQ ID NO: 462720 - DNA, 588 bp, Homo sapiens
tgttaaatagttttaatagcacccctgcatccatgcatcgatttttccattcagctgcatattaagcacttactgtgtctcagatgttgggccaggtgctggagatacactagtgaacaagtgttcacctgcctttgcagaatgtatagtgtagagtagggtttctcaatcttgtcaccgttgacattttgggccaacaattctttgtcacgaggagttttcttgtggattgtagaatgttcaggagcatccctggcctctgcccctagagactaatagtttacttcccagttttaacagccaaaaatgtgttcagacattgccaattgtgcccttatgggggcaaaatcacctccccactcccatcacattgagaggataaacagtattatcaaacaaatgatcacaaaaataaaaatactgttgaacaatataaagatgctctggagaaaacaagcaggctaccatgagcgagaatgaagggagactgactttgggttcaactatgaagcaaggtcacgtggatgaagkgacacttaatccaaggcctaagggacaagaaggagccagtcacatgagggacaaggg

SEQ ID NO: 462721 - DNA, 534 bp, Homo sapiens
tgccagcatgcaatgtgttcattcagctggtgtttatagagatcctaccatgtgctccagggatacagaaatgaacaaggcatagcccctgccccgaaggttccctcgcgcacagttttgtgcagataaatggttctgtaatcaaataacgacatgaccctgagagcattgctataatattagaagatctacagcacctgctccacaggcaggggtgaaatcaggaaacacttcacagaggaggagccttgcgtgaggagtagccagggcctgagcatgaggtctagacacaccgctctacagctcccccaaagtgccagcctttctcctgtccrggagcaggggcgggacctgactccatgtgttttagggaacttctgtctggtggcagaatggagaagggcctggatatgggaggactggagctcagtgaagaacccactgcagggccgaagtgagaggtggtggcagttgtcctggtggagattggcagtgcccaaatccagatcaccatgggaagccccaggggcacat

SEQ ID NO: 462722 - DNA, 370 bp, Homo sapiens
atgccatggctccaagcctagagactggagggatactattaacaggagtgggaagtattaataacagctgacttcctttttttttttttttttttttttttgagcygctgttatgggcttgccactgcaaaactaagaggttttttgtcaactttctcattaagtctcctaatggccctagaatgtatttactagtctccccatattacagattttggagatgggaaactgaggcccaaagtgatgaggtgatttgcccagtttacacagcttataaggaggggagccagtatttcaacccaggtctggctgacagtctctagaattcacacttttaacccagcactgagcagcccctccaacccacctg

SEQ ID NO: 462723 - DNA, 538 bp, Homo sapiens
caacagtgtaccagggtccctttttctccacatcctcatcaacattaaccatttgtcttttgtctttctgataatttgatatttgtctttttgacaaataatggccatcctaacaagtataaggtgataatggttttgttttgcatttgcttgatgattagtgatgttgagcatcttttcatatattgtcggccatttgtatgtcttcttaggaaaaatgtctattgtggtcttttgctcatttttttattttttatttttattttttatttttttgctattatgttaattcctatatattttggatattgcccytatcaaatatatggcttgcaaatattttctctctttccaaaagttgccttttcatgccactgattgtttcctttaatgtgcagaagctttttagtttaatgtagtcatacttgtctatttttacttttgtgacctgtgcttttggtgtcacatccaataaatcattgccaagatcagtgtcaagatttttccctatgtcttcttctaggagttttacagtttc

SEQ ID NO: 462724 - DNA, 550 bp, Homo sapiens
tattcagttttcccaacaccatttattgaaaaggctatccttttctcattgtgtatccttggcacctttgtcaaagattagttgactgtatatgtatggctttatttttgagctrtctattctgttccactgatctatgtgtttgtttttgtgccaattccatactgttttgattcctgtagctttgtaatataattcaaaatcaggaactgtgatgcttccagctttgctcttctttatctagatttctttagctatttggggtcttttgtggttccatatacattttagaatttattttctatttttgtgaaaaacgtcattggaattttgatgaagattatgttaaatctgtagatcactttgggtagtatggacatttttgcagtattaagtcttccaatccataacatgggatatctttccatttatttgtgttttcaattcctttcatcaatgttttacagttttcagtatacagatcttccacctcctgattaaatttgttcctatcttattctttttgatgctataataaacgggattgttt

SEQ ID NO: 462725 - DNA, 550 bp, Homo sapiens
tattcagttttcccaacaccatttattgaaaaggctatccttttctcattgtgtatccttggcacctttgtcaaagattagttgactgtatatgtatggctttatttttgagctgtctattctgttccactgatctatgtgtttgtttttgtgccaattccatactgttttgattcctgtagctttgtaatataattcraaatcaggaactgtgatgcttccagctttgctcttctttatctagatttctttagctatttggggtcttttgtggttccatatacattttagaatttattttctatttttgtgaaaaacgtcattggaattttgatgaagattatgttaaatctgtagatcactttgggtagtatggacatttttgcagtattaagtcttccaatccataacatgggatatctttccatttatttgtgttttcaattcctttcatcaatgttttacagttttcagtatacagatcttccacctcctgattaaatttgttcctatcttattctttttgatgctataataaacgggattgttt

SEQ ID NO: 462726 - DNA, 550 bp, Homo sapiens
tattcagttttcccaacaccatttattgaaaaggctatccttttctcattgtgtatccttggcacctttgtcaaagattagttgactgtatatgtatggctttatttttgagctgtctattctgttccactgatctatgtgtttgtttttgtgccaattccatactgttttgattcctgtagctttgtaatataattcaaaatcaggaactgtgatgcttccagctttgctcttctttatctagatttctttagctatttggggtcttttgtggttccatatacattttagaatttattttctatttttgtgaaaaaygtcattggaattttgatgaagattatgttaaatctgtagatcactttgggtagtatggacatttttgcagtattaagtcttccaatccataacatgggatatctttccatttatttgtgttttcaattcctttcatcaatgttttacagttttcagtatacagatcttccacctcctgattaaatttgttcctatcttattctttttgatgctataataaacgggattgttt

SEQ ID NO: 462727 - DNA, 549 bp, Homo sapiens
tatttcatggagaatatttacaaagtatattggtcactgatgcttcttttcccaaactcatgccaaaatctcaaatgtgtcaggcatgtaggaggtagtcaataaacgttatttactttcccgtcactatatcaatttatgtctgaacccctaagcctttagaaattactagttttccctaacagtagccatggaatatgtaaaaaataaaaagaatttaaataaggattaatattgggtaatctgaaaggaaatgtgaattctagtgaaaatcagatatctccttaatcactcaatagcattatgtaactctcttgctcacaacctcastcttggcaagtattaggacacgaactctccagagttgtcccaagaacagtaggtcccagaaaaagaagaatgacttgtgacaagaaccctgaggagtgcctcaatctgtttccatgatttatgatcttcttacctcagtaatgactcccaccatttggttcagacctacaagaggccatgtctgatattttagcagagaaacaggcatataccatccta

SEQ ID NO: 462728 - DNA, 548 bp, Homo sapiens
tgcctttttgcctaagaaatgtaaacgcgggaggcgggcgccctgggaacgcctcagtacaggggactttgcgccctacagatcgggtccaggacggaaaattcggagagcatgagaatcttagggaccagggtgtgtcgctatccactggaaagagactgcctcgagagcctcccgaagggctcctctgtgttcctatttccggcccgcactgtgccctggaaatccagggacacctggatgtccccgccgctgaggggtacccgggcctcgtggcagggcgggatcagatcagtcagggtgtgattagagctgtgacggtgaagtctggcaggaagaggcaggaagggagagaagcaatgcctcgacacgaggagaaacctgaatggtgcgctagatttcttgkctgaaatcaccttcttttaatgtcttaaaactctaggagttgcttatgtgctgtagcccagccaataagttctgacatcagtaattcagagggtctgctgagagaacatgacggcctgagaggggataagctgtcacttctc

SEQ ID NO: 462729 - DNA, 564 bp, Homo sapiens
tgtatcctttcgtatcaatatatgtaaccttttgaattttttcccacgcagcaacctgagttgcaggttgttgtatcagtattttgttcctttttcttgtagtatttcatggtatgcatgtaccaccagcttgtttaaccattcacttaatgaaggacatttagggttttttccccagtttyaggggtattacaaattaagttggctgaggtgggaggattgcttgagcccagtagttccagactggctaggcaacatagtgagaccctgtctctacataaaaaaatgaaaaattagctgggtgtggctgcacacacctgaagtcccagctacacaagaggctaaagggggaggatcccttgaacccaggagttggaggctgcagtaagctaggattgaaccaccgcacttcagcttgggagaacagagcaagacgtctcaacaacaacaacaacaacaacaacaaaaaccaaataaagttgccacaaacatttgtttacaggtttacaagtgagcatacattttcatatctctgggataaatgcccaggagaactatttctag

SEQ ID NO: 462730 - DNA, 607 bp, Homo sapiens
tgtttgtttgtttgtctgtctcccttactaggctgtaagctgcacagccatgggagtttgtctagatttattgcatgtctccagtgcctaatagtgagttagcacataggaggagttcaataattaccagttaaattaacgcatgttactttaaccccatattatgctgagaaagctgaggttcagagattgcacatttctaagtttttgagctaagatttaatcccaagttttcagagtccacactcttaaarccattacctagtagtattccagggcagtcttgctactaggacttagttacagcttcagaggaaaaaaaatcacatttctttattttatagggttttataaggtttgacagaagtgacttttaaggtttgtcatagtatctgtttgatatctgaatctccttcattcagtcaacaaacgtggcccctgtaggctccatgaaagtgaatactgtgtctgtaccctagactctgggtgtgttcctggcacatgataacccttttaataattatttattgaagaaaacatttattgacatttatcaggcattctgcttagcacaggaaagaaaaacctgtttgagaatattcccctg

SEQ ID NO: 462731 - DNA, 514 bp, Homo sapiens
ccctccccccagccaagggaagccatgagagactgtaccaggaggaatggtgcactccagcccagatattgcacttttcccaaggtcttcacaactagcagacccggagattccctctggtgtctacacaaccaggaccctgggtttcaagcacaaaactgggtggccgtttgggcagacaccgagctagctacaggagktttttttttttttttttttcataccccattggcacctgtaatgctagcagacaagactgttcactcccctggaaagggggctgaagccagggagccaagtggtctggcttgatgagtcccacccacatggagcccagtaagctaagatccagcgacttgaaattctcattgctagcacagcagtctgaggttgacctgagatgccggaggttggttggggaaggggtgtccaccattgctgaggctcaagtaggccattttaccctcacagtgtaaacaaagccaccaggaagttcaaactgggcagagcccac

SEQ ID NO: 462732 - DNA, 513 bp, Homo sapiens
gaaacttgcatcttggacactctgtcagttcttactgaattctcagtaattttagtttctttgaatgtctggatacaactctccaaatcaacttttctccaaacctcctgacttggtgccactgggtactaaaatttgacttcccagattcttgttgaaactttagattttcttgtagcttacctttccccaaggatataaaggatccctgcaacttgaatgtaaattatgtgatataaacttcaaaggactgataactgtagcagacaataaatagacaactttcatgacaggagctgctgctgtatggacaactcaggaatttaactaacctcccatatattccgtgctctgttccaaggtataatcatgactggacaacsttatggaaacctctctaatgtacatgccattgccaaaagcattaaaactgcaaactatctatcagatttccactactgccctcaccttaccatctaaagatgatttaagcctaatgtctagaaatcttga

SEQ ID NO: 462733 - DNA, 577 bp, Homo sapiens
gattacaatatgcctgaaggaagatatttttaggtagactctatttgggaattgttatgccttatgggtctggatgcccatatctctccccaaacttgaaaagttttcagctattattttgttaaatacactttctgtgacttaatccatctcttctctctcaggaactcccatattgaaaagatttggtaacttaatggtgtcccataagtcctatttttttgtcacatttttttcttttttttttccaaactggcttatttcaatagatacatcaagctcacatttttttttcttctacttaatctagtcagctgttgaagctctcaattgtatttttaattttattctttaaactattcagcttcaagatttatgttttgttatttggaatgatgtctatctctttgtgaaattttttattcaratcataaattgattttctgatttaatttgtttatctgtatcaatttatatcacactgagtttccttatcatcattatgttaaaatcctctttaggcagttcatatattttcttttctttggggtaacttactagggaactcttgtgttcc

SEQ ID NO: 462734 - DNA, 576 bp, Homo sapiens
gatagtgagtgagttctcatgagatctgatggttttataagtgatttttccccactttgctctgcacttctttctcctgccactatgtgaagaaggacgtgtttgcttccccttccgccatgattataagtttcctgaggccttcccagccctgtggaactgtgagtcaattaaacctctttcctttataaattacccagtcttgggcagttctttatagcagcgtagaaacggactaatacagctctgttatcattgaattttgattgtgaattcgttttgctmggaatccactgagaacttgttttttcttgtaggggtcagatctcaagtataggtgttactagtggttggcatgtactaatattctgcatgtcttgggacgaagatgagatctggaggaaatgagtcatggtctccctgaggagaaagctctgggtcttgcttacatgttttcatgtaacttctttctagcagttactccaatactgaccagacccacagggcttaccttcctggaagacaggacagagatcacagactcctcatagtccatgctcttgctgttagctgtag

SEQ ID NO: 462735 - DNA, 576 bp, Homo sapiens
gatagtgagtgagttctcatgagatctgatggttttataagtgatttttccccactttgctctgcacttctttctcctgccactatgtgaagaaggacgtgtttgcttccccttccgccatgattataagtttcctgaggccttcccagccctgtggaactgtgagtcaattaaacctctttcctttataaattacccagtcttgggcagttctttatagcagcgtagaaacggactaatacagctctgttatcattgaattttgattgtgaattcgttttgctcggaatccactgagaacttgttttttcttgtaggggtcagatctcaagtataggtgttactagtggttggcatgtactaatattctgcatgtcttgggacgaagatgagatctggaggaaatgagtcatggtctccctgaggagaaagctctgggtcttgctkacatgttttcatgtaacttctttctagcagttactccaatactgaccagacccacagggcttaccttcctggaagacaggacagagatcacagactcctcatagtccatgctcttgctgttagctgtag

SEQ ID NO: 462736 - DNA, 487 bp, Homo sapiens
agtacaatgtgatgttattctatatgtatacattatggaataaataaatcaagctaattaacatacccatcatctcacctaattatcatttttttgtgatgagaacatttaaaatctactcttttggccgggtgtggtggctcacacctgtaatcccagcgctttgggaggccaaggtgggcggatcacctgaggtcaggagttcgagaccagcctgaccaacatggtgaaacctcatctctactaaaaatacaaaattagccrggcatggtggtgcatgcctgtaatcccagctacttgggaggctaaggcaggagaattgcttgaatcctggaggcagaggttgcagtgagccgagatcacaccattgcactccagcctgggcaacaatagcaaaactccatctcaacgacaaaactactctttcagctattgtgacatgtacaatacattcttattaactatactcactatgccatgcagtaga

SEQ ID NO: 462737 - DNA, 580 bp, Homo sapiens
gttgaagagcatagtgctggcatctggtgaaggcctttgtgctatgtcatttcatggtagaagagcaagagagagtgagattgagaaggaaaggctgaactcatcctttttatcaggaacccactcccacaataactaatctactcccgagataaggccattaatccatttatgagggaagaccccttataacctagttacctcctagttacctcctaatggtcccatctttcaactctgttgctttggggattagcttccaacacataaactttgggggacatattcaagccatatcactgatgaaagtactgtattctttctgggtatgatgcatgtacagggccatgcacatttgggggctaaatgcatactttcgatgatgattgagatggtaacattcccacaggaaatgggaaatcagttggtattctccctcactgtgttcaggtgctgggtccatgaacactcctcttttctrttgcttgcatcagacttatctgtgtgttaactaatgacccaaagtcatgcgaggccagggtcccctggagtatttgcaagggggccttggctccataca

SEQ ID NO: 462738 - DNA, 560 bp, Homo sapiens
atgggtgttccagttgatccaggtccttgccaacatttggcattgtcaggtttgtttgtgtgtgtgtgtgtgtgtgtgtgtgtgtgtgtgtgtgtgtgtctaatttagctattctaatagatgcacagtggtaactaattttggttttaatttggaattttcctgatgactactgacgttgagcaccttattatgttcttctttatcatttatacgtcttttatgaactgtctgctagtcaagtattttgctcatttgtactgggttgttttctttttattactgaattataagcattttttacatattctgaatacaaattctttgttggatgtaggcaytgtgaaaattttctcttagctcctggcttgtcttttcattttcttaatggtgtcttttgatgagcaaaatgttttaagttcaatttgtccatttctttttttcatccttctgcatcctctctaaggaacctttgcctaaccttagattgtgaatatatttccctgtagtttcttctaaaagacaaacataaaagctgaaagtttttggctttttttaat

SEQ ID NO: 462739 - DNA, 317 bp, Homo sapiens
taaatacatggacaattgcaaaagctagtatcattgtaacttttgggttgtaactccactttttgttttctgcatgatttaagagactaatgcataagaaataattattaacttgtttgggggcatacaatgcataaagacataattttatgacatcaataactgaacaggagtggggctagaactgtataggaactgagttttcacatgttgaagttaagctggtataaattcacattasagtgttataactttaggatgttaaatgtaatccccatggtaaccacaaagaaaatagctatagaatatacacaaat

SEQ ID NO: 462740 - DNA, 620 bp, Homo sapiens
acaaatgatgtataattccatttatatgagatacttagtcaaatttatagatacggaaaagagccagggtgatgttaggaatagggagtctgccactgaactgcagacttaaaaatggttaatgtggtaaattttacattacacatattttaccctaattgttaaaaactaaataatttttaaaagtttcttctaatattttcctaacagtaacttgcatttattgagtgctttctatgtgttagccacatgcttttccaaacactttatctgtgctattttatataatttctgtaataatttcatgagctggatgctatcattttgcctattttcaaaataagaaaactgaaaaacagaaaagttaagtaactcatcaaaggtcacagagcttattaacagtagatttgagatttgaacccaagcaatgattccagtttccttatcattagccattacattatatcacttccaaaatgagtaagcarttagtactttgtaatgactaattattaagttattcttgatttggttgtcatcagatggtcttaaatcagctgctttgcaacgctatctttcctcagatataaaattgaaattcagaactccctgatgtgtgt

SEQ ID NO: 462741 - DNA, 530 bp, Homo sapiens
aatgaggattgatggccatggagctgtctcatcttgtctcctcctccctagggttgtaggggtttgcagaggaacatttcttcttagtgagggaggagcttggtggggtaggtattagggacacaggatttgagttcttcaaggagggctgcttgttctytttggaagactacctaggaaaagctgatattggtgatgccagcacagaaatctctactccattcacattctcagggattcgggtgaacccaccacttgcatcagggctgccaaggaggatccagggccggtgacacagaaaaccaggttctgatttgggcaccatgtccaggcctaggagtcctgaactgcacatcaccctagttgcagttttcttccattgtaaggtgtttcttctccatcctgccccacgatggcacttgccaaaatcacaggaaaagatgatatcgaaatgctaaccaataataggaatgttacatattttaagcctttttaggaatgtggtttaatgttgtcccgttaaaaactga

SEQ ID NO: 462742 - DNA, 530 bp, Homo sapiens
aatgaggattgatggccatggagctgtctcatcttgtctcctcctccctagggttgtaggggtttgcagaggaacatttcttcttagtgagggaggagcttggtggggtaggtattagggacacaggatttgagttcttcaaggagggctgcttgttctctttggaagactacctaggaaaagctgrtattggtgatgccagcacagaaatctctactccattcacattctcagggattcgggtgaacccaccacttgcatcagggctgccaaggaggatccagggccggtgacacagaaaaccaggttctgatttgggcaccatgtccaggcctaggagtcctgaactgcacatcaccctagttgcagttttcttccattgtaaggtgtttcttctccatcctgccccacgatggcacttgccaaaatcacaggaaaagatgatatcgaaatgctaaccaataataggaatgttacatattttaagcctttttaggaatgtggtttaatgttgtcccgttaaaaactga

SEQ ID NO: 462743 - DNA, 519 bp, Homo sapiens
caagaaaatgctcattaagtttggagttctgtttccttagttccttgtcctgacagcctaaatgatttcagatttttccagtagtgtgctcttctcccacctacaaaacaaaatgtacatgtgcttcctaggttaagggatggttttatttaggtccaactggatggtgggaactgagaaatactgcattcgaggaccggggcaagttctgaagctcctaagcagtgggtgcccacggagaatacatttcaggtccattattcatgacttaagttgatgttctcaagcattaggccaaagacctgaaaaatacaataatcyccgagaaatgtactgcccagaatgtcatattatcccacaaggaggaatgcctaaccaagactaggaaaaggacaaggccaaaccccttgctgggatgtacaaagtataattgcaaattgtcagtaatgaagaatgccgcatggtcagttgtgtttactggaacttgtctagtgatatcactgacagtcagcaagggag

SEQ ID NO: 462744 - DNA, 568 bp, Homo sapiens
tagttcaccagcaatggatccaaaccaagaaaaaaatccctgatttacctgaaaaagaattcaggaggatagttattaagctaattagggagggaccagagaaggtgaagcccartgcaaggcaatacaaaatatggtaccagaagtgaaggaagaaatgttcaaggaaatagactgcttaaagaaaatacagtaaaaaattcaggaaagtttggacacacttttagaaatgcaaagtgctctggaaagtctcagtaatagaattgaacaagtaaaagaaattcagagcttgaagacaaggtcttcaaattaacccattccaacaaagacaaagaaaaaagaataagaaaatatgaacaaagcctccaagaagtctgggattatgttaaacgaccaaacctaagaataattggtgtatctgaggaagaagagaatcctaaaagcttggaaaacatatttgggggaataatcaaggaaaacctccccagccttgctagaggcctagacatccaaaaacaagaagcacaaagaacaccaaggaaattcatcacaaaaagatcttccccta

SEQ ID NO: 462745 - DNA, 568 bp, Homo sapiens
tttttactgtaacacccaatttactggagaaatgaattgctcttgtgaagatgattttatgcagttataattatgatttaatactcattctttatgtctacatttmtttcaacttcaaatggcataatgtgcggtctgcgtgtgtgcataagttttgataaattttaactttctttaatagatttgtgtatattttgttgcagtaaatgatagactagtatcaacatacattttatgcatgcatgacatgcctagcttttccttaatttttttcaatatttctagtctacagggtttatttgtgagtcttttcaagttgccataaaacttcaaaaaaattccaatatatttattgaaaaaaattcacatataagtggccttgctcagttcaaactcatgttgttcaagggtcaactgtaaatctttgaaagtttttctctttatcctcctacaagcaacatttgggaaaaataagctaataataatttctttaagagataggttgcatagaatgtctataactgaaatatacatgaataaataagtacatatggatatacactcactc

SEQ ID NO: 462746 - DNA, 568 bp, Homo sapiens
tttttactgtaacacccaatttactggagaaatgaattgctcttgtgaagatgattttatgcagttataattatgatttaatactcattctttatgtctacatttatttcaacttcaaatggcataatgtgcggtctgcgtgtgtgcataagttttgataaattttaactttctttaatagatttgtgtatattttgttgcagtaaatgatagactagtatcaacatacattttatgcatgcatgacatgcctagcttttccttaatttttttcaatatttctagtctacagggtttatttgtgagtcttttcaagttgccataaaacttcaaaaaaattccaatatatttattgaaaaaaattcacatataagtggccttgctcagttcaaactcatgttgttcaagggtcaactgtaaatctttgaaagtttttctctttatcctyctacaagcaacatttgggaaaaataagctaataataatttctttaagagataggttgcatagaatgtctataactgaaatatacatgaataaataagtacatatggatatacactcactc

SEQ ID NO: 462747 - DNA, 569 bp, Homo sapiens
atttttttggtggaaacagggttttaccatgttgcccaggctggtctagaggtcctaacctcaagtgatcttcccacctcggcctcctagagtgctgggattacaggcrtgagccatcgtgcctggcccaggttctttattcttcatatttatgctctagacttagttccttccaagctgttgctagtacatagggtgcctttgtgcaattcagaagcacattttccttcttcaggatgctttgtcaagaactgagaacggtctgagatgttgccctacgtgcaagctaacgggtaagcctatcgcagtttcatggatggtggcagaagacttgagacttcttgctttcggacttgttttatttttttaatcatctcattcctcagatgatttcctattcgtacttcaactttttactaattatttacccgaagattttgatactttaagacatgatcaactccatatactactgggcctaatccttgttattggcacattgaagcaacataagccacctcagaactgagaaatacagattaaactagccaaatccatgacaatgactg

SEQ ID NO: 462748 - DNA, 569 bp, Homo sapiens
atttttttggtggaaacagggttttaccatgttgcccaggctggtctagaggtcctaacctcaagtgatcttcccacctcggcctcctagagtgctgggattacaggcgtgagccatcgtgcctggcccaggttctttattcttcatatttatgctctagacttagttccttccaagctgttgctagtacatagggtgcctttgtgcaattcagaagcacattttccttcttcaggatgctttgtcaagaactgagaacggtctgagatgttgccctacgtgcaagctaacgggtaagcctatcgcagtttcatggatggtggcagaagacttgagacttcttgctttyggacttgttttatttttttaatcatctcattcctcagatgatttcctattcgtacttcaactttttactaattatttacccgaagattttgatactttaagacatgatcaactccatatactactgggcctaatccttgttattggcacattgaagcaacataagccacctcagaactgagaaatacagattaaactagccaaatccatgacaatgactg

SEQ ID NO: 462749 - DNA, 569 bp, Homo sapiens
atttttttggtggaaacagggttttaccatgttgcccaggctggtctagaggtcctaacctcaagtgatcttcccacctcggcctcctagagtgctgggattacaggcgtgagccatcgtgcctggcccaggttctttattcttcatatttatgctctagacttagttccttccaagctgttgctagtacatagggtgcctttgtgcaattcagaagcacattttccttcttcaggatgctttgtcaagaactgagaacggtctgagatgttgccctacgtgcaagctaacgggtaagcctatcgcagtttcatggatggtggcagaagacttgagacttcttgctttcggacttgttttatttttttaatcatctcattcctcagatgatttcctattcrtacttcaactttttactaattatttacccgaagattttgatactttaagacatgatcaactccatatactactgggcctaatccttgttattggcacattgaagcaacataagccacctcagaactgagaaatacagattaaactagccaaatccatgacaatgactg

SEQ ID NO: 462750 - DNA, 649 bp, Homo sapiens
aaaccaacagcatgaaagagaggtgccaagatgaagaagccttgtaaaaggtcccagaagaaaacttgtatttaatatttgaagtaattttctcaaagacactgagaagttacaagattcataaaacaagacattaccggccatgccaatggatatgttaattaagttcacacttacgggcactaactccaacagaagcttcactttcacaatgtctcaatagccaattacatgtgatcaaattcactgtttatacagaggacttcacacaccaccaaccatgcaattaatatcaacgcacagggartaatcagaggcaggtaacaaaccacagcaaccgtgctggtgaccaatggttaacacaccagtcaagtgggtcctgagtccttggtagggtcactgcttctctctgctgacatccaccaagacaggagaaggtctcagacttaccccgggcagagtctccaaaggcatctctgagaaggcctggtctttgctgcttttataatcctcagccacttttcactttctattgggttcagtccaggtcttcggtggtacctggtgacaacaggtgctattacctctgtccattacatgtatgtttatcacattgaggcaggtgcagcttcactgtgggcttaatgca

SEQ ID NO: 462751 - DNA, 649 bp, Homo sapiens
aaaccaacagcatgaaagagaggtgccaagatgaagaagccttgtaaaaggtcccagaagaaaacttgtatttaatatttgaagtaattttctcaaagacactgagaagttacaagattcataaaacaagacattaccggccatgccaatggatatgttaattaagttcacacttacgggcactaactccaacagaagcttcactttcacaatgtctcaatagccaattacatgtgatcaaattcactgtttatacagaggacttcacacaccaccaaccatgcaattaatatcaacgcacagggaataatcagaggcaggtaacaaaccrcagcaaccgtgctggtgaccaatggttaacacaccagtcaagtgggtcctgagtccttggtagggtcactgcttctctctgctgacatccaccaagacaggagaaggtctcagacttaccccgggcagagtctccaaaggcatctctgagaaggcctggtctttgctgcttttataatcctcagccacttttcactttctattgggttcagtccaggtcttcggtggtacctggtgacaacaggtgctattacctctgtccattacatgtatgtttatcacattgaggcaggtgcagcttcactgtgggcttaatgca

SEQ ID NO: 462752 - DNA, 579 bp, Homo sapiens
ggcggtttggcagggctggaaacaggggacctgaggggggtggtagctggcaggtgggctgagaggtggcatgcagcaggactggggaggctgcctcacctctgttgtagccagatggaccctggctgagaacccagggaaagcaatgccacctactatgccgaaattggttttccagccccttgcgtgggaagaagtcagtagatcacttattaacttgtcaacacactggaatttttaagtgaaaaccctctcatagmattagaaaatccatatgtgtgacatatggaaaacattcaacaaatacagtgaacatttttctaacttgtgacacgtgtttgccatcaagcatttaaaaagaggtcctgtcctttattattttataaaacgtgtctctcttgattgcatgatttttccatttctcctccctgacattttcattctaaagttatatagtcatatgaggcttaattgctgctgctacttttagcagccttcactcactgttgagatttttatttccatataacaatgacgcacctagaattacaccataataattattggtaaagttaattg

SEQ ID NO: 462753 - DNA, 526 bp, Homo sapiens
ttgtctcccaggggatatttgacaatgttggaaaactttttgtttcgcgagggcaaccttagcatctactaggtcagtaatgctgctaaacagcctacgatgcacagggtggcactcacagcaaagagttatctggcctggaatgtcaatagtgccaagactgagaagcctcgaagcagatggaaagaagaaacaggtataagggcagttaggaagcagaatctactaaacttggtgaccgatagaatgtaaaagggtagaggagagcatagtccagggttactccaggtttctgttgtgggtgtctagagataagaaatacaagaggaggaacagtgttgggggaagaggataggtttagctttagacatattaaactgcytgggtgatgggatcaattgtacctcaaacttcagcatcctggaatatacctgtgtaacaaatctgtacgtgtacctccaagtctaaaataaaagttgacattttaaaaaataaagtttaaatacctataggatgtgaaagtgaa

SEQ ID NO: 462754 - DNA, 552 bp, Homo sapiens
cttccctttcttcccctgcctctgtgcctgaggaggccaygtgttccagaggcaaaggaggagggtggctgattcttgactgaactttgtgtgagtgagaaattaacttggtttcagccactaagatttcagggtgtgttgcagcagctgactttgtttacccttaaggatacatcctgtaactgactgaacctctcattctgcttcatgggcaggaagcttaatgtaatcccttccaagtcagctaaatcatgttaatcatttgtcatataaatttcctttctgttctgaatctcctgagagtcgcaatgtggtgggaatgggctcttgtctgagggcatcttgtgctgccattggctgatgtgtagacttgtctgatcttgggtactgcctgcccttcagactggctcccatggaggtgtccatcatccatctggtctctgttgcacaggccacagtgtggctgcctcccttgtcatgactgtgggacccttttgagcccgccagttctctaagtcctatctatgctcctgtcctttgggggctgatgag

SEQ ID NO: 462755 - DNA, 505 bp, Homo sapiens
agggcgcgcgcgcacattctcacgcttccccaacctccctcctcgcaccgggacgagccggcttcgccagagctcagcccrggcggtaggggctaggcacccatacccgttccgccccctcccgcagatccccttgcagtctccgccgacctgcccggcgaggagaggacgcagcaactcccccgccaccccggacttacctcggtgtctgttgctccatgccccaacctgcggcccgctccccctacgtaccagcccggcctcggcactcaccggaggtactgcgcgctctgcaggctcatcctccgccgccgccgccgcgtcttcccgcgaagcctccgtgggtctctcaggctcctcggagcggccccgcggcaccgcgggtgctggcggccgccgccatcttcctctcctccggctcctcctcgctcggcaggggggtgggggtgaatgaggcgagggggagggagtggggaaagctgctctcgctgctgataatggcccg

SEQ ID NO: 462756 - DNA, 505 bp, Homo sapiens
agggcgcgcgcgcacattctcacgcttccccaacctccctcctcgcaccgggacgagccggcttcgccagagctcagcccgggcggtaggggctaggcacccatacccgttccgccccctcccgcagatccccttgcagtctccgccgacctgcccggcgaggagaggacgcagcaactcccccgccaccccggacttacctcggtgtctgytgctccatgccccaacctgcggcccgctccccctacgtaccagcccggcctcggcactcaccggaggtactgcgcgctctgcaggctcatcctccgccgccgccgccgcgtcttcccgcgaagcctccgtgggtctctcaggctcctcggagcggccccgcggcaccgcgggtgctggcggccgccgccatcttcctctcctccggctcctcctcgctcggcaggggggtgggggtgaatgaggcgagggggagggagtggggaaagctgctctcgctgctgataatggcccg

SEQ ID NO: 462757 - DNA, 612 bp, Homo sapiens
tttccccgacttaccccttagactcaacaaggaagctggaggagaacagaagaagggaacatgatcaagtcttacaagttactctttttctctgacacatatatcttatataatacatatgacattacacatatrtaacatgctatatacaatatatatgatatatattatgttatgtaatatgtctagcagagcctcattataacagtctttgccatctgtcctgtaaagctgctaaattaatggaccaattaggtatttttttttctgatgctgtagtaactacttccctttttaaagtttatacttttaactcaattgcatagtatagcaatagttttctaaggaatttctccaaagactgtgtaattaaactgtgtgcaatcaaagcaaatggacagaattataggaatattggtcattcatattaataaagctatccaactatctttccctggtcagatagtctgagctcacatgggaaggcccttttgtgtcttatttgtgctgaagaagataaggaaagcattgagtaagaactaggtcaggtcccttccactgcttatcacagtcatcaaagcaaatttcttaggcttagaagtttctcgtctt

SEQ ID NO: 462758 - DNA, 639 bp, Homo sapiens
taccacaatatgttaatctgcttacctcttgaggatatctcagttacttctagtttttggtaattatgaacaaagctgctatagatattcatttataggtttctataaatgcaagttttcaattcactttgataattacctaggagtggtattgttgggccacatgataagtgtatgtttaactttgtaagaaactgacaaactcattctgccattttgcattaccacaaggaatgaacaagagtgcttgttgcaccatgtcttaaccagcattttgaattatcattttttaaaaagttgccattctaataggtatgttgaggtatcttattgcagttttcatttgcgtttctccaatgactattgtgagcatcttttcatatgcttatttgccacttgtgyatcttctttggaaaagtatctgttcagatctctttttgtctttaatttattattaaattgctttatttgtttttcttgttatgagttctttgtattttggttgtaagtcctttattgatataagatttggaactttttctgtagcttgtatttttattctactaacagcatttttgtgtgtgttggggggggagggcatgtttggtggaaaagccaaagtttttaattttgttgggt

SEQ ID NO: 462759 - DNA, 550 bp, Homo sapiens
gggtgtccttgggatctccccagtagattataacctttccaaagtcactaactacttcctcatttttgtattcaggtttctgtcatacagtaggtmgttaaatgcttccatgtttgaatgaacttaccacctccaagcttcaattttcacatctatagaataggaattatatatagctaccttataggacatatcaagggccctagaccagtgtcttgcacttgaagcatgctcagaaaatgtaaattctagcaaacgttgaaagagccagagggataggttgtgacgatgttaagtgtgataatgagaacctcagtttctacataactactttttgtgttacctgaatccacattgttatatcctgctgttttcatggttattagtgctaggaatatattgacttggatccacacacaattcagttgttattttttaagttaatgttttttatatatggatttatttttgcttttttaggctgattcagtgtgaaaatgaggtagggaaattgttgtttatcacagaaatcccagaattaatactggaa

SEQ ID NO: 462760 - DNA, 469 bp, Homo sapiens
gagtgaacacagggtttaaccatcttattgatctgtcttaaacatgataatgagcaaaatgaagaaggataaattatgtttttcaaaaagttaccagatagagawgaagggtcaaagaaattgaacaacgaatccttaaatagaatttctgtcctttccccacccccaaccttgacagggtctcactgtcacccaggctggagtgcagtggcacaatctgggcttactgcaacctctgcctcctgggctcaagtaatcctcccacctcagactcccaagtaactgcaactacaggctgtgccaccacgcttggttaatttttgtatttattagagacaggatctcgccatgttgctcaggctggtctcaaactcctgggctcaagtgatccacccaactcagcctcccaaagtgctgtggtgataggggtgagccaccgtgcctggcccaattttttaagagaggagag

SEQ ID NO: 462761 - DNA, 496 bp, Homo sapiens
cccaaaaacttgcatcatacttactgcaatttatctctttatctgctcaattcatgggctccttggaagttgggaccatgccttttcattctaggatctctagcacagatactcaatacatgatgaagggatacattctaaaagaaattagaaatcattggtaaatgacctgcaggtagcagtgatggcagaaagaggtattgctattccatctagtgaataaataatcaggacttgaatagcacattaattattcctgagaaaaccaaatggatttgtagctaaattagacttcatttttaaaaaatgtttttgccctcctattatcccaccctgacactcagaactctccttaatctgactgccaagacttttctagccttatccccagaactttccttcacaatcccatacaaactctgctgcttactcttctcccgctatgccttcattcctgcatctgtgcgactygtgctagttcctctttctaggctgc

SEQ ID NO: 462762 - DNA, 568 bp, Homo sapiens
tcactgttttggattctttcaacatgatgctttcactccctttactcattaaaataaaattatggataattcttttacaagacttttctaaaaacttttcctagaaatatttgagaacattttagatacttactctcaaagttctcgtttaatttaaaagtggaaaaaactcttaaaattttagtagaagtatttgtgatattgcatctattatatatcatgggtctctcactcttgatggcactgtcaagttgattcaacagataatttgtaattaaatggaagtattaaagcatgcatattattcaaatgattatgatgttcatcattaggtgtagcaaaaatagctgcattttgcaagttttttttattcaatataaagaattatttaatttggcaaattaagtaatgttataccaaaaatattgaaatgacaataaatcagtttcaaaagcaagatgccacagcttaacaatgytcataaagtttatttagagaatataaaatgtggcttactgttcactgtatgtcaagcttcgtggatgaagtatggtgcctgatgctaatc

SEQ ID NO: 462763 - DNA, 569 bp, Homo sapiens
taactggcaaatattagtaggcatccagtaaatatttgtgttttcatttcgattcagtagtaaacaataaataataattaaacagtaacaatagctaatatttgttgagtgcacaaaaatcaatccaagwtggataaaagacttaaatgtaaatccttaaactataaaaaccctggaagccaacctaggtaataccattctggacataggaaccagcaaagatttcatgatgaaggtgccaaaagcaattgcaacaaagacaacaaatgacaaatgggatcaaattaaatttaagagcttctgtacagcaaaagaaactatcaacagagtaaacagacaacctacagaatggggaaaaatattgcaaactgtgcatctgatgaaggtttaatgtccagcacctataaggaacttaaatttacgagaaaaaaccaaccccattaaaaagtgggcacaggatatgaacacatacttttcaaaagaagacatacacacaagttaacaggagtatgaaaaaaaaaactcaacaacattgctgatcattagagaaatgccaatcaaaaccacaa

SEQ ID NO: 462764 - DNA, 572 bp, Homo sapiens
ttatctctctttgccttttaaaaaggacaagatgacatttaagrgcaagtaattgcatccgtgtaaagcttctgctacagttttaaagaatcttataactttgtactccttaattcagcttaatgtatgtatgaattatataccttgcgggaatgatctggtataactgatctgaactgagattaaggaaaatctggtaggacttctttaaaaacaaggtagatttataaattcatttttctagttttgttgtttattattccttttcttaataggaaaaaataattaggaaggaaataaaatcatagcagaatcagtattacagaaggttgaagcagttatgcaactttgctagaaagtagtaggactggcaataaagcagttgaaatccttccccctgtagacacaaattacaccagtagcagggattctcattattttatacaattgttttctttttgtgtgtatgtggaatacaacattgtcttttcttgtgaaggatgagtatgtattacaattcttgtggtagcactggatagaattccagtgctactggagttctatcctagaat

SEQ ID NO: 462765 - DNA, 572 bp, Homo sapiens
ttatctctctttgccttttaaaaaggacaagatgacatttaagggcaagtaattgcatccrtgtaaagcttctgctacagttttaaagaatcttataactttgtactccttaattcagcttaatgtatgtatgaattatataccttgcgggaatgatctggtataactgatctgaactgagattaaggaaaatctggtaggacttctttaaaaacaaggtagatttataaattcatttttctagttttgttgtttattattccttttcttaataggaaaaaataattaggaaggaaataaaatcatagcagaatcagtattacagaaggttgaagcagttatgcaactttgctagaaagtagtaggactggcaataaagcagttgaaatccttccccctgtagacacaaattacaccagtagcagggattctcattattttatacaattgttttctttttgtgtgtatgtggaatacaacattgtcttttcttgtgaaggatgagtatgtattacaattcttgtggtagcactggatagaattccagtgctactggagttctatcctagaat

SEQ ID NO: 462766 - DNA, 584 bp, Homo sapiens
gtgtctggcctgcagtagctgttgttataaccagggtccaggcaaaccctggaacatgggaactacagaggaagctggaaaacctttgagcaaagatttggtaagagcataggctttatttayttccatacattctaacttatttggcaattcctgattgtagagtgtggggttcacctcctttggggcttacatgggtttgcctttgagtggagaattgagctgagtgcatatacccctcagattacattgactcttttgaggcaacaggctgcagagggtctcagaatagctggtgttgctatcacagtcagtgagcaaatatagactagtatctgataatctctcatgttgagtgtgatgagcaaaatgctaggtcgttttattcaagtatctgcataagaagttatgtgcagaagactggttggtctagtccatgcctttgcccgctaaatcagtatcatttaaacaaaattttaatgttttattctcttcttgtttatttgtttctaaaataaatatagacatgtctataaatttgtatatcttcccttttaaatattagaatgctatatatttgcttt

SEQ ID NO: 462767 - DNA, 469 bp, Homo sapiens
tctggtaatttgttatgcagcatgcaatacagatttcaataccctagagtgaggtgctgcttttatgcttctttgtagatgtagattttgattattggagcttacatctgggtgtgagggaaagaagtaggacatacatgctgtgagacacagtgaatagatagactgtcttctgggtttggaagcttccttaggctctgctctgctttcctgattctagggtccttactcatggtttttgtttctggggacaaacccagctgctgccaccctgcacagccytaagtacgggaagagtcaactagctcagttgcttccagtgtacatctacagttagtcacctgatgccacaggggagtagtctccaaactttttcatagcacactcttatttttaagtcagcttccctaacatatatacattcattccttaataacttatatatgtgttgttattaaatatgctccat

SEQ ID NO: 462768 - DNA, 469 bp, Homo sapiens
tctggtaatttgttatgcagcatgcaatacagatttcaataccctagagtgaggtgctgcttttatgcttctttgtagatgtagattttgattattggagcttacatctgggtgtgagggaaagaagtaggacatacatgctgtgagacacagtgaatagatagactgtcttctgggtttggaagcttccttaggctctgctctgctttcctgattctagggtccttactcatggtttttgtttctggggacaaacccagctgctgccaccctgcacagccctaagtacggraagagtcaactagctcagttgcttccagtgtacatctacagttagtcacctgatgccacaggggagtagtctccaaactttttcatagcacactcttatttttaagtcagcttccctaacatatatacattcattccttaataacttatatatgtgttgttattaaatatgctccat

SEQ ID NO: 462769 - DNA, 538 bp, Homo sapiens
tttctgtgaacctaaaattgctctaaaaatagtctatttaaaaagtaaatataccataaaatctatctgtggacatcctataattttttttattttaactcactttgttgactataaatacatgccattaattatacaagataataaattataccttatttataaagtaagaaataacatatgtattctttactatagtttggcactgatgtcttcacttggtctatttgttaaacattaatgtgtcctgtaaggtacgttcaaggaagagtggaaggcttttgcaatgtagaggggctgaaagtggcatcattactcatttatttacttttgtgtttcaacatgaaaatatgtatgtaactgttaagtgaatctatatattaaattattttacrtagtacagtctttataatagtttataatgagatgagagactttaaaatcttctctgtaaagttcactgttgtgacagcatgcttcaaagtactcttgaacttgtgtaagaattatgcaattttctttcaaaaaagatgagggt

SEQ ID NO: 462770 - DNA, 538 bp, Homo sapiens
tttctgtgaacctaaaattgctctaaaaatagtctatttaaaaagtaaatataccataaaatctatctgtggacatcctataattttttttattttaactcactttgttgactataaatacatgccattaattatacaagataataaattataccttatttataaagtaagaaataacatatgtattctttactatagtttggcactgatgtcttcacttggtctatttgttaaacattaatgtgtcctgtaaggtacgttcaaggaagagtggaaggcttttgcaatgtagaggggctgaaagtggcatcattactcatttatttacttttgtgtttcaacatgaaaatatgtatgtaactgttaagtgaatctatatattaaattattttacatagtacagtctttataatagtttataatgagatgagagactttaaaatcttctctgtaaagttcactgttgtgacarcatgcttcaaagtactcttgaacttgtgtaagaattatgcaattttctttcaaaaaagatgagggt

SEQ ID NO: 462771 - DNA, 505 bp, Homo sapiens
cttatataatgaagcttcaattaagaactctggacatcaaaactccagtgagcttcctgggttggtcatactccatgcatattatcatacctcaatattgggaaggtaacacatcctgaggacaacagaagcttcgcatttggagccatcccagacttcaccctatgtgtctcttcctttggctgattctaatttgtytccttctgttataataaaactgtaatcctaaatataacagtttcctgagttctatgagttgttctagaaaactgtccaacctgaaggaatccatgtggaccacgaatttgtagccagctagcctgaagtgagggtggccctggggacccctgaatttgtggtgtcagaagtgaggacagcctttgggaactgttccctccacctgtgcagttcagctacactcctttgcactgtatgactccatttttataaaatttatgaaattcttgaacagaaaaaactaaagggacagagaagacaccagtgg

SEQ ID NO: 462772 - DNA, 623 bp, Homo sapiens
ttctcttctggtttgcattatttctgacaagaaatacgtgttcattttacctttgtttgtctctatgtaatgtgtcttttttycccctcaggttttgtaaaggttttctttacaaattttaatttttaatttttaatgtttgtggaaacttaatagggtatgtgtatatatttatggggtacatgagatatttttatacagacattcaatgtgtgataaccacatcatggtaaatggggtatcccctgcaaccgtttatcctttgtgttgcgaacaatccaattatactctttcagttatttttaaatgtataattaaattgttattgactgtagccacctgttgtgccgtcaaatactaggacttattcaatctttctctctgttttttttgcacccattaaccatcccgaccttcccacacattccccactactcttctctgcctctggtaaccatccttctactgtctatctccatgagttcaattgtttggatttttagcccctccaaataagtaagaacatgcaatgtttgcctttctgtacctggcttatttcacttaacataatgacctccagttccatctatgttgttgcaaatgacaagatctcattctctctt

SEQ ID NO: 462773 - DNA, 623 bp, Homo sapiens
ttctcttctggtttgcattatttctgacaagaaatacgtgttcattttacctttgtttgtctctatgtaatgtgtctttttttcccctcaggttttgtaaaggttttctttacaaattttaatttttaatttttaatgtttgtggaaacttaatagggtatgtgtatatatttatggggtacatgagatatttttatacagacattcaatgtgtgataaccacatcatggtaaatggggtatcccctgcaaccgtttatcctttgtgttgcgaacaatccaattatactctttcagttatttttaaatgtataattaaattgttattgactgtagccacctgttgtgccgtcaaatactaggacttattcaatctttctctctkttttttttgcacccattaaccatcccgaccttcccacacattccccactactcttctctgcctctggtaaccatccttctactgtctatctccatgagttcaattgtttggatttttagcccctccaaataagtaagaacatgcaatgtttgcctttctgtacctggcttatttcacttaacataatgacctccagttccatctatgttgttgcaaatgacaagatctcattctctctt

SEQ ID NO: 462774 - DNA, 456 bp, Homo sapiens
tccttcttgctccatggtccaaaatatgcctccaggaagaaagccagatgattttatggctcctctcatttctttctcttattaggtttttttgccctatgctactggttgttcagtatctgaaaacagttgttttacatattttgtccagttttatcattgtttaaggtggaagggttaatctggttcctgttatttcatcatgtccagaagtgaaagtatcctccacttaaaaagaaatccatttctctttgatgccactttttcctttgtgaagctggcaaactcatatactctgagtgagggggcatttggagggaaaaggcagctggagagtagagaagatttgaaatagtcacttyagagagaaggagagcaagtcaacagtagaaatataactggaatgctagatagaaatacaaatggagggatgttttgagaatttacggtaatact

SEQ ID NO: 462775 - DNA, 456 bp, Homo sapiens
tccttcttgctccatggtccaaaatatgcctccaggaagaaagccagatgattttatggctcctctcatttctttctcttattaggtttttttgccctatgctactggttgttcagtatctgaaaacagttgttttacatattttgtccagttttatcattgtttaaggtggaagggttaatctggttcctgttatttcatcatgtccagaagtgaaagtatcctccacttaaaaagaaatccatttctctttgatgccactttttcctttgtgaagctggcaaactcatatactctgagtgagggggcatttggagggaaaaggcagctggagagtagagaagatttgaaatagtcactttagagagaaggagagcaagtcaacagtagaaatrtaactggaatgctagatagaaatacaaatggagggatgttttgagaatttacggtaatact

SEQ ID NO: 462776 - DNA, 583 bp, Homo sapiens
gtcagctcaatagacatcttacccagctggagcaggacaagcgtcgactggaggagaacatccatgatgcagagagtgccctccgcatggcagccaagtgagcatttggaccttggggagatcacttaaaacagacaaaagatcaattcttactttcatgctccgggttttagccctggataatacagtgttagaaaacaaaagtacagctgtctttctttgaaattctctgatatatcctcaaaaaagaaaaactcttaacatactaaatgtatattttattgagaaacctcagaaaagtataagcttctatgtaacctctaattatgcttattttgggctctgttayagtgttacatgttagaaactatgttttattaatgtgaaatgtaagactctaaaagttttgcatagtatcttctgttatacattcctattctcttctgctccactgtctccgaaattttgttctgcatatattattatatactaatattgcgagtaatatttccataaagaaatgttagcatacaatcagcatgtgtatcatagcatttaaaaaatacaataaaacatattgacc

SEQ ID NO: 462777 - DNA, 606 bp, Homo sapiens
gttcttcagttgtagttcatcttttgatttttgtgtcatatggaaagaaagctgtctgtaaatctggtctatagccattgtagatttgcttttgctttatggcttttcctctcttcagatttagtagttaattattttgatttatgtctttagaaaattctattaatatagtggctttaaagttatgaattacttttyaagcttgtagtgaaaacttaggaaagataattggggataattctgttttctgtgaggtatgagtgagaatgaatgagtgataaggaggtggcccagagagtcctctgaaagtctcaggaagatgcaggcccacctgtcttcgtgccagagttcaataggtttatttttctggccaccttggacttcccattggcattttgctgtctttgatgaaacaaagagtagtatggaaggagggtccaggctctttcatgggatggtaaaaatggatatggatacatccaaactctttaacgaagtttactgtgcaccgtaaaatagtatcactatttatatttcttactgttttaaacacgtgtgttttcaaggtttgtaccattcattctagaataaaactaagtcttaccc

SEQ ID NO: 462778 - DNA, 590 bp, Homo sapiens
atatttggaaattttccacactttatttttgctatggagttatactttaattttatatggattaaatacttcatttgatttctatcctttttaagtttgttaaagttcgttgtatgctccaatatatggtctgtcttkctgaaagttaaatgtgcattttaaaagaatatgtattcttttgttaggtagactgttctatgtatgtctgttatgtctagcgggtttatgttgttcaagtcttctaaatccttgattgtcttttgtctgggtgtcctattcattagtgaaagtatgatgtcaaagtctccaaatgttattgttgaactctttttcctcttcaacttggtcagttttgcttcatatattttgagattatgtggaaattgttatatcttcttgatggattgactcttttatcattatattatctttgtttcttgcaataattttgactttaaagtctttcgtctgatattagtgtaggcgctccagctctcttggttactgtttgcgtgggctatctttttctgtcttttcacttttaacctattggtgtctttgtatctaagatgagtctgttatagacagtg

SEQ ID NO: 462779 - DNA, 590 bp, Homo sapiens
atatttggaaattttccacactttatttttgctatggagttatactttaattttatatggattaaatacttcatttgatttctatcctttttaagtttgttaaagttcgttgtatgctccaatatatggtctgtctttctgaaagttaaatgtgcattttaaaagaatatgtattcttttgttaggtagactgttctatgtatgtctgttatgtctagygggtttatgttgttcaagtcttctaaatccttgattgtcttttgtctgggtgtcctattcattagtgaaagtatgatgtcaaagtctccaaatgttattgttgaactctttttcctcttcaacttggtcagttttgcttcatatattttgagattatgtggaaattgttatatcttcttgatggattgactcttttatcattatattatctttgtttcttgcaataattttgactttaaagtctttcgtctgatattagtgtaggcgctccagctctcttggttactgtttgcgtgggctatctttttctgtcttttcacttttaacctattggtgtctttgtatctaagatgagtctgttatagacagtg

SEQ ID NO: 462780 - DNA, 590 bp, Homo sapiens
atatttggaaattttccacactttatttttgctatggagttatactttaattttatatggattaaatacttcatttgatttctatcctttttaagtttgttaaagttcgttgtatgctccaatatatggtctgtctttctgaaagttaaatgtgcattttaaaagaatatgtattcttttgttaggtagactgttctatgtatgtctgttatgtctagcgggtttatgttgttcaagtcttctaaatccttgattgtcttttgtctgggtgtcctattcattagtgaaagtatgatgtcaaagtctccaaatgttattgttgaactctttttcctcttcaacttggtcagttttgcttcatatattttgagattatgtggaaattgttatatcttcttgatggattgactcttttatcattatattatctttgtttcttgcaayaattttgactttaaagtctttcgtctgatattagtgtaggcgctccagctctcttggttactgtttgcgtgggctatctttttctgtcttttcacttttaacctattggtgtctttgtatctaagatgagtctgttatagacagtg

SEQ ID NO: 462781 - DNA, 555 bp, Homo sapiens
gtttgtcagttttttcactgtctccaataatttaataacccatgctatttgtctaaaaacagaaaaacataaaacttttattttatattttatttgtgaaaagaaaatccaactaagttctcatgtaagatgctcacttttttatactactgtaaagtcaaattcatacaagaaaaaaaaaaaacctgcacagactgtcgtcagtacagataagccagggacaacgtgaaaacccttctatgtgagtataggcagtggacttaattgagacttgaagtcaggcttagcaatgtccaatcactcaaaactatgtaggggcaccatccrcacttaatgcttaaacactgtttgatgttgccaaacttcaaagaaacaacttcactcacaacataatttttttttttttttatgagatggagtctatctctgtcgccaggctggagtgcaatggcacaatctcagctaactgcaacctccgcctcctgggttcaagtgatttccctgcctcagcctctcaagtacctgggattacaagcacacaccaccacgcccagc

SEQ ID NO: 462782 - DNA, 555 bp, Homo sapiens
gtttgtcagttttttcactgtctccaataatttaataacccatgctatttgtctaaaaacagaaaaacataaaacttttattttatattttatttgtgaaaagaaaatccaactaagttctcatgtaagatgctcacttttttatactactgtaaagtcaaattcatacaagaaaaaaaaaaaacctgcacagactgtcgtcagtacagataagccagggacaacgtgaaaacccttctatgtgagtataggcagtggacttaattgagacttgaagtcaggcttagcaatgtccaatcactcaaaactatgtaggggcaccatccacacttaatgcttaaacactgtttgatgttgccaaacttcaaagaaacaacttcactcacaacataatttttttttttttttatgagatggagtctatctctgtcgccaggctggagtgcaatggcacaatctcagctaactgcaacctccgcctcctgggttcaagygatttccctgcctcagcctctcaagtacctgggattacaagcacacaccaccacgcccagc

SEQ ID NO: 462783 - DNA, 567 bp, Homo sapiens
gcatttactatcataatcccctttgcacagatgagaaaattgaacctcatacaggtgaagtgatatgcacaaagtaatagagcacttctgctcaaaaaaataaacaaaaaaagaattgaggatcctggttctttccactatgccacccttcccccaggacgttatgcagaggccattttcagctttaggtaaggaaacactagccaagcagcatcgctgtctgaaaacacagtgggckgtcccaggaagcagtgagctctctgttgttatatgcatccaaacagaggccggaaaatcatttgtctgagatgaggtagtgatttctgcaaatagggatattacactgatgacttctacgtttctggatgtaacatctcatgattctattcccagttacgtggacttgggaccatccttctcctctctagacctcatttttattccatggagttatatgatcattaaggtgccttgtaggccttgcattaaaaggttcctagttttaaagggcagagatggaggccaaggacactgagcactggctaggatttctctcactgagggtcc

SEQ ID NO: 462784 - DNA, 567 bp, Homo sapiens
gcatttactatcataatcccctttgcacagatgagaaaattgaacctcatacaggtgaagtgatatgcacaaagtaatagagcacttctgctcaaaaaaataaacaaaaaaagaattgaggatcctggttctttccactatgccacccttcccccaggacgttatgcagaggccattttcagctttaggtaaggaaacactagccaagcagcatcgctgtctgaaaacacagtgggcggtcccaggaagcagtgagctctctgttgttatatgcatccaaacagaggccggaaaatcatttgtctgagatgaggtagtgatttctgcraatagggatattacactgatgacttctacgtttctggatgtaacatctcatgattctattcccagttacgtggacttgggaccatccttctcctctctagacctcatttttattccatggagttatatgatcattaaggtgccttgtaggccttgcattaaaaggttcctagttttaaagggcagagatggaggccaaggacactgagcactggctaggatttctctcactgagggtcc

SEQ ID NO: 462785 - DNA, 599 bp, Homo sapiens
gatgacttctacgtttctggatgtaacatctcatgattctattcccagttacgtggacttgggaccatscttctcctctctagacctcatttttattccatggagttatatgatcattaaggtgccttgtaggccttgcattaaaaggttcctagttttaaagggcagagatggaggccaaggacactgagcactggctaggatttctctcactgagggtcctgtttagccaagggacctgggaactttggaactttacttccttcccaattttgtctccaactggccacaaacaatcccgtactgtggaaaattacaggcagcaaagcactggtttgatgacaaagtgttttggagccattcccatagccggcttgagaacctgtactttcccacacaccacctccatccccaccaccctcccacaaaacctctcgttttattagaattccaatcatgctccagtgattttgaatccccagaattcctttatcccagagcaagagtaattggatttttttccttctcagccccggccgcccctccacttcatcagcatgctgggctctgggcccacccagccccatgaaggaattgaa

SEQ ID NO: 462786 - DNA, 599 bp, Homo sapiens
gatgacttctacgtttctggatgtaacatctcatgattctattcccagttacgtggacttgggaccatccttctcctctctagacctcatttttattccatggagttatatgatcattaaggtgccttgtaggccttgcattaaaaggttcctagttttaaagggcagagatggaggccaaggacactgagcactggctaggatttctctcactgagggtcctgtttagccaagggacctgggaactttggaactttacttccttcccaattttgtctccaactggccacaaacaatcccgtactgtggaaaattacaggcagcaaagcactggtttgatgacaaagtgttttggagccattcccatagccrgcttgagaacctgtactttcccacacaccacctccatccccaccaccctcccacaaaacctctcgttttattagaattccaatcatgctccagtgattttgaatccccagaattcctttatcccagagcaagagtaattggatttttttccttctcagccccggccgcccctccacttcatcagcatgctgggctctgggcccacccagccccatgaaggaattgaa

SEQ ID NO: 462787 - DNA, 569 bp, Homo sapiens
ggaagtttttccaacagatagtaccatatgtaattcactaactctaagatgtcatggattataagacgctccattatttttgtgcctttaagaaagaaaaaagtacagtctgttaaactataaaatagcatcagctgtaaagttcatcaagatctcagaaatgttaaaatatgtgtaaaaatgtgtcttataaccaattaacatgtaccattaaagcaatggtattawcttagttttttttccccagaaggaaacggcgagacaaatattcagaagctaatattttatttttgagataatacaagacacactggtaaaggagagggaatatgaaacatggagggggaaaaaagccaataaagggcctctacaaaataaattacttttgtgggaaaattgagcatactttcactgagaaaattctaggagccagtactgaacatgtacctcagagttattttacccaaggtgcaagggagctaggttatttatgcaccaattcctgttagtacttggttgaaggctactttttttttgagacaaggttccatctaggctggagtgcagtg

SEQ ID NO: 462788 - DNA, 574 bp, Homo sapiens
ttgtggaagaaaggctgttattttccagaaagtgcagtggaaatcagtctaaaggcagataaaaagatgaaaaggsggcaagaacggacttagtctcagtgcctcatgctggtcagggatccgtatcaatgtaatgtgtccctaagtgtgcagagatggtgctttatggctttcagaatgccttcacatccacaaatgtgttttatagtcacaaaacagcttgctgttcccacaatcagccactgtttcaaactactgtgcatttgcattcactattctcttgtctacctataaaacttcaacatggctccccttaaatgcctcctccttgcagccttcccttggcccaggtggaattaatcacaccttcctctgtgctcctagaactcacacatactgccattttcataggtagcttacagtaggtattggaatgtagccctgtcttccccactagaacacaaccttttcaagggcaggggtggaatcttattcatctttatgaactgaacatttagtaccatgtctggtgaatggtaggtgctcaatttgattgacatgaagtaagaaaccc

SEQ ID NO: 462789 - DNA, 481 bp, Homo sapiens
ttttgttgggttgcaatattaaatatatatgtatatatatgtatgagctgaatccagcccaactgatccacgacgtcatgtaacataagcaagaaataaatatttgttgtccttagcctctgagatactggggttgtttattattgcaacaaaacctgactaatacactcataaaataaaccatacatactgtcataactcgttttctcatttcttacttaatcaactgccacatagagctactgaccatcatgggttaaggaggtgatgatttgctagtgtggaaagctcacaagcaatagagcctttgagctatttatcttatattatattacattatattatattatattatattatattatatyatatcatatcatatcatattatattatattatattggattatatagactttgataacctcctgtggcttggatttatcatcacaaaactctgtgaattcataaaaatgaggtt

SEQ ID NO: 462790 - DNA, 546 bp, Homo sapiens
gatgactgcccagctctgagattctctaacatttaattccgaaatgccaagagagacagtgtgagttccactgttttggaatgtctagatacatgaaactacttaaagacagtagcacttgagtttctagcaaactaaagccatgatgataagatatttgtaagcagaggaagccagaactcaggtggaatctggggaactttggagggagatgaacttggaagggcctataagactaaaaggtgtcccagtgaattggtcagcttggattcacaacctcagactgtgtggatttaccatcaataggcaatgcccgtgggctgcagtgatcagcaacatcctaatgagaatgtggataaatcaataattagggtctgagctaaattagcaaaatacagcaacataactattatccattcagtgttcattatatatcatcctttcttctgaactccaagctcatatacttaaytgatcactggacatttccacatggatgtcacgctgacacctcaagctcactcaatgtaccaaagctgaattcaa

SEQ ID NO: 462791 - DNA, 634 bp, Homo sapiens
ggagagacattttcatgaagaggctttggaatgagaccaacctggatttgaatcctgctatgccacttcctacctatgtgaccttaggcaagttacttaacctctctgagtctcggtgttctcaactggcaagacaagcagagctgctcagctcagaaggttgttgttgaggattgcactaattaatgttatagcaagggagctcctgaacacatagcaggtgtcttaaagtgacccttgtgttaaagaataaggaagatcctcaagcatcagtgattaaaggggtaagagaggaaattagtggtccagtgaagaaaattgtgatggtattgctgacaatcacttcattttgaactgtgccagggacataattggtataactcaatttcctrtctgttgggagtgtggtgtgagcttcagatgaaacgagggctcatattgacaacagagaatgagaaggcatttggaagaataaaaagaatgcagacctgagctgtctcaccctccaccccctgcctcagtcttctcttctacaaaatggggagaagaactagataatccgaaaagccccttctggatataaaactctgcatatcaagaagaaacataatggtgggctgagttcagtggactt

SEQ ID NO: 462792 - DNA, 634 bp, Homo sapiens
ggagagacattttcatgaagaggctttggaatgagaccaacctggatttgaatcctgctatgccacttcctacctatgtgaccttaggcaagttacttaacctctctgagtctcggtgttctcaactggcaagacaagcagagctgctcagctcagaaggttgttgttgaggattgcactaattaatgttatagcaagggagctcctgaacacatagcaggtgtcttaaagtgacccttgtgttaaagaataaggaagatcctcaagcatcagtgattaaaggggtaagagaggaaattagtggtccagtgaagaaaattgtgatggtattgctgacaatcacttcattttgaactgtgccagggacataattggtataactcaatttcctatctgttgggagtgtrgtgtgagcttcagatgaaacgagggctcatattgacaacagagaatgagaaggcatttggaagaataaaaagaatgcagacctgagctgtctcaccctccaccccctgcctcagtcttctcttctacaaaatggggagaagaactagataatccgaaaagccccttctggatataaaactctgcatatcaagaagaaacataatggtgggctgagttcagtggactt

SEQ ID NO: 462793 - DNA, 552 bp, Homo sapiens
tttgcactgtattcatttaacaagtattgagagtctctgtgctagatacctatgctaaataagcatgggatacagagatgaatgagagagctctacatttctgggattctctgccatgttcttactcttctctagcaggcagatgcagaggctaaaacagcctctcaatcttcaaaaaggtcctgagacttaaggaggyagtatagcctctccttctattccacaaaaagagattactatttctggaaacttcttcacagtattaggtcactaaatttttttttctcactgtgtaactccaataactaaagataagacatactaggcccttctttttcagactaagatttgatctctgtacactagatatcagaattctgctacctagtatttttttttcaatttagattccctgaagccaaaatagaaaaagaaaaaattatataaaataataaccaaataaatatccccgatgcactaacccctctctctaaaaaattttttttgacattcgacagagtataaatataaattgtgagcatttaacaccat

SEQ ID NO: 462794 - DNA, 589 bp, Homo sapiens
tgagaatggtgaggaatgaactagcaatcgattttattgatcatttcaccagttgagagagatttggtttgtttatactttttggctattataatagtgtgccatgaacattcatgtgcaagtttctgtatggacatgttttcaattctattgggtacacagctaataaagggctgtttcaatggtcaccttcacttgggaaagatacaaatcactacacatgaactatcttttaagatttcagtttggctgttttgatttcagctaatttctctattttagctayataataattgtgtaatctttctgtcattgttttccttagacttgctgggaagtaaaccttctgaaatttttttgtcaccatttctcacgtgcactggtcaggcaatcttacctttactcagaaaatcaagccttaatttccaaggtctatctgttcttcagcatctcactaaggaaactgtcctgtcatttgatgtaaacaaacaaaaattctgtattttatacttgtaaagctcagatatgtcttgctagattcaattttagttaaaacttagggccctattattagagtacctatgacaca

SEQ ID NO: 462795 - DNA, 338 bp, Homo sapiens
aagctttcatactttggtatatcattactaatttattaacaagttttttcgttgtggtggactgccccaaattatttttaaaagaggcagaaaatacataagttaccaattaattaccttagtttagaagattaaaaattgttaatagtctgcctatcaactgcaacaaagtwgtcaaggaattggtatgactgattatagttgattttaaaatggaagaaagatgtgataatgattttggtaataataatatgtaacattactgaacacttacggtgtgatacacatttttctagacactaaaccagatccaattactcatcccatgaatttttaag

SEQ ID NO: 462796 - DNA, 318 bp, Homo sapiens
cgccggggcctcgcctcagccccgcccatatgatgccccgcccctccggtcccactcactctcgcttttaactccgagaacccgctcttatccagttcagtctccatgkccccgccgcctttgcacattgcacttcccggcagcctccgcgtgggcgccccctccaactcctgccttcgcccgcgtttctgctctgtgtggttactaggaccaacgaggagggcgttaggttagtccctgtcaccttgtcggggatcagtctgctgtgcgtgctcagactcttcccagagccagcagcaagaacccgaggcattaata

SEQ ID NO: 462797 - DNA, 586 bp, Homo sapiens
aaccctgtcctaaggcgttgagaatggtttgttttctgaatgctgaaatagagaaggaaagggagctagtgacgctgaagaaccaaggagatttggggggcaggtgggggcatggctttctaggcagagggagctgcctgtgctgagcctggggcaaagagcaacggcagagaagaaagaaggaaagcaggttctacggctacagcgtggctgggcctggtccaaaaggtcatcaagatgcttggtgaagaatttttgataattggacatgtagaagtggatatttagaaacaaactgcatttctaaaaaggaaaactataatataataaaacaggctaaaatatgttatagtcagtaaattaggcatttatgaagaattttaggctgggcgaggtggctcacacctgtaatcctagcactttgggaggctgaggcgggcagatyacttgagatcaggagttcgagaccagcctggccaacatggtgaaaccccgtctctagtaaaaatacaaaaattagccaggcgtggtggtgggcacctgtaatcccagctattcaggaggctgagccacgcttgaaccctgg

SEQ ID NO: 462798 - DNA, 562 bp, Homo sapiens
gttctagctgaagataacactaattctggacttcctaagagtcaataaattcttttttttttttttttttttttgagacagggtctcgttctgtcacccaggctggagtgcagtggtgtaatcgtggctcacccgcagcctcaaactcctgggctcaagcaatcctcctgcttcagcctcctgagtagctgggactataggtgtgtgccactgtgtccagctatttgttttaaattttttttaaagatgaggtcttgctatgttgcctaggctagtctcagactcctggcttcaagagatcctcctgcctcgaccycccaacatgctgggattacaggtgtgagccaacacacggccaagttcccttttttatgtaagccagtctgaggtggagttttgtcacttgcagcattagaatttatctacaaaacatgtgataaatgacagtagcaataaactgtcttgcttattcaaaacactgattcaatgttgactgccaaaacattcagtaagacaaggaaaggtatactgagctctggcctggctggagactatctgttga

SEQ ID NO: 462799 - DNA, 334 bp, Homo sapiens
gtttgaccatttaagccctgtaagtttcattttagaaatctgtcataaagagatacttggaaaaaataaaaatacatgtacaagagtatttattacagcaatttatatatttgtaaactttgctaaataaagcaaatatctcttgatgggtaaattactgtacctctatataayagaaaattaggcagccactaaatgtttatatctttattcgttgatatagaaagtcccctgtgattcattgttaaatgcaaaaggaaagcggtaaaacaacatatatgatctcatttatgttaagtttatactgtcataccctcacacacacatacagaat

SEQ ID NO: 462800 - DNA, 201 bp, Homo sapiens
aataacataatgtcaaattcttgatttttacattcaaaatttcctgtgaatttttattaaacttcataaatccaaattgaagcccgcgggcaaattgttctgcttgatttcctttagcaaaagatcaaaactatttatctgcctttcctcatgtggttcrtccacttagaatgctctgtcactcatttcaacatcctatcc

SEQ ID NO: 462801 - DNA, 593 bp, Homo sapiens
caacaactgaatttaataaaaacaaatccacttttagaaataacattcttagtaagacttagaaaagaaattgctaacccttgttgatttaaaaaacaaagtactttgaatcaaatgagccaaaaaaagaagaaaataagcacataataccctcacccttttcccttctgtaaacatctggatcctttttgtggcgctttcaaatttcaaaatggcttaatttagttggctaggatgttctggatggaaaacggggaggaagggtaacttattttatgagtaaacaatagtattgtaaatagctcaattttcttcctttgtggttttaacaatacacaatcggactcttccattgcagagcgtgactttgtatgtagatggtgaaaccatacatgctgcaaataatatctgggagtttatgagyagaacttttgtgaaaatctactgagaacccccatctattgtttttagacttctagtacagtttatgtgtcccagcatagttcaaacgcttttgtcttcatttactctggatttcccagatcttctccattaccacaagacagctcccagatgatgggacaagtatggta

SEQ ID NO: 462802 - DNA, 607 bp, Homo sapiens
tctcaaaaaaaaaaaaaaactcttatttttataagtttacatccagaaaagtcaagaagcgtatgcatgtagtcatgattcctggggtgtgktataaggggatattttcatattctctgttttatttgtattttttaccatcataatttttgattggaaaaacaaaagcttttaagaagaatctcatatttattgagactttaccataaaattatatttatccagctaacatcattatgttagactcgttatctcatttggttaggccatggtgttaatgaagcctaccctgaagttttgtttcctgtgtaggtcaattagctctgcacagaaaacaaaatgactcgtttgtgcattatctattcccccaaggagccaggctttcaagtttacctgagttcgatggcaagagacattgcttggatgttgcacagcatagaaaagaaaaatcaactcaaaccatgtgaacctgggaggtgctggagggtgcggagcgggggcagttagtatgtctttcacctgcaaagaatgactcatatcttactctctttgaaggatctaccttgtttttcccggacaaccgctttcccagtttcgaaagttaaat

SEQ ID NO: 462803 - DNA, 438 bp, Homo sapiens
ctactatgtgctagtcagattgttttgttaatcatctaccccacttttctgtatgtaaatatgagaaaacaggcatgatcttcctacacctcaggaaccttgaggcagagctaagatcagaacccagatatcctgaatcatagacttttgcatgtcccactaggtcatgttccttctaggggttaagttcactggagatccctgtgcccacatgtgcccatataaccctgtgtggcaaacacacaggggacacccttcagaaaagrgtgcacccttcagaaataacaacttcacatgaatgagtgccatcttttggaaagggtgttttttcaaaaaatataatttcataccaagacaagtcatacaagtgtatcacaggtaagagaatcatatcttcccaaattcctatcaggatgacctgatctaaaaatgtaagaa

SEQ ID NO: 462804 - DNA, 527 bp, Homo sapiens
gctgttttttgtgccatcctgttattactgcaccttagcagtaatcaattctggtatcaaatattttgatactcacttagaccaatgtattaactcttctagattttgcttatctccagtacataaacagtaaacaaaagaaacaaaacttaacaaataaataacaccaccctgacctagtcraaagtatgtaggatgtgaatttaagttctggctatgtcacttaagatatgaaatttaagcaagttgtgacatcacagagttccagttttctcatcagcaaagtaagaatactatcttatggatagcattaatttgattttcaaatcaggttaggtacataaaagtgcctaaaattttcactgaattagttgaatttgaataaaaatctttgtttttcattataaaaatgttcaagccgtgaagaaatagtgggcatatttgaggtatctgggacattttctttcttctaaaatctgtccataggtataaagggtcatttaatgttttaggagtgcctgatcaat

SEQ ID NO: 462805 - DNA, 527 bp, Homo sapiens
gctgttttttgtgccatcctgttattactgcaccttagcagtaatcaattctggtatcaaatattttgatactcacttagaccaatgtattaactcttctagattttgcttatctccagtacataaacagtaaacaaaagaaacaaaacttaacaaataaataacaccaccctgacctagtcgaaagtatgtaggatgtgaatttaagttctggctatgtcacttaagatatgaaatttaagcaagttgtgacatcacagagttccagttttctcatcagcaaagtaagaatactatcttatggatagcattaatttgattttcaaatcaggttaggtacataaaagtgcctaaaattttcactgaattagttgaatttgaataaaaatctttgtttttcattataaaaatgttcaagccrtgaagaaatagtgggcatatttgaggtatctgggacattttctttcttctaaaatctgtccataggtataaagggtcatttaatgttttaggagtgcctgatcaat

SEQ ID NO: 462806 - DNA, 587 bp, Homo sapiens
  misc_feature (1)...(587): n = A,T,C or G
ttgttattgcagcccaaacagactaagacagactgtcataaccaaataccatagcctggatggcttaaacaacagacatttatttctcagagttttagagactgagaagttcaaaatcaaggtgttgcctgattcaaattccctttgagacccttcttcctgactttcrgacagccactgcctttttgctgtatttctacatgatgaagaaagaaacagaaataaatctggcgtgtattcctctaattttattttctttatagaaccagcctcactatgctgcccagattccagtgcagtggctattcacattcacaagtgtgattatagtgtagtatagtctcagactcctgggttcaagcaatcctcccttctcagactctccagaagctgggactacagataccagcatgccagcctcttcctcttggacactaatggacaccaagcccatcatgtgggctccacccttatgaaaaaatgaacatttattttcaaatgactcacctgcaaatattacattagggagtaaggcttcaacaaatgagtgagttttttgggtgacagttcataacatcaactgtnnn

SEQ ID NO: 462807 - DNA, 473 bp, Homo sapiens
aatataatataagctgagggaaaaataaaaaggcatgaaaatttgaaagatatggctgttttgaggatttatttattaagtatttactgagcactgaaattgtgccaagaacagatctaggtattaagaatatagttaaagttgagacagacaagatayttaactcatgaatcttgcagtctattgagagagacagacagctaaatggaaatttaatacagtgtgataagcactttggaatggaaatagcagagtaccaaaagagcacagaaggaggatattttctgaagaatgggggagaaggaaggaggcaaaatgtctaggaaagcaacccttagaatgcaactgagtcttgaaggatgagtatgaattaaccaggaaaaaatttggagaagtaccaacagtggaaataacaaagacaaagaaaataaggcaaaggaaaacctagagtcttcaggcaactgtgaatattt

SEQ ID NO: 462808 - DNA, 624 bp, Homo sapiens
tacttgcattggatgctaagaagacaactggagaacaccactggatattgtgattaactttgtcagacaaagagtttcctccatttcaccttayagtcattgattgaaaatctatttcgtgtaagcaatctaaatataaaaaaattaatttattattcttagaatttatcttgtttattttattcagcctatcagtccaggttgttaggatcattatggatcttggtttttgtcttcactctattctgtaaaccatcacggaatcatctctaaaataactcccttttaaatatcatttgctcagtcaaaatatgtaaaatcattatatttgacttacttaacttgacatttaagtatagttgatcccattgcccaagtcagatttgtagtcccagaatgtcccctctgcctagtcagaatattaacttccagtcccattttcaccaacaaataagactatgtctatttttctttggtcactttgaatgtaggcaccatttcacattatttagctcttaacttttattttagttttgtattcaaaggtggtttctaagcagcagatggacaaggactaagtcttatgattatgtatgtacccatgatacaaccatagatctagat

SEQ ID NO: 462809 - DNA, 648 bp, Homo sapiens
tcttatactattaattgattgattttttcccattagctctgctgaatgtttaacgcttatttgatccagttttgttttaaatctaatatattcatgaagtctcttatagtattttattgcacattgtcaattccctagctttgatattagccatagctaaagagaaaattcctcaatttagtggtgagcatttgtagtaaagtttgagactgaatctactgcaaagctaaaagtggtgattgattcagacttatttcaaatgtcagagttttctctttaactttatccaatggtagggtacaagagcagattaggaaaaaagcagcagaaaagacttcagatgggttaaggtgttctgacatcattgccaactgtagtgttctggtttctttttacccatcccaatgacaccatgtcccagtgcataagtatygtggcattttgcaaaaacgtttcaagtcgaagtttctttagttgccatattcgtcttgctatcttcttcccacagatgctctcctcacactgtgttccctttgaagtaaggtagccagaaatcttcagcagggagggagcaagcaaattgcaagagttcgaacagtttgttttgcttactgtctgctcatttgggagcttttagatctgtcaggc

SEQ ID NO: 462810 - DNA, 580 bp, Homo sapiens
gggccttgctccaaaatccttgaggcctccgctgtgattcacctattggggmctgacaagggctccaaacaacatccctatctgccactgaaaccttaagcaccattgaatctgcttggtcacattgcccaagtgcccgagcagcttgcatggcagcctggacttgctgcacaaccttctcctgttctggaccccactcaaaactggcagccttcaggtcactcaataaatgggccagagaaacacactcaattaaagaatgtgttgcctccacaatccaaataggcccactaggtgttgtacttgtttcttggttgtaggaggggccacatgcagcaacttattgttcacattagaaggtatatcttgacaggccccacaccactgaacccctagaaatcttactgaggtagatggtccccgaattttcgttgaatttatgtttgattatcttgcatgcaaatgcctaccaataagtccagtttgtttgctacgtcttgctcactggaaccaatcagcataatttcatcaatgtaatggacaagtgtcatatcttgcagaagcaagcggtgatcaaggt

SEQ ID NO: 462811 - DNA, 516 bp, Homo sapiens
gtgagctgcgctacctgtggttaggggaggagtgttgcaagcactcccttagccactctagctgatgtctgcctaggtcacgtgtcatcctagtccactgactctgagcctagcccagtrcgaggagttgcctgggaattgcaatttttgtgtgttaggcagcttttcaagtttacccaggatcccagagcactttggctacaatgatgaggattgccaagagactgaagttctgactgttgggttgagtgattcccctctggctaagtcagctccaaatgctcccttcatgtgcaggcattggctgataacagcatgacttctctcaactgtaacagggcagcacttagtccaatttaaagtccctcacttgctgtgctctccctctcccaggttggcagactgtttgtgcttctcatcctcttctgggggatgggggaggattggcatcagctatttaagactgtctttcaaactctctttaatacctcttttagggatataaagttaaaacca

SEQ ID NO: 462812 - DNA, 549 bp, Homo sapiens
tgattggctttgcaatgtgaaaaaaaatgacattttggaggagctgggtaagaataatatggttggctctatgtccatactcaaatctcatcttgaactgtaatccccatgggttggggaggggcccggtgggaggtgacttaatcgtggggatggacttcctctttgcttttctcatatggtgagtgagttctcatgagttctggttgtttgacagtgtgtggaacttyccactttgccctttctgtctcttgatctgccatggtaagacatgcttgcttccctttcaccttccaccatgattgtaagtttcctgaggcctcctagtcatgctttcttttaaatctgcagaactgtgagtcagttaaacctttttcttcataaattatccagtctcagatagttctttatagctgtctgagaatggactaatacaaccaattagcaatcaaagtgagcggaataaagctatacacagcaatgtgtatggatctcacaaacataatttgaaattcagatctgtatcactagatacacaaaattattttg

SEQ ID NO: 462813 - DNA, 574 bp, Homo sapiens
tttttaactctttgttgtttctatttatacctcattgtactaaatatgtcttgaaaaaagttgtagttactatttttgattggttcattgtttaatctttctacttgggataagaatagtttacacaccacaattaaaatrttataatattctgtctttttcagtgtacataatattaccggtaagttttgtacttccagatgattacttattgctcactgatatcctttatttctgattgaagtactcccttttagcatttcttataggacaggtctggcattaataaaatttctaagcttttgtttctctggaaaagccttttcttctccttcatatttgaagaatattttcactggatactattgtagaataaaagttttgtagtgttttagtttttgtttgtttgtttgtttgtttgttttttcttcagcactttaaaatattcatgccactctctcctggcctgaaaggttttcagtgaaaactctgcagccagatattttgaagttccattgtaagttatttgtttcttttctttttctgcctttaagattctttctttatacttgac

SEQ ID NO: 462814 - DNA, 603 bp, Homo sapiens
tggtggacactttccttctttttttggactgtgagcctggcctctatgagtcattacttcagctcttgattgattggtcctgggcgaaggtccrtggctgagttccaacttcagctcctgattggtcctagaccaaaatctccaaccaagctgaatcacactatctatctccaagacagcccacagaataagcacattcttttccctttccagtccataaaaaccttggaccccagcctcatagtgggcaacacatttgggccaccctctccactgcagagagctttcttctttcagttattaaacttttgatccaacctcacccttgtctgcactcctcaattctcttggatgcgagacaaagaactcctggtactatctatctcagacaatgagagactactctagtgtggttcattggtgagactacaacaatgtagccaacgaaagggtgataggatcctaagttgtcacatttcagggaccactggtttaaggaaaccaatgatggataatacagtactccaaggacaataacaatggggagatctttaacaccactagacgtgaaaaggcaagaagtggcctagctgataaggagag

SEQ ID NO: 462815 - DNA, 617 bp, Homo sapiens
ttgttgaataaattgatactcatagaggttaagaattaaagtgacttgcctaaaatattgtggataacatcaggtacttactagaactcaagatatacacaaatatcctcacagacagtcacacagactccccattcaacatattaaaactatttatcgtacctgaattaaaaataatatttgattaatgctgaaagaaagggtgcaaataacagaagcctttttctttttccttggggttaactttaacttttttattcttcttaacctacacactcttgccttttgcagttaatatctgcttgttggagctgtactacagtacctattccaaagttaaataactaaactcagcaatatttgcaagttttatgctraatagaaatataaaatgatagttatcattttcaacacataagccttacaacaacactttgaggtaagaaatattatttcttgattattaacttttatatttatgcattcatattagttgtacatatttatgaggtacatgggatattttgatgtagtcatacaatatgtaatatcaaatcagggttactgagatatgaatcactttaaacatttatcacttatttttgttagatacattc

SEQ ID NO: 462816 - DNA, 529 bp, Homo sapiens
atcataaatatgatttcattgttgatttacctcttagcatgcaagctatcggtagaaactgctgatttttgtacattaattatcagaactagaagccttctggtggagtctgtgaagtttttaggtatagaattatattgtctgtaaagacagatagtttgacttcctctcttcctattaggatgctttttatttctttatcttgcttgattgctctgactgagatttctagtactatgttgaatatgggtagtgaaagtgggcatccttgtcttgttccacttctcaagrggaatactttcagcttttgactatttagtatgatgttggttgtgggtttgtaatagatgcctcttattattttaaagtatgtttcttcatagcctaatttgttgagggttttgaaacattaaaagatgttgaatttcatcaaaagccttttttgtttctattgagatgatcatgagctcttgttcttaattcagttttgtgatgaatcaaatgtattgagttgcatatattcatacta

SEQ ID NO: 462817 - DNA, 608 bp, Homo sapiens
gttttgtaattattgttatagagatctttcaccctcttggtaagctatattcctaggtattttattctttttgttactatcataaatatgatttcattgttgatttacctcttagcatgcaagctatcggtagaaactgctgatttttgtacattaattatcagaactagaagccttctggtggagtctgtgaagtttttaggtatagaattatattgtctgtaaagacagatagtttgacttcctctcttcctattaggatgctttttatttctttatcttgcttgattgctctgactgagatttctagtactatgttgaatatgggtagtgaaagtgggcatccttgtcttgttccacttctcaagaggaatactttcagcttttgactatttagtatgatgttggttgtgggtttgtaatagatgcctcttattattttaaagtatgtttcttcatagcctaatttgttgagggttttgaaacattaaargatgttgaatttcatcaaaagccttttttgtttctattgagatgatcatgagctcttgttcttaattcagttttgtgatgaatcaaatgtattgagttgcatatattcatactac

SEQ ID NO: 462818 - DNA, 608 bp, Homo sapiens
gttttgtaattattgttatagagatctttcaccctcttggtaagctatattcctaggtattttattctttttgttactatcataaatatgatttcattgttgatttacctcttagcatgcaagctatcggtagaaactgctgatttttgtacattaattatcagaactagaagccttctggtggagtctgtgaagtttttaggtatagaattatattgtctgtaaagacagatagtttgacttcctctcttcctattaggatgctttttatttctttatcttgcttgattgctctgactgagatttctagtactatgttgaatatgggtagtgaaagtgggcatccttgtcttgttccacttctcaagaggaatactttcagcttttgactatttagtatgatgttggttgtgggtttgtaatagatgcctcttattattttaaagtatgtttcttcatagcctaatttgttgagggttttgaaacattaaaagatgttgaatttcatcaaaagccttttttgtttctattgagatgatcatgagctcttgttcttaattcwgttttgtgatgaatcaaatgtattgagttgcatatattcatactac

SEQ ID NO: 462819 - DNA, 475 bp, Homo sapiens
gacaagaaaatattttaggattaggggtgtgtctcattactcccaaatggtattttgccagtggccaaattttctttaactaaaccaagaacaatgttgattattagtgctgcacccaggctcgggtgttcacattttttcagttttcatgcacattacttgtcttgctttccttatattttaaagaatttgattacattattttaaccagctaaattcgccaatgctgcgatgactaaaccggaattaaggaagacattcctttccctcacaytatgtcagtagcaaaagagatatttcaaaagttcttttcttatgaaaccaatttgacaagggacacatcacagcacaacataagaaaaatgtgcttatcagcacaatgggctagccttctaaccagcacttggggtaaaacaaacatgctacggttaagtatagcattttccttcaaccagtcaaaagaactgtggtctag

SEQ ID NO: 462820 - DNA, 558 bp, Homo sapiens
cacgctgcgcgctgattggttcccagctcagtctttcagcttggcagcaacctagtctcaaccctgtttctgagttgtgtttgcggaaattcagaaaatcaaaatagtttaaatttcctgaggaggaatcacaccaattctattctacaatgaactggaacggctacggtgttatgatctttacattttctttctctagtttttayttaaggcagcctcggcctttatcaaaagttccaactttcagagattcacagttcagagggacaacttcttgattttcatttaaaatataaattcttccattcgtgtcttcaattgtttgctgtcttctaataatagcctacacatttttggcttctcatacattgaacaactacttgattttcattgagatttaacgaggaaatctgttttatatgagaagagaaacaacaggttctttttgaatttctccacaagaacagcagtacggatacttagaacaacagccctttctgataaaattagctggggctgaaaatatttcatgatagcttcttgtaactatttggacgt

SEQ ID NO: 462821 - DNA, 574 bp, Homo sapiens
gtgctaagtttaatgacgtctcctcttcattctcccccacccagcgcctagtccttactggccttcagttcagtgttcgaaggcttgtcaatttacccagcagttaagagttggcttctcctaaagcaactttcaaacttktctgcatgttacaagccccctacggagattttaagtttcaatcaggcaacacaccatttatggctgactgagcactgggattcaagcaaaatttgatttgatttgaatcttgaataaaccagttgaatagaataagatgtatgaagcaacatctggcgcagtgcttacatctttagttctgtactgccttagtgttgttatcaaaactgacgcatattaggttaaaagactattaccggggcagttggaaacccaggagacacacccttcagtatactacgaaggtgtgcgccacgaaaacagagggggagtccttccttaggcagttactgcccaggttcccactccggtccgctatgtaaatcagagtctcaaaacagctttccctcgattggttaatatttaaaatgacaggacagcctattggctagaa

SEQ ID NO: 462822 - DNA, 642 bp, Homo sapiens
ttttactctttctatttttctgacaataatcccttaaggaggtgtggttatagaatagtcagctgttataagtactgttttcctggccttacaacttaaattctttaagctgtttcttagtttgctcatctcaaaattcggaataaggataaaacctatctcttagattgttggattaaatgaattaacatactggaagctcatgaaatgtgcctggcacacagtagtgcctaataaaccatctctcttattcagcctgttttctgatttcagaatctacacttgctgagccaggttcttttcatttcaaggtgagcaaaagcatacaaggaagagatggaggtaggaagagattaagccctaggccaagggagctggaatcaaaggcaatttggtcagtgaataaaaaggattccaaggcccataaggcaattctaaccttaggatcgaaattctcggacatacaggaaatgctgggggggggaaaatccggtcttctcagcycaagagccatgtgaaaccagaccttcaaatctgatgattctcagcccagctgcccattagaatcgttgtaatttaaaaataccctcggaaaattctaatatgtggctatcaaaggtgatcatttgcttttatgccact

SEQ ID NO: 462823 - DNA, 606 bp, Homo sapiens
attcaaaaaagttactcgttaggtagctattgtattttcctctaatttggtcttgaggtctctctcaggaacatgggtaaaaaatcttgccctaccctgccagggctccagggatttggkcatgaatgtttatagtgtgtctttcatgggacacttctgtatcagcagacagcctaatgcctgggtgtccaacccacgacagggtgttcctctcacagaaaacttgtttatactgggagatgcctttggggctcttgtctgacctgtgtccagtttattcctaccaagacagcccctctctaggacagccctgatggagaaagaaggtagaaggtagatttgggtgtgttggtcaggtgagacacagaagaggcaacttagcaaaacacacgaaataacagaagagcgtattacttacagatcagagaacagagggaaagagcaccaacgggaaggggagagctttccaggatatgcactcaaccagcatgtggggagcaagagagagagagggacctttggtccaaagcctttattggggttcagggtgttacccaagcaggtttcccgaggggagttttaattgatgggtttagaacaagcagg

SEQ ID NO: 462824 - DNA, 552 bp, Homo sapiens
aggcttggctcagcttcctccctcattgtcagtcatcaaataagcatccttaaattatctatcctacggcaagcactgggagtcacagagagaaaaggaacaatctcttgtcattaaggaactcactgccagatgaagacacaggaggaaaaaaaaaaacacamcagatgattggagcatcataaattctatgatatgagaatgtatgtaggctagactgccaacccagattagcagggaataaaggcaggatcaaagaaaggctctcagaggaaatgggctacaaaacaaatgagtcttcgtattaaaaaatgaaagccaagcctggttaacatagtgagaccctatctctacaaaactaaaaaattagttgaatatggcggtgtgtgcctgtaggcccagctactcaggttgaggtggaaggatcacttgagcccaggagttcaaggctttagtgagctatgattgtgctattgtaccccagcctgggcaatagagtgagaccctgtctcaagaaataaaaattacaagaaagtcaacaagaaggaatgg

SEQ ID NO: 462825 - DNA, 609 bp, Homo sapiens
aaattctatgatatgagaatgtatgtaggctagactgccaacccagattagcagggaataaaggcaggatcaaagaaaggctctcagaggaaatgggctacaaaacaaatgagtcttcgtattaaaaaatgaaagccaagcctggttaacatagtgagaccctatctctacaaaactaaaaaattagttgaatatggcggtgtgtgcctgtaggcccagctactcaggttgaggtggaaggatcacttgagcccaggagttcaaggctttagtgagctatgattgtgctattgtaccccagcctgggcaatagagtgagacmctgtctcaagaaataaaaattacaagaaagtcaacaagaaggaatggtattctatgctgagtatagcagactctgttagttgcctacacaggagccattctccacaatttcaaagctaatatgaccttgattttgtgtggcatagcaatatatccagccccaagggataaattctgatggatcctaatctatttccctttctcagcctctcttccaaggccaacatattctacctaaggactttttttgccccccgtgcaaactgacacagaatcatgaagagaaag

SEQ ID NO: 462826 - DNA, 609 bp, Homo sapiens
aaattctatgatatgagaatgtatgtaggctagactgccaacccagattagcagggaataaaggcaggatcaaagaaaggctctcagaggaaatgggctacaaaacaaatgagtcttcgtattaaaaaatgaaagccaagcctggttaacatagtgagaccctatctctacaaaactaaaaaattagttgaatatggcggtgtgtgcctgtaggcccagctactcaggttgaggtggaaggatcacttgagcccaggagttcaaggctttagtgagctatgattgtgctattgtaccccagcctgggcaatagagtgagaccctgtctcaagaaataaaaattacaagaaagtcaacaagaaggaatggtattctatgctgagtatagcagactctgttagttgcctacacaggagccattctccacaatttcaaagctaatatgaccttgattttgtgtggcatagcaatatatccagccccaagggataaattctgatggatcctaatctatttccctttctcagcctctcttccaaggccaacatattctacctaaggactttttttgccccccgtgcaaamtgacacagaatcatgaagagaaag

SEQ ID NO: 462827 - DNA, 494 bp, Homo sapiens
ggctagaaaattgcagaaatgtcaatctaatctccttgattgaaaactacactgagtttctaagccaaagtttgaaccacctatcaccaaacctgttatgtaagagaataagataccttatgctgatgtttaagccaccatcagccacttttctgagaaatgtagccaaaacattcctaatgtattcaccataggagaaactcatgcaaaaactgagaggcaatgaagagcaaggcatttagaggaaccacaagtcattcttcattattttaatttagagtataaggtgggaaataacataataagtctgaaacagaaaacaccaactttatggtgcatagctttgaaagatatattaagcatcttcagtttttttcctaactaaggaggaaaattaggacaaattttaaggatgggcataagataagactgaataagtatgcagaagtcagatcataggaagytttgtctaacatgctaggaagcctggcctt

SEQ ID NO: 462828 - DNA, 548 bp, Homo sapiens
cctttaatatcattataatactgactcagttctccattctgtacttgcagaggttcagagtactacccaagatttctgtgaattcttggggtagggagaaggtggtgagaggcaaggaatgagagaaggatttacatttacatggtctcctctaggttcatggtcctgattctgcatattcagcttagtttgtgtgacttctctgtcattcaagttcttatccttttycacgtgtcatcaacatggagccaaggtgttgttttctcccccctactgtttgtaacatacacatacccactcacaaggcagttgtttgtagaaagtataaggagaagagggtgagtttaccttgaaatgttgcaaataacttcatatttagacattttagttctaaaaagttttctcatcatgtggagagttttaatggctacttcacctccagagaactatctcaatggcttcccaccttttctctctcccaatttacaaatttataatttattaaaaatgcagagccaatagccctcccttttattgacttggttcgt

SEQ ID NO: 462829 - DNA, 555 bp, Homo sapiens
tttctgaaaacctttccttagaaaatgagaacataaacctctcacttacaggcacagtattcaccagcttcctctgaaaaagacgtgtgcttctaggctcatcttagtgtgacttattagcctctcattagtgtaatttcctgaattagtctttgctaaagcrgctatgaagttattccatgcttggctggctttataaaaaataattttaaagatgtcagcagagctttatacctgacaaaatgggaaccagaactatttgattatagtaatgtaattcctgttacattatatttatatttagagtgggagagttcctcataataccttcatatttgtcttactgtttcttcagtatttatagaatttctggtagagagactttaaagcctgttgttctagatttacttgaatgccttctagtattctctccatcaagtaattgccagggttgtgcttggttttccctagcaatagaaaacacactacctatcaaagcaaactatagcatctatctttaaacaattccaaaaaaagtcaatgcaaatttttttc

SEQ ID NO: 462830 - DNA, 550 bp, Homo sapiens
tttctgaattttatatttatcatttcattgaacattgtatgtttacctaaattatatatttaaataaaaatggtatatcagtcatgttttttcaccacacgttatattgcaatacttatccacattcttgcacgtagctgaagttcatttattttcattgtttaaattgagctcttttttttgctataaggtaaaattgctatgaattatcttgatcatgtctagtgagacatgtataaagtttatttagggcaagtgataacaagtggagtttctggaacataggttaatgtacacactcaactttgtaagataacaccaaattgtgtttaaagtggtttttcttttccatgcttagcagcagggttttagaattcttaamtactcacaggatccattcttggtgtagtctttcagctagtaaatatagtactagtaggtgtattgtattcttaacttgcacttctctaatgactaataaggttggccatcttttcatgtttcctctttaataaaatgcctatttatgtgtttttttgcattctatttt

SEQ ID NO: 462831 - DNA, 585 bp, Homo sapiens
ttgttgtgatttttttcaaagctcatcagctactgttagtgttagtatattttatgtgtggcccaaggaaattgttcttctcccagtatgacccagggaagccaaaagactggacacccctggtctagccatttctgtacaactgaggactccttgaatgagcaatctttgccctagaacaactcccttaggctcacagagacctcatctgtctgcatcatgagcaatgtctccacttgcccagtwctgctgcctctctcttcacatgtatattccccaataaacctttcatgtacctattccatctcagtgtctgctttggaaagaacacaagacatacaaccatcttgcattatttttagaaaattataatagcaaaaagcaactttgaagacatggtagcaaaacaagcccatgaacacttgtgtggctattggtcccagttattaatggcttaaggtcattgcttgttttaccgtgttcaagtaaagtatggcaatgccttcattattggctacctatacacttagcaaatagcactgcaaataaaaggagggaatgagacttacacagaaagcaccagga

SEQ ID NO: 462832 - DNA, 585 bp, Homo sapiens
ttgttgtgatttttttcaaagctcatcagctactgttagtgttagtatattttatgtgtggcccaaggaaattgttcttctcccagtatgacccagggaagccaaaagactggacacccctggtctagccatttctgtacaactgaggactccttgaatgagcaatctttgccctagaacaactcccttaggctcacagagacctcatctgtctgcatcatgagcaatgtctccacttgcccagtactgctgcctctctcttcacatgtatattccccaataaacctttcatgtacctattccatctcagtgtctgctttggaaagaacacaagacatacaaccatcttgcattatttttagaaaattataatagcaaaaagcaactttgaagacatggtagcaaaacaagcccatgaacacttgtgtggctattggtcccagttattaatggcttaaggtcattgcttgttttaccgtgttcaagtaawgtatggcaatgccttcattattggctacctatacacttagcaaatagcactgcaaataaaaggagggaatgagacttacacagaaagcaccagga

SEQ ID NO: 462833 - DNA, 485 bp, Homo sapiens
ttacacatttaaacatgtaggtccttctttggcattattttattttgattaatttttttaacttaaaaaataagaacagtaatttgtagggtttcttttttccctgtgaaagccatcagttaaggggccacgtttaactaggaaatataaatataaaataaataagtatgtatttccagtggcactggaaagataaagcaaaggcagaaaagaggtgcagttaatatggyttagtgataattgagtttaaaaagctaggggacagataaaatctcaggtcattcataagttttcagattgtgcacaagcatttacaatgatcatggggaaggagtaggaatttctcaggttaacagagaagtgcaaacagtcatgagacagaccaacagttttctttacatattgagttcaacgaaacattcttgtgggatactttcagaggcaattggatatatgcatttctagctggagatagaactctgctt

SEQ ID NO: 462834 - DNA, 485 bp, Homo sapiens
ttacacatttaaacatgtaggtccttctttggcattattttattttgattaatttttttaacttaaaaaataagaacagtaatttgtagggtttcttttttccctgtgaaagccatcagttaaggggccacgtttaactaggaaatataaatataaaataaataagtatgtatttccagtggcactggaaagataaagcaaaggcagaaaagaggtgcagttaatatggcttagtgataattgagtttaaaaagctaggggacagataaaatctcaggtcattcataagttttcagattgtgcacaagcatttacaatgmtcatggggaaggagtaggaatttctcaggttaacagagaagtgcaaacagtcatgagacagaccaacagttttctttacatattgagttcaacgaaacattcttgtgggatactttcagaggcaattggatatatgcatttctagctggagatagaactctgctt

SEQ ID NO: 462835 - DNA, 516 bp, Homo sapiens
caggctattgtcagcctttggtgtttgtgcagtatcgataggagaaagactacagcattgctctgtaaacacctaaaatttactatccaaggaactgatgtattcaattttgccagaaacttatttttgaagcacaatatatagggcatatggatcaattgcaccgaatgtgtttgtcatactagaaaaaagtcagattcattgctaaagtgatgagaaaagtgccttattcaaatgatgacatatcatagatattcaatcatcttctttttggaaaattgactacaaaattgaagaattcgtattctgttgtggcaagtgaaatacatttcaygagggacatgttataaagtccttgcctcttctcagtgctgtgtgcatgtgtgtgtgctcccaagcataagctaagatatctttatggtctgatgcttatccatatgtatgttaataataaataagcttagacaattatgattaagaatatagcctctggagccttactattctgtttgtaac

SEQ ID NO: 462836 - DNA, 487 bp, Homo sapiens
ttgcaccgaatgtgtttgtcatactagaaaaaagtcagattcattgctaaagtgatgagaaaagtgccttattcaaatgatgacatatcatagatattcaatcatcttctttttggaaaattgactacaaaattgaagaattcgtattctgttgtggcaagtgaaatacatttcatgagggacatgttataaagtccttgcctcttctcagtgctgtgtgcatgtgtgtgtgctcccaagcataagctaagatatctttatggtctgatgcttatccatatgtatgttaataataaataagcttagacaattatgattaagaatatagcctctggagccttactattckgtttgtaacccaagctcctctactcactagctgtatgaccttggtcaagttaattgacttctctggatctcaatttcctcacctgtaaaatgtagggataatagtgtctacctcaaagtcatggtgagcattaggtga

SEQ ID NO: 462837 - DNA, 601 bp, Homo sapiens
gacagaagccttgttttctggggagtctaaatcctggatctcagagtcaggggcctgatagtatgaaagaaagaaagccttyccctagattttctcctgccgtctctgtagtctctgtcttctgaggagaagcttgagttttccatgaggtaaaagtgtgtgtgtgtgtgcgtgcatgtgtgcatgcgcaagtgtgtgtatgtgtgtgagaaaaagagagagattaaacatactccatatgaaggttatcaacagtggacccctctcactcatcctcccttcagtttggtgtcatttggccaactttccatcttttttcactgtcgtcatgtatgattttagtggacaatgagagatgatccatcagaggctgtcagcaaagtgcctttttgactggagaattacacatttataatttagtatgcaacatttggccttcagttttgaggctctacccaaggtctcagactttccgggcctaaaaggaacatggtccttcctttgctcaccccaccaacctctgctaattgttactctgttgcatgcatctaggcttcctaatgaaggtctgctgtgtggacagcactgagcagtctggttc

SEQ ID NO: 462838 - DNA, 483 bp, Homo sapiens
aggcaacaatgcccttggcttttgtttgcctgagaaagttttatttttccttcacttttgaaaggtaattttgcagggtaacagagttctatactttttgttttgttttctctcaacacttcaaatatttcactctattaatttcttgcttgtatttaattcttgtatttgctcctctataggtaaggtgtggttttcctctggctcttttcaagagtttgtctttgtctttgattctctgaaatttaaatataatatktattttttggtgcagtttttttaaaacatatcttctgcttggtcttctcggagctccctgaatttgtggtttggtgtttgacattaatttgggggaaagtctcaggcattcttgcttcaaatagtgcttcagttcctttctgtctttcttgtcctttggcattcgcattacacattagcattaccttttgtagttgtcccacagttcttgaatattctgttctt

SEQ ID NO: 462839 - DNA, 483 bp, Homo sapiens
aggcaacaatgcccttggcttttgtttgcctgagaaagttttatttttccttcacttttgaaaggtaattttgcagggtaacagagttctatactttttgttttgttttctctcaacacttcaaatatttcactctattaatttcttgcttgtatttaattcttgtatttgctcctctataggtaaggtgtggttttcctctggctcttttcaagagtttgtctttgtctttgattctctgaaatttaaatataatatttattttttggtgcagtttttttaaaacatatcttctgcttggtcttctcggagctccctgaatttgtggtttggtgtttgacattaatttgggggaaagtctcaggcattcttgcttcaaatagtgcttcagttcctttctgtctttcttgtcctttggcattcgcattacacrttagcattaccttttgtagttgtcccacagttcttgaatattctgttctt

SEQ ID NO: 462840 - DNA, 563 bp, Homo sapiens
tgcctgtctgtctctctaattttgggagtagcagtgtttgaattgagtgacctgaaatccctgatagatgtaagaagagttgttgatttctcagtttgtttagcttttcacttgttagggtagagtggtgacttctaagctctttatatgcctgactggaaaccaggaatttgtggtttgtgatttttcctaaatagtaaattatttttccccatctagagaaaatttattttctttctagtttgaagaaaataaggccattattcataatgtaatgggaccattagcataatatttcaaacttcattgattctttttcaactaccaaaatcatgctgtttgttgatttgattcaagaaaaggccagaacatgtgtccataggattgtatatcactcttgcyaataaaaaatagagaccaaggttagattgtttcctgatgagcataagcaaagcaatgtacctagttttacctgtacgtgatagacatctgtataggctgatgaattctttttatatttaaagcacccttgagacaatctttggtcaatcaaagtcactttc

SEQ ID NO: 462841 - DNA, 451 bp, Homo sapiens
ataaatattgcgcatgaagatgtaaaagtgagaaaaagaaactataaaaccaataacaacttttctaaaaggttaatggatttgatgaaaagtctgtctttaccctgagactattttttgcctctatttaggtgttcaaatcccctttttattggaaaataatatttgtagattttargttttattggttgctgtttctattgtcattaacttaacaaaatggatgagttatcgaaacaacatttgtttctgtggacatttcctgaaatgcatgtctttcttcaaccatgaaatcccaaaatgtagaaaactatttataggagataactgaaagggtattgattcactggatagtaaggaatggacaaatttaaagtttgtttccaacctggaaataaaaccaaataaataaaattttattccaagctttaaaatttttctctttatcgtc

SEQ ID NO: 462842 - DNA, 546 bp, Homo sapiens
tttgttctattgaagcaaagtgaacatacccatgtaattgacatgtagttctagaaataaatattgcgcatgaagatgtaaaagtgagaaaaagaaactataaaaccaataacaacttttctaaaaggttaatggatttgatgaaaagtctgtctttaccctgagactattttttgcctctatttaggtgttcaaatcccctttttattggaaaataatatttgtagattttaggttttattggttgctgtttctattgtcattaacttaacaaaatggatgagttatcgaaacaacatttgtttctgtggacatttcctgaaatgcatgtctttcttcaaccatgaaatcccaaaatgtagaaaactatttatrggagataactgaaagggtattgattcactggatagtaaggaatggacaaatttaaagtttgtttccaacctggaaataaaaccaaataaataaaattttattccaagctttaaaatttttctctttatcgtctctatttaaaagaaaatatttttctacctgtttatcttt

SEQ ID NO: 462843 - DNA, 597 bp, Homo sapiens
tgccaagatgattatatatttggtgacaagaaattgataaatttcacatctgatgatgtctatattctctgtgatttaagaagaaaactagctcagctgttgagagttgaaagggtgatagtgaagttagattttgggaaagtgacaaagataagaaatagttactgaataaaatgagaacaagaaattaatartaaaatatagaaatattaactttaatagcatcaatctatgcattatttactttcctctacagttaacataggcagagagagagggaaagaacatgacagtaattaagaataacaaagagaaagtaattgagaatatattgaagatacattggataaagtgacatactaaagagtcaaaactatgtcaaaatagagatgaaataaagagaatttggagagagaaagtgtagtcatcctgggactagaatctctgtgtgtttgaataataggttatagaccaagtgactgagcttggagacgtgcaggttgcagagtgggatgcttaagtgtacggttacaaagagttggtatttccagctgataacatggttcaaggcaggcataatatactcctcgatggaaa

SEQ ID NO: 462844 - DNA, 609 bp, Homo sapiens
ttttgttagacttacacctaagtattccattgggggaatgctaatatagatggtattgtgttttaatttcatatttcacttgttcattgctgtatataaaaaagcaactgacttttgtgtgttgactttctatcctatgactttggtataagcacttattccaaaagaattttttttactcattctgacttttcatatagatgacggtgttatctgcaaacaaagacaattttcgttctttctttccaatacatataccttttatttccttcttttctcttatagcattagctaggacttgcagtacaatgctgagaacgagtagtgagagagatatttttgcctcgttctgggaaagcttcagtttctccccattaaatatggtattaaggaaacaattttgagaagacaatgcctagtgaaaagaggcrtataccaaatatattaagtataatataaagctaacaaaagtaaactgtaaactgtggtatttgtaaaaactgattatgttggaataattggttaagcttttagagcaaaaggagttagatctttatcttacattatataccaaattatattccaattcaattaaagacttaaataaaa

SEQ ID NO: 462845 - DNA, 488 bp, Homo sapiens
aatggaaatgctacatgccacatttgtgggaattttgtagctatatttgtttatagctaaaatctatttatagccaaacttgtgaggtgtttatagctataaatgaatatattaattaaaaataaagtctggatataagtaatcaagcattcatttacagttcttaagaataacagtaaattaaacatctaaaaatataggaaggtgggaaatagtaaasttaatagaataaattaataaaatatcaagaaaacatagagtgcagataattaataaaacccaaacttggttcttcggaaagactgacaaaattgataaagatcctaagactgattcagaaaaaaaaatagtggaggtataaatatcaggaattaaaatgaggccatcactataggttccacaatataaaaaattgttaaagaatattataaccaagtttatgctcacatatttgaaatcaaaagacaaattcccataaaatacagctt

SEQ ID NO: 462846 - DNA, 488 bp, Homo sapiens
aatggaaatgctacatgccacatttgtgggaattttgtagctatatttgtttatagctaaaatctatttatagccaaacttgtgaggtgtttatagctataaatgaatatattaattaaaaataaagtctggatataagtaatcaagcattcatttacagttcttaagaataacagtaaattaaacatctaaaaatataggaaggtgggaaatagtaaacttaatagaataaattaataaaatatcaagaaaacatagagtgcagataattaataaaacccaaacttggttcttyggaaagactgacaaaattgataaagatcctaagactgattcagaaaaaaaaatagtggaggtataaatatcaggaattaaaatgaggccatcactataggttccacaatataaaaaattgttaaagaatattataaccaagtttatgctcacatatttgaaatcaaaagacaaattcccataaaatacagctt

SEQ ID NO: 462847 - DNA, 595 bp, Homo sapiens
ggaacttcttaaatgaacatatacaaatggctaataaacatataaaaaggtgctcaatatcattagttatcaagaagatgctaattgaaacaatgagattctactacatgtccaccagaatgtctacaattaaaaattactaatagtactattatgcattagggctgatatataatagcagaaattctcttctggagggactgtaaacagtacaataagtttgggaaagaatttggcrtcatctcctggagttgagtatatgttttttatttttcagccattctacacctaggtatatatagccaagagaaatgtgtgcacatgtacacgaaatgaatgttcactgaaccattatttatagtagccccaaatgagaaacatacagtgttcatcaatcattacaaaaacaaagaaacaagcaaatagaggtgaatgtggccaaacaatagaagctatacaaaaatgaacatggataaactgaatttcataaatataatatcatgcctcgcctgtaatctcagcactttgggaggccgaggtgggtggatcacctgaggtcaggagttcaagactagtctgaccaacttggagtggc

SEQ ID NO: 462848 - DNA, 568 bp, Homo sapiens
gaagttaaattgctaatttccttaggtttatggtaggtttatgtgacttgttttttttttcctcatagcagagctatgtatctttggaattcagattaaaatgttcattttctctcagttgattgagatttctctgtgccaatagataatcactccatttccaagtcatggaggactacagaaaagttatcttgtgtcttaaagtaccatttaaaactccataaccccaaaggtattgatttaagtcaattcaattttaattaattttccttcacaaggtttcctaaggtcatgttcctgtggttggagttggagtttccctgaaggaatgtcaattttcactgtcagttatacagggaagaactttgttttcagataggatcagaacttaggatacgggtaaaaggctttttctctcccttctcaaagatccaartggtagaaaacctgaactctgatttacagggatactctgaacatccccagcagtagacaacttggttcttgtccagaggaaacagacaaggaagtaggagctactcagacacagtcttaagaaggacctgag

SEQ ID NO: 462849 - DNA, 603 bp, Homo sapiens
attgtgcttcctaacttgtcatctacattctggtgtttcaaataatataaaataaatktaaaagaaaataagaaattggaaggttatcaaagagttattacaaaagaatacaattatttttcagctactgtgtacaaaatatctagcctctaggacctaaaaagcaataattaaagtaagaatttctacttacatttttcttataaacttacatttctattagttttctggattaaggtattagacaaacagatatcctatttgtataatatctgtaaaaaagatctagcagaatgctacttcagtaatacaagttaatatgaattacagtatatgtagaaattatcactttatgtaacaaaagcattataaaatgtaacaacgataacatactaaattatttgcaaaatacttcatacttaaactgttttcctaagatgcaagggagcagttctgtttatcacaaccaccattagcattaccaaatgtcaccaggataacgtaattaacaaaatgtattcatgaattctatctaagctatatatctgtagtggattgaataattgcctcaaaaaatatgaccaagtcctaacttctggtatc

SEQ ID NO: 462850 - DNA, 603 bp, Homo sapiens
attgtgcttcctaacttgtcatctacattctggtgtttcaaataatataaaataaatttaaaagaaaataagaaattggaaggttatcaaagagttattacaaaagaatacaattatttttcagctactgtgtacaaaatatctagcctctaggacctaaaaagcaataattaaagtaagaatttctacttacatttttcttataaacttacatttctattagttttctggattaaggtattagacaaacagatatcctatttgtataatatctgtaaaaaagatctagcagaatgctacttcagtaatacaagttaatatgaattacagtatatgtagaaattatcactttatgtaacaaaagcattataaaatgtaacaacgataacatactaaattatttgcaaaatacttcatacttaaactgttttcctargatgcaagggagcagttctgtttatcacaaccaccattagcattaccaaatgtcaccaggataacgtaattaacaaaatgtattcatgaattctatctaagctatatatctgtagtggattgaataattgcctcaaaaaatatgaccaagtcctaacttctggtatc

SEQ ID NO: 462851 - DNA, 581 bp, Homo sapiens
taatgttcagtagaaatatttggaacatgaaatctgtagaatgttggattattgactttgctgatgggatctttgatttaactaattgcatccaatatccttttgtattgagaaacatttttggctggaaacatgttggaatgtgtgatggttaaatttatgggtcaactggctagatcatggtgcstatatatttggtcaaacattattctgtgaagttgttttttggttgagatgaacatttaaatcaatggactttgaataaagcagattacacttcataatgtgggtgggcctcatctgattaggtgaagggcttcatagaaaatgattgacttcccctagcaagaaggaattctgccagtagactacctttggacccacacactcttccctgagtctccacaacctaccctatcctgtgagcaaaacctctacaatcatgtgagccaatttcttaaaataaatctctctctagatagatagatatatctaaatatatatattcatatatcaggcaataattgtactactgattttgcccaagatcttgccatcactacttattttagtttatttaa

SEQ ID NO: 462852 - DNA, 439 bp, Homo sapiens
cattagcaccagagactatgacttggaggggaaaaatatgagtggcagagagatcarttaagatgcaactggaatatttcagcctagagattatgaggatctggactagtatactaataacaagataatagcgtgagtgtgaaagtctgtacggatggagtatggacgagacttagtatagaatataggaatggaaggagagggaaaattcaatatgaagccccaagaggcaggtaataaaagtaattccaaagccatttcagaatggttaggagctgtaacagaattgttagcatcaaagaagagccgtcctaggggctactttgaagaagaaaacatgagaatacttatgtgattgtttatatctggaatgcttgccaaataaaactggtcccagtaaacactaaaagttactataatccttttggataataaatta

SEQ ID NO: 462853 - DNA, 621 bp, Homo sapiens
aaaagtgagaggcttagcatttctactcctatgatacgttcttaaatttccacaatttcccctaaatgctcagctatgcttcagccaaaatcttaacagaaagaaaacagccataaatccagtcctgcactcaaatcaggcgatcttcgccagctagatggaacatttacaatagtgtttggctagcattaggtacttttaatgtaacgacttaaagcttaaaagttatgaaaatattcaagtgtttctaaaaagtcagcttttttcgagtaaaaaaaatatatgcactcactctttcttttctaattgttttgtttgtctgaattacaatacaatctgcctgaatttgagaggcagatccattttaggcaatgttcttatgttcttttgaatcagcagactttacgtaaaaatttaatttcatttaaaatttttatttaaatggaatgtctgcacctttttacaaactaaagagatacagtacatgtgttgtgggtggtatgtgtatatgtgygtgagggaggggaaagaggaaagataaaacgagagagttaggactaaatttatggcagagttctgtttacttatgctaccctatagcaagcagcacaaagtaatgta

SEQ ID NO: 462854 - DNA, 572 bp, Homo sapiens
tactgtctcagacatgaagcaacttgataagtttgtcaaggaaacagaaatttaacaagtacagaaattaggccttgtgaaataccttgatatcagttatagattttttaaagttatattttgtcacatcagaatttgtgacagtgactataaatttaaacctactaaactataaattaaaaacctctagactttaatagtttagaaaatatttccattcatttatctcatttgattcttatgaccaaatggtgagatagatattaataatttttcttcatacagaygaaagaaacaaggcttacaaaaattatacagcctgtttcaaatttcctcactattacttggcatggttagaatccatatttaggttttacaatgtcaaagctcatactttatccactatattgcatttgttttattttatatttatctattcaatttacaaaactacatgcttaatatattatttcatataatttagaatataggcctgctcacattatacctgataaagtatgatgtgtctataggttagtcattaatttcacatccggtttattctttttttg

SEQ ID NO: 462855 - DNA, 509 bp, Homo sapiens
atctttggaaagattagaacattctacaacacagaatttttctgatgtaataaaactttcctggattcctctatctcttcaacaaaagagaaaggtacktttttagtctataaattgtatatgcttcccttttgctctttgaattggcacaaagatctttaatgattacatattttcattcttttgttaaaaaatcatatttgctcacagagtaaatatggtgaggattacataaagaaaagtatatatattatgcctagatgagttcctcaaataatagtagacccccaataaatattaactcatttcttctccttttattccatttgaatacaaattcattttgaagtagttttgtaaatgtttgagataaagcatttcaaaatatcaggaagatataactgtgtatcagtctagcagtttacaatcaatgaacatggatggaacattttgtataacattttgctatatgtacagtgccaaaagagaagatgatagtagaggcttcc

SEQ ID NO: 462856 - DNA, 509 bp, Homo sapiens
atctttggaaagattagaacattctacaacacagaatttttctgatgtaataaaactttcctggattcctctatctcttcaacaaaagagaaaggtacttttttagtctataaattgtatatgcttcccttttgctctttgaattggcacaaagatctttaatgattacatattttcattcttttgttaaaaaatcatatttgctcacagagtaawtatggtgaggattacataaagaaaagtatatatattatgcctagatgagttcctcaaataatagtagacccccaataaatattaactcatttcttctccttttattccatttgaatacaaattcattttgaagtagttttgtaaatgtttgagataaagcatttcaaaatatcaggaagatataactgtgtatcagtctagcagtttacaatcaatgaacatggatggaacattttgtataacattttgctatatgtacagtgccaaaagagaagatgatagtagaggcttcc

SEQ ID NO: 462857 - DNA, 616 bp, Homo sapiens
ctttaagcttcaggtgcatatatttatattctagcagtaccaattcatttggcatgtcataaacacagattcaacagcttccaaattaaactctccaaatttcccttttcccactccactccttattgctacctgctaacattccgtctatgcctaattcatcccctagtcctgctgacataatctcagcattttaaagttgtaacaacttagctgggcacacaaagctctgagtgacctaaaacccatttttttctaacttcattttttgaaatactgaagtctgtacacatgttttgtctccataccttatttcagggttactctttggcctagagcactatcccatctcctgtttattcacctgggtaacctcttttcaactctggatgtcgttgcctgaatctgcagacagaatgacgtgtttccctgtcttcctgtgttctactcatttccctctgcttgtctagcagagcactgacattagaaggctcaaaattctactctcagggctagaatgactctagcatgttcctgctccttgagagcagaagcattctacatctttcyagccttagcacctatcacaatgccaaggagagaaggcggttacaaa

SEQ ID NO: 462858 - DNA, 389 bp, Homo sapiens
atatagtagccttttctatgcaggaaaagcctcatgattcaggacaaatgtctccatttcttagctctgagatagccctcattattctaagagtcctattcctccttgtcagaaattggtcaaagaacatgcaaatgtgttagtcagttcaggctgctattgaatataaaatgtatagcagactgagtagcttataaacaacagaaatttatttcccacagttcaggagkctagatgtccaagatcagggtgccagtatggtcaaattctgatgagatcccttgctaagttttgaatgtcacctccaaaactcatgttgaaatttaattgccattgtagcagtgttgcaaggtgaaagcttcaaaagatagtttaagtcatagagggct

SEQ ID NO: 462859 - DNA, 589 bp, Homo sapiens
ctgaaaccatctcccccgttgccctccaccagtcggtggaaaaattgtcttccataaaactggtctctggtgccaaaaaggttggggaccactgatgtatagaaccaggtccattctgtcaatactctccccattccctagttctgttcatcaagttcccaaggtattaaaatgtcttgcttaaaacttatcaaataaaatgagaatatttttgtcttatttttcctttttaagttctttgtgttacctactgtgtgcatttctctctgttataacaatgcctatcttctttaccacatttggaagaagttgcctttaattttttttttaacttataggattagctttacaatcaggcgtatcctcttgttatttgctttcatagtgctttctccttcatagaatttactgcaagaataggcgaattatggcttgatgtctatttttcctgctagcctacaatctgtattaaggcatagtcagaaccagccagtgcaccatcatatccccagtacaaagagcagtttcttaaacattgttagaacccagtcgggttttytgagggaataaatgaatgaattcataaccc

SEQ ID NO: 462860 - DNA, 561 bp, Homo sapiens
tgggattcataagaattgttaaatactatttttattttggaaatgtggtattttttcatatttttctccagctgtctgacccatgcttcaagtgccatctcttataagaagtcttcagtgattcctctagctaaacgtaatcctacctactgcatagaattgttaggaagagtaaagaacaaatttatgtgagtgcactttctgaactgtaaatattaaacaaccattagtttattcattctttatttcaacmaattttgattttccactatgtatcagcattcatttttccagacactggacatacactaatcaagaaaaagacaaaaaatctctcatgaagtttacattatagtgaaagaaaccaacaattaaaaatgtaagtaaaatgtattatgtgtagagctaaatgcttaggagaataaaacagaaaaaagtgatatgagataagcatatgtggttgaaatttatataggacgattgggaaaggtctcattgagaaagtgatttttgattaacaatcagtaagtaagaaggtgagctctatggggatctggcaaa

SEQ ID NO: 462861 - DNA, 536 bp, Homo sapiens
gtggaaataatacactccttggaaaaagtaaaaggaaaatgtaaaatggagtctaccttctggatgcaaagaaattctcatcatcacgtgatagcaaggtaccatatatttgcatcaactatatggattattgaataagttgtattatgtggctaggatatttttaccttctttctattctctaagacacccaaatatctaagccagtcactgccaagttaggtagtcttgctattataatttatattttttattgcacttaaagtgttttgctcatagtatgtgctcattaratgggtcaaacgacattttatacaattaatcacgtattcagtagaagtaaaacgtgaaaacagaactttaaaaggcttaagttttacaattttatagaaatcagctaatgttctataatttaaagaaaataggcatattattgaacacagaaacaacataatagtgaaagcataaataaaaaggaatatttacttaaatcattttgatgtagattacagttacaaagatatttgaacatacat

SEQ ID NO: 462862 - DNA, 474 bp, Homo sapiens
caaacaatggagtcactcatgttaatgccacagaatcaattgaagttttaaggaagcaaacagattaccaaacagaccagttttttttttttttttttttttttttcctgaaaataggagattctagtctacttgagtcagggtaataaraaagtctcctctgccttaattcctacagaaaagtaacctgaagcaccctgatgttaaccaatctgttttttacctattgttctgtttccttgctcccacttcacaaaactcgttgttctgacattgttcagtggagcactcattctattttatagaatggaggctgcccctgagtcatgaatcacaaataaaagccaattagatctataactaaatttgttgtaattttgcctttgccatcccaaataatatttttgctatttggtcagtttgagctgatattaatggaaccacagcatcttttagttagtatttggctggcat

SEQ ID NO: 462863 - DNA, 420 bp, Homo sapiens
ttattaggttttagtttacttgagaatactctgctttaagatggttaaggttttcatacccatgtaactttctgtattgcgtttgacttctttgaatatcactctggttaaatgaataactgatatttaacaatgacctgtgattttgttttgatcaagtattttgaatgtgaaagtttttacatctttggcagatttccctaggatcaaaatcytaaattaagtttttggtctaaaattaactttggggtgttccaattggacctctggagagtctcaaagaatgtggttttcatcttgcagagacgttatatgattatacttttttggtaaattgtatgggaggcattgccaaatgatgagtgatacaagatctatcagttacgtttatgggtatgtgattgatatcaatgttctaaa

SEQ ID NO: 462864 - DNA, 420 bp, Homo sapiens
ttattaggttttagtttacttgagaatactctgctttaagatggttaaggttttcatacccatgtaactttctgtattgcgtttgacttctttgaatatcactctggttaaatgaataactgatatttaacaatgacctgtgattttgttttgatcaagtattttgaatgtgaaagtttttacatctttggcagatttccctaggatcaaaatcctaaattaagtttttggtctaaaattaactttggggtkttccaattggacctctggagagtctcaaagaatgtggttttcatcttgcagagacgttatatgattatacttttttggtaaattgtatgggaggcattgccaaatgatgagtgatacaagatctatcagttacgtttatgggtatgtgattgatatcaatgttctaaa

SEQ ID NO: 462865 - DNA, 616 bp, Homo sapiens
atttgtggtagtatttgcaatgtccttggcttattcaaattaaatgagtgttttaccttagtctggatgtctgacatggcctctggatggaatgaatgctgcctagttatgatgatatcaaagcaatgagctaaggttttttttttttaatcytttttaggacatcattttaactaaaacaaatacaacccactatataatatgtaaaactttcatctgtaaatgttccagcaataaccagagtaaactatatttatattgggtcagagaatcttacattaagccaaaacaaaccttgaacaaagagaaagtttcagacagattcaaaatactgcttttaacatttttaatgaatgtcttcaaaatactacatttagctttgggttacatcttaaataagaataatatccctaaatgatgcttagaagcacatagtggttgatgtagatttttaaatgattaaataaggttttagataaaaattttttaaaatatttgttactgtatatagttgaattttatctgcatgacctttgtgattttataatccttaaaactcaacttgttcctacttttacctttcttttacaaaccttttaacctgtcatcaaaaccc

SEQ ID NO: 462866 - DNA, 586 bp, Homo sapiens
ttcttccaaagaatttagcttctctttctatactaaactattacaattctgtgttgagcacagtcattggtctttgtctttatatcttcttgctgggtgaactcatcaattcttatgactttgaaaatcatctttatgctgtgaactcccatatttatacctayagtatggacattttcccctgatattctgacttcttataaccaaagcaagaactgttacccacttacatagttcataagcatctcagagttaacatatccccaaattataatatataagttttcttctaaatattttcctctagtctaccctcatctcactaaatggcactaaaatagattcagttgctaaattcaggaacctggtaattgttcctaatattttcatctcttatagatcccacatctgatccagtcctagtcccattggttctatacaatgcatttcaaatatgactgtctggctccatcatcactacttccactctagtgtcagtaaccaccatctgcagccttgttggaatcaggtactaatttgtctccatatttccctttgcacctttacaatgtatttgctaaatttt

SEQ ID NO: 462867 - DNA, 486 bp, Homo sapiens
tttctctggggaaccttgactcatacagatacaaatacatttcctacaaatagttttacctcattcacagacattttaagtttgaaacacatttcaaggcattgtttctgaggcattgttttcagtttgtctaagaaattttatttcttcatttctgaggcattgttttcagtttgtctaagaaatttgtttctaacaycatctctaaaagcaggtattttgtttttccccttgaatatcacacaaaaacttgtataaagcaaatgatgactcatatttctcctaagggaaaattctgaagtgcttttatgtacccttttcaaaggagacagtcttggcaaaattcctttgaaactgaactgatatgggatagagacagatcaacatgttggatctagtacttaaacctgtttggctgatctttgtcttttgctgtgagagttaagtaaaatgaggttatatttatagattcatgactcatctgca

SEQ ID NO: 462868 - DNA, 486 bp, Homo sapiens
tttctctggggaaccttgactcatacagatacaaatacatttcctacaaatagttttacctcattcacagacattttaagtttgaaacacatttcaaggcattgtttctgaggcattgttttcagtttgtctaagaaattttatttcttcatttctgaggcattgttttcagtttgtctaagaaatttgtttctaacaccatctctaaaagcaggtattttgtttttccccttgaatatcacacaaaaacttgtataaagcmaatgatgactcatatttctcctaagggaaaattctgaagtgcttttatgtacccttttcaaaggagacagtcttggcaaaattcctttgaaactgaactgatatgggatagagacagatcaacatgttggatctagtacttaaacctgtttggctgatctttgtcttttgctgtgagagttaagtaaaatgaggttatatttatagattcatgactcatctgca

SEQ ID NO: 462869 - DNA, 596 bp, Homo sapiens
gttgtattttattagtagttgttgttaatctcttactgtgcctaatttataaattaaacttggtcataagtgtgtatatataaatacatatatatgtatacatgtgtgaatatacatatatatttgtatatacatttatatattatatataaatatattatatataagtgtatatatgtatcatatataagtaatagatatataatataaataatatacatttatatataaatataaatgtatatttatatatgtacatataatatatattatacatatatgtataaatcatcatattattaatgtattttagttaataatacaaataaatatatattgctatttatatagaatataataaagcataataaataataccctatataaagacaaatatatgcatttataygcatattttgtatgtgttatttatacatatataaatacatatatatttgtgtatataggactcagtactatccagtttcaggcatccactggcagtctcagaacatataccccatgtacagcctctgattctttccttttttattctctttctgaaactttgattaaatatattttagtctttttat

SEQ ID NO: 462870 - DNA, 633 bp, Homo sapiens
atactgtaaacgtattttatgtttttaaatcatttttttgagacagggtcctactctatcacccaggctgactggagttcagtgacgcctttatggctcaagcaattctcccacctcagccttctgagtagctaggaccacaggtgcatgcaccatcttggctaatttttgtatttttcataaagacgttgtttcagcatgttgcccaggctggtctcgaattcctgggctcaagcwatcctcccacctcagccttctgagtagctaggaccacaggtacatgcaccatcctggctaatttttgtatttttcatagagacgttgtttcagcatgttgcccaggctggtctggaactcctgggctcaagcaatcctccctccttggcctcccaaagtgctgggattacaggtgtgagccactgcccctggccttaaaatcattttcttttctgtggcttacttcattgtaggaatacagtatataaaacatacgacatacaaaatatgttaattgattgttatccataagacttctagccaacagcggactattagtatagtcatccctcctctctgtatacatgacagattgattccaggacctcctgcagataccaaagtctgcacatattc

SEQ ID NO: 462871 - DNA, 646 bp, Homo sapiens
agttggggaggggaaaactgaagggcggcccctctcctgctcccctgctcattcctctctattaatagagagggtctgtcccaaggcaggcggggtgtagggagatcaggggtcccacacacagctgatcttcacagtcacctaagggctggagagggaggagtgtggagggcttactaaaaatacagatgtcggctctcactgcagatctactgaatcgagacccaggaatcttgttttaatacttcaggagattctgatggtccaccagggctcgagaatcaggggcctgagagagagctttgctgtaatttttaagcccaagactccggcagtgttagctgggcagaaggactgtgtcctggaaaaggagcaccagagtgtcccaaataggccacctcttttttggggagtgggagtaaacagggaagagctgtctccctctctcctccttgcaagcacaagcagccatatataycacagaggaacattccagtaagaaagttcacccaagatggctccacagagcttctgtttcccctcaactgttaatctgcctgcccaggaccccaggagcatgtgctgggcccttcacctgacccttataggtccctgctcctccttcccagcagccacctgtctgggc

SEQ ID NO: 462872 - DNA, 583 bp, Homo sapiens
gataggaatatgtgttgaaaaactaaattaaaagcaagatggaaaagggggaggtagctgccacctagtatgctgtacctcgacttaatctttctgagtcttggtttcctcatctgcaaaatgattataataccacccatttcataggcttgttgtgaagataaggttacacaaggacttacaacagctcagtagatactgagtaaataaatggtttactttctctggcagacccctctgcccagatccacagtcaccagtgttcctggcaatcatttgttggctgccatgtagaaatamatgacatgtcatctaaggcaaataaggtattgtagaaataaatgacaagtcatctaaggcaaataaggtattgtagaaatacatgacatgtcatgtattgtcatataaggcaaattgggtattggtgactggatctaagttttccctttttccaaccttgagggatgggagttaagttaggaaaatggatattttgtctttctttctgtgtcagagacttgttggttaggagtaggagatgatggctattttgatgtctccgttaatcatagactagatggtt

SEQ ID NO: 462873 - DNA, 583 bp, Homo sapiens
gataggaatatgtgttgaaaaactaaattaaaagcaagatggaaaagggggaggtagctgccacctagtatgctgtacctcgacttaatctttctgagtcttggtttcctcatctgcaaaatgattataataccacccatttcataggcttgttgtgaagataaggttacacaaggacttacaacagctcagtagatactgagtaaataaatggtttactttctctggcagacccctctgcccagatccacagtcaccagtgttcctggcaatcatttgttggctgccatgtagaaataaatgacatrtcatctaaggcaaataaggtattgtagaaataaatgacaagtcatctaaggcaaataaggtattgtagaaatacatgacatgtcatgtattgtcatataaggcaaattgggtattggtgactggatctaagttttccctttttccaaccttgagggatgggagttaagttaggaaaatggatattttgtctttctttctgtgtcagagacttgttggttaggagtaggagatgatggctattttgatgtctccgttaatcatagactagatggtt

SEQ ID NO: 462874 - DNA, 583 bp, Homo sapiens
gataggaatatgtgttgaaaaactaaattaaaagcaagatggaaaagggggaggtagctgccacctagtatgctgtacctcgacttaatctttctgagtcttggtttcctcatctgcaaaatgattataataccacccatttcataggcttgttgtgaagataaggttacacaaggacttacaacagctcagtagatactgagtaaataaatggtttactttctctggcagacccctctgcccagatccacagtcaccagtgttcctggcaatcatttgttggctgccatgtagaaataaatgacatgtcatctaaggcaaataaggtattgtagaaataaatgacaagtcatctaaggcaaataaggtattgtagaaatacatgacatgtcatgtattgtcatataaggcaaattgggtattggtgactggatctaagttttccctttttccaaccttgagggatgggagttaagttaggaaaatggatattttgtctttcttkctgtgtcagagacttgttggttaggagtaggagatgatggctattttgatgtctccgttaatcatagactagatggtt

SEQ ID NO: 462875 - DNA, 434 bp, Homo sapiens
tgctttgcttccttattaactccttatgacttagaccttagatttgcccatagattctgtttctgcctctgttccacttgagtgtcttctcttgagtttacctactgtcagattctggccaattctatgactcagatttttttctgggactctatttggacattttccttacactttctttcattgcccaatcctcttccaaagctgctattatcctgtcttaacattgacatggccagtcaagaggccaggatgggctggggagaagggataccaaaaaacagaagttccccacgtacggggcacttgccrttggggaagaagttgttctcaatttcacgtgagaatcctggtgagatgactgagaaatcagtgagaatgtcatgccggagtcacagtgctgtggtttctaacagcctctatactttggaagc

SEQ ID NO: 462876 - DNA, 599 bp, Homo sapiens
tgtatcataccagaaatattttgttcatttacaaccaaataggtatttatatctgtgtgtgaatgtgactttctccacctccatttccatacaaacgatggtatactctatgtgttgctttcctccttgctttttctcctagcagtatattttggagacttggaggttggtccatatcctgacataaaaaatagctcctttagtatactttatggctacatagcatctataatataattatactataattttacagtccacattaatggacattttgatcctttcaaattatatatatatgtgtrtgtgtgtgtgtgtgtatatatatatatccttaacccactagagcagtcctgggctgcttcttacacctgtggatgtttttatgagttctaggaagatctcagccatttctttctactttcccttttccttatgggactcacagttaacatcttgtcaaacttttcaatatattctctatgcctgctatcatctcttgtgtattttttctccatctatatttctagatagtctgcagagtaggtagacaggaggaagtagatgtgtgtgtgtgtgtgtatatatatatagtatat

SEQ ID NO: 462877 - DNA, 672 bp, Homo sapiens
ttaacatttttcccaatttctgcagaaggaacaattttcttgcatcgaatctggtcaaataaattctgtgtttcagagctgggtggaaatatgatctcagctccccaggggatgttttcatgaggtttctctcaaaagctattttaggcttctcagttacacaccctgaagggctgatgatggtgtagtctagggtatctctgggactggttagcaatattttaaatatggttaktcctcatagattcaatatttatttcttctaacatttaaaataagattttcatttaggcatggaacttgtgtgatacaagcatttctaaatgggttaataagtggcttcaccctccactgatataaaggaaaagggagtcaacaaattgcttttctctcctcactctcccctactgactgaaacaggaaaattctatcatgtttctgggctgcaggctcctcatctgtaaatgagagtgtttaatctctgggatccctcccacagctgatgggcagtgttggcacatagtaattatttgtgaagtggtaacatttgtttttattgatgacctcgcttcatggtgagtattggaatatcttagttttaaattcctctgggatatcccatactcatatcatttggctaattattaataatctttgtaaaaatatatgtac

SEQ ID NO: 462878 - DNA, 581 bp, Homo sapiens
gaggactgtttttcactctccaaagggaatctttcctccaaccaagtcccctctttgtcaatcacagtgagtggaatatgcttggccccaccctctccaagactgtccctgtgtccccatcttaccctctcatcctgtccaaatcctgccattattccacacccaaatcaattttaccaagttcaagaaaacactttctgaccaatatagttcagtgatttctcccttctctaaatttctgtagcattttacaattgatgccaaagaatgtataaattcagatgatttgccttgcctcctgttctttcatctatgtcctttctgtctccataaccttttttaatacaccttttatagaatyaaaacacacatacagaaaatatgcatgtagcacaaaataacccatgcaagcaccacccagatcactcacctacagaaccctgtcagcatctgagaagcccttcttgggcacctttccaaccactgtctccactctccttccaaaagatgcccactctgctgactgctaataccatacattagtttcacctgcttttgagttttctataaagtgtgtatta

SEQ ID NO: 462879 - DNA, 589 bp, Homo sapiens
atgatttgccttgcctcctgttctttcatctatgtcctttctgtctccataaccttttttaatacaccttttatagaatcaaaacacacatacagaaaatatgcatgtagcacaaaataacccatgcaagcaccacccagatcactcacctacagaaccctgtcagcatctgagaagcccttcttgggcacctttccaaccactgtctccactctccttccaaaagatgcccactctgctgactgctaataccatacattagtttcacctgcttttgagttttctataaagtgtgtattatttgatgtctagcttcttttgctcaactttacacttgtgataatcatccatgttgttgtacgtggcagcagtgtcttcattttaattaatttgccatttcatggatatatcacagtttatctctccattctattgtctgaggacatttgaattgtttttaatttggctattttaaataatgctgttatggayattcttatgtttggcttttagtaaacacttgtatgcatttcttctgggcatatatctaggaatagaactagtgggtcatagggtgggcatatgttca

SEQ ID NO: 462880 - DNA, 551 bp, Homo sapiens
gctaatcacattcccctttctgaaatttgggacactcagcattggagctaatcatctgtggtaatcaggctgaaaggactagcagaattaggacctgaacccacagtatggcaagccaaattcagattcaggctggagaatggggaagcagaatccataagtcaagagaaaaccacaatgtcctgagaggaggatggagctgcacaaacaggatcaaagatggggaatcctgtattccgagatggagtgatgtgtgaaggtttgtctcagctccctgtggccttccagttcccmgctccaattcacatgagatcttgatacctttacaacagtctctatctttatttaaactagctggccctacaatcaaagagccttgactgaaacacctcacagtaaatacttgctgaatgattggctgatgagtatatcttttttacttctctaggtgtctgtcttcatcctaaggagtcaactgctataccttagtgatttcaatgtaattgtttggtctgtaagtcattcttgccactgtggttctggggccattg

SEQ ID NO: 462881 - DNA, 622 bp, Homo sapiens
tctttcccccacaattcctcaactttctgagcctgcctcaggcccatggccttgcactaggcctctctgtataagttgccagttctaattttgcaatttcccttcaccttatcgaatatgccccaagcctgccagtggatggagagggaaaggctttggagtcagtcttgtcctctggactttttccacyagccccttctctgctttctccctacaattagggagacttgtttggatacagtttcagtgttgacttgttaatctgacctttgttaatgctttttaaaggagagcattgcccataatgcaagaagcttgggagagttccccactaggctcttccatcccactcacatccccaactcccaggggccctgtacctctgacttttcataaaggttaaactattttcccacaaactgtagatgtcagcccttccctaactgatttagcttgagagcccttcacacttactggaatagggtgtgaaaggaagacgaggagaagagagagggctgagaggtggagagttgatagcctgggctctgggacccatacaggggaggcatggcgtgtgggctcctcataaggggcaccactctatggaagccctgaattggag

SEQ ID NO: 462882 - DNA, 456 bp, Homo sapiens
acccaagcaaaatctggtgaaaaggagagaggaacactatgtgggtagcgttagagtgtatttccctgatttcgtgactgtgccaaagatcagtctttatcacgtcatgttgtagctttgcctgcaaacacctagccctgaatttgtccacagccttatacagtgatgtkccctggcagtttgaacctaacttcattacatttggtctgaaggaactattccaacagagtttcctgggctaggaagagaggttctcatttagcaggggcaccatcaacattgttgttgatttgctactgaacatttcagcctgccctgggggtagatccaggttttgtgtcctatgaagcttatgcaatttgggggagccctatttaagaaaaataaatgttaaaatagcatatctttgcaaatttacaaaaatatatgaagaacacattgttaggctctcccaag

SEQ ID NO: 462883 - DNA, 615 bp, Homo sapiens
acagtccttacccaaaacaaacatccttattgcctgtggactagactgcctaaagccacaagattagaattcatagtaatcttactaaatttaagatgcagctattttcattaaaccaatatcaatgtcttatttattaaaaattacaaaagcaaagatcattctgtttggggctgggtttatagttttgtaacccctgtgccaaattttgacaccttgtagtatttggcagggatgagaatgaaattgcttgactaataaatgcaaataaaaaatgtatgctggcaattcttaagacatttttcatattactttaccagtaattttaaagccagcttatttattaaagattttacttaagtcacataaacttgaaaaagtatttgactagtctttgcttttttagtatctgatttargcacttttattttttttaagccaattaattagagctctttttttttttagtagtgaaacattgtgtacacacacataaatacagagacatattaggcatgccgataaaagtacattttatagattcataaaaacttttttttttcctatcttagaatttcagattcttgataacctgttttaccaccctgggcggtt

SEQ ID NO: 462884 - DNA, 579 bp, Homo sapiens
tcttatttattaaaaattacaaaagcaaagatcattctgtttggggctgggtttatagttttgtaacccctgtgccaaattttgacaccttgtagtatttggcagggatgagaatgaaattgcttgactaataaatgcaaataaaaaatgtatgctggcaattcttaagacatttttcatattactttaccagtaattttaaagccagcttatttattaaagattttacttaagtcacataaacttgaaaaagtatttgactagtctttgcttttttagtatctgatttaggcacttttattttttttaagccaattaattagagctctttttttttttagtagtgaaacattgtgtacacacacataaatacagagwcatattaggcatgccgataaaagtacattttatagattcataaaaacttttttttttcctatcttagaatttcagattcttgataacctgttttaccaccctgggcggttgtcagctaaatagcctaaatttgcatattaaaggaagctgttcatgtgaaagtcaaatagcaaaatttacatggtaagatgcagagagaaa

SEQ ID NO: 462885 - DNA, 545 bp, Homo sapiens
cctttgtttctggtagaggccaggytggaggatgtggcaatctgttagccaagttggcctgcctgtactgaaccccaataaagaaaaaccctcccctagaagagcaaactaaaacgctttctctctgtgagcaactcactcccaataggaaggaacatggagccgagcatgcccagatgtaacagtcaggtaagataatccattcaccctggaagggtgagcaatggagaggaggaggacaggagtaacgctcaatgagctccctttaacaaaaggaaacatcataagttgagtaaaaatattcttacaatatgccaaatttatttaatgtcaatctaagtgaggcctcgtttgaaaagtccacatctcacccatccaacttccattaagccagatagatatgccttctggccctctgttagcaaagacaatagcaatttttcaagccttaaactctgaagtactgtgaagtagagtggaatggagtgtatactaaaccatcctgaaatcacaccaccatattcaactattagttctgcctctgt

SEQ ID NO: 462886 - DNA, 480 bp, Homo sapiens
tggttctcatttactttcagccttattcatttattatttgtctttcagagaaaaaggcagcaagaaaaatcaaccttgaggttygttaattaggcctgcattcttgttgatatatttcaggaaaacaattggtaacttttgcctactctctggagaaccttataatgtggttctattcattcatcagggctcagtgaagctttggggcccactcctgtttggtgatccttaaatccttttacatatggaattgtggaccctgtatcagtttttaaaactaatctttctccctgcagagcttcagcaagcaaccactaggataatgttaaagatcttcagtggtaagaagacaaggagcaaagatttttatcttactttgtgattttcataattaaaaaagaaagaaaggaaaggtaagcactagctctctcactgccctcactcacaaacaccaagcattctaattctgatttcctgttt

SEQ ID NO: 462887 - DNA, 480 bp, Homo sapiens
tggttctcatttactttcagccttattcatttattatttgtctttcagagaaaaaggcagcaagaaaaatcaaccttgaggttcgttaattaggcctgcattcttgttgatatatttcaggaaaacaattggtaacttttgcctactctctggagaaccttataatgtggttctattcattcatcagggctcagtgaagctttggggcccactcctgtttggtgatccttaaatccttttacatatggaattgtggaccctgtatcagtttttaaaactaatctttctccytgcagagcttcagcaagcaaccactaggataatgttaaagatcttcagtggtaagaagacaaggagcaaagatttttatcttactttgtgattttcataattaaaaaagaaagaaaggaaaggtaagcactagctctctcactgccctcactcacaaacaccaagcattctaattctgatttcctgttt

SEQ ID NO: 462888 - DNA, 520 bp, Homo sapiens
tcaatgatatcattatggcacccatggtggatggggcaaatgtttacaaacagccataaaagctgcgttgctttacaaatattacaaawgtttattaatttgagagcttcacagatagcataagtctatgaatgaatgctcaaagaaaacttaagaaacaaagatttttcagcactgtgctcagactgccactcccaactactgaacttaacattcaagttgaaacttattttccatccataatgtagatcttcacaaaaacaaaatgtttctgaagatatatttcaggtcacatcaaagagtacttgtagagtgcttaacagctcacctgcagtattcaatttaatccacctaatatccctgaatgaaagatattaaaattcctattttacagataaggacactgagatttgaaggatgatattaaagaaagatggatattttactgcaagttagttatctggtctcagagccaatagagacttgattatatgtgacaactccaaattgtcaggttata

SEQ ID NO: 462889 - DNA, 376 bp, Homo sapiens
tacatattgtgttattctacttacatggcmttcttggaatgacaaaatgagagagagagagcacacagggattaaggatgagggaaggaagaaggtggctgtggctacaaaagggtagcatgagggatcctcgtgatgaaactgttctgtatcttgactgtggtggtggtgccacaaatctacacgtaataaagttgcatagaattaaatacacacacgcacacacacgtgagtgcatgccacacatgacatctggataaggcgggtggattgcatcagtgccagttttctggctgtaatattgcactaaagttatgcaagattttacataataacagcaaccactggtaagaatgcagagaattatgagaatgga

SEQ ID NO: 462890 - DNA, 539 bp, Homo sapiens
gatcgcatttggtgatgatttgtccatgcgtgctctggcccttacaagtgagttggggcaaggagagcatcttttcaactttgtattccaagtgccttgtacagtgcctggcactcagagagggagagagagggcgagggagtgagagagagagcatgcgccaatctggttgacagcatattgctttagacttctagttctgagtcagagtaaaagtcagagcgttctgatatagcttggtctcatggaacaaacactrttctaagaaaccagtttcatgctcctggggcatgaaacatggggctgcagtgatggagtggcctttaaaaagggtcacagtttctcacaagtcttgaccttgaggccattcagaccaagcacggagagaaaggggcttagcgggttatgcagacgtataataaatgatttcctcctaatttactaccttcctcgtaactcccgactcctgtccgtccccaaagcacccattaggggccagtctcagtccacttggtccacagctgctctgggaagtggaa

SEQ ID NO: 462891 - DNA, 539 bp, Homo sapiens
gatcgcatttggtgatgatttgtccatgcgtgctctggcccttacaagtgagttggggcaaggagagcatcttttcaactttgtattccaagtgccttgtacagtgcctggcactcagagagggagagagagggcgagggagtgagagagagagcatgcgccaatctggttgacagcatattgctttagacttctagttctgagtcagagtaaaagtcagagcgttctgatatagcttggtctcatggaacaaacactattctaagaaaccagtttcatgctcctggggcatgaaacatggggmtgcagtgatggagtggcctttaaaaagggtcacagtttctcacaagtcttgaccttgaggccattcagaccaagcacggagagaaaggggcttagcgggttatgcagacgtataataaatgatttcctcctaatttactaccttcctcgtaactcccgactcctgtccgtccccaaagcacccattaggggccagtctcagtccacttggtccacagctgctctgggaagtggaa

SEQ ID NO: 462892 - DNA, 579 bp, Homo sapiens
aaaaatgcataccctctcagaatagcaagggatgggttggtggggggtgggggaggagagaaaaatggatactctgaaactaataagaaaacacagatgaataaaaatttagggacattctacaatataactcgccagtattcttcaaaaatgtcaaggtcatgaaagacaaagaaaggctggataactaactgcccttccagattaaaagaaactaaagaggcatgacaactcagtgcaacgtctgatcctgaattggatcctgggraatagctataaaggacattattgggaccattagcaaaatttaaatatggatggagtgtattaaataaaacaattgtatcattgttaaaattcctgatttttgaccactgtactgagattatgccagataatgtcttttttttaaggaaacacacacatatatttaggataaaggagtttgatgttggaaactctaaaatgatgtagtaaaaaagaatatatacattatatatgtgtgtgtgtgaatatctatataccgtatactgatttcctttcttttggggtatataccatatagatatccacacacaa

SEQ ID NO: 462893 - DNA, 564 bp, Homo sapiens
ttaaacgtcttctatttttaagatcggttgggggagtggaggaggggtcgggttcagttagtagcagaactgcggagcctcctcacccccgagggcctctctctttccctcccaaaacaaacaaaaagaaaaaacttgactggacccacccacaccctctccctgtctggttccaagtttcctgacaccctccagctccaacccccaaactcctgtggcttcctcgtctgccttttcctctgaggcccccggcccttcatcccaggcagccgagcaaactgactgtcttctggcttggtcctctgaggggtgcaggctgacaaccctcacaggtggcctgagagctgtcacataacaaagcatccggcatcttttcyctccgttttacattcttaatctttttcttaacctcagaggctggctgggaagtggttttacttaaaaggaaaatggggtacattgaggcaagaggtcttgcagtcctggaggaactaattatcttagtttccgggttttaactgcagttagggaatgtattcatcctaactactcagtactcacaag

SEQ ID NO: 462894 - DNA, 501 bp, Homo sapiens
aaagcagctggagaaggcatcgatgactgctgccttttccttgcccaggaagagtctagagaaagaatccaccacttttgcagaacactttaaaatagggctttatggggctgtggactcccagtaccccttctcccccacccaccccyattgtagacatgatcatcctgcatcacctatctgcccagtgtttccagctagcaagaaatgccaagtggggacatctggaaaaaggaatattagctttggattccaagagatggcaaaatgaagatgtcactaatagtcagtgaaaagctggctcattcttcctctctttattcacttcccctgggctccattttctgcctcagcacctgcgccgcctcatgctcggtagcaggaatttgcttttcagcaccacggacagcgattggctggcagccggggaggcgaggaagccagaacgtgggacattcatgcaaccaaacaaatatttactgagcacatcctgggggcagg

SEQ ID NO: 462895 - DNA, 501 bp, Homo sapiens
aaagcagctggagaaggcatcgatgactgctgccttttccttgcccaggaagagtctagagaaagaatccaccacttttgcagaacactttaaaatagggctttatggggctgtggactcccagtaccccttctcccccacccacccccattgtagacatgatcatcctgcatcacctatctgcccagtgtttccarctagcaagaaatgccaagtggggacatctggaaaaaggaatattagctttggattccaagagatggcaaaatgaagatgtcactaatagtcagtgaaaagctggctcattcttcctctctttattcacttcccctgggctccattttctgcctcagcacctgcgccgcctcatgctcggtagcaggaatttgcttttcagcaccacggacagcgattggctggcagccggggaggcgaggaagccagaacgtgggacattcatgcaaccaaacaaatatttactgagcacatcctgggggcagg

SEQ ID NO: 462896 - DNA, 574 bp, Homo sapiens
tttatgtttgggctggaatcacatttgctaatagtaattagctcacattaatcagatacctggttggctttgatgtcatcatagggcttactggtattccagggagaagtttttggtattgaaatgaggcctcctggggtatccttttgagggctgttcttctggagaggccacaatagctcccatctcagctgttacactcagtactccctgcgacagcagagaatgtagaagatgtctatctgaaccctgtaaggtgcagtaagaattttggtgtactaattcatctgagcccagcttcttttcatccaagtggtgccaacaacaccaaaagcattaaataaataattaaaccatagaattgtacacgctcaacacactctgtgtgctaggcactgtgccaggcagtaaaaatactgtgagaatgagggcagacatattccctgttctcctgggccttagagtcaaatggggagaaagattcaaagcacataactggagaacagtaaaagttacataatacaggcatcccaaggacctgtgagaagasagggatggcaacaatcctacctat

SEQ ID NO: 462897 - DNA, 529 bp, Homo sapiens
tattggcacaagtgattgagaagtctggagaccaagcacagattgaccatgggctcaaacaatatcccctagactggctagggattctcagcatcctcagctctggatgctcacctgctgatgtatgtctcyctctctctctctctctctctctctctctctctctctctgccacttaccttcaggaggcagctgaagaaagggatctaataaagtagtctatgtattcctgggcttatccctgaaataagcatatatgcatccaatcctaaacatataccaaagactttgagaactgaactagagaacagacaaccaccaagatcccaggctggccaatggacagtaaatatgcagaatatatctgactagcaccagaaatcctttgaaaactaaactgataatgaaactgtagcccacagaaagtagatcaaaacttgttgcccaaaactaagtgggtcaacttcctggctaaaaataataataacaatcagcattctatataggatttaaacaaatatgagaccca

SEQ ID NO: 462898 - DNA, 529 bp, Homo sapiens
tattggcacaagtgattgagaagtctggagaccaagcacagattgaccatgggctcaaacaatatcccctagactggctagggattctcagcatcctcagctctggatgctcacctgctgatgtatgtctctctctctctctctctctctctctctctctctctctctctgccacttaccttcaggaggcagctgaagaargggatctaataaagtagtctatgtattcctgggcttatccctgaaataagcatatatgcatccaatcctaaacatataccaaagactttgagaactgaactagagaacagacaaccaccaagatcccaggctggccaatggacagtaaatatgcagaatatatctgactagcaccagaaatcctttgaaaactaaactgataatgaaactgtagcccacagaaagtagatcaaaacttgttgcccaaaactaagtgggtcaacttcctggctaaaaataataataacaatcagcattctatataggatttaaacaaatatgagaccca

SEQ ID NO: 462899 - DNA, 593 bp, Homo sapiens
ccgtttacttgtattatctcatctaattctctcaactatctgagaataactgctactatgaacccattttgcagctgaggacactgatcctccaaaagattctgtaccttgctgaatgtcacacagctagtaagtggcaaagccacgacatgagcccaggtctctctgactccatactccatgctcttaaccaccaagctgtactgccctatgtcagcttgaactttatccattccacaagggtttggattcattctgtctagtgggaagccatcaaaatctttgaatcagcaataatctgataaagtgtgtgctattagaagtatcctctccgatgactctggaagttggacagaggaagacaaggctggtgtcttttgtaagcccccctttgactggcctcttctgcaagcctgcctttgcccagatagcctgcatccctccttccagaccctggagcccattcactaaatgggaggccaagatctgctgtgtgatcttaagcaggacctgaccstcgctgggcctcagctttcttaggtgaaataagaagagactgggctcacacatccttaagaatctctccagctctg

SEQ ID NO: 462900 - DNA, 595 bp, Homo sapiens
ttgaggaatagtttggcagttttgtatgaagttagaaataccctgaaaccagcaatcccacttctaagtatttactcaactgaaattaaatgtatgttcatgtaactgagtaccctcatttttctaagagataatttaataattttttctctgtctcttcttttctccttttccctacttcctacttagccctttagaaatgaaaatatagctttccttccccttcaccagacactccctacaaggcaagttcacctgcaactatgtgcttaggcrctccagaaaggaactctcacccgctaggaggttacctcgagaggtaacagtcaattacaacccaaagtatgcctgcccacaaaaacatcagcagtcaccagcttgacagcctggtagataaggcactaagctaacacgaagaccccctacccgctcatttccccctacccctcctcatgctgttcatgttaggtcccctttaaaagtgctcaccttctgctctaaaagtaagtggtacccttaaagcaggaagcccgtatttcttcccctaagctagctttggaataaaaaatcactttatacgagacctcactgttaa

SEQ ID NO: 462901 - DNA, 598 bp, Homo sapiens
aaaaaaactgcaagaaaggaaacgtgtatggaatagtaattgtggatagcaattgctcttttggatataaaaccattgcttacaaaccaatttacattttcacccaactatgcttttgtcagtaacttagtattagaaatgaacagtaaaaagatgtgttctgttctgttggtggtctaggagaaaatgaggagacacatacttgggttttacacccggatctatttctgattagtgtgatgacaacaagcttagattacctgggacatagggttcttctctgtaaaattaaattattgctgatctctgakaactcatcaaataaagtaacttccctttagaaaagaatccctgtgttatacatgaaagttgtgctccccctggaggagaaattggggtacaacattggttgaaaacagcacctgggtgcttttcaaaaatgcggctaggttagctatccttaaggacagttcattgaaaaagcaagtttttccagcttattgttatgggagcagagggctacatcaacttggtggcacttggagaggcacggtgggctcaactgatggttccttaattatctgcaatgattagccca

SEQ ID NO: 462902 - DNA, 519 bp, Homo sapiens
cattttgcagtgatgattatgtgtatgacaaacaattagttatatagctttccatttgtaccaccattattcattttatcaccaatgcagaacttaaagtgtttatacaacagagaaaaagtgaaatattcctctccccaagcaatacagaatgcactacaagtttgtttctacactggaaaaaatttaaaggtaaaaaattctaggtcacttaagttcctccctgctacaaatgaaacataaaagccattgtctcctaacctctggaaaactcactagcttcctctgaaaaattccctcttcattatrtaggcatactttcgcattcaacgcgtattagccaaaacgtttatggataattggcaaccgagaaacaaaagaagacataaaaatatttattttgttcttatgtcacagagaaattcctatgaagctaaagaattctggtattgaatttctagacatatataccctttctaagtgaagacataccatttctgccactgtgcccggctttga

SEQ ID NO: 462903 - DNA, 613 bp, Homo sapiens
tttggggaaaaagacttttaaacatgacatgtcatccaaaaaataaatagcttcataaaactgccccagggaagatgaaaaagttgtaagaataaaaatcttctgagacattaaatgacccacaaaatgcaattattgacaataaaattttgttcttcataatacttacagaacctctaaaatatcccttttaatataggtgaacaaagctactaccacatcatattagtttcctattgccactgttaacaaattaccagaaagttcatggcttaaaacaacacacatttattatcttacaaactctggaggtcagaagtcctaaaattgaggtgttttcagggctgtgttccttctggatgctccagaggaaaatccattatcttcttccrcccagctgctaggggccatttacatgccttagctcatggcctcttcttccatcttcaaagccagcactgtagcatcttcaaatctctctatgactctgaccctcccccatccctcttatagtggcttgtagttacattgggcacctcctaagataatcccagataacatctcatctcaaagttctcaatttaatttcatctgaaaagtcccttttgtcatt

SEQ ID NO: 462904 - DNA, 272 bp, Homo sapiens
tagcatgttaaacacaattactaccttttcttgggcaaagtctccatttttccatattatttaaaatgcttatgtatatgatgagattatgttggtcaaacagcataggacaatgttcagtaagtgtttgttcatttttaaaattttatctcattcacrtatggaaggttcaaagaaagatgtttctgagaggagttattaaacatttaaaaagtaaaagtaaaacgaaacaatttatgtttgagaaaaaaatgttgtctatgaaatgcttc

SEQ ID NO: 462905 - DNA, 576 bp, Homo sapiens
tttgatctaaatgtttataagatctgatatatgttctgattgtgatgcaggcctcagagtatgtctgctaacctgggacttttaaaatggtaatgatttagtycttattgtggccaaatactcaatagatctttaaaatgttatgttcagctcctttctcttacaacacatatcaaacctcatggattaacagaaacccaagagaaagtccatcagaaacatgactttgctaatccccttgcctgtgtctttggaacttgtgctagactgtcacagttgctgtttacaaaaatgtatgggtcattaatccttgcagactacttagctggctcttatttgcctctaaatcagagaagtctttctgagcctgctgggagcaggatcaccatctttaaagaaatttatcctgtatttcctgtaatggtcaatttccttcctggccttttccttccaattagttcttggtgggtctttcagttaacacatgcctctaaatcacattctggttattttttactgcattcttgtattttaaccttttctatatatgtaagtgtgtaattggctgcagagtgc

SEQ ID NO: 462906 - DNA, 472 bp, Homo sapiens
tttaaagcaagtaggaagcagactgcatgaatttgggaggatatttatmactttgtttcactctgaaaaaatatctggaattatctaggatgcttacatagcagagactcaggcaatcaccacctttcctctttgctttagattatatagacctggtctaaccacataatggaatgacatagggcaaggatcccaaaccagattcctcagtcaaatcaggtctaggatatattagtttgactagcctagtattatatacagagatatatatatataaggcaacagtatacacacacacacacacacacacacacacatatctatgaaacacatatattctgtgtgtatgtgtatacacacacacaattgcctttaggtaaggtttatgcagtatacaccactccctcttcttatacaaagctgttttgcatatttacattacccacttatgatagacagaataatgattctc

SEQ ID NO: 462907 - DNA, 472 bp, Homo sapiens
tttaaagcaagtaggaagcagactgcatgaatttgggaggatatttataactttgtttcactctgaaaaaatatctggaattatctaggatgcttacatagcagagactcaggcaatcaccacctttcctctttgctttagattatatagacctggtctaaccacataatggaatgacatagggcaaggatcccaaaccagattcctcagtcaaatcaggtctaggatatattagtttgactagcctagtattatatacagagatatatatatataaggcaacagtatacacacacacacacacacacacacacacatatctatgaaacacatatattctgtgtgtatgtgtatacacacacacaattgcctttaggtaaggtttatgcagtatacaccactccctcttcttatacaaagctgttttgcatatttacattacccayttatgatagacagaataatgattctc

SEQ ID NO: 462908 - DNA, 611 bp, Homo sapiens
ctggcttttccccacttccctagagacctgcatgacagcagatgcagtcataatccccctgggaacataactccattggtctgagaaccataccccatcccccacagcagcctcagcaagccccaaccaaagagagtctgagttcagacatgcctaaccctgtccccaycataggcacatagaccaatgaaacagaatagagaatccggaaataaagccaaatacagccaactgatctttgacaaaacaaacaaaacataaacaaaaacataaagtggggaaaggacaccctatttaacaaacggtgctgggataattggcaagccacatatagaagaacgaagctggatcttcatctctcaccttatataaaaatcaactgaagatggatcaaagacttaaatctaagacctaaaaccataaaaattctagaagataacattggaaaaacccttctagacaatggcttaagcaaatacttcatgaccaagaacctaaaagcaaatgcaatgaaaacaaaggtaaatagatgggacttaactaaactaaaaggcttttgcacaacacaagaaacaatcagcagagtaaacagacatcccacagagtgggag

SEQ ID NO: 462909 - DNA, 564 bp, Homo sapiens
ataatgtgatgccacctgactcttgcaagaatggccataataaaataaataaataaataaataaataattaaaaaacaatagatgttgacgtggatttggtgaaaagggaacacttttacactgctggtgggaatgtaaactactataaccgctacagaaaacagtgtggagattccttaaagaactaaaagtggaactaccatttgatccagyaatcccactactggatatctacccgaaggaaaagaggtcattctatgacataagacgcttaagacactgcatgtgcatgtttatagcagcacaattcacagttgcaaaaacatagaaccagcctaaatgcccataacagcaagtggctaaagaaaatgtgattaatatatataaatatacaccatggaataccactcagccataaaaaaggaatgaaataatggcatttgcagcaacctggatggagttggagactattattctaagtgaagtaactcaggaatggaaaaccgaacattgtatattctcactcctaagtgggaggtaagatatgaggatgcaaaggcata

SEQ ID NO: 462910 - DNA, 581 bp, Homo sapiens
atcaaaactataatgtgatgccacctgactcttgcaagaatggccataataaaataaataaataaataaataaataattaaaaaacaatagatgttgacgtggatttggtgaaaagggaacacttttacactgctggtgggaatgtaaactactataaccgctacagaaaacagtgtggagattccttaaagaactaaaagtggaactaccatttgatccagcaatcccactactggatatctacccgaaggaaaagaggtcattctatgacataagacgcttaagacactgcatgtgcatgtttatagcagcacaattcacagttgcaaaaacatagaaccagcctaaatgcccataacagcaagtggmtaaagaaaatgtgattaatatatataaatatacaccatggaataccactcagccataaaaaaggaatgaaataatggcatttgcagcaacctggatggagttggagactattattctaagtgaagtaactcaggaatggaaaaccgaacattgtatattctcactcctaagtgggaggtaagatatgaggatgcaaaggcataagcatgat

SEQ ID NO: 462911 - DNA, 558 bp, Homo sapiens
atgatcttatgcaaacactgtcgtatatgtggtctgttgttgagtaaaactttgtaatgyggtgcatgactgtagttcaattgcaacacagccatgctctttcttttccatattctctatggctacttttggactatgacagagttgagtatttacaaaagagaccatatggcccacaaatcttaaaatatgtactctcttctcctttacaaaaaaaagcttgctaaacttggcttaatagtttttaaaggctttacatttattattttgtctttatcttcacaacaaacttataaaatatatttgaaatctgccttttgctatgtatcctcttgtagtttaatagttcattagaggaattctgcaggagaaggttcaatatgatgaaacttttcaggccactcttcataagattgactctgtcctgttgttcaaggctactgatgctgatcaaggaatcaagtgaatctcctccacagactgtgaacaagtaactttgacctaaattcttttttacctttttattctcagcaaactatcacaagaacaaaaaaccaa

SEQ ID NO: 462912 - DNA, 581 bp, Homo sapiens
atcaaaactataatgtgatgccacctgactcttgcaagaatggccataataaaataaataaataaataaataaataattaaaaaacaatagatgttgacgtggatttggtgaaaagggaacacttttacactgctggtgggaatgtaaactactataaccgctacagaaaacagtgtggagattccttaaagaactaaaagtggaactaccatttgatccagcaatcccactactggatatctacccgaaggaaaagaggtcattctatgacataagacgcttaagacactgcatgtgcatgtttatagcagcacaattcacagttgcaaaaacatagaaccagcctaaatgcccataacagcaagtggctaaagaaaatgtgattaatatatataaatatacaccatggaataccactcagccataaaaaaggaatgaaataatggcatttgcagcaacctggatggagttggagactattattctaagtgaagtaactcaggaatggaaaaccgaacattgtatattctcactcmtaagtgggaggtaagatatgaggatgcaaaggcataagcatgat

SEQ ID NO: 462913 - DNA, 581 bp, Homo sapiens
atcaaaactataatgtgatgccacctgactcttgcaagaatggccataataaaataaataaataaataaataaataattaaaaaacaatagatgttgacgtggatttggtgaaaagggaacacttttacactgctggtgggaatgtaaactactataaccgctacagaaaacagtgtggagattccttaaagaactaaaagtggaactaccatttgatccagcaatcccactactggatatctacccgaaggaaaagaggtcattctatgacataagacgcttaagacactgcatgtgcatgtttatagcagcacaattcacagttgcaaaaacatagaaccagcctaaatgcccataacagcaagtggctaaagaaaatgtgattaatatatataaatatacaccatggaataccactcagccataaaaaaggaatgaaataatggcatttgcagcaacctggatggagttggagactattattctaagtgaagtaactcaggaatggaaaaccgaacattgtatattctcactcctaagtgggagstaagatatgaggatgcaaaggcataagcatgat

SEQ ID NO: 462914 - DNA, 561 bp, Homo sapiens
gttgtggcccctctttatatgccttgatccttaaaacaatatcaatagcatattggcaactcagaccttagtactcttctaccttcctgtggccttaaatattcagtagaagaaacattttcttgtttagtcagctggcctaaggaaatttctcatgttttctttggaaacaagttaaatcaagctcaatcaatgttactggaatatccatttagggatattagatccaaaagcatggctaggggtatcaggaggctccctggggtgctgaggaagaggctggtctgcgtacaaggcrtttcaagctgtgtgcctttattttttaaaaaacctcttctatctctttctactatttccactggatataattctgcccattattcaaggctcacagtcaacactaatcattttctcgattttcctttaatgaacttttctcattgtgctgagtttcatacagtttctgtctaactgtcatcaaccctgtaaggagagtatgtgttgcttttctgtcttaaggtccttttgaaaggtactatgtcaaattcatctttgcacaca

SEQ ID NO: 462915 - DNA, 494 bp, Homo sapiens
gggtttcttaatcatggtgacaattaaaaagaaaatctcccctacagatttctaaaatgttccctagagggtaatactacttctaaagagaaccactgttccattacacaaccaagaaaaacagaaacattttctggcttgggcagtacctgaatggggaattctctgttcctgctgccttacttcttcccacagatgaatgcataagtaaaggcctactggtttctatgttttagatacttatytattattttagaaatagaagtgttctattagcaaaatgatggagaccaccgttgctgagttgctgcctggcacatataaagaaaccaagagctgcttccttggttgactgctcataaaaactgacatattggatactttcaaccttgacaattaattaaatacatttagaggggtgccagattaaaagcgagccctgcaaatggtttggcatagatgaaaggaccctgcaagctagacccataagttcc

SEQ ID NO: 462916 - DNA, 585 bp, Homo sapiens
aaagaaccagtgatcaatattttttaaaataaaacttgtaacaactattctcctaatctattcattaatgcaaggagagcaacaattgaaaaccatatccatcctaactcactatgatttattacatgttaacagtagtaactccccctaaaaatttcaggaatttcaaaacctgcacgtacaracttatcaagcaggtagcagattaattgttcaaaagaagactcagtaaatcctaatagtgctctaattttagtttacaaatatccaatttgtaaatcaatgttcactaaacttaatttgttactagtaagtatatggatgtgcccattattctagagtaagaactagaatatttattcattgtgtggccaacgtgggtgattcttttagcatgctagtgagatatgaatcaagcttttgacattattgctctgaggctgctttcagcgctaacattctatgaaattatgtaaggtattttattgcttcctttattcattgagagtagcccctcctgtattaattttctgggactgccatagcaaagtgccacaaactgggtggcttataataacaaaaaaa

SEQ ID NO: 462917 - DNA, 585 bp, Homo sapiens
aaagaaccagtgatcaatattttttaaaataaaacttgtaacaactattctcctaatctattcattaatgcaaggagagcaacaattgaaaaccatatccatcctaactcactatgatttattacatgttaacagtagtaactccccctaaaaatttcaggaatttcaaaacctgcacgtacaaacttatcaagcaggtagcagattaattgttcaaaagaagactcagtaaatcctaatagtgctctaattttagtttacaaatatccaatttgyaaatcaatgttcactaaacttaatttgttactagtaagtatatggatgtgcccattattctagagtaagaactagaatatttattcattgtgtggccaacgtgggtgattcttttagcatgctagtgagatatgaatcaagcttttgacattattgctctgaggctgctttcagcgctaacattctatgaaattatgtaaggtattttattgcttcctttattcattgagagtagcccctcctgtattaattttctgggactgccatagcaaagtgccacaaactgggtggcttataataacaaaaaaa

SEQ ID NO: 462918 - DNA, 585 bp, Homo sapiens
aaagaaccagtgatcaatattttttaaaataaaacttgtaacaactattctcctaatctattcattaatgcaaggagagcaacaattgaaaaccatatccatcctaactcactatgatttattacatgttaacagtagtaactccccctaaaaatttcaggaatttcaaaacctgcacgtacaaacttatcaagcaggtagcagattaattgttcaaaagaagactcagtaaatcctaatagtgctctaattttagtttacaaatatccaatttgtaaatcaatgttcactaaacttaatttgttactagtaagtatatggatgtgcccattattctagagtaagaactagaatatttattcattgtgtggccaacgtgggtgattcttttagcatgctagtgagatatgaatcaagcttttgacrttattgctctgaggctgctttcagcgctaacattctatgaaattatgtaaggtattttattgcttcctttattcattgagagtagcccctcctgtattaattttctgggactgccatagcaaagtgccacaaactgggtggcttataataacaaaaaaa

SEQ ID NO: 462919 - DNA, 561 bp, Homo sapiens
ttattttcttattagttttaaaggttgcgaatatcttctccaagtcttccaatctacccattattttattatgtactttaggaaatctttggttttaatgtagtcaaatccatttttaaaacttatagccttttgaataattattttagaatgtttacctacaaatttgatcaaaaatatgttattttacatgttcttctgttttttggtggtttgatatttacgtttggtttttaattcatttatttctcacttggtgtgctrttaaaatgtaaaagtccagctctatttttcttcatatatagtttttcataacattgtcgactgaacaatccattccttcatcattgctttgtgggactatctttatcatatatcaaagttttcatatgtgcagggattatttctatttcttctattgcattttattaacctattagtctaaatccattttctgtttctgtattggtatcatatctctttagaattgctatagtttagtaatatatgttaatttctagtagggttagttccttgtcttagtctactttttcaaagttg

SEQ ID NO: 462920 - DNA, 590 bp, Homo sapiens
  misc_feature (1)...(590): n = A,T,C or G
accacactgtattccacaatgatgtaactaatttacactcccaccaacagtgtatagtttttcctttttctccacaaccttgccattatctcttattttgttatgttttaataatagccattctggagcagcctggccaacatagtgaaaccccatctctactaaaaatacaaaaaaaaaatcagccagatgtggtggcgggcacctgtagtcccagctacttgggaggctgaggcaggagaatcrcttgaacctgggaggcggaggttgctgtgagccaagattgcaccactgcattccagtctgggcaacacagtgagactctctctcaaaacaaacaaacaaagccattctgactgttgttagatggcatctcattgtggttttgatttgcatttctctaattatcagtgatgttgagcttttttcaatatggaaaagttagttgctttcctatataacagtgataaacaactggatttacaaatttaaaataccatttatgaaagcaacaacaaaaaagaaatacttagttataaatttaaaaaaanatgcagaaaattatgattgatgaaagaaataaagattta

SEQ ID NO: 462921 - DNA, 590 bp, Homo sapiens
  misc_feature (1)...(590): n = A,T,C or G
accacactgtattccacaatgatgtaactaatttacactcccaccaacagtgtatagtttttcctttttctccacaaccttgccattatctcttattttgttatgttttaataatagccattctggagcagcctggccaacatagtgaaaccccatctctactaaaaatacaaaaaaaaaatcagccagatgtggtggcgggcacctgtagtcccagctacttgggaggctgaggcaggagaatcgcttgaacctgggaggcggaggttgctgtgagccaagattgcaccactgcattccagtstgggcaacacagtgagactctctctcaaaacaaacaaacaaagccattctgactgttgttagatggcatctcattgtggttttgatttgcatttctctaattatcagtgatgttgagcttttttcaatatggaaaagttagttgctttcctatataacagtgataaacaactggatttacaaatttaaaataccatttatgaaagcaacaacaaaaaagaaatacttagttataaatttaaaaaaanatgcagaaaattatgattgatgaaagaaataaagattta

SEQ ID NO: 462922 - DNA, 590 bp, Homo sapiens
  misc_feature (1)...(590): n = A,T,C or G
accacactgtattccacaatgatgtaactaatttacactcccaccaacagtgtatagtttttcctttttctccacaaccttgccattatctcttattttgttatgttttaataatagccattctggagcagcctggccaacatagtgaaaccccatctctactaaaaatacaaaaaaaaaatcagccagatgtggtggcgggcacctgtagtcccagctacttgggaggctgaggcaggagaatcgcttgaacctgggaggcggaggttgctgtgagccaagattgcaccactgcattccagtctgggcaacacagtgagactctctctcaaaacaaacaaacaaagccattctgactgttgttagatggcatctcattgtggttttgatttgcatttctctaattatcagtgatgttgagcttttttcaatatggaaaagttagttgctttcctatataacagtgataaacaactggatttacaaatttaaaataccatttatgaaagcaacaacaaaaaagaaatacttagttataaatytaaaaaaanatgcagaaaattatgattgatgaaagaaataaagattta

SEQ ID NO: 462923 - DNA, 631 bp, Homo sapiens
atataatcagccttccaatttattgatctactgaattgacaaacatcacatttatttttataaatcrgtatttaaagacaactaaatttaaaaaataattgatggtggatatctaggataatggacaattttctttgcttcaataattttctttgcttcaaaaaaaggactggcaattttatgcaaaatgaggtagaagagatattctaattttatgtcaatagattgaatataagtaatagaatcttaagacatcctagtgttttgaaaaatgattgttcatgagaaatctcttgtctggtatgcagaatatctggactgtgtcaaactctcagaaaataattgcttccaaaatgcctgaaaggttttcattgatcatttaactttctgaggatgggtaatttagtaaaaccaaataattccataatttacctttccccaactttatttatcttctgcgactggttctgttttttgctattaaaaaggtctttgagtataattgacatacaataacgaattttgacacatgtacatacccataaagctatcactacaatcaagatatcaaacattgccaaaaccccaaaagttttctcatgcctcttgtaatctagtcctccctcttcct

SEQ ID NO: 462924 - DNA, 621 bp, Homo sapiens
acagaacacaactaggaatcaattaacaaaattgcagaagtctatacctattaataataaccttgagtataaataaattaagttctccaaataaaggatataaagtggtagaatagattaaaaaacaagacctaattatatgttgcctgtaggagactcacttcacctataaggacacacatagacaaattgtgaagggaagggaaaagatatttcatgcaaatgaaaaccaagagctaggaggaatagctatatttatatcagataaaatagacttcaagtcaaaggctttagaaagtgataaaraagtcattatgtaatgataaaattgtccattcagcaagagcatataataattgtaaacatatatgcaaccaatactggaacaagtatataaagcatgtattattagatataaagggagagatagactgtaatccaattatattaggggacttcattccactttcaaaaatggaaaaatactttagacataaaatcaacaaagaaacatcagagttagactatactctaagccaaatgggcctctgatatttgcaaaacatttaatccaacagcaatagaatacatattcttccaattggcgtttagtggtataac

SEQ ID NO: 462925 - DNA, 615 bp, Homo sapiens
cacaatccaataggcctggtctaggtgtccacgtgaactgattaaatttcagatttcacccgtttagaccttgtctttgtctgtttggctgccataataaaataccataaatggggtggcttaaataaaaaaaatttattttcttaacagttctggaggccgggagtccaaggtcaagatcccagtataatcagtgtctggtgagggctcttttcctggcttgttgatagccaccttttcactgtttcctcacatggcagtgggtatgggagagagagagagagaaaactctctgatatctcttcttgtaagggcactaattttgtcatgagggtgaagctttcatgaccttatccaaacctaataatctcccaaaggccccatcttcaaataccataatattrggggttagggcttcaacatgtgaatttgtaacctgtaagatcagttcatagcagatcttacaggttacaaagagaaggtctgaggggaaaaaagagataactttcaacaattggtgttgaggaaagagatattagtttttctcccaaggtgtttatagaaaccagaaaatagaatattatcttttgcttatctctatctagcttaccatat

SEQ ID NO: 462926 - DNA, 600 bp, Homo sapiens
ccttggatatctttagaatagaataatttaatatgtatacaaattggattgcctgtgtgccatcccagaccctttccgttgtaccagatggtgtrtcagtaatagaaggtaaaacctaggcttgtttcaggagaaagagaaagaagatgtatgttttccatgcaatttgagtttcatcttccttctgacttctcacttttactacctaatccaaaatacaaagaaaacagcaaactgtaaagccaatatttctattaatattttctattaagcaataggagaaaagaacaccttaacagaaaatagacaaaaggacatcaacaaatctagatacaaaatgagaaaacaaatgaataagtgaatgcataaaatcaagttaacacttgttaaagattaacatatgccagacattcttatatgtacttgggttaatacactgtttactcatatgacttagttttatgagatagatactattaatatcatcttcaattttcaggtaaaaaaaaaaaactaaagcacagaacatttaagtaattttctacaagttaaatatctagtaagggccaaaatctggattctaaccaaactgcatgactc

SEQ ID NO: 462927 - DNA, 600 bp, Homo sapiens
ccttggatatctttagaatagaataatttaatatgtatacaaattggattgcctgtgtgccatcccagaccctttccgttgtaccagatggtgtgtcagtaatagaaggtaaaacctaggcttgtttcaggagaaagagaaagaagatgtatgttttccatgcaatttgagtttcatcttccttctgacttctcacttttactacctaatccaaaatacaaagaaaacagcaaactgtaaagccaatatttctattaatattttctattaagcaataggagaaaagaacaccttaacagaaaatagacaaaaggacatcaacaartctagatacaaaatgagaaaacaaatgaataagtgaatgcataaaatcaagttaacacttgttaaagattaacatatgccagacattcttatatgtacttgggttaatacactgtttactcatatgacttagttttatgagatagatactattaatatcatcttcaattttcaggtaaaaaaaaaaaactaaagcacagaacatttaagtaattttctacaagttaaatatctagtaagggccaaaatctggattctaaccaaactgcatgactc

SEQ ID NO: 462928 - DNA, 600 bp, Homo sapiens
ccttggatatctttagaatagaataatttaatatgtatacaaattggattgcctgtgtgccatcccagaccctttccgttgtaccagatggtgtgtcagtaatagaaggtaaaacctaggcttgtttcaggagaaagagaaagaagatgtatgttttccatgcaatttgagtttcatcttccttctgacttctcacttttactacctaatccaaaatacaaagaaaacagcaaactgtaaagccaatatttctattaatattttctattaagcaataggagaaaagaacaccttaacagaaaatagacaaaaggacatcaacaaatctagatacaaaatgagaaaacaaatgaataagtgaatgcataaaatcaagttaacacttgttaaagattaacatatgccagacattcttatatgtamttgggttaatacactgtttactcatatgacttagttttatgagatagatactattaatatcatcttcaattttcaggtaaaaaaaaaaaactaaagcacagaacatttaagtaattttctacaagttaaatatctagtaagggccaaaatctggattctaaccaaactgcatgactc

SEQ ID NO: 462929 - DNA, 384 bp, Homo sapiens
agtctgataagacatatttacaatctattctttctggagcctgctacgtggaggcttcacctgcatgataaaatctttgtcttcataaacccttatcttaacccagacatttctaagtctttagaaaagcaagtaagaaagaaaagttgctaatgttcagctaatatctatttaataggcagtaaaatgcagtagtgtcattttccatgagtcaaaaatattcattaaaactgatgatttataatcattctgcggtaayattagttagaatatttgaccaacaaaaatgacaatgtttaaaaaatgatgttatggtactcctagaaaaaaaattcccagtttgaagacttatataaaggatatagatttgatcataaaactaat

SEQ ID NO: 462930 - DNA, 548 bp, Homo sapiens
cgagtgtgtgtggatgatacagcaaataaaccttcttctagttcttaaagattatggttttaagtgtttagtgagcatccgtgttcatctttaatggatagaaaaatgcaggaggcatcttgtatccatgaagatactaaaacacggatttcctcaggaaattgatcactcaagcatccataatcttagtagactgcccttatagtcgtattgcagaatgtgtgatctgccatctackgagggctcatttttccctctcctctttattcaaaattggtgatagtttcaattttttctcccactattatgtagaataatttccaaacttgacactcaattgaatcatggtgtccaggaaaatagataaaataaatatgacttcatataccagaagtcatattcctttgaatacaatcagggccataaatggcacttgcttctataacacaaagtgctattataattatatacatgattttttaaataattaagtaacttggaaccagtttctattgcaataattataagaaacaaagacctccaactga

SEQ ID NO: 462931 - DNA, 586 bp, Homo sapiens
  misc_feature (1)...(586): n = A,T,C or G
aagcatctgctcacttagtgattgggttggtttcaggtggaaagtccataggctgatatcaatttgactggtatcagtaagaagggaagtgtaagatacacaggtgtcagtttcctgagggtcttagatgaatgctatgtagactggacttatttcagttgttagctctagatatgagggacaggcagacgatcactctgaagcaggttggagcacattttagtgggcatttattggttaccttcacagtatattatctagtctctgttatccnaaaaataccccaaattgcaagccacttagcaaaagaaatttaatctttacaccctgttctaatttaatctacctttttgctactaccagctttccytggccatggtgactgagtcaaggacagactcataatctaaggcaaagcaataagtcatcaggaaactcaatacctgcgtgtctctcaaccattggaaaaagtgaatattctttgtatctggatgtgaatgagaaaatacacaaccccaggagctgctagaacccatcttgagtttgaagagtttgccttataataaaaccaatatcaaaaaaggag

SEQ ID NO: 462932 - DNA, 586 bp, Homo sapiens
  misc_feature (1)...(586): n = A,T,C or G
aagcatctgctcacttagtgattgggttggtttcaggtggaaagtccataggctgatatcaatttgactggtatcagtaagaagggaagtgtaagatacacaggtgtcagtttcctgagggtcttagatgaatgctatgtagactggacttatttcagttgttagctctagatatgagggacaggcagacgatcactctgaagcaggttggagcacattttagtgggcatttattggttaccttcacagtatattatctagtctctgttatccnaaaaataccccaaattgcaagccacttagcaaaagaaatttaatctttacaccctgttctaatttaatctacctttttgctactaccagctttccctggccatggtgactgagtcaaggacagactcataatctaaggcaaagcaataagtcatcaggaractcaatacctgcgtgtctctcaaccattggaaaaagtgaatattctttgtatctggatgtgaatgagaaaatacacaaccccaggagctgctagaacccatcttgagtttgaagagtttgccttataataaaaccaatatcaaaaaaggag

SEQ ID NO: 462933 - DNA, 586 bp, Homo sapiens
  misc_feature (1)...(586): n = A,T,C or G
aagcatctgctcacttagtgattgggttggtttcaggtggaaagtccataggctgatatcaatttgactggtatcagtaagaagggaagtgtaagatacacaggtgtcagtttcctgagggtcttagatgaatgctatgtagactggacttatttcagttgttagctctagatatgagggacaggcagacgatcactctgaagcaggttggagcacattttagtgggcatttattggttaccttcacagtatattatctagtctctgttatccnaaaaataccccaaattgcaagccacttagcaaaagaaatttaatctttacaccctgttctaatttaatctacctttttgctactaccagctttccctggccatggtgactgagtcaaggacagactcataatctaaggcaaagcaataagtcatcaggaaactcaayacctgcgtgtctctcaaccattggaaaaagtgaatattctttgtatctggatgtgaatgagaaaatacacaaccccaggagctgctagaacccatcttgagtttgaagagtttgccttataataaaaccaatatcaaaaaaggag

SEQ ID NO: 462934 - DNA, 589 bp, Homo sapiens
gcaatagaggtaaattatatttccaaatttttttatttattccagacaaattaatcatattcctgtatttttttctctatatttcaaaggtaattagatgtcaacactttttactttcctttttctgaaggttttataaggaaactatgtgcaggatatcaattttttggagaatgactcccacattggctattctagcttattcccacaggaattcctaaaaccaagcaaataatttcaaatttgttgagatcgcataatttagtttagaataaagagatcttgtcacctttcctctaaaggaagtgtctgctacaggcattccctatgggtatgtataattggaaaattaaaaagcatatttaaaggcaacattgtgctataaaaaatgttggcaatgytccaagggggactgtgtatgctattagatatttttgagaatttactctgcctgtgctaagaattttcaataattcccttcttgggtaaaattagggcatcagcagagaagtaaactctctaatataagcagcaagtttccatttttcaccataatgtgttcctaaaaactatgttgggaagtaaaatg

SEQ ID NO: 462935 - DNA, 525 bp, Homo sapiens
taaatgcatttctgatgtgatattttattgggtttattgggatgtaactccattgaaatttgaccatatatatatgaacactggctaatgtcccataagaaataatggaatccaaaaagcagtggaaagaaaaaatactatcagcatagaaccagtattttcaaagaaaggaaaaataaagacaaccaaaagtgagagaactgatttatagcagattatactaaattaaatgctacaggaagttattcagctaaaataaatcataatatatagattccttcagatctacaagaaggaataaagagcatcagaaatacaaataaatgaatacatatattatccattttttcactgaatttctttaaaagcccttgcrtatttaaagaaaacattgtaacttttattgttaggtctacaatgtatgtacatgtaatatacataatattaatagcacaaaggatggggtaggaggttaaatggatctatgctgtctgaaggcttgtgcattttacaaaaaaaaatggt

SEQ ID NO: 462936 - DNA, 469 bp, Homo sapiens
tacatgaagtgaaagtctaacagaactaaagggagtaaacagcagacccacaaattaggtagaaattttaatagccctctcaaaataattaaaagaataactagataaaattcatcagtagactataaaatagctaaacaacaacatcaactgctttgatccaattgacatttagggaaaaatatatactgcaaaatrcacatactttaatgcccatagatagtcatcaaggtacactatatactgtgtcataaaacagatctgaataaattgctaaggactgaaattttacaaagcatgttcagtagggaagcatatttaatgcatttctgacttatgatattttactgggtttactggaataaatggctctactattctggggtctggaaggtgatggcactcttcccacagctccactgggcagtgccccagtggagactctttgcgggggctccaaccccatatt

SEQ ID NO: 462937 - DNA, 469 bp, Homo sapiens
tacatgaagtgaaagtctaacagaactaaagggagtaaacagcagacccacaaattaggtagaaattttaatagccctctcaaaataattaaaagaataactagataaaattcatcagtagactataaaatagctaaacaacaacatcaactgctttgatccaattgacatttagggaaaaatatatactgcaaaatacacatactttaatgcccatagatagtcatcaaggtacactatatrctgtgtcataaaacagatctgaataaattgctaaggactgaaattttacaaagcatgttcagtagggaagcatatttaatgcatttctgacttatgatattttactgggtttactggaataaatggctctactattctggggtctggaaggtgatggcactcttcccacagctccactgggcagtgccccagtggagactctttgcgggggctccaaccccatatt

SEQ ID NO: 462938 - DNA, 523 bp, Homo sapiens
atcaaaaaatcaaaaatatttaaaaattgatcatttttggtgtcatttgattgaatcatttgatacgattcaatactcattgagttaagaactctcagcaacctagaaacagaagagaacttcctcattctataaaagrcatctgagaaaaatctacagaggacatcatacttaatgatgaaacatttagtgacttcttactgggatcaagaacagatgtttactattacttctgctattcaacattgcactgtgtaatctaactagtgcaatagtgcaaaacatagatcaaagaaacaaatattgaaaagataggagtgaaattatgtttattcacagataatattgttgtctatatggaaaattcttagtaatctaggaagcaactattgtaactaatatttgaatttagcaaggtttcaggacacaaaatcattaaactaaagaattgcatttctatattctaccattaaaaattgcaaataacacttaaaagactattacacttaaaataacataaaaa

SEQ ID NO: 462939 - DNA, 516 bp, Homo sapiens
gtcttgcatagggtggaaagtcattgcaactctttcatcaaattgaattaaattgcttaagtctttgtaacctatatgaactcagatatccttgtgcaattatagtgttcaatattcaggactcacaataaggaaagtacctggtttgaacaggtgctaggtcatgagggagcagtgcaggcgtgaagctgaaaccccccatttctagtctttgttctgctgctagctcactctgtgaccctggtcaaggtcttttacttcttggagaactgaattcctcttatgtaaagtggggaaggyggtgcaggtgatctctgaatataatattttatagctctggaattgcattgtaggagtgaagttcctctcatatggtctgcgagaactttatactctgatttcattaataataagtctgaatttctgtagttctgagttctggaggtaacacaattgtctgaaaataatttatgtacttagatttcgatttggggaaatatattaggaaaaatgttt

SEQ ID NO: 462940 - DNA, 507 bp, Homo sapiens
gaaaccccccatttctagtctttgttctgctgctagctcactctgtgaccctggtcaaggtcttttacttcttggagaactgaattcctcttatgtaaagtggggaaggtggtgcaggtgatctctgaatataatattttatagctctggaattgcattgtaggagtgaagttcctctcatatggtctgcgagaactttatactctgatttcattaataataagtctgaatttctgtagttctgagttctggaggtaacacaattgtctgaaaataatttatgtacttagatttcgatttggggaaatatattaggaaaaatrtttaatttggtcttatttacaattttcatggaagtatataaataacaaagggaaatcagtagcgaaaaggtatgtgactctattaggttcaactccttcccccaaaaaatttttggctcaatgaagagtctacctatttacttagttgactttctgccactgaaatacattttaaggctgttgc

SEQ ID NO: 462941 - DNA, 589 bp, Homo sapiens
atggaatctataggtattacaaaaatgagtgttttttttgttttgttttgttttgttttttaaaaaaacccttttacctttttgctgttagtcaatagtataacaagggtcacagtcagggccatttgttgagaatttatgacagctaatatatatagtgacttgaattacccaggatccctgagttctttttattacctaaaatgatcaagaaacagcttctgatatatatttttagttttattgttaataaaatgaagattaaaaaatacagatacaatactgcaacataaataaaaaatagacttaaaaagtagtttgaggtataatgaacaaaattatacacattccaggcattattaatctatttacatttttatccactatatttaattccmcttattaatacttcctgggaaatctcattttactttgttaaagttagaataatcaattttaaagctatcatctgctggaaggtctaaatttgagaatgaatgaatttatgcaggcttttctaagagccttgaattttaaaaagacttacagtttatatataataaggatcaacctctcccccaccgctcat

SEQ ID NO: 462942 - DNA, 595 bp, Homo sapiens
gtgtttcaggaacaccctccagtcccctgacttctgactttactccacacaggcacttgtccttcattcagccactgtcctgtattcrggactatggcttcaggacattggcagctgattattgttactgtcccgggctataaataaggttaacctatatccaatcagttatccagaccaaattttcccttatagcctagtttgaaactgcaaaatgcaaaatgtttcaagctccttgtcctgtagcaggagacaagtctgattctacacagagttcctttgccttatgtgagcctgcagataaatattttggaatatgtgtgtgtatatatatatatgtatatatgtatatatatgtgtgtgtgtgtgtgtgtgtgtgtgtgtgtataaaaatatttttaagaaaacacaaagaaaactattttcccatgattcctatttttgccattaatcaccatctctaaagatattaagtaatatattttgaaccttttatatataataaaataatatttgttagaatggtaataatgggtccattttcatatataaatgtaaacatattaatttaaatgcattcaattaatttaaatac

SEQ ID NO: 462943 - DNA, 607 bp, Homo sapiens
gtaggtggttggagggtggataatgtgttatccaaagcttaggctcaaaccccagctctgccactgaccaactatgcatgcaaatttgggccttagtttcctgatctgcaaaatgaggactttagacacacacacacacacacacacacacacacacacacacacacctctaatagctttgttgctaggattaaatgatctaatacataaaaaggtgtggctctcattgcaggaactttccttatttaggtcatggaagagttatgcaycaagttttttcaaaaagtgctaactggataaagcgatctccacccaacacctcccttaatccctgcttacatgatactcctctacatgagctggtttgtttctaaaggtcattctcaagaagtggagcatagatgttaattggacagttttgaatgtgcagagaggttttaaaaaaaaagctttgaaaagtaaaaatagcgtttatttattactgaaacattttaggcataaaagtgaatgtaaacctgcttcatttcctctgcgcttagaaaatttgcccctaagtcctttatagcaaaaatgagcagaagtgactccttgctggtgatgcagaggt

SEQ ID NO: 462944 - DNA, 611 bp, Homo sapiens
ctttggtgcgacaggtgtagaccatcaggaaatggcctctccctggcactggctgccartttatcacttttagataggctatgtgataactgccaaaccatcatcactcaacattcctggtagaggggagggagccctctcctgccctgctcatgcttaactacctgtaacaggggggcagttaagggaatttcttgcgaactgatcagagcttttaaaaggtcttcaatacagggacaaaaatgggtgtccagaatatatgtgtgagagacatctcatccaagctaaatattctttgagtgaaagaattaatacacagaactttcttggatggctcggcaaaagctgtgatataaacagaagaaaggcaaagctatgggtcagcagaagtctagagtgagaaaaaggtatgaggtgaacagagagtcaggagaatctgcggtgtcaagaaaagtagaagccaagacagagagaaacactggaagcctgtggatgaagagggtgaaataatgagacacaaccatgtggtagctgaagggtgttccagttctccttgaggtgtgacttggtgagcaaagggctattatcctgaaggcctggttgttttgttt

SEQ ID NO: 462945 - DNA, 611 bp, Homo sapiens
ctttggtgcgacaggtgtagaccatcaggaaatggcctctccctggcactggctgccaatttatcacttttagataggctatgtgayaactgccaaaccatcatcactcaacattcctggtagaggggagggagccctctcctgccctgctcatgcttaactacctgtaacaggggggcagttaagggaatttcttgcgaactgatcagagcttttaaaaggtcttcaatacagggacaaaaatgggtgtccagaatatatgtgtgagagacatctcatccaagctaaatattctttgagtgaaagaattaatacacagaactttcttggatggctcggcaaaagctgtgatataaacagaagaaaggcaaagctatgggtcagcagaagtctagagtgagaaaaaggtatgaggtgaacagagagtcaggagaatctgcggtgtcaagaaaagtagaagccaagacagagagaaacactggaagcctgtggatgaagagggtgaaataatgagacacaaccatgtggtagctgaagggtgttccagttctccttgaggtgtgacttggtgagcaaagggctattatcctgaaggcctggttgttttgttt

SEQ ID NO: 462946 - DNA, 353 bp, Homo sapiens
aacactttctttttttggctttaaagcccctcctcattggtctttttgtcctctgagacctttccttctcagtcttcctcccagatctttcatttcctgtcagtgtctatcaaatatgtacartccctccccatatgacccacctttgatcagcagttgcctcatctctccctgctcctagaaattcagccacactagaccactcactgttcccacgcctttgttcactctgttttcttgccctggatctccctaacctcacccataccctctgctgaaatccaatccagtttaaatgccaccactctgcaaagccttcctaaaggtctcagcaggaagtccttactgccatt

SEQ ID NO: 462947 - DNA, 609 bp, Homo sapiens
ttttgcttcttggggatggatagggtagggttagttctcaggctacatgagaatcttctttggttgctacattttgaagttgtgcaagagctggatgtacgttttcccttattttggttgttgctgataaattttttgactgccttttctggttgtggattttttgctttggttttatgttttttccctgtttaattactcattcatcaaaagtctttataaacatattaattagatgtttccctagtaaagttgatacataatgaaagtttgtatatgcgtatattaaaaacataatggctgtacagtaccatgaaatttcagtgaccatttttgtgcctgtgtttacattgttgttagtgcaaartggccacccaaaatatttaactttgttaataaacatatctagctgctctttgcaacacagacacctgccatagtactcattaaattttctactagttataaagacttagttagctatgatagttcacaattaaaagacactctcatataattagatgtagtttcttaacaaattgagagtttaacaagttgaattaaaaattcatgaagaaaagagtgcagtgtagtggtatatacttttac

SEQ ID NO: 462948 - DNA, 609 bp, Homo sapiens
ttttgcttcttggggatggatagggtagggttagttctcaggctacatgagaatcttctttggttgctacattttgaagttgtgcaagagctggatgtacgttttcccttattttggttgttgctgataaattttttgactgccttttctggttgtggattttttgctttggttttatgttttttccctgtttaattactcattcatcaaaagtctttataaacatattaattagatgtttccctagtaaagttgatacataatgaaagtttgtatatgcgtatattaaaaacataatggctgtacagtaccatgaaatttcagtgaccatttttgtgcctgtgtttacattgttgttagtgcaaagtggccacccaaaatatttaactttgttaataaacatatctagctgctctttgcaacacagacacctgccatagtactcattaaattttctactagttataaagacttagttagctrtgatagttcacaattaaaagacactctcatataattagatgtagtttcttaacaaattgagagtttaacaagttgaattaaaaattcatgaagaaaagagtgcagtgtagtggtatatacttttac

SEQ ID NO: 462949 - DNA, 505 bp, Homo sapiens
gtgttgccctcctcaaaaattaaatgtgtggaaccagttgtgcaatatgtaaatttgtgagacaatgtacgtttttttttaagtccagatacattttttttgagagaaggacatgtctattacatctagtttttgaagaaagaaagattatatagctttatcctaaggagttggcagactatgaccagtgggccaaatctggcctgctaccagtttttgtraataacattttagtagaacacagccagaaccactcatacacctactgtctgtagctgcttttgtgctacaggagcaaagagtagttgtgacagaaatcaaatattgtaggaaagcctgcaatatttactatctggttctttacaggaaaagttagccaatctctgccctaagtaattagtaaaatagatatattaattctttattacttagaaaaaactgaagttggaacaagtagtatatgctattggtaccagaatttgtcaaaaataacttgccaagaaaa

SEQ ID NO: 462950 - DNA, 581 bp, Homo sapiens
ctccagtgaaaaacaaattcagtaactaacaatatttgtgaacagtttttttttgtctttagccttacaaaatatagtcaaaacattgtttttcaaatttgttactgtatttcattttcratgttctctacttcctaattcattttgactatttattcagtatgactaatgtgatcatgataccaaaagtcaaagcatatgtgtgtgtgtgtgtacatatgtatctatatatatacatatacatacatatatatacacacatatacatatacatatatatatatacatatacatatatatctaaaggtataatcagagaaatgtcacctccctttagcccttctcctttgttcctgctctcccattctttctattgagtccctacccatctcctttgggtaaccaatctcattagttcaagtttattcttattatgtttctatttgcacaaataagaagatacatgtatattttcttttcccttttttcttttttttcttttcgttctttcttcttcctttttttttttttttttttagagattctcactctttttcccaggctggagtacagtggcatga

SEQ ID NO: 462951 - DNA, 488 bp, Homo sapiens
aattcagtaactaacaatatttgtgaacagtttttttttgtctttagccttacaaaatatagtcaaaacattgtttttcaaatttgttactgtatttcattttcgatgttctctacttcctaattcattttgactatttattcagtatgactaatrtgatcatgataccaaaagtcaaagcatatgtgtgtgtgtgtgtacatatgtatctatatatatacatatacatacatatatatacacacatatacatatacatatatatatatacatatacatatatatctaaaggtataatcagagaaatgtcacctccctttagcccttctcctttgttcctgctctcccattctttctattgagtccctacccatctcctttgggtaaccaatctcattagttcaagtttattcttattatgtttctatttgcacaaataagaagatacatgtatattttcttttcccttttttcttttttttcttttc

SEQ ID NO: 462952 - DNA, 554 bp, Homo sapiens
  misc_feature (1)...(554): n = A,T,C or G
aagcattccaggaagatcaatgtgtagatgtaaacttagaggtgagaataagcaagtagtgtgtgggggctatattcatttgtttttgctatgtaacaaatcatctcccaacgtagtgactgaaaacaaaggccatctgccattgtccattattgtaagattggatgggtgattctgctgatctgggacaggctctgtggatgttagttggacttgctatcagttgggatgcagttagctggaaggtcaggcaggggtgggctggtctggagtaactcacatgttaggctcattggctggttgttggctggttgttggtttggttgttggccgaagtacctcagctcacctctgtttrttctctcatcttccaattgcctgggtctgtgcnnnnnnnnnnnnnnnnnnnnnnnnnnnnnnnnnnnnnnnnnnnnnnnnnnnnnnnnnnnnnnnnnnnnnnnnnnnnnnnnnnnnnnnnnnnnnnnnnnnnccagcggtagagacttaaatgggaggagctgcaaagtcacatcataaaggatacagggaaggct

SEQ ID NO: 462953 - DNA, 579 bp, Homo sapiens
cctgggagcctgttagaaatgcaggcgctcaagccctatcccagaactaagcactcacaagtgcatttttaacaagataccctgatgcttcctatgcatgttacagattgagaatcaccactttcatagaccttaagcttctagcatggcgcctggcacttagtcaactcttaatggaaatttattgaatgaattaagttgaattcctagaagctaccaaattgagctacaggtggagatgaagaaaktgatttcaacccaaaaccaatgccttgagctacagctaaacttttagtgactatagaaactaaataaaatcatctgggctgggcacagtggctcatgtctgtaatccaagcactttgggaggctgaggtgggcagatcgcttgagctcaggagtttgagagcagcctgggcaacatggcaaaccctgtctctacaaaagaaaaaaaatacaaagaaaaaaactagctgggcttggtggcacatgcttctagtcccagctacacagaagggtgaggccaaaggatcacctgagctggggaggtggaggctacagtgagaggagatggtgcca

SEQ ID NO: 462954 - DNA, 515 bp, Homo sapiens
tcaaaaccctttcatgtcaccacatcgcctgttcaaagtgctctcaccttgctcagcagttattaagactcctccatgaggtagcccttccacttccccagtctcatcaccatggacctcctctgtatagctctactggtgccaaaccattctatcagctattacataaccatgatttgtactttgctgctgttatggtctgaatgtgttcctccaaattcatatgttgaaacttaactgccaatgtggtggtattaagcagtggcctttcggggatgacaaaatcatgagggtagcaccccatgaatggggttggtgaacttataaaagaagtttgagagagcaccccaacccttttagcccactctctgcaatgtgaggacgcagtgttgctccccatcagagaaagcaggattcaaggtgccaccttggaagmagagatcgggccctcaccagacactgaacctgccagcgccttgatcttggacttttccacctccagaactatgaggaat

SEQ ID NO: 462955 - DNA, 668 bp, Homo sapiens
gtgcagtggcttaatgatgttaggtcttaggattcatatctctacaattctcttgacttaatagttgcagtatggatgctgcaactccagaaatcatgccctcacataactgcattcagaagcaagaaacagaaatgcagggcagagttctgtttcaccatctctttactatcagggaagaaaagctctcctmcattttccagacttctcattgctttccactgtccacagttggattacacgcttgcccctggaacactagtcccatattgcctgagatgaatcttctgatacttgaactaaattgagattatgttagtaagaaagaaagggaaatgaattttgagccaacaacagaaatggtcttgttagatgagtaatgtacacgtgagtaaaaggggcacagtttcttgtcctgatgaagctaacaacaacaacaaaatcacctagcaagggtgatagatattacatttaaaaaataaaattatacattgtgatgagtaataaaaaggaaataaacaaggagctgggaagtagactgatgtctacttaggacagggtatttctggaaagacttctctgtgaaggtgacatttaaactgaaaccaaagaaacagaacgagtcaaccatgagcagagcaaagaggagtgtatagaagcatgtatag

SEQ ID NO: 462956 - DNA, 668 bp, Homo sapiens
gtgcagtggcttaatgatgttaggtcttaggattcatatctctacaattctcttgacttaatagttgcagtatggatgctgcaactccagaaatcatgccctcacataactgcattcagaagcaagaaacagaaatgcagggcagagttctgtttcaccatctctttactatcagggaagaaaagctctcctccattttccagacttctcattgctttccactgtccacagttggattacacgcttgcccctggaacactagtcccatattgcctgagatgaatcttctgatacttgaactaaattgagattatgttagtaagaaagaaagggaaatgaattttgagccaacaacagaaatggtctygttagatgagtaatgtacacgtgagtaaaaggggcacagtttcttgtcctgatgaagctaacaacaacaacaaaatcacctagcaagggtgatagatattacatttaaaaaataaaattatacattgtgatgagtaataaaaaggaaataaacaaggagctgggaagtagactgatgtctacttaggacagggtatttctggaaagacttctctgtgaaggtgacatttaaactgaaaccaaagaaacagaacgagtcaaccatgagcagagcaaagaggagtgtatagaagcatgtatag

SEQ ID NO: 462957 - DNA, 518 bp, Homo sapiens
gacaaacatgtttcaatggtccagtgacctaagtcagcatgtgcaaatgtgaacagcaatgatgattttctgtgaaccgtctcagatattggtagacaaatgttatatttgtttcttttggtctgctattcctcgtatttctcccttcacaccttcccaacaaaatatatgtatattatacacgactattaatttggggcattttcttastaattcactgccttctctaattttaaaagactgtgtagaacttaacctttggcttgataaatatgattcaattgagtgaaactcctgttcttttggaacttaaaagataaaatgccaatataaatatgtggtaattatcaccagaactgttcatttttaactattaaatttaagcaaagagcaattgctgtttgttcatgcaaaacaaacagtgcctgcttaagatctttttgattaatctgcttccctgcatgcagattcaagagaaaacactgcctcaggctcagtacacacatctatgaaacaga

SEQ ID NO: 462958 - DNA, 515 bp, Homo sapiens
cccaacttgaataaagatccacagaaaattacaaaataccaagtttggttggatttcttgtagaaactggggaaaggtggagatggatgttgagaacataatgaagaaaagggaaagcattcccttcccagagagctataggaaatcacagggagggctctagatggacaccagctgggacgggcatttctaacagctctgatggagaggggagccccaggagatccctaggttacaggagagaagtgaactgatggctgcctaccgtattttaggcactactgtcaccagatcaaggaaggcagtaagtgggttcaatcttctgggagtagggctggcagggacaaggtaatgagcagatcctagctgctggcaagagacattggttgagctcccacagggagccggggctctgaccagggtggttaaggtctgtgtgtgagtggtggtgggagttgtgagtctgtggatgggcgatgtygaccaggggagaggaatcttaaacacccaggtgg

SEQ ID NO: 462959 - DNA, 586 bp, Homo sapiens
aaatataacaatattcctctattttgggggaagtgtatggtgaagggactgggtgagaggagctctccagagaggtcaagagtcctgtgtgcataaagttttgaagcatgaagaaacctagaaatgggtattcttaacagagggarccatatgccaaagatcccaggcatgagagatcccagcaagtctaggaaatgccaaagaatgcaacatggttggaccctaggatgtgaggaaggattaggggtgacagatgagggggaaggctaaatatcttggacgttattctgcagagatttatagggcttcagatgactgaaagtagtagggatatgatcagattcttattgtagaaccattgcctgctcatataaaaagcccacctaagcctattctgaaatttacttactactatcctgattctcattcagtctcagaatttagtaaaatgagattcctatagtggatgattaactgcatgctcactgcaaattggaacgtgtcagagagtgtccaggaggaatgaggttctattagtgtgaaagcagcatcgtagtctcagaataagaaactactgggcacatta

SEQ ID NO: 462960 - DNA, 586 bp, Homo sapiens
aaatataacaatattcctctattttgggggaagtgtatggtgaagggactgggtgagaggagctctccagagaggtcaagagtcctgtgtgcataaagttttgaagcatgaagaaacctagaaatgggtattcttaacagagggagccatatgccaaagatcccaggcatgagagatcccagcaagtctaggaaatgccaaagaatgcaacatggttggaccctaggatgtgaggaaggattaggggtgacagatgagggggaaggctaaatatcttggacgttattctgcagagatttatagggcttcagatgactgaaagtagtagggatatgatcagattcttattgtagaaccattgcctgctcatataaaaagcccacctaagcctattctgaaatttacttactactatcctgattctcattcagtctcagaatttagtaaaatgagattcctatagtggatgattaactgcatgctcactgcaaattggaacgtgtcagagagtgtccaggaggaatgaggttctattagtgtgaaagcagcatcgtagtctcaraataagaaactactgggcacatta

SEQ ID NO: 462961 - DNA, 435 bp, Homo sapiens
tgacacttctttcatagcttcatttgctgttttaataaaaatgttcacaatgctttggttccatctgttagagagagtgaaaacagctaactgctattcaaacaacaaaaaatacagctttctagaaaactatatcgagtgccaccaaaatgtaaagaggtatttataaattttaaacttctgcctcacttctaaaaaatgctgtaattgcactgcatcttggactcaacatataaataatttaggcaaaaattttaaatttaaattattcccccacactctaaatgcaaacaaatgctttcaaagttatcatgaccatgaatcttactgcagcaagctacagwttttcattataacaatttgtaagcaaatatttggttatttttataagccacaaatctggctgaaggagaaaatgatgtataataaacaaaa

SEQ ID NO: 462962 - DNA, 616 bp, Homo sapiens
ccctctgtcttctagttgctcaagttcattcagatgcaacaggtcaccaattttctcttcaacagtttttgtttatttttccagaaattacttgatcattttagaagtgtctctccagaatcattgaggcattcaaaagttaatctatacatacttttttatttataaaactgccttaatatgagttagatatccattagaaataatttctggccaggcgctgtggctcacacctgtggtaccagcactttggaaggctgaggtgggtggatcatgaggtgaggcgatcaagaccatcctggctaatatggtaaaaccccatctctactaaaaatacaaaaaattagcygggcatggtggcacacacctgtagtcccagctacttgtgaggctgaggcaggagaatcgttcgaacccaggaggcgggtgagccaagatcgtgccaatacactccagcctgggcaacagagtgagactctgtctcaaaaaaaaaaaaagatttctattgacactggagacctttatttccccgcaatttttggtgcttactatctcataaagtatgcactgcctgagaatctacagtaagtactttagtatcaatatttaggtcctt

SEQ ID NO: 462963 - DNA, 616 bp, Homo sapiens
ccctctgtcttctagttgctcaagttcattcagatgcaacaggtcaccaattttctcttcaacagtttttgtttatttttccagaaattacttgatcattttagaagtgtctctccagaatcattgaggcattcaaaagttaatctatacatacttttttatttataaaactgccttaatatgagttagatatccattagaaataatttctggccaggcgctgtggctcacacctgtggtaccagcactttggaaggctgaggtgggtggatcatgaggtgaggcgatcaagaccatcctggctaatatggtaaaaccccatctctactaaaaatacaaaaaattagccgggcatggtggcacacacctgtagtcccagctacttgtgaggctgaggcaggagaatcgttcgaacccaggaggcgggtgagccaagatcgtgccaatacactccagcctgggcaacagagtgagactctgtctcaaaaaaaaaaaaagatttctattgrcactggagacctttatttccccgcaatttttggtgcttactatctcataaagtatgcactgcctgagaatctacagtaagtactttagtatcaatatttaggtcctt

SEQ ID NO: 462964 - DNA, 609 bp, Homo sapiens
tatgccagttcataaatacagaattagctaaattyactatcaagcaaaagcgcatgcatccacaaaaaacatccaaaatgcatgcatgcaggtagtcatgagtggctataaatttctagggaattttcagctctacctatctagaattaaatctacaattgttatacctcatctctacctttgtaaatactcatcagttattcaacaagcatcagtagttacattaagcttactctaatgtcctatttcctttttcggagacagggtctcactctgccacccaggctggagtgcagtggcatgatcatggctcactgcagcctcaacctcctgggttcaagcaatcctcccacctcagcctccctagtaagctgggactacaggcacacatcaccaagcccagctaatttttgttttttagtttttattttggtagagatggggttttgctatgttgcccaggctggtctcaactcctgggttcaagtgatctgcccacttcagcctttcaaaatgccgggtttacaggtatgagtcaccattgcctggcttgatgtcctgttttcataattctctatcagtactgcttagggttatcttgagcactgt

SEQ ID NO: 462965 - DNA, 609 bp, Homo sapiens
tatgccagttcataaatacagaattagctaaattcactatcaagcaaaagcgcatgcatccacaaaaaacatccaaaatgcatgcatgcaggtagtcatgagtggctataaatttctagkgaattttcagctctacctatctagaattaaatctacaattgttatacctcatctctacctttgtaaatactcatcagttattcaacaagcatcagtagttacattaagcttactctaatgtcctatttcctttttcggagacagggtctcactctgccacccaggctggagtgcagtggcatgatcatggctcactgcagcctcaacctcctgggttcaagcaatcctcccacctcagcctccctagtaagctgggactacaggcacacatcaccaagcccagctaatttttgttttttagtttttattttggtagagatggggttttgctatgttgcccaggctggtctcaactcctgggttcaagtgatctgcccacttcagcctttcaaaatgccgggtttacaggtatgagtcaccattgcctggcttgatgtcctgttttcataattctctatcagtactgcttagggttatcttgagcactgt

SEQ ID NO: 462966 - DNA, 613 bp, Homo sapiens
aaagttaggggtgagtagaggcagtcyagctatgctgttcctttcctgtgcccagaggagtgttttaatttccctttcgttcgataacacacgtccctttctccactttctaccaagtcctctcttggaagtcaccctggcttggtacattccatgtctgaaatctgagctccacccaagcaaatcagtagtcagcctctgcacctccttcctctctccgcttgcccttggtctccttcatttctctcttgattactgcagtccattttttcttttacaaagtcaaacttcagctcccttctccaccagcaactgtatacgcaaattaagatgaggttgttccattctcttttaggagtatctatcactgactgctattcccagaaaaatacatttgggaagtattattttagattatattagtttgtacaccatcttttaactttctttttctgatgtcaaaagtaaacattttttgacaacatttgagaaaacagggaagaaaatagaaatcagtctcctcacccagagttcttgttaatatccacatctatttctttcaagaccttaatctatgcatgtatgattatataaaaatatatatatatatata

SEQ ID NO: 462967 - DNA, 613 bp, Homo sapiens
aaagttaggggtgagtagaggcagtccagctatgctgttcctttcctgtgcccagaggagtgttttaatttccctttcgttcgataacacacgtccctttctccactttctaccaagtcctctcttggaagtcaccctggcttggtacattccatgtctgaaatctgagctccacccaagcaaatcagtagtcagcctctgcacctccttcctctctccgcttgccctyggtctccttcatttctctcttgattactgcagtccattttttcttttacaaagtcaaacttcagctcccttctccaccagcaactgtatacgcaaattaagatgaggttgttccattctcttttaggagtatctatcactgactgctattcccagaaaaatacatttgggaagtattattttagattatattagtttgtacaccatcttttaactttctttttctgatgtcaaaagtaaacattttttgacaacatttgagaaaacagggaagaaaatagaaatcagtctcctcacccagagttcttgttaatatccacatctatttctttcaagaccttaatctatgcatgtatgattatataaaaatatatatatatatata

SEQ ID NO: 462968 - DNA, 530 bp, Homo sapiens
gaattataaatagcacctcctttgactctcagaagtggcycagtttagactacaaactttggtctccctgttctgaggacatacacaggcagcctcatggaaggttaaactcatattgacacccaagtgactttttttttcccccaagtaatttgtacatagggtagtaatgccttttctgaaagtgctggcctgtttctggaactttaaaaatggaaacattggtgaagtgagatttttaatactttgagatatatgtatatatatctcatatatagtctagtaattctgaatcttttaattcataaatcttttagaagaccaagctttgtagaacaccgtgaaagtgagccctgtgactggagggctgtggggccaccagcccggctgagtcctcctgcgggccaggttgccctctgaaacggggttgactgttatacttttggttttgtattatatgctatgtatatggttttataaatgtcatttatacttacactttagacaatttgatgttaatatgggccagg

SEQ ID NO: 462969 - DNA, 530 bp, Homo sapiens
gaattataaatagcacctcctttgactctcagaagtggcccagtttagactacaaactttggtctccctgttctgaggacatacacaggcagcctcatggaaggttaaactcatattgacacccaagtgactttttttttcccccaagtaatttgtacatagggtagtaatgccttttctgaaagtgctggcctrtttctggaactttaaaaatggaaacattggtgaagtgagatttttaatactttgagatatatgtatatatatctcatatatagtctagtaattctgaatcttttaattcataaatcttttagaagaccaagctttgtagaacaccgtgaaagtgagccctgtgactggagggctgtggggccaccagcccggctgagtcctcctgcgggccaggttgccctctgaaacggggttgactgttatacttttggttttgtattatatgctatgtatatggttttataaatgtcatttatacttacactttagacaatttgatgttaatatgggccagg

SEQ ID NO: 462970 - DNA, 593 bp, Homo sapiens
gtcttgtttaaaaagaaaaagaagaaaaaagaaaaagagagggagagagatagggaggaagaaagttaaggaaataacaaacatgggttgcaacagattctttttttataccagggggaargaaagtgtttcagttgtaagactaaagaactctgccatagctgtaaatttactagtataataagcaatcaagaagctcaataaatgctcattttaaaaagcgacttctgttctgaacatgtgctcatcttttgcaaaccgattccacccccatgaatgaaacagtgctgccgaggtcttttcctatacacatacaaaatttataagaacccacttacatgtctctcattcaatcatgtaagtgactgttggactttaaaacatcttgctcaaattttaattcacaagctcaatttacagattatacaattagacttttaaccatgtcttttaccttcaaccgaaatatcctgaatagcaaagcgaaggatgatggtccagatcatacccagggtcattttcacgttgccatcaacaatttctgcaggtaagaaaacaacaaattaatgtaaagataacatagtctgtacgta

SEQ ID NO: 462971 - DNA, 593 bp, Homo sapiens
gtcttgtttaaaaagaaaaagaagaaaaaagaaaaagagagggagagagatagggaggaagaaagttaaggaaataacaaacatgggttgcaacagattctttttttataccagggggaaagaaagtgtttcagttgtaagactaaagaactctgccatagctgtaaatttactagtataataagcaatcaagaagctcaataaatgctcattttaaaaagcgacttctgttctgaacatgtgctcatcttttgcaaacmgattccacccccatgaatgaaacagtgctgccgaggtcttttcctatacacatacaaaatttataagaacccacttacatgtctctcattcaatcatgtaagtgactgttggactttaaaacatcttgctcaaattttaattcacaagctcaatttacagattatacaattagacttttaaccatgtcttttaccttcaaccgaaatatcctgaatagcaaagcgaaggatgatggtccagatcatacccagggtcattttcacgttgccatcaacaatttctgcaggtaagaaaacaacaaattaatgtaaagataacatagtctgtacgta

SEQ ID NO: 462972 - DNA, 593 bp, Homo sapiens
gtcttgtttaaaaagaaaaagaagaaaaaagaaaaagagagggagagagatagggaggaagaaagttaaggaaataacaaacatgggttgcaacagattctttttttataccagggggaaagaaagtgtttcagttgtaagactaaagaactctgccatagctgtaaatttactagtataataagcaatcaagaagctcaataaatgctcattttaaaaagcgacttctgttctgaacatgtgctcatcttttgcaaaccgattccacccccatgaatgaaacagtgctgccgaggtcttttcctatacacatacaaaatttataagaacccacttacatgtctctcattcaatcatgtaagtgactgttggactttaaaayatcttgctcaaattttaattcacaagctcaatttacagattatacaattagacttttaaccatgtcttttaccttcaaccgaaatatcctgaatagcaaagcgaaggatgatggtccagatcatacccagggtcattttcacgttgccatcaacaatttctgcaggtaagaaaacaacaaattaatgtaaagataacatagtctgtacgta

SEQ ID NO: 462973 - DNA, 593 bp, Homo sapiens
gtcttgtttaaaaagaaaaagaagaaaaaagaaaaagagagggagagagatagggaggaagaaagttaaggaaataacaaacatgggttgcaacagattctttttttataccagggggaaagaaagtgtttcagttgtaagactaaagaactctgccatagctgtaaatttactagtataataagcaatcaagaagctcaataaatgctcattttaaaaagcgacttctgttctgaacatgtgctcatcttttgcaaaccgattccacccccatgaatgaaacagtgctgccgaggtcttttcctatacacatacaaaatttataagaacccacttacatgtctctcattcaatcatgtaagtgactgttggactttaaaacatcttgctcaaattttaattcacaagctcaatttacagattatacaattagacttttaaccatgtcttttaccttcaaccgaaatatcctgaatagcaaagcgaaggatgatggtccagatcatacccagggtcattttcacrttgccatcaacaatttctgcaggtaagaaaacaacaaattaatgtaaagataacatagtctgtacgta

SEQ ID NO: 462974 - DNA, 576 bp, Homo sapiens
accatttgttcttatctttgtgcaccgagcgccctaagagagagcctgatacaaggcaggtacagtaaatggtgaaagggagggaagaaggggagaattcaagtcgcagcccacacctacgctattaggtcagtgtggcagacaggaccacccaccacacctctcaccttcagcgccratggacaccagtttcacccctttgctggctatgtaatccaaagctttgttgacattagcaattttgtggaaccgcatttttccccggtcaggtttgggcagcctttcccctgttggatgaaaagagaatcatgcagacatagagacagtgacctcttgatgcggaatcaagatgccaaaactaagcatccatcttttccttaaaaagagaaggttacatgactatttctgatgtgtgcctggtctctctaaatcacagcaatgagggaacactaacccagaaactttcagaatcaaatggaccagcagggagccatactatgaaggacacatgcttttcagatctgcagggagagtctggtttggcccatgatccaacttacaaatgagtaaaaagag

SEQ ID NO: 462975 - DNA, 576 bp, Homo sapiens
accatttgttcttatctttgtgcaccgagcgccctaagagagagcctgatacaaggcaggtacagtaaatggtgaaagggagggaagaaggggagaattcaagtcgcagcccacacctacgctattaggtcagtgtggcagacaggaccacccaccacacctctcaccttcagcgccaatggacaccagtttcacccctttgctggctatgtaatccaaagctttgttgacattagcaattttgtggaaccgcatttttccccggtcaggtttgggcagcctttcccctgttggatgaaaagagaatcatgcagacatagagacagtgacctcttgatgcggaatcaagatgccaaaactaagcatccatyttttccttaaaaagagaaggttacatgactatttctgatgtgtgcctggtctctctaaatcacagcaatgagggaacactaacccagaaactttcagaatcaaatggaccagcagggagccatactatgaaggacacatgcttttcagatctgcagggagagtctggtttggcccatgatccaacttacaaatgagtaaaaagag

SEQ ID NO: 462976 - DNA, 613 bp, Homo sapiens
atactttagatctatacccaatcagtgtggtagctcctagccagaagtagccacttaaacttagactaattaaaataaaatttaaaaattagctcctcagttgcacaagtcatgttttaagtgatcaaaagccacatatggctagtagtattggatggtgcaaatatacaacattcctatcatcacagaaaattctactggacaacactatagataattaagttttgttttttgaaggtaagattatgataagaattcattacttattttttaacatattaattttatgtatttattttttgaatgagtaataggtttctttggtwtaaaacttcaagtggtaacagggtggggggaggggggagggataggattaggagagatacctaatgttaaatgacgagttaataggtgcagcacaccaacatggcacatgtatacatatgtaacaaacctacacgttgtgcacatgtaccctaaaccttaaagtagaataaaaaaaaaaaaaaggaaaaagaaattcaagtggtacgaaagggttcaaagaaaaatccatcctctcacctttgttccttggctacccaatgccctaccccataaggaatgaagctat

SEQ ID NO: 462977 - DNA, 613 bp, Homo sapiens
atactttagatctatacccaatcagtgtggtagctcctagccagaagtagccacttaaacttagactaattaaaataaaatttaaaaattagctcctcagttgcacaagtcatgttttaagtgatcaaaagccacatatggctagtagtattggatggtgcaaatatacaacattcctatcatcacagaaaattctactggacaacactatagataattaagttttgttttttgaaggtaagattatgataagaattcattacttattttttaacatattaattttatgtatttattttttgaatgagtaataggtttctttggtayaaaacttcaagtggtaacagggtggggggaggggggagggataggattaggagagatacctaatgttaaatgacgagttaataggtgcagcacaccaacatggcacatgtatacatatgtaacaaacctacacgttgtgcacatgtaccctaaaccttaaagtagaataaaaaaaaaaaaaaggaaaaagaaattcaagtggtacgaaagggttcaaagaaaaatccatcctctcacctttgttccttggctacccaatgccctaccccataaggaatgaagctat

SEQ ID NO: 462978 - DNA, 613 bp, Homo sapiens
atactttagatctatacccaatcagtgtggtagctcctagccagaagtagccacttaaacttagactaattaaaataaaatttaaaaattagctcctcagttgcacaagtcatgttttaagtgatcaaaagccacatatggctagtagtattggatggtgcaaatatacaacattcctatcatcacagaaaattctactggacaacactatagataattaagttttgttttttgaaggtaagattatgataagaattcattacttattttttaacatattaattttatgtatttattttttgaatgagtaataggtttctttggtataaaacttcaagtggtaacagggtggggggaggggggagggataggattaggagagatacctaatgttaaatgacgagttaataggtgcagcacaccaacatggcacatgtatacatatgtaacaaacctacacgttgtgcacatgtaccctaaaccttaaagtagaataaaaaaaaaaaaaaggaaaaagaaattcaagtggtacgaaagggttcaaaraaaaatccatcctctcacctttgttccttggctacccaatgccctaccccataaggaatgaagctat

SEQ ID NO: 462979 - DNA, 529 bp, Homo sapiens
tctcttgcatatcccttcagtggtatctgtgtatacataaacacacagtgaggaatgaagctatcagtctcttgcatatcccttcagtggtatctgtgtatacataaacacacagtgaggaatgaagctatcagtctcttgcatatcccttcagtggtatctgtgtatacawaaacacacagtgaggaatgaagctatcagtctcttgcatatcccttcagtggtatctgtgtatacataaacacacagtgaggaatgaagctatcagtctcttgcatatcccttcagtggtatctgtgtatacataaacacacagtgaggaatgaagctatcagtctcttgcatatcccttcagtggtatctgtgtatacataaacacacagtgaggaatgaagctatcagtctcttgcatatcccttcagtggtatctgtgtatacataaacacacagtgaggaatgaagctatcagtctcttgcatatcccttcagtggtatctgtgtatacataaacacacagtgaggaatgaag

SEQ ID NO: 462980 - DNA, 544 bp, Homo sapiens
ggatattttgcagaaaaattcctttattatgagcaggttaagtttttagattttaaggtcgtatgctgtatgacaatatatgcagtcaaccagtgcyatacatccatttggaaagatgaggatagaagaaataatttcatcttaaaaagaaaaacaggaactttgtcagattgccttcttcctagtccaaactatgagactgcctttaaacaaagtatttgtttattgaggtaattaactccatctaaggctcaaaattttacatctaatattcaggactattatagtacttgcttgtattagttacctactactgctgtaacagatgatcataaactgagtggcttgaaacaacacacatttatctttcagttttgcatgtcagaaacctgatgtgggtctaagtggactaaaatcaaggtgttggctggactgtcttccttctggagggtccagaggaaaatctgtttccttgccttttccagcttctggaggctgcctaattcttcagcttgtggcttccttctatcttcaaatttagcaa

SEQ ID NO: 462981 - DNA, 562 bp, Homo sapiens
ctcaattagccaaaccatatcagttacagatccacaagtgtaagaataaatgttgttgtaagatgctgagtttgggggatcatttgttatgcagctatattgtggctctaggcaacttatatagccatgatgtccacataaaattactggagacatacaagaagaaaaatactttattatttctgagtcatccaagacaggaaagcaatgaagggctgtgactaagagatttgaatagatggcctgagcacatacgaaaggactgtttctgaatgcttatttgctggactaggggagcttcagagtaagtggtggaggggagccctgccagtgtgagagctctttcccagccagactcttaagcttagccctaggagacaaccagaagctggctgtcagtagaaataagttaaggaagaaaggattaaggcartggttgtcttggctctctgctctgctgccttacaaataagattagtaaattgctaaacatagtttttgtgtaactagttgacttcatttcatttccctacagaatagtgtattcagccaaatagggctt

SEQ ID NO: 462982 - DNA, 545 bp, Homo sapiens
agcaagctttgtttcattcttgtatgtttggatacaacttttatggaagtttttctcaaacggaaatcccaatatatgaagttatatctcccatgctgttaatttccagaaggcttacagggagaactgaaatggtttgcaaacaaaaatgacaatagaacacagtaagatgctgcacttcccgctctcccaagacacccagcctccaaactgcactgtggtgccatcagttagcatgaattaggagagacacgaggttagacagcccagcacgttgtagtcaacctggagkgggtaatgaatgctgagcagcgtcaggggaaattaggaggagaggtcacagaggtgtggtgcagctggagtctcatgccttggtgagaagtggagaacaaagaaaagggaggagttccattctgacccagtgtgtgtcacttggtttagcaaatttataatcatgggtcccagagaaaatttatgtaaaatacccttatccaacccactgctccaggaagcacctatttttcatgccttctgtgagttgtcaa

SEQ ID NO: 462983 - DNA, 545 bp, Homo sapiens
agcaagctttgtttcattcttgtatgtttggatacaacttttatggaagtttttctcaaacggaaatcccaatatatgaagttatatctcccatgctgttaatttccagaaggcttacagggagaactgaaatggtttgcaaacaaaaatgacaatagaacacagtaagatgctgcacttcccgctctcccaagacacccagcctccaaactgcactgtggtgccatcagttagcatgaattaggagagacacgaggttagacagcccagcacgttgtagtcaacctggagtgggtaatgaatgctgagcagcgtcaggggaaattaggaggagaggtcacagaggtgtggtgsagctggagtctcatgccttggtgagaagtggagaacaaagaaaagggaggagttccattctgacccagtgtgtgtcacttggtttagcaaatttataatcatgggtcccagagaaaatttatgtaaaatacccttatccaacccactgctccaggaagcacctatttttcatgccttctgtgagttgtcaa

SEQ ID NO: 462984 - DNA, 528 bp, Homo sapiens
tagcataatttcatgatctaaaatattgtaaaacacagcagttccatcaaatttccaatgaataaragacaacatgtactctaaaatcaaaaatacatctgttatctataataatcttaagtatggaaaatgacctggcttcaatgccagagaatgagcaaagaaatgtcttaccttgtttaattttgagcaacatgatctagcattaatgtaatcacattctaaatcagacaatgtaattatctgatgatcaagataaggaattattatatttcttttataataactaagtatttaagtttcagaaagcaatcccagttacaaggcagaattagatttgacttgaaaaaaatgagttgtttcctaaagtttgctcattagacaactcaattttcccattcatgttccttcaacaaattattttacaaaataatcctattttgctcaaatctaatctgacccaaccagaacatttagtttgagttcttcaaatgtaaaacaatggctattaaaaaaaaaaaaatggga

SEQ ID NO: 462985 - DNA, 580 bp, Homo sapiens
ttatatatctgaaaacataggtaagtctaaaagaaatgagtatcagctatggtattgcattcattacaaggtatttataatatgcctgttttcaataaggatttgcagtattcccaccatgatatcctatgccacctgtagtattgtacccgtcacactgagtctgtttccacaactgcatggagtgctctttgagggaagggacccatcctgttcactgtaaacaatttcttaagtataagtcrctacctgtctgtgaagcagcagcaccttcctgggcatgctgaaaccaccctgattcagggaccatctggcctcctcatctcaaggccagccttgcttggcctgtgctcatactgctataccacctggaagagaaaatcaggaggcttcagtttcttgctctcctagtatcaggctaacatggaggccccagcagcagcaggagcgatggtggtagcagaaggggtgtcatcagcaacactagttaggtgggccagagctgaatggactggagttgacatctgcccacgggacagccagcagcacagaaagtgctcagacatggaagttctcccca

SEQ ID NO: 462986 - DNA, 544 bp, Homo sapiens
taccttggcatgggagagaagggggctgggatcaggactgggctcattgtgtgaggtagtctcaagtccttacatgaggaggctcattgaacagccaaaaaattgatgagtctcaggtaggggtctcaggaaggtctcccctgcytaccacgggaactactctcactatggggcagttctgataggcctctaaggcatgaactggtagagagtgtgtgtgtgtgcatgtgtgcatgcgtgtatgagtacatgtgtgtgtatttgtcctgtactccagattcaggtaaggagcagcttggggggctcaggcgcagccccttaataggggaaagtggaggtaggcagagagggcagaagaaagcaagccactttcaaaacaaccctccaaaaacatctgagagactttagtgtaataatctgattttgtgagacaaagatccagagggcgttgggcatgagtccagttcagaatcaatctggtgggcacctcagggctcaaaaatactctctttaccaggccctgacctgggccacctgttattgg

SEQ ID NO: 462987 - DNA, 583 bp, Homo sapiens
attaagtcaccttgtaagagtgccctgctattagttttttaaaaacaagaatgtcaacaaaattggtagaagcagttggggggtttcttactccttccagtaacaatccttccttctgttctttagaggcgtttctcaagccttagtttggatatgagttatctgaagattgtttttgagttcaggtctggttcagaactggggtggggcctatgattcctcattttattagtgctgcccatcctggctatgtattgggaaggaaggcaggtgagaagagtgaatttatagtttgagtctgttctgactttgaggacgggctctcagtcaggcgagactttctaaagttgagtaggcatcatacttcctgctgtttccttagggaaatgctcagatacccctccagcttgtgggatggaagacctgggtcctagtctcagtgcacatctagctctgtggaggtatttttccaagttcccttgctagcttcagttttatttcctatcattctccccatgggtgaaaagctcctggttctgggagagttcttwgaatcccagctcagtcattcaccagtgatagg

SEQ ID NO: 462988 - DNA, 586 bp, Homo sapiens
cactttccattgataataagaaggtctattcaaaattgttctttaagagagggattacagttctttatatactgtcctgtacattttacagaggtgttcccctaattagtaaagcacacattcatatttggaaaacaaaaggtatagctctctctatgtctattcatatttatcttgaaattcttaaaaatattgtttgaaaggcctttattaacatgcatgtgtaatgtcacatgtatacacatatatgtgtctcctatccttttcctccatgcttatctcctatccttttcctcctttataaaaattaaacatatgtgtatatatgtataatttttataattatatgtgtatatatgtataattatatgtgtgtatatatgcataatttttataaatttttataatttttataagggaggaaaaggataggggataagcatgtagaatccacctacaagaggtactgaccagtgatgttagacctagaatttaagaacaacaaccctcataagaaagccatttgaacagcagagtcatatttagtgttttttagcccttgrgaaatcaaaaattgacaactcag

SEQ ID NO: 462989 - DNA, 571 bp, Homo sapiens
ttcaggaactcctttcctcccgtttattctgttttatgggagtgcatattcttggctatttccagaatatcagtgtctatctgctatctgtgccttgtgtaaagtctgtccgtgtaaaaagagaatcattatgttctagaraatcattatgttctggaaatattttgacaaactgacagatttttgctgatgtcgaaattaaaatttatctcaaaatagtatgtggtgatgctgagcatgaaattattaaagaggtttctcaaataaaactgcactttagtagcatgcatttgggaacattgctgcaattgctaaattttatttcattcattcatgttgagagatatatgtaaacaaaatgattttgcataatcatcttttcatctttgaagtttaaaaatgatttcactagtgtaattatctataagaccctatgtgtttaaaaacatatgcatatatgtaatatctattctatcttctgtttttccaaaaccttctagatgcttcttcctgcttgaatatagctgattcattttcattccatttttaccttcctagaagtacacaggaa

SEQ ID NO: 462990 - DNA, 437 bp, Homo sapiens
gcagggagaggaggaggagtatatggaaactctgtactttctgctcatcctttttgtaaacctaaaacttctctaaaaattaaactctattgaaagagaaataaagggagaaatagccttcaaaatattacagagagagcattatagaaagaggggcattgagtcttcagartgctttccaaaacctgaattaatcgtggagtaggaaatattaagtcatgagtaatttataacttagtataaattattagttcattttccttgctgctgtcattagctggtttcaggatgtgaagaaatgaagattcccttggctgcaagtgaaacctagctcagactcccttcgagtaaaaggaagtgtactggctgacgtaacctggaagtcctaggtgccacttccggcatcgctgaatccaagagtacaaatgaagtcactg

SEQ ID NO: 462991 - DNA, 553 bp, Homo sapiens
tacccattgtgcatacacaagactcccctcataaatatgtatagctttcccccaaatctatgtatgattctactgtgtaatatggaccccgtgaggcataaaagccaacctgctcttccctcttcaaagagaaatcaccttcagtacatgccagagacagtctcttctggtactgcaaactgataccacaaacacagttcaccattctgctgttcagccacmctagtggtcttttggatgatgatcttttcacttttcctctttggggcttcctttcggtttcctttgcctttagttttgaagtacagcttattttgaaaacttcacctaactctctcatatactgctgtattacattttgagaaactgggcaatatacatgtcatttgacccagcaatttcacttgaaggaatttatctcaaggaataacaagtacagtacataaaagtgtctgtataaggatgttcatccctacattgtttataatactgtaaagactggccatgatataaatgtttaccaagtgaagacagcacaataaagactggtata

SEQ ID NO: 462992 - DNA, 553 bp, Homo sapiens
tacccattgtgcatacacaagactcccctcataaatatgtatagctttcccccaaatctatgtatgattctactgtgtaatatggaccccgtgaggcataaaagccaacctgctcttccctcttcaaagagaaatcaccttcagtacatgccagagacagtctcttctggtactgcaaactgataccacaaacacagttcaccattctgctgttcagccacactagtggtcttttggatgatgatcttttcacttttcctctttggggcttcctttcggtttcctttgcctttagttttgaagtacagcttmttttgaaaacttcacctaactctctcatatactgctgtattacattttgagaaactgggcaatatacatgtcatttgacccagcaatttcacttgaaggaatttatctcaaggaataacaagtacagtacataaaagtgtctgtataaggatgttcatccctacattgtttataatactgtaaagactggccatgatataaatgtttaccaagtgaagacagcacaataaagactggtata

SEQ ID NO: 462993 - DNA, 304 bp, Homo sapiens
gaatagcaaagttgagctagctaacacatacattacctcttatttttttgtagtgataacacaatgtactcttagcaattttcaagaatacattgttattaactacagtcaccatgttgtaaaattctttaacttattctttgtagctgaaattttgtatccttycataaacatttccaaacttttcccccttattttctttgaaaataatcttctaggtgtttttgacacacataagataaatttaatgttctgagaggactgcttatagactgacgaggggatataacagtttgaatgcttg

SEQ ID NO: 462994 - DNA, 635 bp, Homo sapiens
tggcttccctgtggcaatgtctaccacagtgtctttcacattagcaagggttaaaaagcagtacttcttggaaaatgtagaaagaggcaattaagtggcacagctatccaatctctgctccctctggcttgcaaatgttgcagtaaggcttaatcaaacctttattaaacagtagctgacatttagcccttagagggcagaaacgtgctgtggtgtaagacacaaaagcatattgtccgttcacagcatgaaaacygagcaagaaatcatgggagtagagtttccaaaggacagctgcaaatcaagacccgtggaaaaaaactgaaggggattaagacggttctaagaaccaaaaatttagagccagacagctagaaacaattgatagttttctatttcagaggtgagaaagttgagttcacagagattacatctctgtgtctgtatctggctcttctgatctgaatattctgagtgaagatgggagtgacagggaacgtgacattgttagaataggcttctttccaaacggctgctataacatcagcttcaacttctggtttcctaccattattcttgttaccagaccatgtaaacaagttccatgttgttggttgttggaccagagtactgac

SEQ ID NO: 462995 - DNA, 635 bp, Homo sapiens
tggcttccctgtggcaatgtctaccacagtgtctttcacattagcaagggttaaaaagcagtacttcttggaaaatgtagaaagaggcaattaagtggcacagctatccaatctctgctccctctggcttgcaaatgttgcagtaaggcttaatcaaacctttattaaacagtagctgacatttagcccttagagggcagaaacgtgctgtggtgtaagacacaaaagcatattgtccgttcacagcatgaaaactgagcaagaaatcatgggagtagagtttccaaaggacagctgcaaatcaagacccgtggaaaaaaactgaaggggattaagamggttctaagaaccaaaaatttagagccagacagctagaaacaattgatagttttctatttcagaggtgagaaagttgagttcacagagattacatctctgtgtctgtatctggctcttctgatctgaatattctgagtgaagatgggagtgacagggaacgtgacattgttagaataggcttctttccaaacggctgctataacatcagcttcaacttctggtttcctaccattattcttgttaccagaccatgtaaacaagttccatgttgttggttgttggaccagagtactgac

SEQ ID NO: 462996 - DNA, 635 bp, Homo sapiens
tggcttccctgtggcaatgtctaccacagtgtctttcacattagcaagggttaaaaagcagtacttcttggaaaatgtagaaagaggcaattaagtggcacagctatccaatctctgctccctctggcttgcaaatgttgcagtaaggcttaatcaaacctttattaaacagtagctgacatttagcccttagagggcagaaacgtgctgtggtgtaagacacaaaagcatattgtccgttcacagcatgaaaactgagcaagaaatcatgggagtagagtttccaaaggacagctgcaaatcaagacccgtggaaaaaaactgaaggggattaagacggttctaagaaccaaaaatttagagccagacagctagaaacaattgatagttttctatttcagaggtgagaaagttgagttcacagagattacatctctgtgtctgtatctggctcttctgatctgaatattctgagtgaagatgggagtgrcagggaacgtgacattgttagaataggcttctttccaaacggctgctataacatcagcttcaacttctggtttcctaccattattcttgttaccagaccatgtaaacaagttccatgttgttggttgttggaccagagtactgac

SEQ ID NO: 462997 - DNA, 569 bp, Homo sapiens
tgttgattactgacctgcttgctaagaaccctgatattagtgcaaggatattagtgcaaggggtatttttgttgtgacattttttagtaactgggattggttgatattacactttaagggaatcccagaattattgaatgattgaacatataattttatgttaaatatgtaagctagaattcaagaagtacaaggaaaaatgttgctcaccagggatgagaatttagatgatcctcattagcggttctaagaggattgctggtccagagaaagggtaactcctgtaaagtgaatatgtgcctgtgtcttcatttagagagatgagcacaayactggttgtttctgttgttgataataagcaaaatgatcagaatgttttgcacgtttgttttctaacggaagtcagtcctgggcaggagggtagtggtctggcacatcctccaaagtcaacctgcctgggttgactccccagtaaccttgggaaggttatggaacctggctgggctccatccctcagctgtaacatttataataagattaaataatggtaatgcatataaatgctgaat

SEQ ID NO: 462998 - DNA, 569 bp, Homo sapiens
tgttgattactgacctgcttgctaagaaccctgatattagtgcaaggatattagtgcaaggggtatttttgttgtgacattttttagtaactgggattggttgatattacactttaagggaatcccagaattattgaatgattgaacatataattttatgttaaatatgtaagctagaattcaagaagtacaaggaaaaatgttgctcaccagggatgagaatttagatgatcctcattagcggttctaagaggattgctggtccagagaaagggtaactcctgtaaagtgaatatgtgcctgtgtcttcatttagagagatgagcacaatactggttgtttctgttgttgataataagcaaaatgatcagaatgttttgcacrtttgttttctaacggaagtcagtcctgggcaggagggtagtggtctggcacatcctccaaagtcaacctgcctgggttgactccccagtaaccttgggaaggttatggaacctggctgggctccatccctcagctgtaacatttataataagattaaataatggtaatgcatataaatgctgaat

SEQ ID NO: 462999 - DNA, 575 bp, Homo sapiens
ctggccctttgagaacttctgaagttcatctcagtttgccgtttcccttactgagacagcttggagtcagcagacctgtagacactgctatatcatccccttgtcagacaattttatagaaatgttaagcaagattggcctagagatcagccctaggaagcctgcactgcttagaattctccatagagagaaatgtccgtttttcaggtcaagtggcttcactttgggcatcagtataaggcatttttctttctttctctttctccccccacctagtttctgctttgcacttgctctacccacattatggggttcctctttgcacaactcacttcccagtcttgaagaacagctggtcttctgaggcagcctcttttatttttctgttaatcacataatactattatttyctcagatatattttcacagatattctctctgtcatatttattcctgttagtctaacctaacattatctaatcaatcccttgaataagttaaacctatcctctctattgagcattcagaatcctggatctagtagtcttctgatggggagtcataaaaaagattgg

SEQ ID NO: 463000 - DNA, 609 bp, Homo sapiens
tatattagtgttttattcatctctaagacagaatagttagtaatacttattctgccttctacacaatatggtggtgataaaattaaatcatgaataagaaaataagacaacttttatcaactatagatttataaacagtgacagcaatcctaaatgataagcsattctggccataactctgtattttactccttcttttggaagactgaaaactttttctctcttctgaatagtatcagaacctacttttacttatatttaaaaggcttatattctcttacagaaaaataatatttacaatttaataatttagtaggtttttatgcacagcatgcctagacaaagataagcatcatttgagatggaattagcagtccacatgcctatttgatgatacctggagggcttctctaatgtgagagttttgctaaagacaaaggttttcctgagatgggttgaaccattgcttaaagattaccactatataccagttacatgatttgcctctgttccacaaacttaaaaggttatatatcctgtctagtttcttctcaccaagaatcagtttaaccttcaaagggttctgggtcagctggatttgttttcttt

SEQ ID NO: 463001 - DNA, 411 bp, Homo sapiens
taatgtaccccataaatataatacatacacctactgtgtacccacagagattaaaaataaaaaaaattaataaaaaaargtgataaatattgggaccactaggcacactagtcataatgtaaataaagccagtcatatggagtaacttcatttgtttccagaataattatgtaggtataaggagtaacattgtgtcttaaaaccatggcaaagtcactccaatacctgttcctccctttctcaaatgatcttaaaactgaaagggttatgccttgttccatggttggataacaagttatagtcaaggaaaagcatttcctggatctctcagaagatgcaaacctgcatgaggaggtagacacacagatgtatgaactctagattgaaaatacaatagaatgttgagtgtgt

SEQ ID NO: 463002 - DNA, 595 bp, Homo sapiens
acctggacacatttggtgcaatatagatcttaaactctttaattagacattttcataacataacattattacataagactatatcttcctaaattgtcaacttatttggttttactttttctttgctttctcatttcaaaactttatttttttttaccaatctttagttattacatctttcaatattacatttctttctaaagacactaggaatcggtgactatttaacataaattgtgcaatttaacagcataaccatataaacctcagccataaataaagtgctaaaataagctctgacatcatacataggtttgattcatttgtacttactatatccccatgtttttcagttatgttattaccaagaagtatgtttgatgstatggtttgacagtttaagatttcccagtgtttgaagtcccagggtttcatcacaaggtcactctcttgctataattagttatcacaatatatgaacttcccttctgagagtaatgaatgaatttgtttctaaagtccttattctcctaacgtctattacctgtcacttggactccatacattagaactcatcctcatttgccaggttctt

SEQ ID NO: 463003 - DNA, 606 bp, Homo sapiens
tctgtcatgtgagcatagagtgagaatagactcatcttcaatactgaaagaaagcccttaccagaactaaacattgctggcaccttgatcttgaacatccaggctccagagctgtgagaaaatamatttctgttgattaagccatttagtatataatgttttactatggcagcctgagctgataaagacatcttttcaaggaataagtccattatacttggttaccaaatttgtattcatacagttgtcataatattcctttattatcattttaatgtccatgggatatgtagtaattttccctcttgctttcttgatattagtcatttgtgtattttctgagtttgtttcttagcctgagtaggggcttatcaatattattgatatgtataaaggactagttttggtttcattatttctctattgcttttctattttcaattgaatgagtttctgctcaattattattttcttcttattactcttggatttagtttgctcttctttttctagtttcctaaggctgtagtttaccaattttacaggtttgttttccttttctaatgtatgtatgcaatgctataaatttccctgtaagtactgcat

SEQ ID NO: 463004 - DNA, 606 bp, Homo sapiens
tctgtcatgtgagcatagagtgagaatagactcatcttcaatactgaaagaaagcccttaccagaactaaacattgctggcaccttgatcttgaacatccaggctccagagctgtgagaaaataaatttctgttgattaagccatttagtatataatgttttactatggmagcctgagctgataaagacatcttttcaaggaataagtccattatacttggttaccaaatttgtattcatacagttgtcataatattcctttattatcattttaatgtccatgggatatgtagtaattttccctcttgctttcttgatattagtcatttgtgtattttctgagtttgtttcttagcctgagtaggggcttatcaatattattgatatgtataaaggactagttttggtttcattatttctctattgcttttctattttcaattgaatgagtttctgctcaattattattttcttcttattactcttggatttagtttgctcttctttttctagtttcctaaggctgtagtttaccaattttacaggtttgttttccttttctaatgtatgtatgcaatgctataaatttccctgtaagtactgcat

SEQ ID NO: 463005 - DNA, 606 bp, Homo sapiens
tctgtcatgtgagcatagagtgagaatagactcatcttcaatactgaaagaaagcccttaccagaactaaacattgctggcaccttgatcttgaacatccaggctccagagctgtgagaaaataaatttctgttgattaagccatttagtatataatgttttactatggcagcctgagctgataaagacatcttttcaaggaataagtccattatacttggttaccaaatttgtatwcatacagttgtcataatattcctttattatcattttaatgtccatgggatatgtagtaattttccctcttgctttcttgatattagtcatttgtgtattttctgagtttgtttcttagcctgagtaggggcttatcaatattattgatatgtataaaggactagttttggtttcattatttctctattgcttttctattttcaattgaatgagtttctgctcaattattattttcttcttattactcttggatttagtttgctcttctttttctagtttcctaaggctgtagtttaccaattttacaggtttgttttccttttctaatgtatgtatgcaatgctataaatttccctgtaagtactgcat

SEQ ID NO: 463006 - DNA, 595 bp, Homo sapiens
acctggacacatttggtgcaatatagatcttaaactctttaattagacattttcataacataacattattacataagactatatcttcctaaattgtcaacttatttggttttactttttctttgctttctcatttcaaaactttatttttttttaccaatctttagttattacatctttcaatattacatttctttctaaagacactaggaatcggtgactatttaacataaattgtgcaatttaacagcataaccatataaacctcagccataaataaagtgctaaaataagctctgacatcatacataggtttgattcatttgtacttactatatccccatgtttttcagttatgttattaccaagaagtatgtttgatggtatggtttgacagtttaagatttcccagtgtttgaagtcccagggtttcatcacaaggtcactctcttgctataattagttatcacaatatatgaacttcccttctgagagtaatgaatgaatttgtttctaaagtccttattctcctaacgtctattacctgycacttggactccatacattagaactcatcctcatttgccaggttctt

SEQ ID NO: 463007 - DNA, 579 bp, Homo sapiens
gttattttaatggctcaatcatcaagaaagagcaagaacaataggtaagcacattaagaatactaaaatctgtttattttctatttttttctattttgtaaacacataaaaagtactatgcttcaggaacaactctacataaattgtctgtatgctaactttgttaagwtgcttgaattaatatttacatttgattgaagaagaaactgaaacaggttaagtggcaatgctttatagtagttatgaatagagatttttaactatacttgttgcaaattaaacttgtttttaattaattattttcttaaacaaaactgatttatctatttcacagcctgaataaagccaatagtaaaattaggattattacagctttaaaactgaacaagatcatgtgtataatttgctattttctgaatctgtgtttacaattcttattaaacctattagagtagagaaagaacttttccataaactagaaaatggagaatagattttgtttatcgcttggtttatggcatggctatgaataagtttagttccaaattcttttacctctataatatattatttttaaaa

SEQ ID NO: 463008 - DNA, 629 bp, Homo sapiens
attatttccttcagggaccttatgcactcttacacatccgtctattatttttatatggattactatacaattacatgttgaatttgtacttttcccccatatatcctgtcatatgttttcacctgagcatctcaatatctaatactcttatttgcttaaaatacacgtgattattttctccaccctgacatattttatgttcaactttctaatttctaaaaatggacctaccattgtcctatttattcttgcttaaatcttgatattttctttgagttcatgctccttcgtattcactccagctgtgataagtcaccaatcctttgggtttttacttaccagtatttctatttctgtttctatagccttaaagctggaactgtgtagtcccagttcctctgtgtagccccccaagtctgctctatttcaatcttctcttaagggaactccttccctccgtttttcttttcctccatttgatacatcrcacttatagatggggcatcttccctaattactggcttcatcctcaattcccgggacccataccttcactggcttcctaaatttatttaataattctcatatacctttgagaagtttctactgataggcaacaaatgaatatt

SEQ ID NO: 463009 - DNA, 568 bp, Homo sapiens
tgataaatgcagttacatctatattgtgaaataaaacacactgtttttcaacgaagttataaaataattatataaattttttttcatgttgtcatctactgatgtaccacatttaattcagcaatttactacccttatcttttcaaggaaaacctcataattatgttcctgtagcttaagaagggtccatatatagaacaaatttttggaatacttcagtaccaaattttgccttatgaaagtttattttgtggactcacataaaaaatgaaaatagataatgctattaataarcatttcatatgttgtagagtgaatctcttacctgaagataaatctgctgaagtggttaccccaaaaaaactgttcttacaatgctacaagattatagtagggaatgttgtatagatgttaaggaaaataatttagcagatttttatgctaaaaaagtgttattcaacttatacaagaatctcttgcagagcagatagaggagtccatgaagacatatgtcagaaaataacgaatgctgctgagattgtggagaaaaaggaacacttatacagtg

SEQ ID NO: 463010 - DNA, 595 bp, Homo sapiens
tatgtctgtgtgtgtgtgtataagtgagaaaactaatcaatatatgagagtaggaagactatcgtgtgaaggagaggaaaaggtagtaattgtgaartataattacatattgctctagagtgttccccagtgagtgctctttttctatacgttaacttggcagagatttgcctgcagaatttcaatcatttaaacagggtttaataatctgatgcctgaatgtcaccccagatttctgatttaattggccttgagggtacctggagagagtgattctaacatatgatcaagttgtcaaaactacttatttagtgttttgtcattttagaaatacttaaaatataagattaacctttgcttactttattgacagattttgtgcttgtcccatattgaagttacggagctatctatcttcttacatgatactctgtcacacatcctttttagagaactttaacatattcttaatatgaaagaggaatataatgaaaataatttcaaatgtattgtacttctatgtggaaatgctcagccttgtcaaaaactttatagtcagatgcctacattcatactggggatcacttttagaatc

SEQ ID NO: 463011 - DNA, 617 bp, Homo sapiens
taaaccattcataaaggatccactcctatgatccaaatatctcccaccagccccacctccaacgttggtgattacaattgaacatgagatttgggtagagatacagatccaaaccatataaaactacaaatttttttgattaagcagcattgaatataaaatagaaaaaatgaatacagcatgtcagtttatgctttctttatttttttcttcctgtcatatgtcaaagtttagagcaccaagtaggctcttggggttcctaattctgggacttaactcttggatggcatttctgaacctgccctgtccccragggagtgggaaggactgtatcatttggtttaagtgtcagattagctgcaatgaaataggataccagatagacttctaaggtttttgaccctagtccctgaatcccagacagcacttctgcaaccacctgggacttggaggacctcactgccatgaagggaaggacacaggcctcacttgatttgccatttgctgattttagagccctagggccttgagtaaacacagacagtggcagggagtggttatagcaagacttggtgaagatccagcactgtgctagcttcaggtctgaccaagcatag

SEQ ID NO: 463012 - DNA, 617 bp, Homo sapiens
taaaccattcataaaggatccactcctatgatccaaatatctcccaccagccccacctccaacgttggtgattacaattgaacatgagatttgggtagagatacagatccaaaccatataaaactacaaatttttttgattaagcagcattgaatataaaatagaaaaaatgaatacagcatgtcagtttatgctttctttatttttttcttcctgtcatatgtcaaagtttagagcaccaagtaggctcttggggttcctaattctgggacttaactcttggatggcatttctgaacctgccctgtccccaagggagtgggaaggactgtatcatttggtttaagtgtcagattagctgcaatgaaataggataccagatagacttctaaggtttttgaccctagtccctgaatcccagacagcacttctgcaaccacctgggacttggaggacctcactgccatgaagggaaggacacaggcctcacttgatttgccatttgctgattttagagccctagggccttgagtaaacacagacagtggcarggagtggttatagcaagacttggtgaagatccagcactgtgctagcttcaggtctgaccaagcatag

SEQ ID NO: 463013 - DNA, 602 bp, Homo sapiens
aataacggagaactttacaaacctagagaaagacttcaatatacaagtagaagaaggttatagaacatcaaacagtttcatcccaaagaagactaacccaaggcacttaacagtcaaactcccaaagatcaaagataaagataagatcctaaaagcagcaagagaaaagaaataaataacacacaatggagctccaatatatctgacaacagacttatttgaaatcttataagccaggaaagagtggtatgacatttaaagtactgaagaaaaaacamttctaccctggaatactatatctgatgaaaatacgcttcaaacatgaaagagaaataaagattttttcagacaaacaaaagctgagggatttaatcaataccagacctgttatataagaattgctaaaggaagcacttcaatcagaaagagaaggacattaatgagcaataaataatcacctgaaggtacaaaattcactggtaatagtaagtacacagaaaaacacagaatattataactataaccatggtgtgttaactattcttatcctaagtagaaagacaaaatgatgaactgatcaaaaataataactacaggctggg

SEQ ID NO: 463014 - DNA, 602 bp, Homo sapiens
aataacggagaactttacaaacctagagaaagacttcaatatacaagtagaagaaggttatagaacatcaaacagtttcatcccaaagaagactaacccaaggcacttaacagtcaaactcccaaagatcaaagataaagataagatcctaaaagcagcaagagaaaagaaataaataacacacaatggagctccaatatatctgacaacagacttatttgaaatcttataagccaggaaagagtggtatgacatttaaagtactgaagaaaaaacacttctaccctggaatactatatctgatgaaaatacgcttcaaacatgaaagagaaataaagattttttcagacaaacaaaagctgagggatttaatcaataccagacctgttatataagaawtgctaaaggaagcacttcaatcagaaagagaaggacattaatgagcaataaataatcacctgaaggtacaaaattcactggtaatagtaagtacacagaaaaacacagaatattataactataaccatggtgtgttaactattcttatcctaagtagaaagacaaaatgatgaactgatcaaaaataataactacaggctggg

SEQ ID NO: 463015 - DNA, 602 bp, Homo sapiens
aataacggagaactttacaaacctagagaaagacttcaatatacaagtagaagaaggttatagaacatcaaacagtttcatcccaaagaagactaacccaaggcacttaacagtcaaactcccaaagatcaaagataaagataagatcctaaaagcagcaagagaaaagaaataaataacacacaatggagctccaatatatctgacaacagacttatttgaaatcttataagccaggaaagagtggtatgacatttaaagtactgaagaaaaaacacttctaccctggaatactatatctgatgaaaatacgcttcaaacatgaaagagaaataaagattttttcagacaaacaaaagctgagggatttaatcaataccagacctgttatataagaattgctaaaggragcacttcaatcagaaagagaaggacattaatgagcaataaataatcacctgaaggtacaaaattcactggtaatagtaagtacacagaaaaacacagaatattataactataaccatggtgtgttaactattcttatcctaagtagaaagacaaaatgatgaactgatcaaaaataataactacaggctggg

SEQ ID NO: 463016 - DNA, 602 bp, Homo sapiens
aataacggagaactttacaaacctagagaaagacttcaatatacaagtagaagaaggttatagaacatcaaacagtttcatcccaaagaagactaacccaaggcacttaacagtcaaactcccaaagatcaaagataaagataagatcctaaaagcagcaagagaaaagaaataaataacacacaatggagctccaatatatctgacaacagacttatttgaaatcttataagccaggaaagagtggtatgacatttaaagtactgaagaaaaaacacttctaccctggaatactatatctgatgaaaatacgcttcaaacatgaaagagaaataaagattttttcagacaaacaaaagctgagggatttaatcaataccagacctgttatataagaattgctaaaggaagcacttcaatcagaaagagaaggayattaatgagcaataaataatcacctgaaggtacaaaattcactggtaatagtaagtacacagaaaaacacagaatattataactataaccatggtgtgttaactattcttatcctaagtagaaagacaaaatgatgaactgatcaaaaataataactacaggctggg

SEQ ID NO: 463017 - DNA, 544 bp, Homo sapiens
tcaattataacattgaatacaatggactaaatttccctatcaaaagacacagactagctgaatggataaaaaacaagacccattgaactgtttcctgcaagaaacacacttcaccaatagagacacacatagactaaaaataaaggaatagaaatagatactccacgacaatgaaaaccaaaaaatagcaggagttacaatacttatatcagacaaaatagatttcaagacaaagaccctaagaagagacaaataatatcactgtataattwtatatcattcaattcagcaagagggtataacaatttgaaataaatatgcacccaacactgagcacccagattcataaagcaaatattattagtgctaaagagagaaataggccgcaatataataatatctggatatgtcaacaccccactttcagcattggacagatcttccagacagaaaatcaacaaagaaacatcacacttaatttgcactatagtcctaggggttctaataattttttacagaatactttatccaagagctgcagagt

SEQ ID NO: 463018 - DNA, 542 bp, Homo sapiens
caatgtaacaaaaagttctttctaagattaaacaaaattgacaaacatttagcctgaatcactaagaaaacaaagaagatccaaataaatagaatgagaaattaaaaaggagacattacaactgctactrcagaaattcaaaggatcattagtggctactatgagtaactatatgtcaataaattggaaaatctaaaagaataaaaaagaaagaaattctcagacacacaaaaatttccaaggttgaagcaggaagaaattcaaaatgtgaacggactaataataatgagatcaaagcaataacacagtctcccagtaaaagaagcctaggatccaatggcatcaatgctgaaatctaccaaacatttgagaactaattccaatcctactcaaactattaaaaaaaaaaaaaaggtgtagggggaaatacttttaaaatcatcctatgaggccagtattaccctgataccaaaatcagacaaagacaaatcagaaaaaaaaaaaaaactacaggccaatataaataatgaatattgatgcaa

SEQ ID NO: 463019 - DNA, 542 bp, Homo sapiens
caatgtaacaaaaagttctttctaagattaaacaaaattgacaaacatttagcctgaatcactaagaaaacaaagaagatccaaataaatagaatgagaaattaaaaaggagacattacaactgctactacagaaattcaaaggatcattagtggctactatgagtaactatatgtcaataaattggaaaatctaaaagaataaaaaagaaagaaattytcagacacacaaaaatttccaaggttgaagcaggaagaaattcaaaatgtgaacggactaataataatgagatcaaagcaataacacagtctcccagtaaaagaagcctaggatccaatggcatcaatgctgaaatctaccaaacatttgagaactaattccaatcctactcaaactattaaaaaaaaaaaaaaggtgtagggggaaatacttttaaaatcatcctatgaggccagtattaccctgataccaaaatcagacaaagacaaatcagaaaaaaaaaaaaaactacaggccaatataaataatgaatattgatgcaa

SEQ ID NO: 463020 - DNA, 542 bp, Homo sapiens
caatgtaacaaaaagttctttctaagattaaacaaaattgacaaacatttagcctgaatcactaagaaaacaaagaagatccaaataaatagaatgagaaattaaaaaggagacattacaactgctactacagaaattcaaaggatcattagtggctactatgagtaactatatgtcaataaattggaaaatctaaaagaataaaaaagaaagaaattctcagacacacaaaaatttccaaggttgaagcaggaagaaattcaaaatgtgaacrgactaataataatgagatcaaagcaataacacagtctcccagtaaaagaagcctaggatccaatggcatcaatgctgaaatctaccaaacatttgagaactaattccaatcctactcaaactattaaaaaaaaaaaaaaggtgtagggggaaatacttttaaaatcatcctatgaggccagtattaccctgataccaaaatcagacaaagacaaatcagaaaaaaaaaaaaaactacaggccaatataaataatgaatattgatgcaa

SEQ ID NO: 463021 - DNA, 542 bp, Homo sapiens
caatgtaacaaaaagttctttctaagattaaacaaaattgacaaacatttagcctgaatcactaagaaaacaaagaagatccaaataaatagaatgagaaattaaaaaggagacattacaactgctactacagaaattcaaaggatcattagtggctactatgagtaactatatgtcaataaattggaaaatctaaaagaataaaaaagaaagaaattctcagacacacaaaaatttccaaggttgaagcaggaagaaattcaaaatgtgaacggactaataataatgagatcaaagcaataacacagtctcccagtaaaagaagcctaggatccaatggcatcaatgctgaaatctaccaaacatttgagaactaattccaatcctactcaaactattaaaaaaaaaaaaaaggtgkagggggaaatacttttaaaatcatcctatgaggccagtattaccctgataccaaaatcagacaaagacaaatcagaaaaaaaaaaaaaactacaggccaatataaataatgaatattgatgcaa

SEQ ID NO: 463022 - DNA, 447 bp, Homo sapiens
tctctactaactaatgatatgtacatattttcatgttctcatcagtcatttgtgtatttctytggagaaatatctattcaaatttgttttccattttctatttttttgtctttttaatttgttgagtcgtgagagttctttatatattatggataatagtcttttaacagttatatgacttacaaatgcttttgccacttctctgagttgtcttttcatttttttgaatgtaacctttcaaaagaagtttctattctgatgaggtaaaatttatctatatttttcttttgtcatttgtgcttttggtggcatatccaagaaaccatttctcactataaggttacaaagatttaggcctatgttttcttaaaaagagttttaaagttttagctctaatatttaggtttttgatctgttttgagataatttttatataatatgcagtag

SEQ ID NO: 463023 - DNA, 594 bp, Homo sapiens
attataactcttacctttaaatttcctcgtttgacaagaactatcaaattcctttttaagagtgtacacatatatgtttttaatttggaaattccatattcagtgaaaattcaaattttaattcctatggaaaatttaaattttatttactgtggaatggcaaagctgaatttatttcactattatytatcaaaaagcgtgtaacataagatttcaaatatgtttaacctggtaaaagtgagaatatatttccatcaagagcacaccatctaaaaaaacagtattgctatctagtcatatgcatttaatttttgcagcccctaattgttcagaataaatgtagcattcacataatattatagtccatgaaaagagtatattcttttactggttttggttcatacatgttaagtttcaactttcaataataaaattctataaatttgatttcttaatcataaaaaatcaacaacaaaagaaagtaatcctatttacaatagtcacatgtaaaattaaatatctaggaattgacaaaagaagtgaaagatctacataatgaaaatgataaaacactgagaaaaaaattaaagagga

SEQ ID NO: 463024 - DNA, 594 bp, Homo sapiens
attataactcttacctttaaatttcctcgtttgacaagaactatcaaattcctttttaagagtgtacacatatatgtttttaatttggaaattccatattcagtgaaaattcaaattttaattcctatggaaaatttaaattttatttactgtggaatggcaaagctgaatttatttcactattatttatcaaaaagcgtgtaacataagatttcaaatatgtttaacctggtaaaagtgagaatatatttccatcaagagcacaccatctaaaaaaacagtattgctatctagtcatatgcatttaattttygcagcccctaattgttcagaataaatgtagcattcacataatattatagtccatgaaaagagtatattcttttactggttttggttcatacatgttaagtttcaactttcaataataaaattctataaatttgatttcttaatcataaaaaatcaacaacaaaagaaagtaatcctatttacaatagtcacatgtaaaattaaatatctaggaattgacaaaagaagtgaaagatctacataatgaaaatgataaaacactgagaaaaaaattaaagagga

SEQ ID NO: 463025 - DNA, 447 bp, Homo sapiens
tctctactaactaatgatatgtacatattttcatgttctcatcagtcatttgtgtatttctctggagaaatatctattcaaatttgttttccattttctatttttttgtctttttaatttgttgagtcgtgagagttctttatatattatggataatagtcttttaacagttatatgacttacaaatgcttttgccacttctctgagttgtcttttcatttttttgaatgtaacctttcaaaagaagtttctattctgatgaggtaaaatttayctatatttttcttttgtcatttgtgcttttggtggcatatccaagaaaccatttctcactataaggttacaaagatttaggcctatgttttcttaaaaagagttttaaagttttagctctaatatttaggtttttgatctgttttgagataatttttatataatatgcagtag

SEQ ID NO: 463026 - DNA, 560 bp, Homo sapiens
gataggtctacaccctgcaaagccacaaggttggagttgcccaaggctgtgggagcccagctcttgtatcagcatgccctgcatgtgagacgtgaagtccaaggagatcatttgggaacttttgtgtttaatgaytactctatcagattttgaacttgcatgggcctgcaggcccttagatttgccagtttctcccattcggaatgggtgtatttcccaatgactgtacctgcattgtttctaggaagtaactaacttgcttatcattttacaggctcataggcagaagggatttgtcttgtttcatatgagactttggactgagacttttggcttattgctggaatgagctaagaatttgggggactgttggaagggcatcattgtgttttgatatatgaggacatgagatttgcgaggggccagagatgaatgatatgattttgctgtgtctacacctaaaatctcatcttgaattgcaattcttacgtgtaaagcgtgggataggtgaaggtaatcaaatcatgatggcagttttccccatgttgttctcataatag

SEQ ID NO: 463027 - DNA, 560 bp, Homo sapiens
gataggtctacaccctgcaaagccacaaggttggagttgcccaaggctgtgggagcccagctcttgtatcagcatgccctgcatgtgagacgtgaagtccaaggagatcatttgggaacttttgtgtttaatgattactctatcagattttgaacttgcatgggcctgcaggcccttagatttgccagtttctcccattcggaatgggtgtatttcccaatgactgtacctgcattgtttctaggaagtaactaacttgcttatcattttacaggctcataggcagaagggatttgtcttgtttcatatgagactttggactgagacttttggcttattgctggaatgagctaagaatttgggggactgttggaagggcatcattgtgttttgatatatgaggacatgagatttgcgaggggccagagatgaatgatatgattttgctgtgtctacacctaaaatctcatcttgaattgcaattcttacrtgtaaagcgtgggataggtgaaggtaatcaaatcatgatggcagttttccccatgttgttctcataatag

SEQ ID NO: 463028 - DNA, 606 bp, Homo sapiens
taagcttccttgttaacactgccttagctatgccccaaggattctggcatgttgtgtcttggttcttattattctcaaatattggtttctgcattaatttcattatttagccaaacattcaggagcaggttaaatattcatgtaattgtacgtttttgagtaaatattttagtttttattttgaacttaattgtgctatggtctgagagactgttggttatgattcacttattttgcatttgctgaggagtgcttacttycaattacataatctattttagaataaatgctatgcgataatgagaagaatgtatattcgattatcttttgatagagagtgatatggcttgactttttgtctccactcgaatctcatgtctaattgtaaaccccagtgttagaagagggacctggtgagaagtgattgaatcatgggagtagactttccccttagtgttctcatgatagagttttcatgagatctggttgtttgaaactgtgtagcacctccacctttactctgtctgtctcctgatgaccatatgaagatgtgcttgcttctgctttgccttttcaatgattgtaagtttcctaaggcctccccag

SEQ ID NO: 463029 - DNA, 606 bp, Homo sapiens
taagcttccttgttaacactgccttagctatgccccaaggattctggcatgttgtgtcttggttcttattattctcaaatattggtttctgcattaatttcattatttagccaaacattcaggagcaggttaaatattcatgtaattgtacgtttttgagtaaatattttagtttttattttgaacttaattgtgctatggtctgagagactgttggttatgattcacttattttgcatttgctgaggagtgcttacttccaattacataatctattttagaataaatgctatgcrataatgagaagaatgtatattcgattatcttttgatagagagtgatatggcttgactttttgtctccactcgaatctcatgtctaattgtaaaccccagtgttagaagagggacctggtgagaagtgattgaatcatgggagtagactttccccttagtgttctcatgatagagttttcatgagatctggttgtttgaaactgtgtagcacctccacctttactctgtctgtctcctgatgaccatatgaagatgtgcttgcttctgctttgccttttcaatgattgtaagtttcctaaggcctccccag

SEQ ID NO: 463030 - DNA, 615 bp, Homo sapiens
acaatttacgatagctaagatttggaagcaacctatgtgttcatcagcagataaatggataaagaaaatatggcacatatacacaatgaagtactattcagctttaagaagaatgagatacagttatttgcaacaatataattagaaatgaagatcattaagttaagcgaaataagagagggcacagaaagtgaaatatcacgttcttacttatttgtgggatctaaaagtcaaaacaattgaaacatgaccataaagacctgaaggatgtttaccagaggcttacaagggagtatgagggtcgggtggaagtgaggatgattaattggtaccaaaaagttagaaatgaataagacttaactatttgatagcacaataggatgactacggtcaataataaatttattgtatattttataataacttaaaaaggctaattggattgcttgtaactcaaagaataaatacttaaggggatgaataccacattmtttatgttgttcttatttcacattgtatgcctatattgaagcatctcatgtacatcataaatgtacccacctgctatgtatacacaaaatttaaaaataaaaaatgaaaaagaggataataaat

SEQ ID NO: 463031 - DNA, 652 bp, Homo sapiens
gtttcaggaaagtaatttgggaaattcttttagtatcaagaaagatgacaaagcagcatgaatgagaaagcaggtaggtgtctaaatatttctaaggatgaatattcaacatttgtatcaayttttacatatttatatatgagggcttttttatgtttttataaaaggcagtagtgggtaaatgattttgttgatggtacaggcatcaccttatcccttgcatctcatgaagtgtagagaaaaacttatttccttatgtgagtttccatcacaacacttatagccagtgtccacatcaatttatttgttatttaagctgactataatgtgatgacaggttataaaatttattccaaaacatagttaggttttgcaatcatataaactttgagtagaaggaggagagagtgttcttaataagttaaaatagcacaaattggtgaaagtcagggtggatttaaagaatcagggaaactgagaaaaatgaagataaagaattgatcacttctgttatcttgagatgtcttatatcttgaggtttcttctgtgttattttttttttttttgcatggatagggattataaattgaaatatggccacaagttctcccctttgtatccttctctttgatgccatctttgtacagtgcgt

SEQ ID NO: 463032 - DNA, 652 bp, Homo sapiens
gtttcaggaaagtaatttgggaaattcttttagtatcaagaaagatgacaaagcagcatgaatgagaaagcaggtaggtgtctaaatatttctaaggatgaatattcaacatttgtatcaatttttacatatttatatatgagggcttttttatgtttttataaaaggcagtagtgggtaaatgattttgttgatggtacaggcatcaccttatcccttgcatctcatgaagtgtagagaaaaacttatttccttatgtgagtttccatcacaacacttatagccagtgtccacatcaatttatttgttatttaagctgactataatgtgatgacaggttataaaatttattscaaaacatagttaggttttgcaatcatataaactttgagtagaaggaggagagagtgttcttaataagttaaaatagcacaaattggtgaaagtcagggtggatttaaagaatcagggaaactgagaaaaatgaagataaagaattgatcacttctgttatcttgagatgtcttatatcttgaggtttcttctgtgttattttttttttttttgcatggatagggattataaattgaaatatggccacaagttctcccctttgtatccttctctttgatgccatctttgtacagtgcgt

SEQ ID NO: 463033 - DNA, 652 bp, Homo sapiens
gtttcaggaaagtaatttgggaaattcttttagtatcaagaaagatgacaaagcagcatgaatgagaaagcaggtaggtgtctaaatatttctaaggatgaatattcaacatttgtatcaatttttacatatttatatatgagggcttttttatgtttttataaaaggcagtagtgggtaaatgattttgttgatggtacaggcatcaccttatcccttgcatctcatgaagtgtagagaaaaacttatttccttatgtgagtttccatcacaacacttatagccagtgtccacatcaatttatttgttatttaagctgactataatgtgatgacaggttataaaatttattccaaaacatmgttaggttttgcaatcatataaactttgagtagaaggaggagagagtgttcttaataagttaaaatagcacaaattggtgaaagtcagggtggatttaaagaatcagggaaactgagaaaaatgaagataaagaattgatcacttctgttatcttgagatgtcttatatcttgaggtttcttctgtgttattttttttttttttgcatggatagggattataaattgaaatatggccacaagttctcccctttgtatccttctctttgatgccatctttgtacagtgcgt

SEQ ID NO: 463034 - DNA, 583 bp, Homo sapiens
atagaaataaaggtagcttagacattacaggagaaagtattagtaaacttgataacatagcaacagaaactagctgcagagagagaaagaggatgcactcaaaaaaatctacagagtatcactaagttgtgggaaagctttatgtagcctaaaatacatgtccatgatacatattttacacacacacacacacacacatatataattgtattgctgcacacacacacacatactgtgttagtctgctttgcattgctataaaggaatacctaggactgtattataaagaaaagaggtttattttggctcacagttctgctcttcaggctatacagaaaacatagtgctgwcatctgcttctggtgaggtcctcagaaagcttacagtcatggtggaaggtaaagggggagctggcatatcacatggcaagagaggaagccagagaaatgccatcctcttttaaacaaccagctcttgtgtgaactgagtgaaaactcactcagcacccaggtgatggtgttaagcccttcaatatggctccactcctatgacccaacacctcccgctaggtgccacctccaac

SEQ ID NO: 463035 - DNA, 583 bp, Homo sapiens
atagaaataaaggtagcttagacattacaggagaaagtattagtaaacttgataacatagcaacagaaactagctgcagagagagaaagaggatgcactcaaaaaaatctacagagtatcactaagttgtgggaaagctttatgtagcctaaaatacatgtccatgatacatattttacacacacacacacacacacatatataattgtattgctgcacacacacacacatactgtgttagtctgctttgcattgctataaaggaatacctaggactgtattataaagaaaagaggtttattttggctcacagttctgctcttcaggctatacagaaaacatagtgctgtcatckgcttctggtgaggtcctcagaaagcttacagtcatggtggaaggtaaagggggagctggcatatcacatggcaagagaggaagccagagaaatgccatcctcttttaaacaaccagctcttgtgtgaactgagtgaaaactcactcagcacccaggtgatggtgttaagcccttcaatatggctccactcctatgacccaacacctcccgctaggtgccacctccaac

SEQ ID NO: 463036 - DNA, 583 bp, Homo sapiens
atagaaataaaggtagcttagacattacaggagaaagtattagtaaacttgataacatagcaacagaaactagctgcagagagagaaagaggatgcactcaaaaaaatctacagagtatcactaagttgtgggaaagctttatgtagcctaaaatacatgtccatgatacatattttacacacacacacacacacacatatataattgtattgctgcacacacacacacatactgtgttagtctgctttgcattgctataaaggaatacctaggactgtattataaagaaaagaggtttattttggctcacagttctgctcttcaggctatacagaaaacatagtgctgtcatctgcttctggtgaggtcctcagaaagcttacagtcatggtggaaggtaaagggggagctggcatatcacatggcaagagaggaagccagagaaatgycatcctcttttaaacaaccagctcttgtgtgaactgagtgaaaactcactcagcacccaggtgatggtgttaagcccttcaatatggctccactcctatgacccaacacctcccgctaggtgccacctccaac

SEQ ID NO: 463037 - DNA, 639 bp, Homo sapiens
cctcttctgtgttaatttacttggaaatgtaatttacatacttttagttttgtgaaaacaaatttgtgattgaagtgacactatrtgaggtcagcagtgttataaaaagtaatctagaaaaatcaggcttattgtcatatttattattaatgttaatgggcatttttactcaagtcttcataagctttaggatatcttgaatatttttcttcttcagtttagtttcatcttcctcaataatcttccacagttgattctggtgcataaatgccatacagaatcccagatacaaattaatgaatattgtagagattttaaggtatgaggaaccagaaactctcttctctttcctttttggtttcagaatcaattgttttcacttggatctgaagcaccatattctgctgacttgctcctatcttattggccactcttctcagtcttctttgagtcttcctcctcgttcctcaaactttgtaatactagtatgtcatggggttttgcctttggatgtctgtactccacactcactctcttggatcacatccagtctcatggcctgataaaatgttatatgcttatgattccaaaatttatgtttgtaactcatatctttctctgaactttggtattcacttt

SEQ ID NO: 463038 - DNA, 639 bp, Homo sapiens
cctcttctgtgttaatttacttggaaatgtaatttacatacttttagttttgtgaaaacaaatttgtgattgaagtgacactatgtgrggtcagcagtgttataaaaagtaatctagaaaaatcaggcttattgtcatatttattattaatgttaatgggcatttttactcaagtcttcataagctttaggatatcttgaatatttttcttcttcagtttagtttcatcttcctcaataatcttccacagttgattctggtgcataaatgccatacagaatcccagatacaaattaatgaatattgtagagattttaaggtatgaggaaccagaaactctcttctctttcctttttggtttcagaatcaattgttttcacttggatctgaagcaccatattctgctgacttgctcctatcttattggccactcttctcagtcttctttgagtcttcctcctcgttcctcaaactttgtaatactagtatgtcatggggttttgcctttggatgtctgtactccacactcactctcttggatcacatccagtctcatggcctgataaaatgttatatgcttatgattccaaaatttatgtttgtaactcatatctttctctgaactttggtattcacttt

SEQ ID NO: 463039 - DNA, 639 bp, Homo sapiens
cctcttctgtgttaatttacttggaaatgtaatttacatacttttagttttgtgaaaacaaatttgtgattgaagtgacactatgtgaggtcagcagtgttataaaaagtaatctagaaaaatcaggcttattgtcatatttattattaatgttaatgggcatttttactcaagtcttcataagctttaggatatcttgaatatttttcttcttcagtttagtttcatcttcctcaataatcttccacagttgattctggtgcataaatgccatacagaatcccagatacaaattaatgaatattgtagagattttaaggtatgaggaaccagaaactctcttctctttcctttttggtttcagaatcaattgttttcacttggatctgaagcaccatattctgctgacttgctcctatcttattggccactsttctcagtcttctttgagtcttcctcctcgttcctcaaactttgtaatactagtatgtcatggggttttgcctttggatgtctgtactccacactcactctcttggatcacatccagtctcatggcctgataaaatgttatatgcttatgattccaaaatttatgtttgtaactcatatctttctctgaactttggtattcacttt

SEQ ID NO: 463040 - DNA, 558 bp, Homo sapiens
taatgcatgacatgttattagctttgaattaataaaaaagtatcattttgcatttgtttaaacaggaaagtagttaacagaactctttaaagaagcaagaatcaaatttcaactcaacacaactcaaaagtttaagcactgtaaagtaatactgcattgtctactatcttagatattaaggatttgtcaggacagtaaaacrttctgacatagagtaaagaacacagaaataagacttggcaaaattattccatagactaggctcctgaattggtagtggttacttatagacattaaaatatacatggactttttttctttttaatatttacagagattgatactatctatattaagaattaagatagtcaaaggagttgtcaataaaaaaattattcttctgggcaagaggtagtaacagggttgaaacctactttactgtctggaaaaaaaagtaaaaataatacatcaagacttagaagatgttttctgtaaaggggcaaatataacatatttcagctttgagggatattcactttctgttgcaactatttgact

SEQ ID NO: 463041 - DNA, 558 bp, Homo sapiens
taatgcatgacatgttattagctttgaattaataaaaaagtatcattttgcatttgtttaaacaggaaagtagttaacagaactctttaaagaagcaagaatcaaatttcaactcaacacaactcaaaagtttaagcactgtaaagtaatactgcattgtctactatcttagatattaaggatttgtcaggacagtaaaacgttctgacatagagtaaagaacacagaaataagacttggcaaaattattccatagactaggctcctgaattggtaktggttacttatagacattaaaatatacatggactttttttctttttaatatttacagagattgatactatctatattaagaattaagatagtcaaaggagttgtcaataaaaaaattattcttctgggcaagaggtagtaacagggttgaaacctactttactgtctggaaaaaaaagtaaaaataatacatcaagacttagaagatgttttctgtaaaggggcaaatataacatatttcagctttgagggatattcactttctgttgcaactatttgact

SEQ ID NO: 463042 - DNA, 558 bp, Homo sapiens
taatgcatgacatgttattagctttgaattaataaaaaagtatcattttgcatttgtttaaacaggaaagtagttaacagaactctttaaagaagcaagaatcaaatttcaactcaacacaactcaaaagtttaagcactgtaaagtaatactgcattgtctactatcttagatattaaggatttgtcaggacagtaaaacgttctgacatagagtaaagaacacagaaataagacttggcaaaattattccatagactaggctcctgaattggtagtggttacttatagacattaaaatatacatggactttttttctttttaatatttacagagattgatackatctatattaagaattaagatagtcaaaggagttgtcaataaaaaaattattcttctgggcaagaggtagtaacagggttgaaacctactttactgtctggaaaaaaaagtaaaaataatacatcaagacttagaagatgttttctgtaaaggggcaaatataacatatttcagctttgagggatattcactttctgttgcaactatttgact

SEQ ID NO: 463043 - DNA, 558 bp, Homo sapiens
taatgcatgacatgttattagctttgaattaataaaaaagtatcattttgcatttgtttaaacaggaaagtagttaacagaactctttaaagaagcaagaatcaaatttcaactcaacacaactcaaaagtttaagcactgtaaagtaatactgcattgtctactatcttagatattaaggatttgtcaggacagtaaaacgttctgacatagagtaaagaacacagaaataagacttggcaaaattattccatagactaggctcctgaattggtagtggttacttatagacattaaaatatacatggactttttttctttttaatatttacagagattgatactatctatattaagaattaagatagtcaaaggagttgtcaataaaaaaattattcttctgggcaagaggtagtaacagggttgaaacctactttactgtctggaaaaaaaastaaaaataatacatcaagacttagaagatgttttctgtaaaggggcaaatataacatatttcagctttgagggatattcactttctgttgcaactatttgact

SEQ ID NO: 463044 - DNA, 527 bp, Homo sapiens
taatctctttgctccttctataatgttcagggcaagtaatgcatagctaaaaatggataaattagtagacagtatacctccaaagacaatatgctactgaggcaacatactactgaggtaatattttaaatcacaattacattgcttaagtctgaaaaagaaactttgatttagtgtgcatacaggtttcagggaaagatatgggtaacttgtacaaattttgtacgttgataatgtttaggtaaaaattttcaattatcactctttcatcttattttatttccttcaactcttagcatgtgcgatctttaaaaacctatttgaaatatgaattgacacagagaaaacaacatcatttttctacatggaaagttgtattctttcaaccraagataatatacaaacaaaaatagaaaagcagcaaatcctggattgccaagaaaagagataaactattctctgtccctaataaagatgaatcttcagacaaaaagagttatcttttgaaatacatgaaattagagaag

SEQ ID NO: 463045 - DNA, 526 bp, Homo sapiens
gacactatttcattgtggcactatgcacaatagcccaagttgtgaaaacgacctggaaatgtccattgacagatgaatggataaagaaaatttagtatacaaataaactgaaatactattcagccttaaaaaagagaaattttcaacatgtgaccacatggatgaaccttaaggacattagggtaagggaaataagccagtcacagaaaggtgataaatactgcaggattccacttatctgaggtatctaaaataggaaaacttgtataatcacagactggaatggtagttgccaaaggctgagagaagggggagatatgtaactattaatcaatgagcataagattttagtcaagcaaaaggaataagctctagggatgtgctgtacaacattgtaattataattaacaataatgtactatactcgatgttataaaaaattagcaastaataattaataatatgactcttttttatgtaccagaagaaaaaaaaataagatattgccaaattaagttgtttccaa

SEQ ID NO: 463046 - DNA, 460 bp, Homo sapiens
tgactaaaaatgcacagggaaggtcctcttggcaatttgaaatgcaatataatcgctcagatataaatgataaaaaagattacgagtctatattttaactttcagttatccttgaaaaatgatactttgaacttgaagcaataattaaccagtaagattatattgcttagcaaatttatgtaatctgtttatttgccacaaatgtttaaataaatgtgtgatttggagtttataatcagtgttggagacattagattgyttagattttaagattccttctgtctaatatttctttcagcaccttgcaactcagtccttttcaatcaatatttgaagggcaattttcacacaaagcatcatgtttagttctaatactttcacagaaacctctttgtatcacagcacaattctgatctattaaaaattatcatgaattgtttctattaaggttataataaaa

SEQ ID NO: 463047 - DNA, 627 bp, Homo sapiens
ttttctatcaattttaatagttaaatttgcgaagcacattaaaaaaataacttgactgaacatgggtaaatgtggaataagcatcccagttttttaatgccattaatcagtgaatcttaggtaaaaactgaggtacttcctctttctgagaagtttgctatgaagttagatacagtttgatatcactgaaagcatcctgaaattctcttatgaaagtatcagtcaagcccaaatgtactgtgaacacaattatttaaagtaatattgacacactggtggcatgcacctgtagtctcagcttcttgggagactgaggcaggaggattgctcgagcctaggagtttgaggctgtagtgtactatgattgcacctgtgagtagtctctgtgaatagtcattgcacttcaacctgggcaaaataatgacacctgtctcttaagaaattgttatcaacctttgakaaaaagtataaattattatacagtcatattttaaaattatattaagaaggaaaatattttataactgatcttgcctaacttataatcataattgttgtatagtattgttgaaagtgattataaatagataatgaaacaatgtgtatcatttatctaacgcactataa

SEQ ID NO: 463048 - DNA, 627 bp, Homo sapiens
ttttctatcaattttaatagttaaatttgcgaagcacattaaaaaaataacttgactgaacatgggtaaatgtggaataagcatcccagttttttaatgccattaatcagtgaatcttaggtaaaaactgaggtacttcctctttctgagaagtttgctatgaagttagatacagtttgatatcactgaaagcatcctgaaattctcttatgaaagtatcagtcaagcccaaatgtactgtgaacacaattatttaaagtaatattgacacactggtggcatgcacctgtagtctcagcttcttgggagactgaggcaggaggattgctcgagcctaggagtttgaggctgtagtgtactatgattgcacctgtgagtagtctctgtgaatagtcattgcacttcaacctgggcaaaataatgacacctgtctcttaagaaattgttatcaacctttgagaaaaagtataaattattatacagtcatattttaaaattayattaagaaggaaaatattttataactgatcttgcctaacttataatcataattgttgtatagtattgttgaaagtgattataaatagataatgaaacaatgtgtatcatttatctaacgcactataa

SEQ ID NO: 463049 - DNA, 654 bp, Homo sapiens
catcacactgtctttttgcatacataatttctaattataaatcagcactttaccttattaaggatttcctgtatgtgatgaactacttctctttagtggctttcaagattctctttttgtctttggatttcaacagtttaattytgatgtgtataggtgttaatctcttttgagtttattactaattgcagtctatctggcttctggaatgtgtattgtttttcatcaaatgtgagatgctttcagctattatttttggaattttttttctcttttctctctttccttatgggaaacacactatatgtacattggtacgtttgattgtatcctgcagttctctgagaatctgttccattttcttcattctttttttttttttcctcttcctctgactggataaaatctaacaataaatcaaattttcaagtttgctgatttttttattctgccatctcaaatttctaggcttgatttaagcactgttagtgcagtaaatagctttttgttttgttttgttttctttcttgagcaggcttaatctaacgttaagggcctttttatttttcattttcttttgagtttgcactagatgctttcagcattgtataaagtctcttctctctggtttaccaaaatttaactgttttctat

SEQ ID NO: 463050 - DNA, 654 bp, Homo sapiens
catcacactgtctttttgcatacataatttctaattataaatcagcactttaccttattaaggatttcctgtatgtgatgaactacttctctttagtggctttcaagattctctttttgtctttggatttcaacagtttaattttgatgtgtataggtgttaatctcttttgagtttattactaattgcagtctatctggcttctggaatgtgtattgtttttcatcaaatgtgagatgctttcagctattatttttggaattttttttctcttttctctctttccttatgggaaacacactatatgtacattggtacgtttgattgtatcctgcagttctctgagaatctgttccattttcttcattctttttttttttttcctcttcctctgactggataaaatctaacaataaatcaaattttcaagtttgctgakttttttattctgccatctcaaatttctaggcttgatttaagcactgttagtgcagtaaatagctttttgttttgttttgttttctttcttgagcaggcttaatctaacgttaagggcctttttatttttcattttcttttgagtttgcactagatgctttcagcattgtataaagtctcttctctctggtttaccaaaatttaactgttttctat

SEQ ID NO: 463051 - DNA, 529 bp, Homo sapiens
gttatttcatgtgtttttgttttgtctgaccaacacacctaaatataactcacctcctggtaagggttctcctagagagtgattatcttgttagaaataaactgaacaaaggtcagacaagagccaaagctgtctgtcagcataaataagattcctatgagaggaacacctggtcacagcttgaacacataggcattaggctgtccaccaaaataaagaaggatcttatgaaagacacactatarcatccaaaaacatcacccctggaagcccatcagagaagaatcagcatttatagccactctccgaagagagtcctcaagatgaaattagacgaaaatcacaacatgaattcaggaagatgcagcatacaaatcaacctacaaaaatcagtagctttttaaatacactaataacgaactacctaaaaaaatcacgaaaaaatttcattcataatcgctacaaaaattacttaggaatatatttaacaaaagagattaaagacctgtatgctcaaaactataaaaca

SEQ ID NO: 463052 - DNA, 654 bp, Homo sapiens
catcacactgtctttttgcatacataatttctaattataaatcagcactttaccttattaaggatttcctgtatgtgatgaactacttctctttagtggctttcaagattctctttttgtctttggatttcaacagtttaattttgatgtgtataggtgttaatctcttttgagtttattactaattgcagtctatctggcttctggaatgtgtattgtttttcatcaaatgtgagatgctttcagctattatttttggaattttttttctcttttctctctttccttatgggaaacacactatatgtacattggtacgtttgattgtatcctgcagttctctgagaatctgttccattttcttcattctttttttttttttcctcttcctctgactggataaaatctaacaataaatcaaattttcaagtttgctgatttttttattctgccatctcaaatytctaggcttgatttaagcactgttagtgcagtaaatagctttttgttttgttttgttttctttcttgagcaggcttaatctaacgttaagggcctttttatttttcattttcttttgagtttgcactagatgctttcagcattgtataaagtctcttctctctggtttaccaaaatttaactgttttctat

SEQ ID NO: 463053 - DNA, 529 bp, Homo sapiens
gttatttcatgtgtttttgttttgtctgaccaacacacctaaatataactcacctcctggtaagggttctcctagagagtgattatcttgttagaaataaactgaacaaaggtcagacaagagccaaagctgtctgtcagcataaataagattcctatgagaggaacacctggtcacagcttgaacacataggcattaggctgtccaccaaaataaagaaggatcttatgaaagacacactatagcatccaaaaacatcacccctggaagcccatcagrgaagaatcagcatttatagccactctccgaagagagtcctcaagatgaaattagacgaaaatcacaacatgaattcaggaagatgcagcatacaaatcaacctacaaaaatcagtagctttttaaatacactaataacgaactacctaaaaaaatcacgaaaaaatttcattcataatcgctacaaaaattacttaggaatatatttaacaaaagagattaaagacctgtatgctcaaaactataaaaca

SEQ ID NO: 463054 - DNA, 529 bp, Homo sapiens
gttatttcatgtgtttttgttttgtctgaccaacacacctaaatataactcacctcctggtaagggttctcctagagagtgattatcttgttagaaataaactgaacaaaggtcagacaagagccaaagctgtctgtcagcataaataagattcctatgagaggaacacctggtcacagcttgaacacataggcattaggctgtccaccaaaataaagaaggatcttatgaaagacacactatagcatccaaaaacatcacccctggaagcccatcagagaagaatcagcatttatagccactctccgaagagagtcctcaagatgaaattagacgaaaatcacaacatgaattcaggaagatgcagcatacaaatcaacctacaaaaatcagtagctttttaaatacactaataacgaactacctwaaaaaatcacgaaaaaatttcattcataatcgctacaaaaattacttaggaatatatttaacaaaagagattaaagacctgtatgctcaaaactataaaaca

SEQ ID NO: 463055 - DNA, 579 bp, Homo sapiens
tctgataaaactaaacaaactctagaagtcacatatagcataacactaattttaggtctttctctgttgtgaatgacatacaaaaataatgtatccttttccaaaatttattccagataacatgtcatatatttttcaataaataaataaatctttcagaaagttcttagaataaacaactattctatttttcagtaaaagttttcaggaatagtaaaattaatttgatgaaggcagtgtaatagtaagagttatgttaatgtagacatgtatgtggatatgaatggttttagttcttactatgtttttaaagcagataatacgggccaaaamaaaatctgtttgtaatcgatgcctttgtctatacttatgaaatcactgaatgactggaaaatctctaccacaatttggtactcttgtcacttttgtacattaatgttatccatgccttaatactatccagaccattataccctttgtattgtatccagaatcagagaggcagctacaatatctctctgtgtgtgtgtgtgtgtgtgtgtgtgtgtgtgtgtgtgtttcatgcccatagggaagata

SEQ ID NO: 463056 - DNA, 579 bp, Homo sapiens
tctgataaaactaaacaaactctagaagtcacatatagcataacactaattttaggtctttctctgttgtgaatgacatacaaaaataatgtatccttttccaaaatttattccagataacatgtcatatatttttcaataaataaataaatctttcagaaagttcttagaataaacaactattctatttttcagtaaaagttttcaggaatagtaaaattaatttgatgaaggcagtgtaatagtaagagttatgttaatgtagacatgtatgtggatatgaatggttttagttcttactatgtttttaaagcagataatacgggccaaaacaaaatctgtttgtaatcgatgcctttgtctatacttatgaaatcactgaatgactggaaaatctctaccacaatttggtactcttgtcacttttgtacattaatgttatccatgccttaatactatccagaccattataccctttgtattgtatccagaatcagagaggcagctacaatatctstctgtgtgtgtgtgtgtgtgtgtgtgtgtgtgtgtgtgtgtttcatgcccatagggaagata

SEQ ID NO: 463057 - DNA, 579 bp, Homo sapiens
tctgataaaactaaacaaactctagaagtcacatatagcataacactaattttaggtctttctctgttgtgaatgacatacaaaaataatgtatccttttccaaaatttattccagataacatgtcatatatttttcaataaataaataaatctttcagaaagttcttagaataaacaactattctatttttcagtaaaagttttcaggaatagtaaaattaatttgatgaaggcagtgtaatagtaagagttatgttaatgtagacatgtatgtggatatgaatggttttagttcttactatgtttttaaagcagataatacgggccaaaacaaaatctgtttgtaatcgatgcctttgtctatacttatgaaatcactgaatgactggaaaatctctaccacaatttggtactcttgtcacttttgtacattaatgttatccatgccttaatactatccagaccattataccctttgtattgtatccagaatcagagaggcagctacaatatctctstgtgtgtgtgtgtgtgtgtgtgtgtgtgtgtgtgtgtgtttcatgcccatagggaagata

SEQ ID NO: 463058 - DNA, 620 bp, Homo sapiens
acaaactgaatactttccaaatattttatttaatttagtaattaatgagagaaccagaaatatgttacaacaggttcaaaagtaaattcatagaaccacatatagatagaaaattaagaaatgttgaaatcaatttacaaataggtgtaaaatgggagtatccaccggcaaaaaccatttgtatttcatggaacataatgaatttgcacttctgtgaacaagratcatttgcactaataatcaagtttccacattttacaagttttaaaaatacctcaaagacaatgaaaggcttagataactaggaatgatgtgctggttaagacaccataatctttttagataatttcagtcttttatagtttgtccttaaagtatcttccttccctcttttgatcataaatctcaaatataactcttgagcccccaaagtttcaatactagggacataacattcattttagtccataagttttcacaaggaatatattattgaacttttaaaagccatatttgatatctccaggctagaaaaccaagttgaagaactactctgtaacatttcatctgcaatacatataaatttatatgtgttcttctctttttgaagcccgctccca

SEQ ID NO: 463059 - DNA, 588 bp, Homo sapiens
aacttagttcttttattaaggaggrtcacattttttattcttaaataatcaagcatataataaaatcaatataataaataaaacttattctagtaaaacacaaaatctgttatcgaggtagattatacaggtttaaaaagtttctttcaaattctagctaaagacattaattggtaaactaaggaaagaagcccatataattttatcaaactttgctaagattttaacatactgcataacttactttcagactcttgtaaactaaggcagacagattcactttccatattttgtccttcattatattcttttatagtccagaacaaactgccactttttttttttttttagattacaggaggtctttgtggtcaaaactaattttatactcgaacttatgttagttgtggaagagatctgaattaccctcagttactggaggcatatccatatgggtctgtagcaacttcagttcttgcctcttcagaagaaagagtttgaggaaaataaaacaggaaaagagaccaaggcaagtttcagagcaggagcagaagtttatttaaaaaggctttagaataggaaagaaag

SEQ ID NO: 463060 - DNA, 588 bp, Homo sapiens
aacttagttcttttattaaggagggtcacattttttattcttaaataatcaagcatataataaaatcaatataataaataaaacttattctagtaaaacacaaaatctgttatcgaggtagattatacaggtttaaaaagtttctttcaaattctagctaaagacattaattggtaaactaaggaaagaagcccatataattttatcaaactttgctaagattttaacatactgcataacttactttcagactcttgtaaactaaggcagacagattcactttccatattttgtccttcattatattcttttatagtccagaacaaactgccactttttttttttttttagattacaggaggtctttgtggtcaaaactaattttatactcgaacttatgttagttgtggaagagatctgaattaccctcagttactrgaggcatatccatatgggtctgtagcaacttcagttcttgcctcttcagaagaaagagtttgaggaaaataaaacaggaaaagagaccaaggcaagtttcagagcaggagcagaagtttatttaaaaaggctttagaataggaaagaaag

SEQ ID NO: 463061 - DNA, 588 bp, Homo sapiens
aacttagttcttttattaaggagggtcacattttttattcttaaataatcaagcatataataaaatcaatataataaataaaacttattctagtaaaacacaaaatctgttatcgaggtagattatacaggtttaaaaagtttctttcaaattctagctaaagacattaattggtaaactaaggaaagaagcccatataattttatcaaactttgctaagattttaacatactgcataacttactttcagactcttgtaaactaaggcagacagattcactttccatattttgtccttcattatattcttttatagtccagaacaaactgccactttttttttttttttagattacaggaggtctttgtggtcaaaactaattttatactcgaacttatgttagttgtggaagagatctgaattaccctcagttactggaggcatatccatatgggtctgtagcaacttcagttcttgcctcttcagaagaaagartttgaggaaaataaaacaggaaaagagaccaaggcaagtttcagagcaggagcagaagtttatttaaaaaggctttagaataggaaagaaag

SEQ ID NO: 463062 - DNA, 522 bp, Homo sapiens
ttaaaaaggctttagaataggaaagaaaggaaagaaccgttggaaggtattcaagtgggtgactgaaggtcaaagagagaaaaataagggcctttaaccttgatcctgggactttatcactcacctctttcccacgattcttccctgagggtgggttttctgcatgtgcagtgccctcctcaccctttggaattgagcaagtgcagcgtgtttagggatttatatgcatgtgcatctgaggcttccttcctttttccagtggagtgtacctagaagatcatacttcaccaatttcgtctcttaacgtgcatgcccaggaagttgcttctctttgggaacctgctttaattaaaactttaatgataacagatgtagrccatcaagagctgtcgtctcccaggtgctgactgccaatttatcacttttagagaagcaatgtggtaattgccaaaccatcacccaacatttctcgtgtgtggggagagagccctctcttgctccactcatgcctgtctacccata

SEQ ID NO: 463063 - DNA, 616 bp, Homo sapiens
cgtctcccaggtgctgactgccaatttatcacttttagagaagcaatgtggtaattgccaaaccatcacccaacatttctcgtgtgtggggagagagccctctcttgctccactcatgcctgtctacccataacattgaagtgttatttctgctatcatgtgatgtgttcattactgttaccttaaaatgaaccaataaacgttttaagatttcttatttctattttcaacataataaacataaacacttatagcccacacattttaaagctcctaaaatactmaacaaattttaagagtgtaaaagagtcaagctacaataaatttgcaaatagatgcaaaatgggcttatctgcacggcaatagttaattcagttttactgataaaattattcatatttctatgggaaagaatcatttgcaatgttatcagtgcctacacttacggagttgtggaatatctcaaaaataatgaaagaatgagatagcctggaagagtgacttagagaaaactgtcatgatcttttcggtcagtttaaagtctttcacaattttaattttcctacacctccaatgtatcattgggcagagtacctatttctaatgaaacagttat

SEQ ID NO: 463064 - DNA, 545 bp, Homo sapiens
aaaaccacaaaagtaggaaaaatattaatacctaatgttgggtaagtgttgatgaaaattgaaagtactatctttgtaaaaaagaattcatcaaatcccttagaaatacgcttattctctggcaaagcaattacaggatggtaggctcagttataaggcagaaagtgaaatgacaatattgtagrcatttttacgtgaggttagtctcctgaatccatgaaagaacttgcgaagtagaacagttcttgtactcaacacagactactatgtgaggacaaaaacaatattcagtgttctttgagcaactgaattgcttgctatgtgttttacaatggattggacttctgctcaaaatatcataagatggacatcattgcctgaattagtatgtgagagaatttgaaaatctaagaaagatagcaaatattaagtgatagttatatggggaaattgattggaaataaacaacatatgaatttcagtattctaaaccattctgataattttttcagcattctactaggttttgcacactggtaggttaa

SEQ ID NO: 463065 - DNA, 545 bp, Homo sapiens
aaaaccacaaaagtaggaaaaatattaatacctaatgttgggtaagtgttgatgaaaattgaaagtactatctttgtaaaaaagaattcatcaaatcccttagaaatacgcttattctctggcaaagcaattacaggatggtaggctcagttataaggcagaaagtgaaatgacaatattgtagacatttttaygtgaggttagtctcctgaatccatgaaagaacttgcgaagtagaacagttcttgtactcaacacagactactatgtgaggacaaaaacaatattcagtgttctttgagcaactgaattgcttgctatgtgttttacaatggattggacttctgctcaaaatatcataagatggacatcattgcctgaattagtatgtgagagaatttgaaaatctaagaaagatagcaaatattaagtgatagttatatggggaaattgattggaaataaacaacatatgaatttcagtattctaaaccattctgataattttttcagcattctactaggttttgcacactggtaggttaa

SEQ ID NO: 463066 - DNA, 577 bp, Homo sapiens
tttactgtaattactttcatgctgtgtgaaaaattactttgcatcaagcaaacatgtagatatattacaattatcaaaaaagattcagtaagtgaaaactacttaccaaaaataatattttcttagtttctcctcttatgaagctttatctttgctatccatrgctggcttccagtgcttttttttttctgtagtattcacttaaatgtatatctctcatgaggatcaggtaatggttcttcaaaagtccccatgaggtctttcacactgcaagtccctgacatgagcacaatctatgttctccatctgtcctcctgaaattctttttcagcctgactcctctcatctctctagggctcaagcctggctaatgtctgctgtattcacccggtcatgctaaaaaggaacagtgcatgctttctccattgtcctttcttctcaaccagacattggtagcagttctgtattgtttccaaactttagaaccctccaggtgaaaagcgcacaccagtttttatgtttatatatagagtcatgccccgttaatgattacaatacattctgagaaatgcatagt

SEQ ID NO: 463067 - DNA, 610 bp, Homo sapiens
gcatagttaaacaattcccttgtgtgaacattatagagtgtacataaatatacgtagatgatatatgtgttcatatatacactttttcatatggaaaatcaaatgtactagcaccattactagcaataatttccactgcttaatcttcaatgccaatatcaagtgctatatatcagttttttatatatgctccattagaatgttatatgaccattaccataatatgccatctgtcactggcttaaacatcattatgcatctataactttatctccaaattccagaattcaaatagcaaactcttgcaaacactctattatcatgccctatttytgtggccacaccaggcggggacaatgagatttcagataaaatactctctttgtcttctgcattccttcaatttctcaacaactagcctttgaaaggaccattttttccttcctccatgaggaaagctggaaaaattctacagtattccctataaaaacaaaaacacagtcatccttaattattttttcccaaatatctaatttttggcttacataggatggattagattatgaggtaaatgtcccataagaaattttactattctgttggaggacat

SEQ ID NO: 463068 - DNA, 508 bp, Homo sapiens
aaaattaatagttttgtactatttgattactaggtgaaggaaaatgattagatataatatacagtataaattgttatcataaatggtttaacattaaccaatacatcaaacaattgttgcgtagtgatatggtttagttctatgtgcccactcaaatctcatctccagttgtaatcctcatgagttgaggaagggacctggtgggaaatgattggatcatgctgttaccatgatagtgatggaattctcamaagatctgatggtttaaaagtggcagtttcctctgctctttttctcttctgctgccatgaaagatatgccttgctttccctttgcttctgccatgattgtaagttttgtgaaacttccccagccattttgaattgtgagtcaataaaacctcctttctttataaattacctagtctcaggtagcatctttataaagtgtgaaaatggactaatacaggaaattgatactgagagtggggcactgctataaagataac

SEQ ID NO: 463069 - DNA, 508 bp, Homo sapiens
aaaattaatagttttgtactatttgattactaggtgaaggaaaatgattagatataatatacagtataaattgttatcataaatggtttaacattaaccaatacatcaaacaattgttgcgtagtgatatggtttagttctatgtgcccactcaaatctcatctccagttgtaatcctcatgagttgaggaagggacctggtgggaaatgattggatcatgctgttaccatgatagtgatggaattctcaaaagatctgatggtttaaaagtggcagtttcctctgctctttttctcttctgctgccatgaaagatatgccttgctttccctttgcttctgccatgattgtaagttttgtgaaacttccccagccattttgaattgtgagtcaataaaacctcctttctttataaattacctagtctcaggtagyatctttataaagtgtgaaaatggactaatacaggaaattgatactgagagtggggcactgctataaagataac

SEQ ID NO: 463070 - DNA, 503 bp, Homo sapiens
catgcctggaattgagaagctagtcttaatagtcctctgtagcttataaacatggaataatgaataaaaagtacgacatctaaactcttttgtgtttgctgaataaattgaaaattattttgtggcactgtcttctataatggttgatttagaatattcaagtggggaaatgtttgtgtatgttctgtatatttgtcttgtgcaaaaactgtataattaaaataaactctttggaatttgaacagaaaaaagaagaataaataaacaaatatgttgtgtaacaaccttcaggcatctgcggcaaaaagttgtggtaaaktacaatagtgataaaatgataaaaaagtcttaggaataaaatgataaataaaatgataaaaaagtcttaggaataaaacataacgactaatattttggcattgtgcatctgctacgtaagtcagtcatgaacgtttttagagggactgagttaatataaaattacaaccatgatatagtaaagt

SEQ ID NO: 463071 - DNA, 623 bp, Homo sapiens
atggggatggttttccccatggtgttctctctcctgatagtgagggagttctcacaagatctgatggtttaaaagtggcagtttcccctgttcccactccgtctcctgccagcacgtaagatgtgccttgcttccccttcaacttccaccatgattgcaagtttcctgaggcctccccagccatgcagaattgtgagtcaattaaacttccttcctttataaattacccagtctcaggcagtatctttatagcattgtgaaaacagacaaatacaagtactcattctatgccagatagtgttctaggaagatagaacagaaaaacaaacagaaagcaacatstttctcagataaatacatcttttctaacatggatggtgggggcagaagaaaaaaaaagtacataacgtggtactaattcaggaaacagggaagaagtatcagagaggggactggaagatatttgatttgttttgttttgtttcttttattttgttttgtattttctttggaatgctcaggaaagtcttaattgttaagattaaatttatgcaggggccttgaaatatggtaatgaataatacagacatatagaagaataatagacacaagggatatcaaat

SEQ ID NO: 463072 - DNA, 620 bp, Homo sapiens
taagttcaactatgtgtgacaaatggtgctgtcaagtcctcttatttgaggactagttattgtttatcttgaaaatgtgtgtaatgggttgtatatgcttgacaatataaatgataagatttctgtttttgcattctcttagaggattgcctgtgatgtgtatcacaaacattctggtttaatagttattcaataataaaactatttttcctactacctagatagggaggtttactgggctgagagaagatttaatttctaattatatttcctcatcaacatcaatattgacatcatggaaaatcataacactgagccatggtcctagtcttccaggaatgaaaagtgacctaggagtctgtaggtgagttcaaccaaaaagtaggaaagaatgcaaatgtgagctgaagttcaaaggcatattgcacaaatgtatagcaaagcctacatgtgacagcaagacgggcatttcyatggtcattatatcagaatatttagaattcactggctatatctttgactgcatagcttaattcagttagaaatgcagagctgcatgttaagaaataatgagtcaaaaagattttgttatattacaaattaaatatcaataaaacaac

SEQ ID NO: 463073 - DNA, 620 bp, Homo sapiens
taagttcaactatgtgtgacaaatggtgctgtcaagtcctcttatttgaggactagttattgtttatcttgaaaatgtgtgtaatgggttgtatatgcttgacaatataaatgataagatttctgtttttgcattctcttagaggattgcctgtgatgtgtatcacaaacattctggtttaatagttattcaataataaaactatttttcctactacctagatagggaggtttactgggctgagagaagatttaatttctaattatatttcctcatcaacatcaatattgacatcatggaaaatcataacactgagccatggtcctagtcttccaggaatgaaaagtgacctaggagtctgtaggtgagttcaaccaaaaagtaggaaagaatgcaaatgtgagctgaagttcaaaggcatattgcacaaatgtatagcaaagcctacatgtgacagcaagacgggcatttctrtggtcattatatcagaatatttagaattcactggctatatctttgactgcatagcttaattcagttagaaatgcagagctgcatgttaagaaataatgagtcaaaaagattttgttatattacaaattaaatatcaataaaacaac

SEQ ID NO: 463074 - DNA, 566 bp, Homo sapiens
gttgtacagacaatttgtgcagtaagttcagaaaaataagaggccacaaatgaaatgagttggaaagaattttttgaattaatatrtatggagtattctgtgtatcaaatcaaaaggatcatgtctaaactagctatcaagtagcacctacgatgggatatacaccccatgggggctcaataagtgctaattatcataatatcaaagggtaagaggcacctcatctaatccagccctcaggcatcaagcttaaaccatcctagatagaagagagactgtctgagtttgaaaccgttttttgagaaatcaatttatgattatttttgttttaaaactttccttgttttaaaatctaatccaattttcaatgcatttaattttataatatctgtagaccatcaaataataaaggttagataaaataacattttctaattatttctctttgatgaatttcttctttttcttatgcaatcagtatcagaattaaatctagacactgtgctcaaataaagcccaattatttattcagctgttcatttattcacttattccatatgtatttt

SEQ ID NO: 463075 - DNA, 566 bp, Homo sapiens
gttgtacagacaatttgtgcagtaagttcagaaaaataagaggccacaaatgaaatgagttggaaagaattttttgaattaatatatatggagtattctgtgtatcaaatcaaaaggatcatgtctaaactagctatcaagtagcacctacratgggatatacaccccatgggggctcaataagtgctaattatcataatatcaaagggtaagaggcacctcatctaatccagccctcaggcatcaagcttaaaccatcctagatagaagagagactgtctgagtttgaaaccgttttttgagaaatcaatttatgattatttttgttttaaaactttccttgttttaaaatctaatccaattttcaatgcatttaattttataatatctgtagaccatcaaataataaaggttagataaaataacattttctaattatttctctttgatgaatttcttctttttcttatgcaatcagtatcagaattaaatctagacactgtgctcaaataaagcccaattatttattcagctgttcatttattcacttattccatatgtatttt

SEQ ID NO: 463076 - DNA, 566 bp, Homo sapiens
gttgtacagacaatttgtgcagtaagttcagaaaaataagaggccacaaatgaaatgagttggaaagaattttttgaattaatatatatggagtattctgtgtatcaaatcaaaaggatcatgtctaaactagctatcaagtagcacctacgatgggatatacaccccatgggggctcaataagtgctaattatcataatatcaaagggtaagaggcacctcatctaatccagccctcaggcatcaagcttaaaccatcctagatagaagagagmctgtctgagtttgaaaccgttttttgagaaatcaatttatgattatttttgttttaaaactttccttgttttaaaatctaatccaattttcaatgcatttaattttataatatctgtagaccatcaaataataaaggttagataaaataacattttctaattatttctctttgatgaatttcttctttttcttatgcaatcagtatcagaattaaatctagacactgtgctcaaataaagcccaattatttattcagctgttcatttattcacttattccatatgtatttt

SEQ ID NO: 463077 - DNA, 566 bp, Homo sapiens
gttgtacagacaatttgtgcagtaagttcagaaaaataagaggccacaaatgaaatgagttggaaagaattttttgaattaatatatatggagtattctgtgtatcaaatcaaaaggatcatgtctaaactagctatcaagtagcacctacgatgggatatacaccccatgggggctcaataagtgctaattatcataatatcaaagggtaagaggcacctcatctaatccagccctcaggcatcaagcttaaaccatcctagatagaagagagactgtctgagtttgaaaccgttttttgagaaatcaatttatgattatttttgttttaaaactttccttgttttaaaatctaatccaattttcaatgcatttaattttataatatctgtagaccatcaaataataaagkttagataaaataacattttctaattatttctctttgatgaatttcttctttttcttatgcaatcagtatcagaattaaatctagacactgtgctcaaataaagcccaattatttattcagctgttcatttattcacttattccatatgtatttt

SEQ ID NO: 463078 - DNA, 578 bp, Homo sapiens
  misc_feature (1)...(578): n = A,T,C or G
tttgtctgtgtttcttaacagtctgtaattacttcctgtacatattgcatgtctgtggtactgtagtttgttgctgtaacatttacctttggtctcagcagactcaagctgttatttcaaagtataccatcatttctttcagcacattttgtcattggagacagaaacaagtctctgtaaaagtgcccagaagccagaagtaaaaatacacgagccagttttttctttttctatattgaggaagatgccaggcattgcagtttacttctaaaagtgccatgctgcattatggaggagtaaaggtgttgggcaaatgtaacaarcttttctatccattcagtatggcttgtggcattttgctcacctggtacactgaacacacttaactcatttctagattttccataaagacattttggtcagtacagttttgttataagtctataaaagaattaagacctgtggtatttttgttatgccatgttgctaatgtactttgtataattttatgtattagatttgtaaacaatattaggttanttttacatgggcctattgtgataatgtgttatttttat

SEQ ID NO: 463079 - DNA, 464 bp, Homo sapiens
aagtttgaatgcatctaaggtgcaggaaggaggttataatgaacttaaccaatgtttgtcgattactcagagcaaaatacttcaatgtaatacatgtgtgaaagtcttaaggaaattttcaaattcaaatagacttaggagaagacatactggagagaaacctttcaaatgtaaagaatgtggccaattctttcacaggttctcacacctaagacaacatcagataattcatactgaagagaaaccctacyaatgtgaagaatatggcaaagattttaagcagtcttcaggtcttactatacatgggagaattcatactaaagagagaccctacaagtgtgaagaatgtgacaaagcctttaaacaatcttcaagactgaataaacataagaaaatttatactggagatacaacctacaaatgtgaagaaatagtcttcaaacctgactatacataagattatt

SEQ ID NO: 463080 - DNA, 464 bp, Homo sapiens
aagtttgaatgcatctaaggtgcaggaaggaggttataatgaacttaaccaatgtttgtcgattactcagagcaaaatacttcaatgtaatacatgtgtgaaagtcttaaggaaattttcaaattcaaatagacttaggagaagacatactggagagaaacctttcaaatgtaaagaatgtggccaattctttcacaggttctcacacctaagacaacatcagataattcatactgaagagaaaccctaccaatgtgaagaatatggcaaagattttaagcagtcttcaggtcttactatacatgggagaattcatactaaagagagaccctacaagtgtgaagaatgtgacaaakcctttaaacaatcttcaagactgaataaacataagaaaatttatactggagatacaacctacaaatgtgaagaaatagtcttcaaacctgactatacataagattatt

SEQ ID NO: 463081 - DNA, 568 bp, Homo sapiens
  misc_feature (1)...(568): n = A,T,C or G
aataataagaaatccactaaaaaactaccaaaactaagtaacaaggtaagtaatgttgcgggatacacgatcaatatacaaaaatcaggcaaagatcattattggccactaagaccagagaagagacacccagacattaagggcctnctgatggaagaaacataatgcatctatgaaattttcttgcaaaaaaaaaaaataccatgaagcagctcaagcctctggatctaacagtttgcaggaaataaagagaatgaagaaatgtgttaaacaacaccatgaggatacaactggaaaaatcaagaatgtaggaatctacagaccaaacaacccagtttcttcagtataaaattgcaagaaaagaaaaatgaaaaaggagaaagtgggacctatagattaaagaatttyaggggccaggtggctccctcctgtaatcccagcactttgggaggccaagatgggaggattactggagcccaggagtttgagactagcctgggcaacatagcaagacaccatctctacaaataataaaaaaaaaaaattagccaggcatggtggcgcatgg

SEQ ID NO: 463082 - DNA, 433 bp, Homo sapiens
acccagatcattcaggatactctcctgacccccaaattctcaaccatgtctgccaagttatttttgacatattcataagtaatgatcatagattccaratattaggacaatgatgtctttagtgggtgtattattcattccacaaacaaccctcatcatccacacaatggtcttcccctaaggtagaataaaaatatcacaaggcagatttacgaggcgatcgacctagaaaaaacctgagaatctaggactgtctgatgtgtggatgtcaaatcctgggagattctgagtctctgctctatgtggactctatgttgtgtagccatttgtggaaggcttctgtgattttgtgacctagagaaaatgaatctctgctaaaatcaaatctaagaaagattggcaaagggaatttaaagatttcctaaatttttgg

SEQ ID NO: 463083 - DNA, 537 bp, Homo sapiens
ttgtaacaagtagatttctctgaattcttgaatttgaaaacaattggggttcctaaacagagaatatggaatattattggggatgatgtctttaataatacatytcaagataggagaaactttttctatatagttgactttaataaaagcctagggcaaaactttcaatatattaacagtatttatgaggcagttaagaatttgggtcatctctgtctccactaaaaatacaaaaagttagccaggtgtggtggcgggtgcctgtagtccctgctacttgggaggctgaggcaggaaaatggtgtgaacccggtaggtggaggttgcagtgagccgagatcatgccactgcactttagcctgggcaacagagcgagactgcgtatcaaaaaaaaaaaaaaaaaagaatttgggtcatctcaattaaacatagaatttaagattacattgaaaattcagtacagagtattttgccttcatctgttgtttgagtctcccttctttcagccatccttccatcagaaatagaataccaagt

SEQ ID NO: 463084 - DNA, 537 bp, Homo sapiens
ttgtaacaagtagatttctctgaattcttgaatttgaaaacaattggggttcctaaacagagaatatggaatattattggggatgatgtctttaataatacatctcaagataggagaaactttttctatatagttgactttaataaaagcctagggcaaaactttcaatatattaacagtatttatgaggcagttaagaatttgggtcatctcygtctccactaaaaatacaaaaagttagccaggtgtggtggcgggtgcctgtagtccctgctacttgggaggctgaggcaggaaaatggtgtgaacccggtaggtggaggttgcagtgagccgagatcatgccactgcactttagcctgggcaacagagcgagactgcgtatcaaaaaaaaaaaaaaaaaagaatttgggtcatctcaattaaacatagaatttaagattacattgaaaattcagtacagagtattttgccttcatctgttgtttgagtctcccttctttcagccatccttccatcagaaatagaataccaagt

SEQ ID NO: 463085 - DNA, 537 bp, Homo sapiens
ttgtaacaagtagatttctctgaattcttgaatttgaaaacaattggggttcctaaacagagaatatggaatattattggggatgatgtctttaataatacatctcaagataggagaaactttttctatatagttgactttaataaaagcctagggcaaaactttcaatatattaacagtatttatgaggcagttaagaatttgggtcatctctgtctccactaaaaatacaaaaagttagccaggtgtggyggcgggtgcctgtagtccctgctacttgggaggctgaggcaggaaaatggtgtgaacccggtaggtggaggttgcagtgagccgagatcatgccactgcactttagcctgggcaacagagcgagactgcgtatcaaaaaaaaaaaaaaaaaagaatttgggtcatctcaattaaacatagaatttaagattacattgaaaattcagtacagagtattttgccttcatctgttgtttgagtctcccttctttcagccatccttccatcagaaatagaataccaagt

SEQ ID NO: 463086 - DNA, 591 bp, Homo sapiens
tgctctgggtattttgtggctttgatctctccctgctgacatgcatgtttacacttacagattgtgcaaccagattctatttacaccagcagcctctcacataaycatagcaggtcactggaaaagatctggaaagctcaaagggtacactctgaaggaagggctttaagatttctatgctgacatctcacagatcagaaaatgtctcctatgggttttctgtacattctcaatccaaaatctggctctctcctgtgaatcccagggagagctcagctcttatgtacagattacaggtaagatcaacctgactcttcattctttggtgttacagcaaggagagtaaaaaaaaaaagtttccatcataaagtctgctctagcacatgatatgtcagcctaaaaagaaaaggctaaggcaacactcatttaactagagagtttatttgggccaagactgaggattgaactctgggagcatagattcaagttgccttgaatgtacactttaattagcagcagttacaagtggatttacaaaggcaaaagagagggacagggagtggactgaaacaaagttgtttgtcagaaatt

SEQ ID NO: 463087 - DNA, 531 bp, Homo sapiens
gaggatattatgttaagcaaaataagccaggaatagaaatttcaacaccacatgttctcactcacgcagaagctaaagaaaagttgatctcatagaagtaaaaagtagaacagaggatactgcaggctgaaaagggtagggagaaaggaggaatggtaagagatttgttaatggatacaaaattacagctaggtaggagtaataagttctagtgttctatagtactgtagatgactatagttaacaatactatattatgtagtttaaaatacctaggagtagtttgaatgttcccaacacaaagaaataataaatgtttgagatgatagatatgctaattaccctgatctgatcaccatctacatgtactgaaacatccccrtatagccatgaatatgtataatctttgtcaatttaaaaagtaaaaaaaaaaattaatcttggagaatgcatttgaagaacttgtactcaagaaatcaacttaagaacctgactctacttggaatttgtgtattctagaccagtacttct

SEQ ID NO: 463088 - DNA, 589 bp, Homo sapiens
tgctcccaggtgatactgatgctgcttatttttgcccagatttttagtcacaaggttctaaattatcgttttgaagtcctacatgagtaatcacttggrgagctcaattaacacccagcaacagactaattattaataaaccagaatcttcagtattaggcttcaatcattggcaattttttttttttgacacacagtctcccactgtcgcccaggctgaagtcctgaggccagaatgagactaggacatggttcctttgcctaagtaaactgaggcagaaaatggaatacttcagacttcaaattagtatggtaagtcctatgaagagtatgattagagttcattatttacccagaaaagggtcactcagcccagcctgggagttagagaaggtttcctgaagtcttgacatgtgagtcgtgaaaggacataaggagttaaccacgtgacaaaataagctaagagaattctcaacaaaagacaaaatattggcaaaggcttttaggcatatactagcttagtattattgggagaatgtaatgattttctgtatttcaaaagtgtaaaatacaaagtgggccatgatat

SEQ ID NO: 463089 - DNA, 589 bp, Homo sapiens
tgctcccaggtgatactgatgctgcttatttttgcccagatttttagtcacaaggttctaaattatcgttttgaagtcctacatgagtaatcacttggggagctcaattaacacccagcaacagactaattattaataaaccagaatcttcagtattaggcttcaatcattggcaattttttttttttgacacacagtctcccactgtcgcccaggctgaagtcctgaggccagaatgagactaggacatggttcctttgcctaagtaaactgaggcagaaaatggaatacttcagacttcaaattagtatggtaagtsctatgaagagtatgattagagttcattatttacccagaaaagggtcactcagcccagcctgggagttagagaaggtttcctgaagtcttgacatgtgagtcgtgaaaggacataaggagttaaccacgtgacaaaataagctaagagaattctcaacaaaagacaaaatattggcaaaggcttttaggcatatactagcttagtattattgggagaatgtaatgattttctgtatttcaaaagtgtaaaatacaaagtgggccatgatat

SEQ ID NO: 463090 - DNA, 578 bp, Homo sapiens
  misc_feature (1)...(578): n = A,T,C or G
tttgtctgtgtttcttaacagtctgtaattacttcctrtacatattgcatgtctgtggtactgtagtttgttgctgtaacatttacctttggtctcagcagactcaagctgttatttcaaagtataccatcatttctttcagcacattttgtcattggagacagaaacaagtctctgtaaaagtgcccagaagccagaagtaaaaatacacgagccagttttttctttttctatattgaggaagatgccaggcattgcagtttacttctaaaagtgccatgctgcattatggaggagtaaaggtgttgggcaaatgtaacaaacttttctatccattcagtatggcttgtggcattttgctcacctggtacactgaacacacttaactcatttctagattttccataaagacattttggtcagtacagttttgttataagtctataaaagaattaagacctgtggtatttttgttatgccatgttgctaatgtactttgtataattttatgtattagatttgtaaacaatattaggttanttttacatgggcctattgtgataatgtgttatttttat

SEQ ID NO: 463091 - DNA, 578 bp, Homo sapiens
  misc_feature (1)...(578): n = A,T,C or G
tttgtctgtgtttcttaacagtctgtaattacttcctgtacatattgcatgtctgtggtactgtagtttgttgctgtaacatttacctttggtctcagcagactcaagctgttatttcaaagtataccatcatttctttcagcacattttgtcaytggagacagaaacaagtctctgtaaaagtgcccagaagccagaagtaaaaatacacgagccagttttttctttttctatattgaggaagatgccaggcattgcagtttacttctaaaagtgccatgctgcattatggaggagtaaaggtgttgggcaaatgtaacaaacttttctatccattcagtatggcttgtggcattttgctcacctggtacactgaacacacttaactcatttctagattttccataaagacattttggtcagtacagttttgttataagtctataaaagaattaagacctgtggtatttttgttatgccatgttgctaatgtactttgtataattttatgtattagatttgtaaacaatattaggttanttttacatgggcctattgtgataatgtgttatttttat

SEQ ID NO: 463092 - DNA, 578 bp, Homo sapiens
  misc_feature (1)...(578): n = A,T,C or G
tttgtctgtgtttcttaacagtctgtaattacttcctgtacatattgcatgtctgtggtactgtagtttgttgctgtaacatttacctttggtctcagcagactcaagctgttatttcaaagtataccatcatttctttcagcacattttgtcattggagacagaaacaagtctctgtaaaagtgcccagaagccagaagtaaaaatacaygagccagttttttctttttctatattgaggaagatgccaggcattgcagtttacttctaaaagtgccatgctgcattatggaggagtaaaggtgttgggcaaatgtaacaaacttttctatccattcagtatggcttgtggcattttgctcacctggtacactgaacacacttaactcatttctagattttccataaagacattttggtcagtacagttttgttataagtctataaaagaattaagacctgtggtatttttgttatgccatgttgctaatgtactttgtataattttatgtattagatttgtaaacaatattaggttanttttacatgggcctattgtgataatgtgttatttttat

SEQ ID NO: 463093 - DNA, 441 bp, Homo sapiens
aatagttaatacaaaagccctattttaggagtgttcctggtatgttcaaggaagctatattaattatatattgctatgtaacaagttaccctaacacatagtagcctaagacaaaattatttattataccatcatacctgtaggtcaataatataggtataatttaactgggtagatttaaatctagatttgtatatttaaactaggcttcagagctccacatcctctttgtaagactatttactcctatcagccacagamctggatttaaaggaagctccagttccatgtgctgcagggaaacccaaggctgcaatccagccaggctatagacatctcaaggcttgacttggggaggatccacttctcagcttactcacacagctgctggcaggattgagttctcccagggtgttcacctgaagtcctcagttacttgct

SEQ ID NO: 463094 - DNA, 558 bp, Homo sapiens
acttaccagacacttggaggcatttcagtgtgagagacaggtagttggcaccattaaaaatatttcacatttctagatgtatcccatttagtttagtttagcaaaaaccagaaacacaagtgatccacttcattaaaaatattagccaaggcattttcytagcattgatgaaatgaaatattgtttgttctctgtaggaaaaacactcatgttaatcataacagatgtttgtataacattttacctgcattatctcatttaaaagttactgtaaccatatgatatatttatcattcttattttattttttaaaaatttttgatttttttatttctataggtttttgggaacaagtgatgtttggttacataaataagttctttagtggtgatttctgagattttggtgcacccatcacccgagcagtgtacactgtacccaatgtgtaatctcttatccctcatcatccccaaccctttctcttgagtccccaaagtccaatgtatcattcttaggcctttgcgtccacgttgcttagctcccacttatgagtaagaa

SEQ ID NO: 463095 - DNA, 601 bp, Homo sapiens
atgggagccaactaaaagagctcacaatggccaaaaatagaaaaaattgagcaacaaaataaatgagttggtattactggactacaaaaagtataaaataaatgtccatgagtctatactgacataaataaatgattgactaaaatataaatgggagagaatagagaaatctcccagtccaaattccaaaaacaatgtgtagatagagttgtccatcagtatctgtgggttctatatccgtgggttcagtctattgcaaatggagaaaaaaaataaaaataacaatacaataaaaataatgtgaataaaaaccaatatagtataacaactatttacataacatttacattttattaggtattgtaagtaatctagagatgatttaaagtgtacgggaggatatgtgtaggttatatgcaaatacaccatcttataataagggaattgagcatccatggattttgatatccaagacgggtgggtcctggaaccaatacctggagccaataccaatacctcatggaaaccaagggacaactgtactctgccctcaagkaagtggagcataaaacttcacatttcttaaatttgttctggacac

SEQ ID NO: 463096 - DNA, 474 bp, Homo sapiens
atgcttttacactgctggttggaatgtaaactagtacaaccactatggaaaacagtatggagattccttaaagaattaaaagtagaactaccttttgatttagcaatcccactacggggtatgtacccaaaggaaaagaagtcattrtatgaaaaagacacatgcccatgcatgtttgtagcagcacaattcacaattgcaaaaatatggaaccaacctaagtgcctgtcaaccaacgagtaaagaaaatgtgatatatgtattcacatatataacatatatatgagagacaaaacagtacatattgggtactgtgtacactactcaggtgacaggtacaccaaaattccagaaatcacctctaaagaacttatccatgtaaccaaaaaccacctgtacccccaaataatgaaaatagaggtccaagtaaaattgtaatgtagcttgtattattagatttagtgtctcaatctc

SEQ ID NO: 463097 - DNA, 515 bp, Homo sapiens
ttacataaaatatgtagacatttgtacttttaaaagcttaaaatcctgtcaacagccacatttacattatgcccctcycctccttttaagtcagaaactatagatccacctcagtttagttcatgatgtacaggttttcacagctaacaaataaacaaacaggaacacatactctaagtgcctaacaacatcccagcaatgttacaagattccaacaggtgcaatttactgcacaatgaaattgtgaaagttatcaaagatgaaagattttatttttataataatgaaagagagagcaaaatgggttatttaggtccctgtcttcatggagccttaactacagtttgaagtatgagtaattcaattaattggtccaaaataacactcaaaatgcatgttaaacttctttttctccaatccacattcacctcatccaccagtacaaactaacttccatcagagtatagtgatgaagagcgtggtctctggagccatatagacctcagttcaaatcc

SEQ ID NO: 463098 - DNA, 515 bp, Homo sapiens
ttacataaaatatgtagacatttgtacttttaaaagcttaaaatcctgtcaacagccacatttacattatgcccctcccctccttttaagtcagaaactatagatccacctcagtttagttcatgatgtacaggttttcacagctaacaaataaacaaacaggaacacatactctaagtgcctaacaacatcccagcaatgttacaagattccaacaggtgcaatttactgcacaatgaaattgtgaaagttatcaaagatgaaagattttatttttataataatgaaagagagagcaaaaygggttatttaggtccctgtcttcatggagccttaactacagtttgaagtatgagtaattcaattaattggtccaaaataacactcaaaatgcatgttaaacttctttttctccaatccacattcacctcatccaccagtacaaactaacttccatcagagtatagtgatgaagagcgtggtctctggagccatatagacctcagttcaaatcc

SEQ ID NO: 463099 - DNA, 599 bp, Homo sapiens
ctagggggtggggcagaccgccatctttgctgtttgggctacttagccattccagctttcagactttggagagtccccgatcccattcctccttattgttgggtgggacctcccaatcagggactctagccacccctggcagtgttctccacccaatagagatttgaagtctccctgggatataggtcccagagggaggggcaggccaccatctttgctgtttggktggcttagccattccagcctttgggctttggaaagtccaagccaaccgggggcagaagcggtaccccagcacagcacagctgctctacaaaaacatggccagactgcctttttaagcaggtcccctatctcgttcctcatcaccagttggggcctcccaactggggtctccagctacccccaccagtgttctctggcaaacagaagtttcaagactccttaggacagagctcccagagggaggggcaggctgccatctttgctgtttgggcaacttagctgttccagccttcaggctttggagagtccaggctgaccagggatggaggtgatcccccagtatagcacagctgcttttgaaaatgtggccagac

SEQ ID NO: 463100 - DNA, 575 bp, Homo sapiens
tctaaagtctgtattcactggggtggacctgttgatttgattggtggagatgggcctaaagcctaggtcaacaggggcttacctggtgctagggccagtcttgagtatgagtctacaggcgctagttgtgtgctgggatgggcctgacacttgggtctactgggaagggcctgcagcctaagcccatggaaacttgcctggtgctgggttgggcctggtgcctggaaccactgggtaaggcctggagcctgagttcatggggattggtctgctggagcttaggaccccagggcctggcctaaagcctggggccagcctggtcctggggccaatgtggtgcctgggtccatgaagcctggttggagcctaggatcacaggtgctggcctggtgcctggggccactggggctagcctggaccttgggaccatggggacctacctaaagcctgtgtctggtggtgttggcctgtakattgggtgtgcaggtgctggtctagatgctagatttttgagggctggcctgggtcttggggcattaggagccagtctggatcctggtacacaagggtagtcc

SEQ ID NO: 463101 - DNA, 621 bp, Homo sapiens
gtgtgggatgtacctaactgcatatatagtgcgggcacaaacactgttataacccatattagctgggccataaaagccgctagggctttagaggcccagtggggaagaaaataatccaggagagaacatggtcagggctgtggcactaaaccagtttagcaatcaatgccttcttaaggagcaagctagcagttagtgtccacagsactgtagcatgtttggacctagccagcatagatctacaagggggaggggtggcctaatgtgattagatagtatatggatgttcgttagtagaagtttccaagtaatggttatctctgtaggcagaaatatggtagcactgtgattctataaggtccatttgtttgagggcaaaaataaggagtatgtctctatcagcaaaagataatcagggattcagggattcaatatctagacccactaaagaaacaagagtgcaacgtggaaacagagacagtaatcccagttatgtacacgggctaaacataacaggaaatggtaaggaagttgaggttcataaagtacatggtaactaattctgagcttgtcctagacacactggtattaggtttaggacagataaaacaattcaaaatc

SEQ ID NO: 463102 - DNA, 512 bp, Homo sapiens
ttatacccagcacaattatcctttggaaatgaaaaagaaataaagttgttcccagacaagcaaaagctgagggaattcatcgccctagactggtcctacaagacatgcttaagggatactcagtataataacatgctgtataggtttttaaaagttaaaaaaaaaatggttaagggagtcctacacccagaagtgaaacaacaataactaccatcatgaagacaygtgaaaatataaaaaccactggtggagcaaacacacaaatcaagaaagagaaaaacctcaaatgttaccactacagaataccactaaactacaatgataaaaaataagagagaaataaaggaacaaaggatatacaaaacaaccagaaatcaagcaataaaatggtaggaataagctctcatatatcaataataaccttaaatgtgagtaaattaaattttccactttaaagacacacagtggctgaatggcttttaaaaatgactcaactatatactgcctacgag

SEQ ID NO: 463103 - DNA, 595 bp, Homo sapiens
ataattatttctaacacatcttacttctcattactctatatggagaacatggacaatgatttaacctttttctgacgattctcagtcaacatcacaaactgattatatccctcaatttctggcaccaagtaaatgtctgggaatatgattgaacaaaaacatcatttactgtacacactataaaagatgcctttacagtgcactaaggtatataaggctatttggtctttcaccaaatggacccagactacttttgctttttgttgagttggatttttgtcttttycttttttaagcagcttttcctcagccataggatattcatttatcctttattattatcagtgtacctgaactctttaaaattttctacctctcatctgctaaggattggaaatcagacaagcaagttcctcaagctgtgtctaaaactgggaaactgtctctgactgatagtctgggaatggtctcacaacatgatttgtagaaagctttattatagatctgtgtattttatgttcatgttggttttatcttggttttaggctatattctttttttaaacttttggggagcatttctaagcatagactat

SEQ ID NO: 463104 - DNA, 584 bp, Homo sapiens
atctgtacaatctgtacagactttggagttacaaagtcccgccacgggtgaggtctcattaaatcctacaactcttagaggtaggtagacaagtttcatytccatttcagaaaggccagtcaacacccaaatgtgagcttcaggacagcctgtaaaaattaaaaagcaaagcagcctcttttgcctccaagttccaacaacccccttcacattcagaatgtcctcaatgtatctgaggaatctcagatggtagcattcaccatttgtgcctcagttgttccagtctctaatgtggaccttcagtctcattgactctaatgctcctgtggcccctttccaaacctctcatctttgccatgctttctcattccagcaggaccttgttctcaggttgatctctccatctctacctgccaatatgtacatatgagatgtcacccggctctctctatatgtatatatttcagcagggttcttagcccctcattcaattgcaagatgatgtcaggccttctaccaagtcacttaaaaggaaactgcctgtccattgggtcagttgtcagtcaccacagtgagagctgtaa

SEQ ID NO: 463105 - DNA, 584 bp, Homo sapiens
atctgtacaatctgtacagactttggagttacaaagtcccgccacgggtgaggtctcattaaatcctacaactcttagaggtaggtagacaagtttcatttccrtttcagaaaggccagtcaacacccaaatgtgagcttcaggacagcctgtaaaaattaaaaagcaaagcagcctcttttgcctccaagttccaacaacccccttcacattcagaatgtcctcaatgtatctgaggaatctcagatggtagcattcaccatttgtgcctcagttgttccagtctctaatgtggaccttcagtctcattgactctaatgctcctgtggcccctttccaaacctctcatctttgccatgctttctcattccagcaggaccttgttctcaggttgatctctccatctctacctgccaatatgtacatatgagatgtcacccggctctctctatatgtatatatttcagcagggttcttagcccctcattcaattgcaagatgatgtcaggccttctaccaagtcacttaaaaggaaactgcctgtccattgggtcagttgtcagtcaccacagtgagagctgtaa

SEQ ID NO: 463106 - DNA, 412 bp, Homo sapiens
ctgctacatccaactctattttatctgagaatggctgagatggttcaggccaaactcatggtataattggtaatagatacccagaactttctctgtaagtttcctttgcgatttttttcttttgatgtagtttggggttaacaatagtgtatacttgtggattagtaattggataattaarcatgtaagtgtttcattttaacaagttcatctctcttgattcatcgattcagtttctagaaatctctcccaaggcatacatgcagacaaaggcttataaagaaagttatttatgataaggacaaacttagaaatgattgaaataccttatttacatagaagaatgagatatatataatacgcacatttagaaccatatgtgattatgaaaatatctgatatagcttaaatg

SEQ ID NO: 463107 - DNA, 412 bp, Homo sapiens
ctgctacatccaactctattttatctgagaatggctgagatggttcaggccaaactcatggtataattggtaatagatacccagaactttctctgtaagtttcctttgcgatttttttcttttgatgtagtttggggttaacaatagtgtatacttgtggattagtaattggataattaaacatgtaagtgtttcattttaacaagttcatctctcttgattcatcgattcagtttctagaaatctctcccaaggcatacatgcagacaaargcttataaagaaagttatttatgataaggacaaacttagaaatgattgaaataccttatttacatagaagaatgagatatatataatacgcacatttagaaccatatgtgattatgaaaatatctgatatagcttaaatg

SEQ ID NO: 463108 - DNA, 342 bp, Homo sapiens
attttttttttggaaaaagaaatrtgtgtatgcacatacagaaaaaagtctgggaggaaacagacccaactctttattgtgttactataagagagtttcagattggggaagaggggtgaagggatcatggagacattcagattttatgagcaggtatgtcttgctttataacaggaacaaaaaagacagaaatgcacaaggcctctgccatacagcaggagcatgtgcctgtgcagttaatgggcttctctgtttctgggcctgaggaccagacaggccacactaagtagaccatagggaccacttggtgaatttagggatgtttcccttgaatgaacagca

SEQ ID NO: 463109 - DNA, 342 bp, Homo sapiens
attttttttttggaaaaagaaatatgtgtatgcacatamagaaaaaagtctgggaggaaacagacccaactctttattgtgttactataagagagtttcagattggggaagaggggtgaagggatcatggagacattcagattttatgagcaggtatgtcttgctttataacaggaacaaaaaagacagaaatgcacaaggcctctgccatacagcaggagcatgtgcctgtgcagttaatgggcttctctgtttctgggcctgaggaccagacaggccacactaagtagaccatagggaccacttggtgaatttagggatgtttcccttgaatgaacagca

SEQ ID NO: 463110 - DNA, 466 bp, Homo sapiens
tgctatctagccatattgcaattagagcaaacataggatgcatcagctctgccaactcatgagtggtttctatgattgcatttctccttaaatttgtggatgttgtatcagcattcagactgtgtacrtcagtcatttaaatgcctctatgtgcgtgtatatgaatgttcataagaactaccatttactgagctgctacatctcttaaacctgcagtgttaggctcttacactatgctaagggattcatatatatatataattgctccatgtatattcacatcatattattcatatatatcgtttatatatatgaatatatacatatatagggcttcatatataggaatacatgaatatgtatgtatatacatatataggaagatatatatatatagcccttagcagagtataacagaccaacactatgggtttatatatggcatatacatatatattaatatgta

SEQ ID NO: 463111 - DNA, 469 bp, Homo sapiens
tgaggcctgtgggaaatgatgggggactgcagcacttgtatgctgtgatgtcggaagaataacagccagcggctcagcagcattaaggctttgtggactgttcctaggctttttccgtctctccttttttttttttttttttttttttgccacagttgacatctgtacgccccacgtcacgtgaggttagtgtctgagcagggactacaaggagccaacaatcctgacttctggtctacctttcccccaagtacccacagcctccctaatatccaaatcctcatgtaactttatgcaatgaaacatatcaaactttacayagcattgcccagcctgtgcacgttgaggtatttcaaagcaaaaagcattataaagtctttgtgaacctctccccacaagcatgtaaagctttgggaacaggccaggaaccacctgccttggcataccatagtgctgtgaccattgcaat

SEQ ID NO: 463112 - DNA, 469 bp, Homo sapiens
tgaggcctgtgggaaatgatgggggactgcagcacttgtatgctgtgatgtcggaagaataacagccagcggctcagcagcattaaggctttgtggactgttcctaggctttttccgtctctccttttttttttttttttttttttttgccacagttgacatctgtacgccccacgtcacgtgaggttagtgtctgagcagggactacaaggagccaacaatcctgacttctggtctacctttcccccaagtacccacagcctccctaatatccaaatcctcatgtaactttatgcaatgaaacatatcaaactttacatagcattgcccagcctgtgcacgttgaggtatttcaaagcaaaaagcattataaagtctttgtgaacctctccccacaagcatgtaaagctttgggaacaggccaggaaccacctgcyttggcataccatagtgctgtgaccattgcaat

SEQ ID NO: 463113 - DNA, 575 bp, Homo sapiens
ttccccattctaagttcataaaaaccttggactcagccttgcagccagcaaccctcttttgagtacccacttgatgctatgagctttctttatgttgctcaataaaattcagctctgacttattctccagtgtctgcgtacctcatttctcttggtcatgaaacaagaactcggaactcaacaaactgcaagagtggtaacgctctctcccacttgccaaactacaggagtgaagaagccacaaaaataacactttattgattatacttaaaaaaaaactcagctgtctttgttgatattaaataattcctgggctccaaaatcatttacaagtaataaagcaagccagaaacagtaaaatagcatggcgttcaaattsaacaaatctggactatatttgttacctttatgtgaagaacaaaagtggataaatgaagttgcccatgatcacacaaagaataaaattgtttcacgttacaaaaattaagaaaatttcagaaattagaggtaaaaacttctgtggaatacacggttgtgatggagagaggttcagaaaagaagggattgtttttgaa

SEQ ID NO: 463114 - DNA, 553 bp, Homo sapiens
aggggagtagagataaagaatggggcaatatataataagaatgaataaaactcaacagaatacattgtgtggaaagagtcaggttccctcactaaakacccacaaggtgggtgagattatttcctgctgttcttactcccaattttttccactctttctgtcttctcacaatagaggaggggatttcctgttgtggtaatagaatgggtttagagaataactgccagaaactaacaatttgtgaagaagagcaccaactacaaaacagaaagtacaaattatcttgccacttgacaaaccaggtccatccacccttaagaaatgtttctcctttttaaaaaacttttttagtaattaaaaaaatttattattattattatcttttaaacttttattttaggttcaggggaacatgtgcaggtttgttacatagataaatttgtgtcacagtttgttgtacagattatttcatcacccatgtgctaatcccagtacccagtaattattttttctgatcctctcccttctcatgcccttctccctcaggtaggcc

SEQ ID NO: 463115 - DNA, 553 bp, Homo sapiens
aggggagtagagataaagaatggggcaatatataataagaatgaataaaactcaacagaatacattgtgtggaaagagtcaggttccctcactaaagacccacaaggtgggtgagattatttcctgctgttcttactcccaattttttccactctttctgtcttctcacaatagaggaggggatttcctgttgtggtaatagaatgggtttagagaataactgccagaaactaacaatttgtgaagaagagcaccaactacaaaacagaaagtacaaattatcttgccacttgacaaaccaggtccatccacccttaagaaatgtttctcctttttaaaaaacttttttagtaattaaaaaaatttattattattattatcttttaarcttttattttaggttcaggggaacatgtgcaggtttgttacatagataaatttgtgtcacagtttgttgtacagattatttcatcacccatgtgctaatcccagtacccagtaattattttttctgatcctctcccttctcatgcccttctccctcaggtaggcc

SEQ ID NO: 463116 - DNA, 609 bp, Homo sapiens
ctcattaatgtgatttttctttcagattggggaattaacaccctttagcattttttgtaggataggtctgatgttgatgaagtctctcagcttttgtttgtctgggaaattctttatttctccttcatgtttgaaggatctttttgctggatatactattctacagtgtattagcccattttcatgctgctaataaagacatagctgagactgggcaatttacaaaagaacgagattacgagatttaatggacttaaaagttccacgtggttggggaagcctcacaatcatggtggaagatccccttcattcttttaaattattttaatctctttgctaaatttatctgatacgattttgaattccttctgtcatgttaaattttgttgaatttccacaaactaactattttaaattttctgtctgaaaagtcacatgtatctatctctctaggattagtccctaatgacttatttaggtttttttktgtgtgtgtgtgagtttctgtttttctggatggtgttgatgcttatgaatgtttgtcagtgtctgggtattgaaatgttaggtatctattataatccttgcagtcttaggttgtttgtaccc

SEQ ID NO: 463117 - DNA, 464 bp, Homo sapiens
tggctaagttggcacccaaaccataagacaaagtcttgcccattctttcttcctctttccacaagtagagtctctctctgaggccacaactacctttggcccatggtgaacactgcctagctatggctgatattcattcaargcccaaggggcttttaaatcagcttgtggtgaatgctgtgaggcctgggactctctctttaggcagtggtcttccctctggccgaggtaggtccagaaatgctgtccaagagccaaggcctggaatcagggaccccaagggccagctggtcaatcatggtgattgacttggtacctaggctccaagacaaagtctcctttactcttccttcaccttttctcaaactgaagaaatctctctctgtagccaccgagctgaaaatgtgctggatcacacctgaagccaccacatctctgactttcacccaaggctcacagtgagt

SEQ ID NO: 463118 - DNA, 464 bp, Homo sapiens
tggctaagttggcacccaaaccataagacaaagtcttgcccattctttcttcctctttccacaagtagagtctctctctgaggccacaactacctttggcccatggtgaacactgcctagctatggctgatattcattcaaggcccaaggggcttttaaatcagcttgtggtgaatgctgtgaggcctgggactctctctttargcagtggtcttccctctggccgaggtaggtccagaaatgctgtccaagagccaaggcctggaatcagggaccccaagggccagctggtcaatcatggtgattgacttggtacctaggctccaagacaaagtctcctttactcttccttcaccttttctcaaactgaagaaatctctctctgtagccaccgagctgaaaatgtgctggatcacacctgaagccaccacatctctgactttcacccaaggctcacagtgagt

SEQ ID NO: 463119 - DNA, 464 bp, Homo sapiens
tggctaagttggcacccaaaccataagacaaagtcttgcccattctttcttcctctttccacaagtagagtctctctctgaggccacaactacctttggcccatggtgaacactgcctagctatggctgatattcattcaaggcccaaggggcttttaaatcagcttgtggtgaatgctgtgaggcctgggactctctctttaggcagtggtcttccctctggccgargtaggtccagaaatgctgtccaagagccaaggcctggaatcagggaccccaagggccagctggtcaatcatggtgattgacttggtacctaggctccaagacaaagtctcctttactcttccttcaccttttctcaaactgaagaaatctctctctgtagccaccgagctgaaaatgtgctggatcacacctgaagccaccacatctctgactttcacccaaggctcacagtgagt

SEQ ID NO: 463120 - DNA, 464 bp, Homo sapiens
tggctaagttggcacccaaaccataagacaaagtcttgcccattctttcttcctctttccacaagtagagtctctctctgaggccacaactacctttggcccatggtgaacactgcctagctatggctgatattcattcaaggcccaaggggcttttaaatcagcttgtggtgaatgctgtgaggcctgggactctctctttaggcagtggtcttccctctggccgaggtaggtccagaaatgctgtccaagagccaaggcctggaatcagggaccccaagggccagctggtcaatcatggtgattgacttggtacctargctccaagacaaagtctcctttactcttccttcaccttttctcaaactgaagaaatctctctctgtagccaccgagctgaaaatgtgctggatcacacctgaagccaccacatctctgactttcacccaaggctcacagtgagt

SEQ ID NO: 463121 - DNA, 524 bp, Homo sapiens
atcttgctctgcctcatgatcccttacttataattttagtttaaaaatatgtttcaaaattaaaagaaataacattgaataatttcaaagttagaaaaatacaaaaaaaatttcctttttccatttttatttttgtctccttttaaattaggagtataaatcttaaagagaggagggtagatgaatattattctatctttctagaagcagatacaaaattctgaaccataatacttaaaagaaaagctatattaggccgggcgccgtggctcacgcctgtaatcccagcactttgggaggccgaggtgagtggattacctgaggtcaggagttcaagatcagactggccaacatgatgaaaccccgtctctactaaaaatacaaagattagctaggcatrgtggtgcacgcctataatctcagctactcggaaggctgaggcaggagaatcacttgaacccgggaggtggaggttgcagtgagctgagatcgcatcactgcactccagtttgggcgacagagca

SEQ ID NO: 463122 - DNA, 485 bp, Homo sapiens
cctttgcttatcatatcttacaaacatacttaaattggcgattcaagttacctctttcttcacagacttccagtgacttcttactacatgctaatccaaaaataaatgttagattgtgacctttaaatgtttactccaaattgtcatttctacctattatttaccatctaagtttatgaccctttgagcatagctccacaaatacatgtgcaatgcagaaattgtggctccaaaagtgtggcacagtcttaaataaatgagtgtagatgaacataatttggattattttttcaaattcccaccttattagcttaatagacttttataagcaaggaactccaagcataagaatttttaaaagctcaaaataagaatgaaattttttaaatagaatttattaaggctccttcagtgacttgaatatattcctcgctttacacytcatgtttggaggtgtaaaaaagtaaagtttttcaaaatattct

SEQ ID NO: 463123 - DNA, 598 bp, Homo sapiens
ccaatgaagtcgttatgcctataatgttgttatcatcactctgtgcctcaaagctggacttgtatattaaaagatggaaaatatttgaagaaagaaaagtcaagctaggacttagaactctggcgcaaaaattctatatcatcgagccctaactttaagccagtcagctgccagcttacaaagcacacatttgtgtcatgtttctatrgatcacacattttagagacaaaacttataagttcacctgaaagatacagatgtagagtttgataataaatatggaaaataaatgtttacttatatttgttttaaagtcagtgacaaatagttataaacttttacaaaacagaattgatccagattcaacccatatctgcagctttataaaagtttatattcgctgtttttattcactgattctaaatttgttcttccttgtgtatacttgaccaaatgcttgtgaatttcaagctgttcagatcaaataagcattgaaaagtaaataaaggcatttctaggactaaaaaggtgatatgatggatttgcacaccggcagagaatccatgaagaaaatgtattctcatcagaaaaaaccctc

SEQ ID NO: 463124 - DNA, 534 bp, Homo sapiens
cagtggttttcacatgatggtctgtttagcatagggctccttgggggccagtgaaggaagactgaagaggctgggctttgaggaccctactggytccatcacaggtcacagagcagacctgctttcatctgttctgtattttggaattctgcaaatgattttattaaaaagaagggtttcctacttaaatatcctacttgaggaactgtatagacaaaaatgaaggaaacgtgtacatgctaaaacgcaaccctaaaatgtatacgttctccttttcttatgctatcatcccaccataccctccaaagacaaagcctcggatgcacagcagtggttccggttgggtcttcacctcctctcctctggaacagcgtgtgcatcaaaacaggtgctgatcttgttaaaagtatcagtatctaggtcccatcctggtgctgccaatccagtagctgtgggcggggccttgatttaataaactccccaggtgatctccatacaagtggtcggagggtcaccctctgagaaacacaggta

SEQ ID NO: 463125 - DNA, 639 bp, Homo sapiens
agtgatgggaaggataatggaaagttctcctggaggaagtaggcaaagaggtggtagttgagctttaacaagaaggcaagaaggtgactctagagacaaattccaaaagatgcctatgagactaaggaagtcaagctactgcttatgaccaagaaaaggatctagaaattagtgtagactgtttcctgagaacttcagtccaagacagtttcagacagaaaggcakgagaaatcctgggtgtcttattccttcaggctattctaacagaataccatgaacttgtattataaacaacagaaatgtatttcttatagttctggaggctgggaagtccaacaccaagttgctgacagattcagagcctggtgagggcctgtttcctggttcatagatggcaccttctcactgtgtcctcacatggtgcaagtggcaaggagtccctggggtctctctctctctctttcttttcttttttaagattactcaagtgcagcagtgagacggggagaaagagtcgaacaggaatttgatctgtaactgactatgaacactcaactgagataactctctaccttcggactagcctctggggtctcttattttttaaaatcttttcagagatgaggtctcattatgtc

SEQ ID NO: 463126 - DNA, 615 bp, Homo sapiens
atctataagataataataaacaaactctatctgtaaggaactgaagattctaaactaacaaggggcttaaatgatacaagtaggccttcgaagattggtatggaagctctgtgtgtcttaggcttctttctgctctaccaatctgagagtgtgtcttccatcttcaaagtctcccaaatggcaccttcagacatcatgtcaacttcaaagtaggaggaggaagaaagwgggaaaggaagagggtgaatcttgaagttgagtcaatatcccccctcccatagaactttctggaattttcatcaaatgatttctacttatgtctccctggccaccttttaagcacaaagagctcagaaatatagtcttttagttgggcacaagtcatcccccaatgaaatcagggctcccttagtgagaaagaagaagagaataggtatctggtagacaatgaactgtcttggccatacatggtgtcatggaaagagccctagatgaaatccgggatgtaaattctactttagcccttacttcttgctcattgggcatgtcactttctgagattcaatttctgcatctgtaaaatggtgctaaaaatttatactttacaaagtttgc

SEQ ID NO: 463127 - DNA, 558 bp, Homo sapiens
tttaggttcacaggtacacgggcaagtttgttacatagctaaactgtgtgtcatgagagtttggtgttacagataatttaatcacctgggcaataggtattttttctgaacttcttcctcttaccaccatacaccmtcaagtaggccccagtgtctgttgttcacctcctagtagccatctgttctcattgtttagaccccacttataagtagaatatgtgatattttgttttttgttcctgtgttggtttacataggataatgacctccagctccatccatgttgctgcaaaggacataatcttgttctttttatggttacatagtattccatggtgtatatttattacatttactttatccagtctactattgatgtacatttaggttgattctatgtcttcactattgtgaatagtgccacagtgaacatacatatgcatgtgtctttatggtaaaatggtttatattcctttgggtatatacccaatcatgaaactgctaggtcaaatcgtaattctgttttaagttttggagtaattgctacactgcttttca

SEQ ID NO: 463128 - DNA, 581 bp, Homo sapiens
gtgctactggcattgagtgagtagagaccagggatgttgccaaacattctacaatgtacacggcagactcctcctcagctaacaaagaatattagctgaggagctagttacttaaaactaattaatgagctttatctagatatttacagattatagatcaaagtgcagaaatgaagaggaagctgcagtgtagagtgttgtttggtagctccagtattaagctaattaattagaaagacccagatgaatttaagatctagtagtgcctgagtttgttaggatcactgatgtgctggaatcaacttataccagcttgatataacttaaattttgaggaattttgtgagtcagttcatgccatgttggtattctaaaattgtccatgttgagaatacttaaacagagggaatcaacaaacactacaaccagtactttgtttccccatcccccaaagaggtagttgttaatcatttgccagcacactacttgttagaatacagagcaccagaaatgtagcaataktatctatcatctacttaattctattaaaaaattgttttacatggataattttaaacact

SEQ ID NO: 463129 - DNA, 608 bp, Homo sapiens
  misc_feature (1)...(608): n = A,T,C or G
agtatttaatctgtggattgctttgggcagtattgacattttgatgattttgattcttccaatccatgaggatggaaagtttttctatttgtttgtgtcatttccaatttctttcaacagtattttgtagttctccttgtagagatcttttacctctctgtttaaatgtattcctagaatttttttttttgctattttaaatggcagggcattctccatttgtttctcagcttgaattttattcgtgtataragaaatgctactcatttctgtctattacttttgtattctgaaactttactgaagttgtttattaggcctaaggctcttttgacatgatctttntggntttctaggtataggatcatattgtcagtgaaaagaactaatttggcttattgtttcttattgggatgcattttccttctttcttttgcctgattgatctggctaggacttccagtactatgttgactaagaatgatgtgagtggacatctttgattgttccaattctaaggcagaatgcttgcaaattttgcccattcagcatgatgttggctgtgggtttgtcatagataggtcttattattttgaggtatgttgctt

SEQ ID NO: 463130 - DNA, 658 bp, Homo sapiens
aacaggctcctcttgcattcttactacagyggggataaattagtgtcatattttttgtgtcaccaattttttgtctctctgctagagcttcctaaccaatatttaaacatgctgctatttctctcaaaggaagaaaacattttcctaatcccacttcttactctatttttattttttctctttaattttacacaaaaaaatcctcaccacctaatataataattgcatctacaaccatctaggatattagatattttactttttatgttctttattttctgcctctgttcacaagtctcagaatgatgaaggtacggtttctgttttgtttagtgctcaatcccagtacataaaaatgtggctagtacataagaggtgttttttccattagtcaaataagtaactggctgggtgaataaattctgggataaaaacaaactgatattttatacagatgtagcatatagcttattctgcatattaaaccacccccaaacttagtggtttaaaataacaactatttatttagtttatgattttacggattagcaattatggctgaattcaaactagactgaacttatgtgcttggcagtaaactataaatcaggtaggtagttttactttttgccgttggctggctctaagggaagaaaac

SEQ ID NO: 463131 - DNA, 658 bp, Homo sapiens
aacaggctcctcttgcattcttactacagcggggataaattagtgtcatattttttgtgtcaccaattttttgtctctctgctagagcttcctaaccaatatttaaacatgctgctatttctctcaaaggaagaaaacattttcctaatcccacttcttactctatttttattttttctctttaattttacacaaaaaaatcctcaccacctaatataataattgcatctacaaccatctaggatattagatattttactttttatgttctttattttctgcctctgttcacaagtctcagaatgatgaaggtacggtttctgttttgtttagtgctcaatcccagtacataaaaatgtggctagtacataagaggtgttttttccattagtcaaataagtaactggctgggtgaataaattctgggataaaaacaaactgatattttatacagatgtagcatatagcttattctgcatattaaaccacccccaaamttagtggtttaaaataacaactatttatttagtttatgattttacggattagcaattatggctgaattcaaactagactgaacttatgtgcttggcagtaaactataaatcaggtaggtagttttactttttgccgttggctggctctaagggaagaaaac

SEQ ID NO: 463132 - DNA, 576 bp, Homo sapiens
ttcacggaagcatggagtaggatagggggaacaactaacacaggaaaatacttggatttcagtgaggctgtctgttartaaagatgagggaaagggattatctactatgagaaacataagcaatataagataataaggggttggagtaaaaatattaccagtacttagagtattaaatgtttgttgacatttatgatagaaggactcttaaatagacagacatctgtataatggatgtccttcatttcttttatttcagtaagcaaagttacctcttgtgaaattcttaataaaaaagaaacattatattaaaacttccagttatatgccccaatgcaatacacacacacacacacacacacacagagagtatataaatacagaaaatctgggatttggctcaaggcgccaaggagtcttataataaacaatttgaagaatccgagaatgaggcaagactgagaagatatgcgctgtggaatctcccaggacagaaggcataggttgcagcaacaaactcatttgttatattttgtctattctatattttcctctattgcttcctctgcaagtggt

SEQ ID NO: 463133 - DNA, 576 bp, Homo sapiens
ttcacggaagcatggagtaggatagggggaacaactaacacaggaaaatacttggatttcagtgaggctgtctgttaataaagatgagggaaagggattatctactatgagaaacataagcaatataagataataaggggttggagtaaaaatattaccagtacttagagtattaaatgtttgttgacatttatgatagaaggactcttaaatagacagacatctgtataatggatgtccttcatttcttttatttcagtaagcaaagttacctcttgtgaaattcttaataaaaaagaaacattatattaaaacttccagttatatgccccaatgcaatacacacacacacacacacacacacagagagtatataaatacagaaaatctgggatttggctcaaggcgccaagkagtcttataataaacaatttgaagaatccgagaatgaggcaagactgagaagatatgcgctgtggaatctcccaggacagaaggcataggttgcagcaacaaactcatttgttatattttgtctattctatattttcctctattgcttcctctgcaagtggt

SEQ ID NO: 463134 - DNA, 617 bp, Homo sapiens
cttgtggaaacctcagttggtctgtagccccattgtggggtgtctctctaggttcaggtcctggggggtcttggatggctctccctaactaatagaaagagtcttggtgcaggagatttttcactcaggaagattttggggagatttctcagagaataggaggatagtttggaagggatattcctggagttcttggttaggaatctaatttggaaggccttctgtccgtcttatctttgagtgtgtttgcaaatgtggaggggatctcagaaagaattgctgataaaagtcaagcaggcctaactcagagaaccctctttatttgtctggtaacattcagtgagtcctaaagaaggytcagcaggcctgtcttggggtgattatcttctcttcgccttgcctagagaccccagtgtgaatcaccacctgaaggtctttcctcccaacctggagtggatcaaatacaacatgaactaacaggagaaagtgtgagccttgctgggttgatattgggtgctgatcgaggtgactagtgtctgtttggttatgtgtattttgctgggatggaaaatgttaattctgttcctcatgcagcccattgggcaacatcttgcaaa

SEQ ID NO: 463135 - DNA, 605 bp, Homo sapiens
aaatttgctaaataaacattttctttattattattattattatttttgttccatcaaatttttctcttttatcaattagctctgcatcattgcttgtcctttgctgaattttaccacagtccatgttggttcatagtggacaagccactttyttatgttaaggctgatatacaatcagcagagaactctatctttatgcacaattgctcaaatgttagaccttcatgaaatttttacaaccctctgaccacgtgtgtccctgttagatagtgcacagatacatgtgttgctggaacttaaggtgaagtggctcccctccaattaacactctgaaaaaaaaaaaaaaaaggctgcagctctccagcaaaaccatttctctatgcctgctccagatttaatggaaaaaaggagttttatagtatgtgctgtctttggctgcatgccactcaaaagcattcatccattattaaattaaaaattacttcatggtgctcacttcagcagcatatatactataattggaataatttagagaagattaccatggcctctgcacaaagatgacacattaattcatggttatattctataaattagaaacaggt

SEQ ID NO: 463136 - DNA, 549 bp, Homo sapiens
tttgtcaacaggatggaggttaaagacagggcgtggtaagtcaacacaacggagtataatgaagttgtaaaaagcagttaagtagatctctatatattcttataaagcaatctctgggatatagtgttgtatttaaaaataataattttatatagtatgctgaccattccccaaacatccttagattccatgtagaacattacacattcttactgttgctagctcttccctcttttgcatgtctttcattgttgttgmtggtttttgttttgttttagtacaggcagagtatcacaacctactctgacatcagcttttagtctctcaacatctttcctcttggattatgatcatgttacaatcatgaattgataaaataaagtataaataacactgaccaacaagtgtggtctactatgcactaaataatgtgatatatcctgggaaaacaaagataaatgcaacacagattctgataccaagaaactcatcagatttttacaaattatttttttcataaactgtggattagagacttttatcatgtct

SEQ ID NO: 463137 - DNA, 636 bp, Homo sapiens
gtatatttatttatatatactttgacaaattttgccacatttgctaactttcttatgtttttgtcttcttattttaaagtaatctaaactattttaatggttttacagttttagatttaagaaccacaatgaaaaatatgtcctgaactatcttttcaatgcaatatttttcagaaactatgtaggatatttctacaatttcctccgtaaattgagccctatgactcaaaccttatataaayttaagccacttgtgtttgtgtgtgtgttcttgatatttaatgttaataaaagtaatatgactttctctggccaatctgaaatatataaactgatcttagtttagctcaataaaatctgatgtaaagagtcaaaaaaaagcaactttgagaaatagcattaaatatgtgttttaaaatatgtcgtttttttatcctcttctggagatgcttatgctttcagagccttcctctgtgtccatgcagacaagttccatttgtatcatctggggtagttctgtgctcctttagagggcacagagaaaaagaggatccatcaaggacagtttcatatagcgctgttcttgagaaactgttcttttattgtttggatttgtttttcctgaatacaaacata

SEQ ID NO: 463138 - DNA, 585 bp, Homo sapiens
gagtcttattcctgttatttctcccagcatacagcaggtgcccaatacatgcttccaagtgaatgtggacagcatgatttgaatgcagcaataggccaaggtgcccttgaaaagagggtcctgctgccagccctgagctctgagagccaagccagccatcaccgacctgtgggaacaggaggggagatggcataggggatccgaaacagcagccggttcgaagccctgcccctcctgtctttgggcatgtattacatgatgccatttttcttctgcagattggcatgctyattcctgtcgagcatggctcatgccctgactcactgaatcaagacaaactccttggaccctgattccctattcagcaaaatggacacaagccatgtggcctgtctcacctgtgcttgtgacaactcaatgcatgatggatgtgaaggccctttgggaacagacgcaccaactagatcatgcccaggatggttgtcaagcatagctggaaggaggagtggagactgaatggggacgctggttcccaaaggcatgtgtagaagggaattcccaccgagagcgatgtcagtggattct

SEQ ID NO: 463139 - DNA, 579 bp, Homo sapiens
tcccttctggttctcagatgcctccatctgttagacatgtctcctctcaattaaataaaacttgcccctccgcagcctccatccattggtccaattatgtctcttgggacaaggcagaaggatctgatgcaaatttcatatgcccgatcaccagacacttgatgataattcttatgtcctcacaaactcttctcatctccaggctatatagtaacaatggtattaatatgaacacttattgtacttttcatgtttcagacactgtgctgagagctttacatgtgctrtctcaggggctggatcatgagtaactttaaaatatcttcattaggcattccattgcaatcccaaaagcaagagggcttattgccaaattttaagtaggagagggaatactttaggaagtctagtcaggtggccagtgtgaagagtgccctggcaggagagagaataagccgggtggcaggcggggggcggggcggtgggctgttgaaataatccaggtgagaaatgactaagacctggacatcagtgatggtaaagggtatggcgaacaagggacaactggaagacattcga

SEQ ID NO: 463140 - DNA, 434 bp, Homo sapiens
tatctaatctatgtatatatctatgtatcaaatctatgtatctgtccatatatcatgtttccactctawtcctcatctttccccagacaataataattaaagtcctgtaaaattctctgagttgtattttctttctttttttttttttttgttcttcacattgccacagctatgagaacgctcatggatgtcttgtgactgtctgatctttgaggaatcttcactctactctgtgcctccactcctgtgctgtcctacccaccgcagcaaatcagattgtgatccttggttcacagcctcccatggcttccgagtgtccttaaattgaaactctgatgagtacttggcatctaaacctgtccctaccctcccttgtgcctcctgcaggcaagtgggctctggcctggcctgaactttgggctgagagtctggac

SEQ ID NO: 463141 - DNA, 434 bp, Homo sapiens
tatctaatctatgtatatatctatgtatcaaatctatgtatctgtccatatatcatgtttccactctattcctcatctttccccagacaataataattaaagtcctgtaaaattctctgagttgtattttctttctttttttttttttttgttcttcacattgccacagctatgagaacgctcatggatgtcttgtgactgtctgatctttgaggaatcttcactctactctgtgcctccactcctgtgctgtcctacccaccrcagcaaatcagattgtgatccttggttcacagcctcccatggcttccgagtgtccttaaattgaaactctgatgagtacttggcatctaaacctgtccctaccctcccttgtgcctcctgcaggcaagtgggctctggcctggcctgaactttgggctgagagtctggac

SEQ ID NO: 463142 - DNA, 658 bp, Homo sapiens
tggctgtcatagttcagggagcatgtggaaacaccttacactgaaaatcaacttaccgttaactcatagttaatgtgcctatgcaggcacatcaaccatgccaataggacwttcagccatagcatttgttagttttaaaaatacagacataaggaggatgcaatgaaaaataacctataatcttatcagccaaacacccatggctgacatctaaaaataattggaacacacacagattgtaataatattcaaatggaccacaaagccacaaagatgcaaaatttaaaaaataaaatccaaaccacctattttcctattcatgctacaagctctcttcaaagatatccacagttaataatttcttatgcttgtatttcttcctggaaaaatgcagatgatagcttgcctctttttcctctgtctctttctctctctctctctgacgtgtatgtgcatatacatatatgtatatgtgggtatacatgtctatatatacactcatacacatgtatgattagttttgttttcacaaagaactttgtattaacatgccatatataccttttttcaataaaaatctattcaaggtgtattaaaaattattgccattttaacacatatatccttatctaattcttcttaatgcccattccaacac

SEQ ID NO: 463143 - DNA, 512 bp, Homo sapiens
tgtcttttggcactgtttgcatggctaatcattttcattcttttattttcaaactacttgtttatttgaatttaaagtttatcttttaaagatggttgattatgtttttttaattactgatagttttgatcttagcattttagttagaatatttaatcatttatgtttaatataattactgataagggagaacttatatctgacattatattgttttctacatatcttatgtcctttgtatttatctatttctgccttcttttgcattaaatagatattttgtagattactgttttaattttcttgttgctttttttaaactataatttgagttagtttcttaattgtttcctggggattgcaattaacatctaattgtataataatatagttagattaataccaacttcatttcaataatgtatataaaaacaytgctcctatatacttccatttcctacttgcctacttcgtgctatcattatcatagaaactacatctttatacattat

SEQ ID NO: 463144 - DNA, 510 bp, Homo sapiens
cagccatagcatttgttagttttaaaaatacagacataaggaggatgcaatgaaaaataacctataatcttatcagccaaacacccatggctgacatctaaaaataattggaacacacacagattgtaataatattcaaatggaccacaaagccacaaagatgcaaaatttaaaaaataaaatccaaaccacctattttcctattcatgctacaagctctcttcaaagatatccacagttaataatttcttatgcttgtatttcttcctggaaaaatgcagatgatagcttgcctctttttcctctgtctctttctctctctctctctgacgtgtatgtgcatatacatatatgtatatgtgggtatacatgtctatatatacactcatacacatgtatgattagttttgttttcacaaagaactttgtattaacatgccatatatacctttyttcaataaaaatctattcaaggtgtattaaaaattattgccattttaacacatatat

SEQ ID NO: 463145 - DNA, 610 bp, Homo sapiens
acgtggaaaattatgagcacctcgctgcatggaagacttttccaccaaccaccacctgctgctctgccctctgcacctgtctcccagcaaaagcatgaatcactaagcacaccctccaccgaaaggktgaggcccagacttacatctccccagctcatggcctcctgggctctgcttcattcctacatcccaaagattctgttaaatcccatcgcggtggagaggaaatggaagcagatgcttcctactgtccctgtcagaccattctcctcctggctttctagggtagcatatggggtgctggcctcagggctgtttgggcagatttccctttggcattttaccctcactgttcatggcagcagccctccctcactgcagctgtaggcatggaagatatttgagagccctgccccagaggcactggccgtgagggctgcactcctctgtcttgaaatggcaaaaggaagggctgtgcaggacgggctatatcttagtggatttttgtgacacaaatatccactattctacaggatgatgctgacaagaaaaggatgtgttctatttattaaatagaacctccttggaaaaagaagagagtccattgcat

SEQ ID NO: 463146 - DNA, 610 bp, Homo sapiens
acgtggaaaattatgagcacctcgctgcatggaagacttttccaccaaccaccacctgctgctctgccctctgcacctgtctcccagcaaaagcatgaatcactaagcacaccctccaccgaaagggtgaggcccagacttacatctccccagctcatggcctcctgggctctgcttcattcctacatcccaaagattctgttaaatcccatcgcggtggagagsaaatggaagcagatgcttcctactgtccctgtcagaccattctcctcctggctttctagggtagcatatggggtgctggcctcagggctgtttgggcagatttccctttggcattttaccctcactgttcatggcagcagccctccctcactgcagctgtaggcatggaagatatttgagagccctgccccagaggcactggccgtgagggctgcactcctctgtcttgaaatggcaaaaggaagggctgtgcaggacgggctatatcttagtggatttttgtgacacaaatatccactattctacaggatgatgctgacaagaaaaggatgtgttctatttattaaatagaacctccttggaaaaagaagagagtccattgcat

SEQ ID NO: 463147 - DNA, 610 bp, Homo sapiens
acgtggaaaattatgagcacctcgctgcatggaagacttttccaccaaccaccacctgctgctctgccctctgcacctgtctcccagcaaaagcatgaatcactaagcacaccctccaccgaaagggtgaggcccagacttacatctccccagctcatggcctcctgggctctgcttcattcctacatcccaaagattctgttaaatcccatcgcggtggagaggaaatggaagcagatgcttcctactgtccctgtcagaccattctcctcctggctttctagggtagcatatggggtgctggcctcagggctgtttgggcagatttccctttggcattttaccctcactgttcatggcagcagccctccctcactgcagctgtaggcatggaagatatttgagagccctgccccagaggcactggccgtgagggctgcactcctctgtcttgaaatggcaaaaggaagggctgtgcaggacgggctayatcttagtggatttttgtgacacaaatatccactattctacaggatgatgctgacaagaaaaggatgtgttctatttattaaatagaacctccttggaaaaagaagagagtccattgcat

SEQ ID NO: 463148 - DNA, 506 bp, Homo sapiens
ttctaaatcaaatgatatagaatgaaagtagaagagcttaatccttctgactgcatttaaattggcctacaaaatattgcatatgccttcaggtaagttgcacactagcagtattaagaamaaataaactgatattagtgatattgataaattaatattaacaaattttttagtcacaaagcagatctcactgacatcaattttgggaaagatttccatcaggagcacgagagaaggttagtggaaatctatacaaccctcactccccatgttttatccttcactaagttctgtagcttgttttacttccataggcttcttgctccttaaagttccagcgtgccttttattccactctcagctcataactcatttattttaatgccaaaattgaagcaccctaaaacactctttaagttcccaccactttaacaaatttagaagcaaaagggcccatgcatcctggtttcttttctgctaattaaagataaagtttctcctcctct

SEQ ID NO: 463149 - DNA, 571 bp, Homo sapiens
aatgagacgaattaatttatagaagttacgaaaaatacataaacttattataaatttaaatgcctttaaaacaaatgcccagttcttttactgggactattgaaaatyacaaaatcagactgaccctcatactgaaaacaatgtaaaatgctagctaaaatatgaataacatatttttagatgcatgctgacttaataagtaagtgcggacttttcaggggccaaacaccaattgaaaatagtacatcggacaggccagcagacagtcaaggccaacttcaggctaaggacatttgacaagtccaaggaaatttgagatttggtggttctcaaaatctagttgggggatggagctgactgggatcaggagacaaagccagagcttacacacatacaatgcgatccacacagggctatgcccagagcaaagataaatggtggggaggtgggaagctgcctttactgcctatcctccacaaattccccaatgcttcacaccacatggatcagtaagaaaagtggataatctgagaccttagcattgggtgagtcacagcttgttcctttcata

SEQ ID NO: 463150 - DNA, 595 bp, Homo sapiens
atagctttctgttacgtgcagccttggtaggacccacaggagtccagccaaattcaaaggtgcagagsttgaactgacacactgagttcaggaactatttgttcttgatttccttaaataatgctaatctctgcaacaaatgtctttggttccgtgattcagattgtatgtaaacttaaacagtaaaataccaaaatcattttctttggctctagtactttttccctaccgatgtgaaagtagtttctaattttcttccagatttctttgaatattatggtaataattacttcattactaatcttgtctttattcacaaatgttcttcatttagtatcgtattaacagctgaactgcactcagcactgggccagatatcatgcaatttaaaactacagctgctgcccaccaaataccagtagaagaaaatcactgacccatttaaccaataagtaggattgaaagggagcctaaatggaaacacagatctctgaggaagctcttaaaataatcttcgcctgaactaagactgtggcaatggagatagaaaaatgaaaatgtcagcaataatactcgaggcatatttaataaagtg

SEQ ID NO: 463151 - DNA, 595 bp, Homo sapiens
cagacaacctcctaatgcatgtctctgatcacaccacatctccaatcaaaatccagcaatggttcctcatttgctgtggaatttaggaaagactccttggcctggaatttaaagccttccgtaccataactccaagctaccaatttgttggtttttttttttttgagacagtcttgctctgtcaccaggctggagtgcagtggatctcggctcactgcaacctccgcctcctgtgttcaagcaattctcctgactcagcttcctgagtagctgggactacaggtrtacgccaccacgcccagctagcttttgtatttttggtagagacagggtttcaccatgttggccaggatggtcttgatctcttgacttcatcatccacaagcctcagcctcccaaagtgctggaattacagacgtgagccaccgctcctggcccaagctaccaatttttaatcattgctcataagttcctaatatcacatggaactcaactctaacaaactcccaccctaccttccctgttcctctgctcaacactgtttcttttatctggaatgtcctcccactttatttaagcaggaaaaccctgcctg

SEQ ID NO: 463152 - DNA, 620 bp, Homo sapiens
aagcattttacatatactgcctcacttaatcttcataacaatcctatgtggtcagagttagtactgttactatctccattttatggatgagaaaactgcaacagaaagttttgtgtcttatatgttaataaatggtagagccaggtatggtaaagatgatgtcatgtttaactaaattgtttaattttccttccagttgccacaggaagattttatttccagctgcccttcatcagtcacgtgactgattctggccartggaatgtggccagaagtgatgaaggtcacttatctggcctaatcactgctttctgaagcatggttttttattcactctctctctttctccctctttctctctctctctctagaagcaaatggccccgagatggcaaagccataccatgaaaagcgactggacctctgaatcacctctttgagcagagagagccagaagatcctcttcactcacactgaacagtggcacgtgggtgaaatcacactgtgctgagtttctggaacctcaggaatctttggtacagcaaagatgatactttgattaatacgccaaactccaagcttagaaaatctggatgtacagcctgtgttcttaattgcaa

SEQ ID NO: 463153 - DNA, 614 bp, Homo sapiens
gcattgtcatctatcaaccaccataagcagcctgatcttaacaagatatctagaagttgtcctctgtttctcctttatcctacactcaaatagttgccagagcctrtggaatccacctcaaaaatatctcttcaaactgttcactcatcccttcagaaactgcttgttgagttttactaggttgctgtcttggggtgtttatgtgcagattacatgatagtgagaaaagccaggaaaaaaaaaaacaacaacaaaaaacaagaacagggaagaaaaaaaggaaaaaagaaagaaggaaggaaagaggaagaaaggaagaaggaaagaaaagggaggagagagggaggaagaaaggaaattgggaaaggagatgggattattcagacatatgctatgaaggaaattaaacagtgatataatggaatctgaaaaggtaagtggaatctacatcagaaaggaaagagaagacaggccactctgaacaaatgatgtctgaactgagaccagaatgatgaaaacaaacagaagttaacttctttaaaacattaagaaagcatcctattgacaccaaatatacacatgctgaagggatgtgtcaataaaatagccatagg

SEQ ID NO: 463154 - DNA, 614 bp, Homo sapiens
gcattgtcatctatcaaccaccataagcagcctgatcttaacaagatatctagaagttgtcctctgtttctcctttatcctacactcaaatagttgccagagcctatggaatccacctcaaaaatatctcttcaaactgttcactcatcccttcagaaactgcttgttgagttttactaggttgctgtcttggggtgtttatgtgcagattacatgatagtgagaaaagccaggaaaaaaaaaaacaacaacaaaaaacaagaacagggaagaaamaaaggaaaaaagaaagaaggaaggaaagaggaagaaaggaagaaggaaagaaaagggaggagagagggaggaagaaaggaaattgggaaaggagatgggattattcagacatatgctatgaaggaaattaaacagtgatataatggaatctgaaaaggtaagtggaatctacatcagaaaggaaagagaagacaggccactctgaacaaatgatgtctgaactgagaccagaatgatgaaaacaaacagaagttaacttctttaaaacattaagaaagcatcctattgacaccaaatatacacatgctgaagggatgtgtcaataaaatagccatagg

SEQ ID NO: 463155 - DNA, 590 bp, Homo sapiens
gaggacgtggctcagtgagttcagggaacaggaaaatcagtggggatggaggacaatggcaaagaaagagagaggtataggataactccaaagaggcaggcaaagccagtgcatgggcagccttccattttatctctattaccaggggaatcactcagagagttttaagcaggaagcaatatggtctgaattatctttttttccaagaatgactctggctgctatctggataatggatgtatatgggaaacaagagtgattacaggagaaagtgggaagcttttgtggccaacaagcctaggaatggtattggcttagactagaattgctgcagcagatgtcatgaaccattgtcagatttggcacattcttgtacagaaagctgacagtacctkctaatgcaatcatgtgtggggaggagggagagcacatggagggtgttgaaagagaaaaagaaggatcaaagatggcttcttcgtttggggctggagtgaatgttctctcccatcacctgctttggttaaggttctttatgactctatcctggacaaatcccattagtgtcctggtttccacttctttcagtctcc

SEQ ID NO: 463156 - DNA, 513 bp, Homo sapiens
gtgtttactgaattgtaggtcctattggaattaaagaattgccagtaccaaggtagtaggaaatggcctagagagaggtaatatccactgagagagtagaacccttgaaattgggatgaagggggttttccagctattgttaatgagaaagtctggggcaatcattctcaacagagaaatactgctcagtcctagggcatgtctcaaaaaatttcagaggctttagtggttgtcaaaagaatgggaggtaacagtgtcatttaataggctagagacaaatatgtagatgttttcatcctcacacmgtgaaaaagtccccagtagcacggcaatcaaatattccaccagacattcattgaggcaaaaaaaccacttacgttaacctagaacctaaccccattttacatatccacacaaattacacattttgcatggttttagcatagactgatttttctagaaatggaatggtagtgtaagaagattgtactttgttatttgcagagctttaac

SEQ ID NO: 463157 - DNA, 513 bp, Homo sapiens
gtgtttactgaattgtaggtcctattggaattaaagaattgccagtaccaaggtagtaggaaatggcctagagagaggtaatatccactgagagagtagaacccttgaaattgggatgaagggggttttccagctattgttaatgagaaagtctggggcaatcattctcaacagagaaatactgctcagtcctagggcatgtctcaaaaaatttcagaggctttagtggttgtcaaaagaatgggaggtaacagtgtcatttaataggctagagacaaatatgtagatgttttcatcctcacacagtgaaaaagtccccagtagcayggcaatcaaatattccaccagacattcattgaggcaaaaaaaccacttacgttaacctagaacctaaccccattttacatatccacacaaattacacattttgcatggttttagcatagactgatttttctagaaatggaatggtagtgtaagaagattgtactttgttatttgcagagctttaac

SEQ ID NO: 463158 - DNA, 473 bp, Homo sapiens
ttggaaactgatgaatcatgggttattaataaaggaaaagagagtgcttaatacttaggacattttrgtaaaagaaggtgacatgtttggaatgagtaaggtactttcactcttttttggggaagcctttggtattgacactgaatttgatcctgacctggagcaatatatgaattctgatttgccaataatatctatttgtcatgtaaaggatcaggttagcatttggcagaggttgctaaggaccagaggagaaggctaatgttgcaagctgtcccaacactaggggcatgttctaagaaaaaaggaaaggaaatttaattcaggaatagttagttatacattagagaaaagctaaaatgttctacttggagaaggttgcacgactcacttctgagaaaaaaagaactccacatattttgaaaaatcaaaatattacaaaagaaccattaagaaataatccaggcagatag

SEQ ID NO: 463159 - DNA, 559 bp, Homo sapiens
tatgtttaaaatgttaagtaacacacaattctaactgagttattttaagtgatacttacataaggatagaaaattcaagcagmatggaaaagcacaaaataaaaagtaaaagcctacccatcactctcaataattccaaatgacacctctcttaactctggaaatagatatctatttggttaatattgcctgatacatacatggagatacgggaaggatgtttgaatggatggatggaaaaatatatagatagaataaaaaatgttatcttataaaaataggatcacactcttaaattgttcaagctggatatggaatctctaatttaaaatttaacacctttttgttatagaaagacaaaagctgagtgagttgattagctattaaaaactttataggtacccttgtagttttaaagagttcattttaaattaaacactatggagttctagagttagtgatggttctcagaatttatacaagcttaagaaaataaatagaatcaagaagggtttagataaacttatggatcatggatctatagcagtgaataaaggaa

SEQ ID NO: 463160 - DNA, 586 bp, Homo sapiens
attttttatgctatggactcttcgtcccctctccccccagattcatatgttgaaacctaatcttcaatgtgatggtatttggaagtgagacattttggaggtaagtaaaacatgaagatgggaccctcatgaatggaattagtgtccttataagggtatgaaattaccctctcctctatgtgatgatatgagaagacagccrtctgtaaaccagaagaaagccttcaccaagaacccaacaatgctggcaacttgatcttggatttcaagcccctagaactgtgggaaacaaatgtttgcttaagcgcacaccttataatattttgttacagcagccgaagctaaaacactttacttaaaacataacaatataaaaataaataatcacaccttatgacttcctttgctgaataattggatgaagcaaataacgaaaaagcaaaacaaaaccagccacaataaagaggataaaaggcagtttggattctgctgaagacagaatgtgtgatatgaaaaatagatctgagaaattacccataatacagtgaaaagaaatcttatacattcaatttctagtggttgctgt

SEQ ID NO: 463161 - DNA, 596 bp, Homo sapiens
ggttttctgagtcatccatgaaggttggaatcaaattcttccaaactcctgttaatgtttatattttgacttcctttcatgaaccatgaatgttcttaatggcatctagaatgatgaatctttccagaagattttcaatttactttgcccaaacccatcatcataggaatcactatttatggctgctatggttttatgaaacgtagtttttaagtaataagatttgaagctcaaaattattccttgatctatgggctgcagaatggatgtagtgtatgcaggcagtctgttcctggcraagatgctgtaaacattgctgaaatgacaacaacaaaaaaatcagaatgtttacataaaattggttgataaagcggtggcagagtttgactccaattatgaaagttctattgtgtctaaaatgccatcaaacagtatctcgtgctacagagaaatctttcacgaaagggtcaaccattgcaataaactttaatgttgtgttattttaagaaattggcacagccacactaaccttcagtagccatcaccctgatcagttagcagccatcaacattaagacaagaccctctgccagcaaa

SEQ ID NO: 463162 - DNA, 612 bp, Homo sapiens
aatgtttacttttttctgtgggtcaaacgcagatttttcacaatcctattaaggcatgcagctcattataattgtatgtacagatgaaagcatattcagttattattattccccttaattgtaaactgctgctggtaattttactgtaaagctcaaacaaaaggagaatacttgaaaggaccaccactgcccacttatgtaatcaatttatatatgtcaagtttgtactgggatggttatccccttctgttaccagacatgtgacatgctaccaccctgcagcttggggccatgcatgcatgtctctggctccttttgcaggctgcttggaaatacagtacatgtcggtaataatgttaaatgacagcttcaaactatttcccttaggcctgtttgacccgtgsgttcaaggtaaaacaggaatggttccgcttaccttcaagacctgagcatcctcaccactggcaaatttaacttggaagcttggtgaggttccctggagatccaattacccttgttaggggacctattgaaacattaatgacatgtaaccacttcattcataaagttgggctcagctcatgcctagcattacctcccacacacccgctt

SEQ ID NO: 463163 - DNA, 574 bp, Homo sapiens
ttcaaatttcaaagtggcatcaccatttgctttcttcagagctacaatctaaataaatgaacagtggtatcagatgcaagtatatggcctgtcctttggcgaccctttaccccatacataacttcaatttctcttagaaattttcagaatcactcagcatattttttctgcagtaacttttccctctgctttcttggtcctttttcaccaaaaatttatttgcttattttcttaaaatttctagttctcccgtaaatcttctataccattctttccacytattagtgtgctttgaagaagtaaactactactttatttaattccataacggatttttcattaggaaatgtagtatacaaaaactgtattaggattgtttaaattttttgttagattgagatagagacaaatgtaatgtgagagaagggtccaaacaaagcctaactgccacccatgttcccaagaagcatcctgtaccaagcaccagtgcttaccagcagcactagtaagctcacaaatagcagtgcatgcaaagagctcagagcacagccagtgagttcctgttccctctgta

SEQ ID NO: 463164 - DNA, 588 bp, Homo sapiens
taagttgcatgctggtctaagaacataactgatgaaaatataaattattctactatattgggagatacaaaaatgcagtgttttatggttggaacaatatttttcattcatatatttatataggatatgtttcattatactagtgtttatctagtaaaaacaataccacactatcaaatacttcaggagtaaataataccagtcccacacaaatgctttcagaaaataaaaaggagggaactgatatgagatcctcattccccttaytccaaatgcaggaataaaaataaaagtacagtagttccccccttatccacagttttactttcatggtttcagtcactcataatcaaacatagtcaaccgtggtctgaaaataggtgagtgtagtacaataaaatatttcatatttgagagggaaagtgcacacatacacgtaacttttattttaatatattgttataattgtgctattttattattgttgataatctcctactgtgcctaatttataacaaactttgtaataggtatgtatgtgtagaaaaaaatagtatatataggattcagtaccatctgcagtttcag

SEQ ID NO: 463165 - DNA, 520 bp, Homo sapiens
acttcatagcctcaccacattctcacttttaccatcttcatgatcagcaagtcacccccacttcctctcttccctccctcatgggtttgggtgttctttcatgaattttcttcctgtcattctttttgttaccctgatttaatgaagataaagatatttcctgtggaatggggtgcatctgtagttgttttttccccccagagatgwcctacttaacagccctggaatgatgtagtctgttgggaatcagtttttagatagaagaaatttagactgttactataacttcatagaggataccagccttggacagagcttgattaatttttaaataagtcttaattgcttattgttactattgttgaagacaattggaaattgtaccaatattcccatatgacattgtatgcaaaaataaagtataaaaataacatggactctttaaaagtgcatatgctttggctcagaaattcggattctaaaaagctatctaaagaaaactgggataccacaaatgact

SEQ ID NO: 463166 - DNA, 568 bp, Homo sapiens
gatcaatatcactttgtgcttggaattatactagagagaaacagaatacaaaatccactggatccactggtaggccgggcgcggtggctcatgcctgtaatcccagaactttggtaggcccaagtgggtggatcatcttaggtcaggagttcaagaccagcctaaccaacatggtgaaaccccgtctctactaaaaatacaaaaaattagccaggcatggtagtccatgcctgtaatcccagctacttgggaggctgaggcaggagaatcgcttgaacccrggaggcagagattgcagtgagccaagattgtaccactgcactccagactgggcgacagagtgagacttcgattaaaaaaaaaaaaaaattccacgagtattctgaaactcaggggagaggtatgaactgcagagagagatttggccattgccagtaaaaagtagtaactgattttaggaatatgtatactaataagaagaagaaagaaggggtaggagaaagaggaaggagaaaaggagaaagaagaaaagaccaacacaatcgtcacaaacctcatttgagaaata

SEQ ID NO: 463167 - DNA, 608 bp, Homo sapiens
tttaagattaaaaagccaatatatacacaaaccttttctcctttaggtcctggcaatccagagggtcctggttggccctgatggccctacgaaaggacaagtagacatttatacatgctctacctagatattagatattgcattattctgaaaggaaaaataggattcactgtctaggaggatgagacctaaatatgttagaaaggtttatcagagagatttcatcttaatttgaatatttgggatatcatctttaataaaaatgttttcatgtgaatatattttttcaattataaatacttaccctgtaccctggaattcctggttctccatcaggtcccatcaatcctaaatgtccctgaaaaacaaagtaaatattagtgagagagagaaagtaaagaattgtttaaatcattagacttctactcctattgtttaaattgttacctttagatttttcatggttgaaatttacctagtttgaaataggaaagcaaaaaataaccmcccaacttttgtctatttttttttctgaaacacaaaaagttctgcaacaaatgtctttttggtttacttctgatataaatatccttaatcatattaaaaaa

SEQ ID NO: 463168 - DNA, 597 bp, Homo sapiens
aatatgctcagctgcagactcctcagcagaaaccttacagaccaggaagaagtgaggtgatatatttagaatcctaaaggaagaaattaaaaaaactaccaactaaaaataccatagacagcaaagaagtcattcctccaaaatggaggagagataaagaatttttctttacacatatgttcattgcaccactgttcacaatagcagagacatggaatcaaccaaaatgcccataaatggtaaactggataaagaaaatatagtacatatacaccatggaatactatataaaggaatgagttgtataaaagaatgagatcatgtcctttgcaggaacatggatgaagctggaagccattatccttagsaaactaacacaagaacagaaaaccaaatactgcgtgttcacttttataagtgggagctaaatgatgggaacaaatggacacaaagaggggaacaatagacactggggtctacctgagggttgagggtgggaggcaaaagaggatcagagaaagtaactattaggtattaggcttcgtacctggatgatgaaataatctgttaaacaaacccttgtaacacaagtttact

SEQ ID NO: 463169 - DNA, 544 bp, Homo sapiens
ccaaataagtccaaaaccaacaggatagcaactttaaatcttaaagctcaggaataatctaccttgacattgtttcccacctcttgagcacgctggggttggtgttgggctcccaatgccttgggcagccctgcctccatggctttgctgggctcagctcatgcagctgctctcatgggttgaaatctcatgcctgcaggwctcatgcctgcagtatggggctgcaatcacaggtggttctataggtccggggatttggaggaggttctacacctatggttccactagacattgtcctagtgggaattctctgcagtggatatacccctgcagcagcaggtttccatctggactcccaggcagtcaaatacattctttgaaatttaggtggaggaatccatgcccccacagctcttccatacttcaaatctgcagaattagcaccagatagacacttctggggttcatggcttgtaccttttggaacagtgggtttggctgcacttagatctacctgagccacaatttgcgtgaccaaggaaca

SEQ ID NO: 463170 - DNA, 548 bp, Homo sapiens
aaaaaaaaaaaagatggtcacacaaaaagtgtaggaagaacagtttaattttgcctgcatcatcccatcttctggcccagcagtgctcagtgttgagagaaaaatccccagcttgttatattccttcatagggggaaggagagcagggtaaatgagtagcttctctagactgcggacactgcccccaaggtcctgctatggtttcctctactcagatcactgaggagaccagaatgtctctattactagaaactactgtaacaaacagtagagaatatcagaatcagccatgtggtaggtgccaaaatgatcccaaatatcttgctctgtagggggcaccagcaatctgctgctgagaaccttaagagcctcatgaccaccttgtacttcctgcaggtttcaccattgaagaccccacagcgttcatcattgcaaatcctagtggcctgttctgcagaggatctaagtagattttcctgctaaggaaaccaacagctagcacagccaccacacgaacsctgcacgttttgctgccaagggctactggt

SEQ ID NO: 463171 - DNA, 597 bp, Homo sapiens
ttactttattgtaatttagtgtcataacatgagcatttaagttattgaattgatacctttcaccattttaacattagagtttatagtwataatttttcccataagcattgcttttgctatatcttatgatttttggtaggttgtgcttcattttatcccagataattttccatttcacttgtgatgtcaaggatgtattgtttgtttgggatatattgtactgtttaattttcacatactgtgtattatcagaattccttcggttattgatttctaatttcattccatgtaatcagagtgtcttaaactgtttgggctgctataataaaatatcatagacaagtagcttataaacaacagaaatttatttttcggttttggagtttgagaagtccaaggtcaggacaccagcagatttgatgtctgatgaaggcctgctttctcatattcatccttcttgctatttccacacatggtagaaaggaatagctagctctgtgaagtctcttttataagggtgtttgtcccaatcatgtgggcttttccctcataatttaatcacctcccaaaggtcctacctcctaataccatcacctt

SEQ ID NO: 463172 - DNA, 396 bp, Homo sapiens
aaaaaatcaacaatactaagaactggttttgaaaaatctaaagaacattgataaattatggctagattcccttagaaaacaaaagggaggagacacaaataaattaaatcagaaataaaagaggataaattacaactggtttcacaaaaatcaaaaggatcaaaggagaccattatgaacaattacataccaacaaattgattaaactagaagtgttggacgagaggtccccakatgaccctggcttggctaacccagctcttccccatccttcttgtagctctgaggataactataggaagtgctagaatgcagtggccatagataagaataaattgacagaacactcgtggcactgaactggtctctactaaaacaagattttatacaacactt

SEQ ID NO: 463173 - DNA, 629 bp, Homo sapiens
tttcaccactttcccattcagtgtgatattagctggaacttgtcatatatggcctttatggtgttgaggttcatcccttgcatgcctratttgttgggagttttcattatgaaggaatgttgaattctgtcaaatgcttttccttcatctattaaaagaattacataaactttgtctttcactctattcatgcaacttgtcacttttactgttttgtttatgttaatccatccttgcatccttgggatgaataccacttgagcaagttgaattattttttttagtgtgctattgaattctctttgctaatatttttttgagaaattttacatacgtgttcatcaggaacattggcatggagttttcctttttattgctgttgtgtctatatctgggattgatatctgggtaattctggccttataaattgagtttggaaatattatttcctctttaattttttacgagtttgagaaggagcggtattagtttttttttaatgtttagtagaattcagcagtgaagccatgaggtcctgtgcttttctttgatacgaaagtttttattacgaattgtatctccttacacattattggtctgttcggatttctatttcttcataattcagt

SEQ ID NO: 463174 - DNA, 624 bp, Homo sapiens
gtgacacaatatatacacctactatgtgcccataaaaattaaaaatttaaggaagaagcttctaaagatattagattttttaaagacaaatgaaataatttatcaatacacaaataagcagattacagagttgagaagtggtaatgaaaatcttctttgcaatgttaattatttttgttttaaactgtctttatgaaaaaaattgaaaaataatgattttattttggagaatatatatactcttgagtgataagaacaaagattatttgcatgtaaaataaataatagcttagtggtctatyatataatagtgtccaaatattatttcattgtcacattgcttttattcttttaattcaagtcataaaatactaagttctattttctctgactagattatggggaggatatgatttaataataagaactcagtatcttctttttgagttacaattaattttcaagtatactggctctcttcaatgtgaatagaaccaaccgcactaattctgaactaactgttgctgatatttcaggtaaggtagcaaaagtactgaattacacagtaatgacttccattgaaaatttgatttatttttctatatataatatatatgaaaaagg

SEQ ID NO: 463175 - DNA, 624 bp, Homo sapiens
gtgacacaatatatacacctactatgtgcccataaaaattaaaaatttaaggaagaagcttctaaagatattagattttttaaagacaaatgaaataatttatcaatacacaaataagcagattacagagttgagaagtggtaatgaaaatcttctttgcaatgttaattatttttgttttaaactgtctttatgaaaaaaattgaaaaataatgattttattttggagaatatatatactcttgagtgataagaacaaagattatttgcatgtaaaataaataatagcttagtggtctattatrtaatagtgtccaaatattatttcattgtcacattgcttttattcttttaattcaagtcataaaatactaagttctattttctctgactagattatggggaggatatgatttaataataagaactcagtatcttctttttgagttacaattaattttcaagtatactggctctcttcaatgtgaatagaaccaaccgcactaattctgaactaactgttgctgatatttcaggtaaggtagcaaaagtactgaattacacagtaatgacttccattgaaaatttgatttatttttctatatataatatatatgaaaaagg

SEQ ID NO: 463176 - DNA, 624 bp, Homo sapiens
gtgacacaatatatacacctactatgtgcccataaaaattaaaaatttaaggaagaagcttctaaagatattagattttttaaagacaaatgaaataatttatcaatacacaaataagcagattacagagttgagaagtggtaatgaaaatcttctttgcaatgttaattatttttgttttaaactgtctttatgaaaaaaattgaaaaataatgattttattttggagaatatatatactcttgagtgataagaacaaagattatttgcatgtaaaataaataatagcttagtggtctattatataatagtgtccaaatattatttcattgtmacattgcttttattcttttaattcaagtcataaaatactaagttctattttctctgactagattatggggaggatatgatttaataataagaactcagtatcttctttttgagttacaattaattttcaagtatactggctctcttcaatgtgaatagaaccaaccgcactaattctgaactaactgttgctgatatttcaggtaaggtagcaaaagtactgaattacacagtaatgacttccattgaaaatttgatttatttttctatatataatatatatgaaaaagg

SEQ ID NO: 463177 - DNA, 577 bp, Homo sapiens
cattgtgggtcagggcttcaacataggcatttcrgggggtggtatacagtcaggagataatagtacctaaaattaattaattaattaattaattatattttttgagatggagtcttgctctgtcgcccaagctggagtgcaatggcacgatcttggctcactgcaaactctgcctcctgggctcaagcgattttcctgcctcagcctcccgagtagctgcgattgcaggcatccaccaccccacctggctaatttttgtatttttagtagagacgaggtttcactatgttggccaggctgctcttgaactcctgacctcaggtaatccacctgcctcgatctcccaaagcactgggattacaggcatgagccatcacacccagccctaaaattattttgttacaaaaatcaatataaaattacatcaatgaacagtgtgcattccaaagatttcagaataaaaggaaacaagtgaccattttgaaatattgaataccttctgatatgattaagtttattttgaaatacaggtcctaacttttaaaaatatggcttatgaaagaaaactaaaatgagc

SEQ ID NO: 463178 - DNA, 479 bp, Homo sapiens
agacagaatatttaggaagagtcaaagtgaaaatgcagataaacataataaatcaaaatcttctctagttctttgttgtcagattatataatttctttttagttcagyattggatatgctgttaattttaaggacatttagtatattgaataattaagtaataaaataaaggttaatctttaaaatgatgttatcaatcatagatgtataggaagattgaactacacatacatttaaatacacttgaagagacagaaatgttgggtttgtaggtttcttaattctgtcttaataaaatataaataataaattgaagtcattaaaaactgacatattttgatatcactagaaatgatagttttagatgtttcatgcataatttgacaacatgcaatcaatcaatcaatcaatcaaaattattccaaactcaacaattaattcaacgaatgaacttttgtcagagtacacattggaaaggt

SEQ ID NO: 463179 - DNA, 329 bp, Homo sapiens
tatgatcataccactgcattatagcctgagtaatagagcaaaacctagtctcaagtaaataaataaataactttggggcttcaaaagaccctattaagaaagtaaaaagaaaaatcacagaatgggagaaaatatttgcaaaccatatatctagtaagagattaatatacagcatatataaggaactcctacaactcaacaatgaaaaaccaaataacctgattaagaaatgggcaaaggcagaacatagaggatttttagagtagtaaaactagtctgcrtgataatataatcatggataaatgcattatacatttgtccaaagtcac

SEQ ID NO: 463180 - DNA, 605 bp, Homo sapiens
ctggtgcttaataagtagatacgtattcttcaaggtagagaacagcaccaggatgatgaatttgaaaactagaaagaatatatcrctaacagtcaaattttgtttaatgcttgggatccaaaatgacccaagaggagatgaatgcctcgagtgggggaccttcccagggctgtggtcatgctgtggtttgatggcctcttccatcctgcaatatcttctaagattttatgtccagtaggctcagtagcagtgtcacaaccatcaccaccacataacagtagcaggagtacgtgcttttatatattctcagagcagataatctgtctccttttcatttgtaattgttgaataattttcttaggagttcactgccttgctcctggctaagcagaggagcccataatttcagattataaattggaactctgacaagtggttccataataaaatgtaagtcctgttcaaaatgcgcactttttttctttcaaaatattatttggaagagctgcctttgtggcctcacagaatgagaaggaacctaataggtgagattttaggacagagaagagatccatgctccccaacatatttcctccactgtctta

SEQ ID NO: 463181 - DNA, 605 bp, Homo sapiens
ctggtgcttaataagtagatacgtattcttcaaggtagagaacagcaccaggatgatgaatttgaaaactagaaagaatatatcactaacagtcaaattttgtttaatgcttgggatccaaaatgacccaagaggagatgaatgcctcgagtgggggaccttcccagggctgtggtcatgctgtggtttgatggcctcttccatcctgcaatatcttctaagattttatgtccagtaggctcagtagcagtgtcacaaccatcaccaccacataacagtagcaggagtacgtgcttttatatattctcagagcagataatctgtctccttttcatttgtaattgttgaataatyttcttaggagttcactgccttgctcctggctaagcagaggagcccataatttcagattataaattggaactctgacaagtggttccataataaaatgtaagtcctgttcaaaatgcgcactttttttctttcaaaatattatttggaagagctgcctttgtggcctcacagaatgagaaggaacctaataggtgagattttaggacagagaagagatccatgctccccaacatatttcctccactgtctta

SEQ ID NO: 463182 - DNA, 587 bp, Homo sapiens
tgatatcttaacctcacccttgatttcaactaatttttctatacttattttcacttagccttaatttattaacttayagttttaatcttctagaagtgtttttatttcatatgctggaataaggctaaatatacatgcataaacttttcaacctggctgtgttacctttggaaacttaatctctcaggggctggattttcttatcgataaaatgagaggtttctccattctagttctgaactgtttttcatcttgctaaattaaaaccaggaaagtattatagtaacaaacttattcctatattacaactttttgttacttttttttctaactattataacaacacaagaaggagtatgtgtcctaattctcaacatccctaatgacttcatgatcaatacccaggagaggtttccataactttctcattttgaggatggggatggaagctgaaacttcctagaaaagccagtaatatcaataagtaggtaaataaactgagttttgtttgcacactaagtaatcactcctgaaaaggacaaaaagccacatataaataaacgcacagtaaatggtttttgaagatt

SEQ ID NO: 463183 - DNA, 587 bp, Homo sapiens
tgatatcttaacctcacccttgatttcaactaatttttctatacttattttcacttagccttaatttattaacttatagttttaatcttctagaagtgtttttatttcatatgctggaataaggctaaatatacatgcataaacttttcaacctggctgtgttacctttggaaacttaatctctcaggggctggattttcttatcgataaaatgagaggtttctccattctagttctgaactgtttttcawcttgctaaattaaaaccaggaaagtattatagtaacaaacttattcctatattacaactttttgttacttttttttctaactattataacaacacaagaaggagtatgtgtcctaattctcaacatccctaatgacttcatgatcaatacccaggagaggtttccataactttctcattttgaggatggggatggaagctgaaacttcctagaaaagccagtaatatcaataagtaggtaaataaactgagttttgtttgcacactaagtaatcactcctgaaaaggacaaaaagccacatataaataaacgcacagtaaatggtttttgaagatt

SEQ ID NO: 463184 - DNA, 587 bp, Homo sapiens
tgatatcttaacctcacccttgatttcaactaatttttctatacttattttcacttagccttaatttattaacttatagttttaatcttctagaagtgtttttatttcatatgctggaataaggctaaatatacatgcataaacttttcaacctggctgtgttacctttggaaacttaatctctcaggggctggattttcttatcgataaaatgagaggtttctccattctagttctgaactgtttttcatcttgctaaattaaaaccaggaaagtattatagtaacaaacttattcctatattacaactttttgttacttttttttctaactattataacaacacaagaaggagtatgtgtcctaattctcaacatccctaatgacttcatgatcaatacccaggagaggtttccataactttctcattttgaggatggggatggaagctkaaacttcctagaaaagccagtaatatcaataagtaggtaaataaactgagttttgtttgcacactaagtaatcactcctgaaaaggacaaaaagccacatataaataaacgcacagtaaatggtttttgaagatt

SEQ ID NO: 463185 - DNA, 587 bp, Homo sapiens
tgatatcttaacctcacccttgatttcaactaatttttctatacttattttcacttagccttaatttattaacttatagttttaatcttctagaagtgtttttatttcatatgctggaataaggctaaatatacatgcataaacttttcaacctggctgtgttacctttggaaacttaatctctcaggggctggattttcttatcgataaaatgagaggtttctccattctagttctgaactgtttttcatcttgctaaattaaaaccaggaaagtattatagtaacaaacttattcctatattacaactttttgttacttttttttctaactattataacaacacaagaaggagtatgtgtcctaattctcaacatccctaatgacttcatgatcaatacccaggagaggtttccataactttctcattttgaggatggggatggaagctgaaacttcctagaaaagccagtaatatcaataagtaggtaaataaactgagttttgtttgcacactaagtaatcactcctgaaaaggacaaaaagccacatataaataaaygcacagtaaatggtttttgaagatt

SEQ ID NO: 463186 - DNA, 596 bp, Homo sapiens
taactgttttacttagcagttttcaaggtccatccatgtcctatgaacatttgtatgcatatttctttgtagacatatgttttcagttcttctggatatatactgggagtggaattgctggatcatatcatacttcaatttttaactttttgagggactgccaaactgttttccaaaagggctgtaccatttacatttccaacaggaatgaatgagagtgtccaattctccacatccrcaacacttgctaccatcttttctatttttagctatggtagtgggtactgtcggtttgagttgcgttttcctaatgactatgtgttggtaatcttttcataaacattttggcttatatatatattttctttggagaaatgtctatttagatccttggctcactttttaaattggttttacttatctttttattgattagttatgtgtcctttatatattctggatactattccttatcacaggttggatttacaaatatcttctgccattctatgtgttttctttttactttcttgatgctgtctttgatacaaaaaagttttcatgaagtccaatttatctacttttgtcatgtatgc

SEQ ID NO: 463187 - DNA, 596 bp, Homo sapiens
taactgttttacttagcagttttcaaggtccatccatgtcctatgaacatttgtatgcatatttctttgtagacatatgttttcagttcttctggatatatactgggagtggaattgctggatcatatcatacttcaatttttaactttttgagggactgccaaactgttttccaaaagggctgtaccatttacatttccaacaggaatgaatgagagtgtccaattctccacatccacaacacttgctaccatcttttctatttttagctatggtagtgggtactgtcggtttgagttgcgttttcctaatgactatgtgttggtaatcttttcataaacattttggcttatatatatattttctttggagaaatgtctatttagatccttggctcactttttaaattggttttacttatctttttattgattagttatgtgtcctttatatattctggatactattccttatcacaggttggatttacaaatatcttctgccattctrtgtgttttctttttactttcttgatgctgtctttgatacaaaaaagttttcatgaagtccaatttatctacttttgtcatgtatgc

SEQ ID NO: 463188 - DNA, 616 bp, Homo sapiens
cactcccatgattatactctgtcatttaagactctgtcttagcaggtgagggagattctcctggtagccttgaaaaaggaatcagccatgttgtgaaagggtaacrtagctaggtcttgagggaacttttaggaactaagagtgaccccaggctgacatccagccagaaaataagggcctcaggcctacaaatgcaaggaactgaattcttccaacaatcctaaggagctttgaagaggaccctgagcctctgagaagatcacacccaagtgagacctttatttgcttttatttttattttttgaaactataaatttctacatgtaatattttattattaactttatgaagacatggctctggtcatgattgtttatagaggtcagataatgcaaataacagcaagtagacttgtatttttttgaagatgatctctgcattgtattattattattattgagacaaggtctcactatgttgtccaggcgggttttgaactcctgagctcaagcgatcctcccacctcagccacccaaattgctaggattacaagcgtgagccactatacccagccaacatcttgattttagagtgatgaaaccttgagtttaggacc

SEQ ID NO: 463189 - DNA, 631 bp, Homo sapiens
ttcaataactaaatccccattggtcttaccagatagctacaatattttcagacttttaaaatgtattaaaaactaatatatacctaagaatattttaggwatattttagtggttctccagagcattgtagatgacaaactaaaactaaaactccttaagtgatgaaagaatgccaaaccaatgattattcaaccatataactccaacaaggataaaagaaaatcttcgtaataatagtatatatgatgtatatacatatatatacatagaaacaaagggcacttactccgaaagttgttcactggtaagactccaggatgatagaatcctgctttgcaaatgcactcataggctccaagaacgaatcctaggcctttaattggcatacactatgaagaagaaaagacagcaacatagttgatcatggcttatctcatggtataaaggctcgcagatatccatcattgcaaatggtaacagaaaactaacacattttccagaaataaaatagctcttttttgaacttttcagttttgttgtgccaacaattttttttagaagcagtaaattaagtttcctttctaaatttatgccattacagctgcagttgcacacatctttacttcctgtg

SEQ ID NO: 463190 - DNA, 590 bp, Homo sapiens
aatgtttaaaaaattgaattgattagatctggtacatattgccaaataaaatattccttraacttgaaagaaatgcctcctgattttattacataaaacacagaaacatgaattattagctacctcaaacttgttattctattaataaataattttatgatctcaaaggaaagaaaaaaaactttgtcaattaaaatcaataaaagcagatcatcctgctgtactgactccacctccaagacagcagggcctgtacggaaccaaatgtgctactgttttcatgcttttgccttgaagtatacaagtggtcttggcttatttttttttatgaagaattgtaaattttcaataaacttgcaaggcatattttcttgctgtacccaccaccatgattccctcgctacttcatctctgttacctcctaaacaaaattatacatttttaagattaggaaattagttcagttaacctagtttaaaaaaaaaactgtaaatatagtgatgctcaactaatgtttagtttgggtttaggctgaggggctgcttgttaagtagcacttgtttctcctccatgagggtagctgctccatg

SEQ ID NO: 463191 - DNA, 560 bp, Homo sapiens
ggttaaggccacagcagaggctctgggcctgggaacaggttctgcctggccatgcaagggtgggggtggtgyggttgactgcctcagggactcaggccacagaggacccactgccgccactgctgctcccacaaccactcctgctgccaccgctctcacctcaccaatgcagctggcataatgacagcagctgctctggatggcccacgattgccgtcattattgtacccctgaataaggaagctgcttacaatattggaagcctactttgatgaaccttaacaagccaccagcagagatttacaaaagacagctcttaagaactcacaatcaaatccaggttcctaggagcagaccagatccaattgcataagatgtggtggtcaagagtttagagtgaagtggataaatttctagaaacatacacgctatcaagattgaatcataaataataaaaaagaacagatatataactagtaaggagattaaattcagtaatcaaaaaacttcccaataaaaaagtgcccataaccagatgtcttcaatggagaattctacta

SEQ ID NO: 463192 - DNA, 560 bp, Homo sapiens
ggttaaggccacagcagaggctctgggcctgggaacaggttctgcctggccatgcaagggtgggggtggtgcggttgactgcctcagggactcaggccacagaggacccactgccgccactgctgctcccacaaccactcctgctgccaccgctctcacctcaccaatgcagctggcataatgacagcagctgctctggatggcccacgattgccgtcattattgtacccctgaataaggaagctgcttacaatattggaagcctactttgatgaaccttaacaagccaccagcagagatttacaaaagacagctcttaagaactcacaatcaaatccaggttcctaggagcagaccagatccaattgcataagatrtggtggtcaagagtttagagtgaagtggataaatttctagaaacatacacgctatcaagattgaatcataaataataaaaaagaacagatatataactagtaaggagattaaattcagtaatcaaaaaacttcccaataaaaaagtgcccataaccagatgtcttcaatggagaattctacta

SEQ ID NO: 463193 - DNA, 626 bp, Homo sapiens
ttattgctctgtgcttagcattcttctcggaagagacattcctcaggactcactgctttaaaggttcaaccagctgaaaacatttttcaaattgtacagcattaaattcaaaatggatctgaaaatataaagtttgaaagaattcactggcagtattttgatggtgttttatttygtgttggggctaaagattatattaacaaattatcttgattttaaaatttaattttttaatttataaaatatatatttatggtgtacaatatgatgttttgatatatgtatacattgtgaaatggctaaatctagctaattagcatatatattacctcagccattttttgtggtgagaacacttaacacttaaaatctactctcttagcaatgttcaagtatatggtatgctattaattatagtcaccatgatacacaatagatctcttgaatttatttatcttgagtttaaaaaaaagaggttatagaatctaaggccctatctgcattatagctaattcattcatggataaaacattctaaatgtttgatattaaaaatactgaagtctaaacatgatgcatttgcaccatgatgaagcccagaaactccagtgttattcatagttatta

SEQ ID NO: 463194 - DNA, 626 bp, Homo sapiens
ttattgctctgtgcttagcattcttctcggaagagacattcctcaggactcactgctttaaaggttcaaccagctgaaaacatttttcaaattgtacagcattaaattcaaaatggatctgaaaatataaagtttgaaagaattcactggcagtattttgatggtgttttattttgygttggggctaaagattatattaacaaattatcttgattttaaaatttaattttttaatttataaaatatatatttatggtgtacaatatgatgttttgatatatgtatacattgtgaaatggctaaatctagctaattagcatatatattacctcagccattttttgtggtgagaacacttaacacttaaaatctactctcttagcaatgttcaagtatatggtatgctattaattatagtcaccatgatacacaatagatctcttgaatttatttatcttgagtttaaaaaaaagaggttatagaatctaaggccctatctgcattatagctaattcattcatggataaaacattctaaatgtttgatattaaaaatactgaagtctaaacatgatgcatttgcaccatgatgaagcccagaaactccagtgttattcatagttatta

SEQ ID NO: 463195 - DNA, 455 bp, Homo sapiens
attgggttgaccgtaacttacaaatatcagtaaggcatgggatgggaggggcaaccccattcattagtgactatgtattgtgaatattcagaaatttatacttttaaataaaattcaatatttttaaatgaaatagactaatggtcataaaattttgttggcagggttatgctcagaagaggactattgcagaaatggattaaactgacccataggcttctttctctaatatacattgtcartattctttatgtaaatcaaaattcttctgaatcgctatctttctttcacttctttctaacctgccccttacatgtgaacatagtatcgaaggtcatatttgtggagctacaacactactttcttgacttagccccgttggtcagttttttcctaattttaaaaggattgtcaggataagaagttgagatggtaagcaagataagggtattgaa

SEQ ID NO: 463196 - DNA, 455 bp, Homo sapiens
attgggttgaccgtaacttacaaatatcagtaaggcatgggatgggaggggcaaccccattcattagtgactatgtattgtgaatattcagaaatttatacttttaaataaaattcaatatttttaaatgaaatagactaatggtcataaaattttgttggcagggttatgctcagaagaggactattgcagaaatggattaaactgacccataggcttctttctctaatatacattgtcagtattctttatgtaaatcaaaattcttctgaatygctatctttctttcacttctttctaacctgccccttacatgtgaacatagtatcgaaggtcatatttgtggagctacaacactactttcttgacttagccccgttggtcagttttttcctaattttaaaaggattgtcaggataagaagttgagatggtaagcaagataagggtattgaa

SEQ ID NO: 463197 - DNA, 532 bp, Homo sapiens
catttttggagatagaattggcaggacttgctaataaatttgatgtgaggggaatgggaaaaaatagaaatccatattgattcctgaagcttggggaactgggtgaagagtgggactacttactaaattaaaaaaatggaaaacactgagtagaggatrgtttccaggatgagggaaggaaaaatcaaaagttccatcttgaaactagatttaaaaactcagcaaataaaaatacagaatccctagttaaacttgattttcagacaaacaatgaataatgttatagcataagtgtgtgcccggtgttacatgagacatgtgtatactaaagcattatttgttgtttatctgaaattcaaacttacctgagcatcttgtattttatctgacaatcctaatggttaacctgtctatgagaaatccaagttgaaatgccaagtgggcaggtagatatttgagctggaaacttagtagagaaattggggcaagagctataaatgagggtcatgagcattaaaacatgagaatttaa

SEQ ID NO: 463198 - DNA, 532 bp, Homo sapiens
catttttggagatagaattggcaggacttgctaataaatttgatgtgaggggaatgggaaaaaatagaaatccatattgattcctgaagcttggggaactgggtgaagagtgggactacttactaaattaaaaaaatggaaaacactgagtagaggatggtttccaggatgagggaaggaaaaatcaaaagttccatcttgaaactagatttaaaaactcagcaaataaaaatacagaatccctagttaaacttgattttcagayaaacaatgaataatgttatagcataagtgtgtgcccggtgttacatgagacatgtgtatactaaagcattatttgttgtttatctgaaattcaaacttacctgagcatcttgtattttatctgacaatcctaatggttaacctgtctatgagaaatccaagttgaaatgccaagtgggcaggtagatatttgagctggaaacttagtagagaaattggggcaagagctataaatgagggtcatgagcattaaaacatgagaatttaa

SEQ ID NO: 463199 - DNA, 612 bp, Homo sapiens
ctgtctgaaaaaccaaccttctctgctcagctcattggagtattcattctggtatagaataaggtgttgcccrattctagaatcataagtaaaaccaattaagatctttaaatttgttgtaattttgtcttttgacagcctgaagagaacaaacatggtttttccaaaccaatttaaatgtggttacatagaaagagatctaccgtttgttaataggagttgtggaacaactgcttccttgctgtcctgcatcttttcagcccatctttcaggcaggctctcccacaatccagtgggtttacctggaatatccaaaaccttcctgccacctatacactacactctgccatagagaaagggttaccagatttagcaaaaaacaagacaaccaataacaaaatacaaaaaaatcccaaacaaaccatgatgcctagttaagtttcaacaacaaataacaattccttctgaagcatgtgtaccctttccctatggtatataagccttggaactggggggtgtaacagtgcagcatggggacccaccatctcatcttgctgctgagaattctgttcataagtccctattaaatgcttctttaggagaaactggaat

SEQ ID NO: 463200 - DNA, 612 bp, Homo sapiens
ctgtctgaaaaaccaaccttctctgctcagctcattggagtattcattctggtatagaataaggtgttgcccaattctagaatcataagtaaaaccaattaagatctttaaatttgttgtaattttgtcttttgacagcctgaagagaacaaacatggtttttccaaaccaatttaaatgtggttacatagaaagagatctaccgtttgttaataggagttgtggaacaactgcttccttgctgtcctgcatcttttcagcccatctttcaggcaggctctcccacaatccagtgggtttacctggaatatccaaaaccttcctgccacctatacactacactctgccatagagaaagggttacyagatttagcaaaaaacaagacaaccaataacaaaatacaaaaaaatcccaaacaaaccatgatgcctagttaagtttcaacaacaaataacaattccttctgaagcatgtgtaccctttccctatggtatataagccttggaactggggggtgtaacagtgcagcatggggacccaccatctcatcttgctgctgagaattctgttcataagtccctattaaatgcttctttaggagaaactggaat

SEQ ID NO: 463201 - DNA, 608 bp, Homo sapiens
tcctacaagcctgtcagtgaagattcccagcagtggggttggcccagagcagaacttaacttgaatttgatggatttaagccaatgtccctcaagtcccatgcagaaagcataccttcatttattcttttgtgttttgctttgttgtcctcatcttcccagaattgaaatatcatgggaccctcttctcagggaaagaaagggggaaatttgactkctggaaagagtgagaggtgagatccccttcagactttccactcctgaacactgcgtgggcctgatgagacaggcgcgttttgtttggatgctaaattaaatggagaggagaccttatgatgtgagtttggcagaggaataaatcaaataaaacagtaaggaaagcagttagccaaacaaaatgggcttacaaccctggatattaatgaggcttttactttaaacgggtatgtttaatcaagcaacgtgaatccatattgggagcgggaggaattatggtgattgttttggaatcctgcccaaaagaggtttgactgtgttatcttgtgctaacaggagcacccagggagcaagagaagccctgcgacagcagcaagggacactgtggggctg

SEQ ID NO: 463202 - DNA, 592 bp, Homo sapiens
tccaacagctgagatttttaattatttatttcacacctgtttacattccaaactcacagcatcagtgagcattaggaacaggtgtttggcaacactgtattttggggtgatgtgctacacagcaataataactgggataggcctcaaggtgcrgctacttgggcaataaaagtataaattggctcaaagtttttggaggtagagggaattttggtggtactttgaagaatcacaggtaaattctacatacaaaggtgttaatgaacaagagaagaaaggagttactttgagcccttgccctaagtaagagctttgcagatattatataatttggttattctcacggcctcataatataggatgattctacagaagaggaaactgactctcaggaagattaagtcccagcctcccaagtttgcacagtaacagctggctgagcccagacgcaaacctgggcctgacaatggcaaggctctcattgtctgccctgcgaagctgcctgcctgtttgattgactctgttttcgttttcccttgtatttatgtttgaggaactggaaacaacctaaatgcctaagaatatgtgatgg

SEQ ID NO: 463203 - DNA, 609 bp, Homo sapiens
caaccaccctcttattatgtgaatatacgagtttcacttttctaattagtactgtgatgtgtattcttataccaaatgtctctgyctctctgtctggtaatctgcctagagcacagtagaagatgctcttcttaagagcgtttgatggaagttgccaaatttcactcttgtcagtactgggagtgcccattttccacgcaaatcctagcagttgtctttatcaatctttgacagtttgatagaaataaatggtacttcatcgccattggctaacttacctgaatattagtgtggttaatcataaattcatttacttattggccttttgtttggattaaacaaattgtttaggtcctttgttggttttgccttggaggtgattgtcatttttcttcttgatttggtaagacatctctatatatttagacattatctctttgaaatgtgttataaatatagccccgatttcaaacatggtgttctgcccagcactgggctacgtttcaatggcaggaaaggattttggaaaaggaagcctgaattaggggaatatatatggcatcactatcttccttctacccacataaatagcatcgcttgtggaagtga

SEQ ID NO: 463204 - DNA, 646 bp, Homo sapiens
aaagcaaattcaagattgaacccaatctctatcaaaataacaataacattcttcacagaaatagaaaaaataatctaatcctaaagtttayatagaactaaaaaatacccaaaatagctaaagccatccttagcaaaatgaacaaaaatggaggaattacattacctgacttaaaattatattacaaagctataataaccaaaacagcatggtactagcatacaaacaaacacatagaccaatggagaaaaatagaaaatccataaataaataaatatattattagtcaatcttttttcaacaaaagcaccaagaacacacattcggggaagacagtcttttcagtaaatggtgctgggacaattagatatccacatgcagaaaaatgaaactagacccctatctctcaccgtataaaaatacaatcaaatttgattaaagacttacatttaatacctgatactgtgaaactcccataataaaacattggggagactctccaggacattggtctattcaaggatatcttgagtaacaactcaaaagcataggcaaccacagcaaaaatgggcacgagtcacatcaagcaaagatacttctgcacagcaaagaaaacataatacaaagtgaagacacaacacaaaac

SEQ ID NO: 463205 - DNA, 646 bp, Homo sapiens
aaagcaaattcaagattgaacccaatctctatcaaaataacaataacattcttcacagaaatagaaaaaataatctaatcctaaagtttatatagaactaaaaaatacccaaaatagctaaagccatccttagcaaaatgaacaaaaatggaggaattacattacctgacttaaaattatattacaaagctataataaccaaaacwgcatggtactagcatacaaacaaacacatagaccaatggagaaaaatagaaaatccataaataaataaatatattattagtcaatcttttttcaacaaaagcaccaagaacacacattcggggaagacagtcttttcagtaaatggtgctgggacaattagatatccacatgcagaaaaatgaaactagacccctatctctcaccgtataaaaatacaatcaaatttgattaaagacttacatttaatacctgatactgtgaaactcccataataaaacattggggagactctccaggacattggtctattcaaggatatcttgagtaacaactcaaaagcataggcaaccacagcaaaaatgggcacgagtcacatcaagcaaagatacttctgcacagcaaagaaaacataatacaaagtgaagacacaacacaaaac

SEQ ID NO: 463206 - DNA, 463 bp, Homo sapiens
acttgtatgtccatcactgtgttattcataatagcagacatggaatcaacttaggtgyccactaatgaatgggataaagaaaatgtagcacatacacaccatggactacaatgcagccataagaaggataaaattaatgtgattttcagcaacatggatgcagctggaggccattatcctaagctaattaatgcaggaacggaaagccaaagaccacatgctcttatttataagtaaatgctaaacattgggtacatataaacataaaaatggcaacgaaagacacgggactactggctggaagagtggaagagggtcaaaggttgaaaaaccacctattgggtactatgctcaccacctgggtgacagggtcaataatcatgcaaaccacagcatcataaaatatacccatgtacattctgcatacaaaaactctagactttactctccttccagagtttat

SEQ ID NO: 463207 - DNA, 573 bp, Homo sapiens
tacagttgaacctaatattttaggaactaytcacagtctgttttgaaattatactcttctcttttgtatgaggtacattattgtgattgatcagtggtcatttactatcaatcatttaaagttacatttaaaattatctatacaattatacaaataactttactcttgaaaagaaagtttctcaacaacactaaaacaaaactagagtctatttgaaaaaggcaaactaaagtaaataaaaagatataaaatgtacaaaataggtacaaaaattcttcaatatgatgatcaaatcatggaatttcagattgtaaaatgatagtttctactagaaaatagttatattaaatagtattacccatatatagaattgttaaggatgtttttagaatatccagaagagtatggtacttacagaaaatatatcagtgtttcctaggcaagcattggtctattgaaattacatacctaagcacttcatacatatttattgaacatttatcatacattaaaaactgctgatcactacaaaatagctgtaagacaaaaatacatgtttaatgaagcttatgg

SEQ ID NO: 463208 - DNA, 573 bp, Homo sapiens
tacagttgaacctaatattttaggaactactcacagtctgttttgaaattatactcttctcttttgtatgaggtacattattgtgattgatcagtggtcatttactatcaatcatttaaagttacatttaaaattatctatacaattatacaaataactttactcttgaaaagaaagtttctcaacaacactaaaacaaaactagagtctatttgaaaaaggcaaactaaagtaaataaaaagatataaaatgtacaaaataggtacaaaaattcttcaatatgatgatcaaatcatggaatttcagattgtaaaatgatagtttctactagaaaatagttatattaaatagtattacccatatatagaattgttaaggatrtttttagaatatccagaagagtatggtacttacagaaaatatatcagtgtttcctaggcaagcattggtctattgaaattacatacctaagcacttcatacatatttattgaacatttatcatacattaaaaactgctgatcactacaaaatagctgtaagacaaaaatacatgtttaatgaagcttatgg

SEQ ID NO: 463209 - DNA, 573 bp, Homo sapiens
tacagttgaacctaatattttaggaactactcacagtctgttttgaaattatactcttctcttttgtatgaggtacattattgtgattgatcagtggtcatttactatcaatcatttaaagttacatttaaaattatctatacaattatacaaataactttactcttgaaaagaaagtttctcaacaacactaaaacaaaactagagtctatttgaaaaaggcaaactaaagtaaataaaaagatataaaatgtacaaaataggtacaaaaattcttcaatatgatgatcaaatcatggaatttcagattgtaaaatgatagtttctactagaaaatagttatattaaatagtattacccatatatagaattgttaaggatgtttttagaatatccagaagagtatggtacttacagaaaatatatcagtgtttcctaggcaagcattggtctattgaaattacatacctaagcacttcatacrtatttattgaacatttatcatacattaaaaactgctgatcactacaaaatagctgtaagacaaaaatacatgtttaatgaagcttatgg

SEQ ID NO: 463210 - DNA, 582 bp, Homo sapiens
tttgtatacagtgttgcatacttctattaataggtaaataatgccatatttaacaagcataagtgatygttattttagtgattacaacatggtactacattaaattcagcattctttctttaccatgtcctttataatgataatttttcattcaacaactatttttctactctgaggtattgttctcacaaaaaaggtaagacaaatgtttgcttctttacagttatttatcagctttcaaaatattaaggtggtttctatagcagattcttatgtgaccccaactcccaatgattcctctactctgtttcaatcctttgtgtaatctttttgccttgagttatgtgggacctgtgacatgcttccaaccaacataaggtggcaaagggaatagaaggctgtcactgatgtacttatgttatataagactccatctgagcagactagaggtagagattctccttgcagatcccatgaattagacatattggagaaatccacatggcaaggaactgtgagcagcctcttggatgtgaaggtggtatccagctgatagccagcaaaaagcaagggccctcagtt

SEQ ID NO: 463211 - DNA, 582 bp, Homo sapiens
tttgtatacagtgttgcatacttctattaataggtaaataatgccatatttaacaagcataagtgatcgttattttagtgattacaacatggtactacattaaattcagcattctttctttaccatgtcctttataatgataatttttcattcaacaactatttttctactctgaggtattgttctcacaaaaaaggtaagacaaatgtttgcttctttacagttatttatcagctttcaaaatattaaggtggtttctatagcagattcttatgtgaccccaactcccaatgattcctctactctgtttcaatcctttgtgtaatctttttgccttgagttatgtgggacctgtgacatgcttccaaccaacataaggtggcaaagggaatagaaggctgtcactgatgtacttatgttatataagactccatctgagcagactagaggtagagattctccttgcagrtcccatgaattagacatattggagaaatccacatggcaaggaactgtgagcagcctcttggatgtgaaggtggtatccagctgatagccagcaaaaagcaagggccctcagtt

SEQ ID NO: 463212 - DNA, 594 bp, Homo sapiens
cacttaattcttcaaatatatctgctattttcaaaatcaccagtaattgtattttttcatttttttaaattttagatgcgggggggtcccggggcatgttcgttatatgggtatattatgggatggtaaggtttggaattctagtgcattctagtttgtctgcatactctctggtttctttcgttgtgtggaagctgtttagttacttaagtctcatcaaccaaaatggtgaacactgaacacaataggtaatatttcaaccctcatcaccctcccaccttctccctttttggagtcaccagtgtctattattttcctctgcccctttgtgtacccattgtttagatcccacttataagtgagaaaatgcagtacttgattttctgattctgagttatttcatttgggataatagtctcctgttccatcygtgttgctttttagggcaggcttttatacctttttatagctgtatagtattccatagtgtacataaaccacattttgtttatccaatcatcctttgatgtacacttacattgattccatgattttgcccttgcgagtaatgaatagagctgtgataagaatatg

SEQ ID NO: 463213 - DNA, 657 bp, Homo sapiens
gaaaataaataaacaaggaaaataaagaaataaactagtgtcagaaaaaaagacagaaawtgctaatatcagaaatgaatgatgagacatcactatggatcttacagacattcaatggataatacaggaatttatgtacaattctatgcccacaaatttgactacgtagaaaaaatagactaattacttgaaatacacaatctgctaaaattcacagaaaaagaaatagacaatttgaatagatctttattattaaagaaattgcatgagtaattaataaccttgcaaaagagaatgtacattgtccaaatagtttcactggttaatcctaccacaaattaaaaaaaataaattataacattttatacaaactccttcaggacatagaagcagaggaatactttctaactcattctatgaggccagcattgtgaaaaagcaaaagcagacaaaatcattataagaaattaaaactatgttttaatgtttctaaggagcatagatgcaaaactcttcaacaaaatattagcaaatcaaatttaacaatgtacaaaaagagttacaataacaaatgagatttatctcagctatgcaaggcttatttaacacttgaatatcaattaatgcaattcatcatatcagcaagctaaagaataa

SEQ ID NO: 463214 - DNA, 566 bp, Homo sapiens
tagaccccatttgtcaatattttattttgttgcagttgcttttggtgtctttatcatgaaatctttgactgtttctatggatggtattgcctgggtttcctccagggtttttatagttttgggttttacattaaagtatttaatccatcttgagttgatttttagaagtccagcttcaatcttctgcatatacctaaccagttatcccagcaccatttattgaatagggaatcttttccctattgcttttgtcagttttgtcaaaatatcaratggtcgtagatgtgtagccttatttctgggctctctattctgtttccttggtctatatgtctgtttttgtaccagtactatgctgtttttgtcactgtagccctgtaatatagtgtgaaatagggtaatgtgaatcttccagctctgttctttttgctcaggattgccttggctattcaatctcttttatggttccgtattaatttaaaatttatttctctaggtctgtgaagaatatcattggtagattgataggaatagcattgaatctgccaactgttttgggcagtata

SEQ ID NO: 463215 - DNA, 532 bp, Homo sapiens
ggtctcagccatttatctttgtttttattgcatttgcttttgggttctttgtcgaaatacttgcctaagccaatgtctactttgagttatcttaaaattattattgatatgccatcaatcaaaatcataaatagcttataaaatgtagataaatcattatttaacagaaagtataatgttacttaaaatgtatcctttaatgagatagctacttttgctcccaatgtatctattaatgaatattacatattgacagaataaatagagtttcagcaacaattttttgtcaccttttaagtggaatcatgcagtatttattcttctgtgactggcttattttactaagaataatgttctcaaggttcatccatgtcattgcaaatagcaggatttccccctttttaaaggctgactaaacatataaatgtatgtatatacgayatcatacctattaattcatctgtcaatgagcattaggttatgtcaattaattggttattgtgaatagtgctgcaatgacaggtaagtgcag

SEQ ID NO: 463216 - DNA, 543 bp, Homo sapiens
tgactgatgtctttatgaaaagtgaagacactgaaggaaagccatctacaagcctggaatgcctgaggctatcagaacccaggagaaaggaatgaaacaattcccctcactgccctcagaaagaaccaattctataaacaccttgatttcagacttccaggcaccagaactgtgagacaataaattttggttgtttaaggcactgagtttgtggtacatttttacagcagccccacgaaacgaatacaccagggatcagtagctgccccccagagcagctggcatcaggacttggctttctctcatttttggtctctgtagatttttcttacttttttactaatgcaactctgcattccaaaatatgttttcaaaaatttatttgttgtgtgctggsaagattttttaggatatttaattttcattttgttggaaatggaagtctacttgattcttcaataataactttctgaaaatggggtttggtttctctcaggtacttattattactttccaagtgaaatttgttatttattttacatc

SEQ ID NO: 463217 - DNA, 560 bp, Homo sapiens
tcaagcatggattttctattactgtgtattcctgtaatagctgtcatttattaaaggcttactgagtaccaggaactttgcacacatttcatttattatttacaataacatggcaaattaggtattattacccccatttcacagatgtggaaagcctcagatataattagtcccaagactgtaaacctattaagtgaccataatgatgggtccttaatatgtgattgttgagttgatggatttgtggtaattttcctgaaagatctttccatctggccatagtgcagtagaaaaagacaccagtttgtatccttatgctataaattactagcttgtgactgtggacaagttacttagcgtcatcaaatctgagttcctgatttgtaaaatgggataataaagcccaatccatgaaggagtcttaaatrttaaactaggtcatacagatgcaaaataaatattgatttattaacttgcttatgtgtttcttttctctcactgaaatatacactgaatgaataagtgaataaattaagaagtaccaagaaaagacatttatc

SEQ ID NO: 463218 - DNA, 389 bp, Homo sapiens
agaattattgaacaggcctacactaaaattcttccttgtccgatgaggatgagggctgggggagaaaggtgaggtggaacaattgaagtgtaatagtatctgcgtagtttttttaaatgtacaatctctctcccggtctccggtccccctgctcctatgtgctggtacctctggactgttcagaagccattttagaactcaggaagcaaaatatgtgagttccactgtgcttctgcaggtgctgtggtggcaaggataacctttgctcgcttgccggggggtgtaaccacgctgttatttaatgtctttgaggattaaagacaccacagaaaattccaaayccacatcctaacacctgaagctcgcacaatgtttctagagcaaatgac

SEQ ID NO: 463219 - DNA, 435 bp, Homo sapiens
cctgctcgccccggccgtccgcacgtccgcgcacacactcactccgagggcgcctccaaggttacccgcgggtgggggctggggcagactccggccactggcctccttcgctgctttcctatcgccgcggcccttctgccgctccagggccactgggatccaaatcctaacgcagaagacactccaaagtccggggagggaagtcaagctgagaggcaggccggcatctgggcagggggcggccttagttgcctccgggtgcccggacagccrggtcaggcgaggtcgcggcaggagggggctgtgactccggcgggcgcgctccgtacagcgcaagctgggctgggggcagcgcgcgggggctgcaggcagcaccgaggcgcccgaggcgccccgggcccgtaggggggcagagacaagcgggctgccaaacct

SEQ ID NO: 463220 - DNA, 551 bp, Homo sapiens
ttttacgggctgacaggcaaaagggacttacctgtctcagatgagactttggacttggacttttgggttaatgcaggaatgatttaagacttttggggactgttgagaaggcatagttgtgttttgaaatgtgagracatgagatttggtagaggccaggggcagaatgatatggtttggctgtgtccctacccaaatctcatcttgaattgtagttcccataatccatacgtgtcatgggagggactcagggggagataattgaataatgagcgcagttatccccatgctgctgttttcttaatagtgagtgagttctcatgagatccgatggttttataagtgacttttccctctttgcttggcacttctccttcctgccacgacgtgaagaaggacgtgattgcttccccttccaccatgattgtaagttttctgaggcctctcccaccctgcagaactgtgactcaattaaacctctttcccttataaattactcagtctaaggcagttagttatagcagcctgagaagagactaatacaaaaacac

SEQ ID NO: 463221 - DNA, 623 bp, Homo sapiens
ttgtgggttaggggctggtttattattcaggtggtcatgattatactcaaagaaaagttttttaagttctttttatcctttacgtcctttacgtcaatggaataaagagcacactcaatgtatgcaggcagtctcacccatttagagctagaatcccaagccagaggaaggaaatcacaatagcctacaggggtggatggtgaggcctggattcaggggccatttcttgtgtcttagtcatgactttgggccaaatgggcactggatgtgtgctgagatgagctgtgctccctggagctgctttctgtaggagcaggactgtggtgagcatcgtttcctctgcagggccttctgagggaggagtttcttctaccctggaagtcagcttctgcttctcttcatcttgctggcatcttctctaccacaatggttattagtrtctttaatcttcaatcccatgggaagaaagagctgttatctctcttcccataaaggacactcagtcacctaagacatttctctgtagttgaacatagcttagttctcactcacagaatgacatttgaatagttctaaaggctcattgcaaacatgagcaccctacggtgttacaaagtccctgt

SEQ ID NO: 463222 - DNA, 557 bp, Homo sapiens
ggctcttggctctgccatcttctcaatctgtgctggtttctctttatgttatttaccctttagatttttcagagaaaataactggtctttaattcactgattcatagagtcgtttatttaagagaggttaatagcgcaatcctcttaatggaaagagtcaagcaaagaaacagagttcgaattccagctgtaccaccaactagttgagtaactggaaaactcagttcatctctatgggcccgatgaggggagaggatatgaatattcaacacttcttattaagacacattttaaaacatacagctttgtagaggataataaggccaggtgcagtgactcatgcctgtaatctcagcattttgagagaccgaagtgggtggagtggatygcttgaggtcaggagttcgagaccatcctggccaaggtggcaaaacaccatctctactaaaaatacaaaaattagccaggtgtggtggcaagtgcctataatcccagctactcgggaggctgaggcacgagaatcacttgaaccaggaggcagagtttgcagtgagccg

SEQ ID NO: 463223 - DNA, 509 bp, Homo sapiens
gacgcaacaggggaggatcacttgaggccaggagtttgagaccagcctgggcaacatagtgagacctttccaccacaaaaaaaaaaaaaaaacccttttttgactaggtgggcatgccagcatgtgcctgtagtcccaggtattcaggaggctgaggtgggaggattgtttgagcctaggagttggaggctgaaaaagaaagagagaaagggagaaggaaagaaagaaagaaaacagagccttgcctggctctcagctgtgtgsctaaggagggtgttttggggcagctgggcaggacagcaggaacacaatgtaagtggcagctgtaggggacagcatatgggtcacagaaggagcatccttggcatgcaggacccaccctgtcctaagttcagtgaatcattgccgtttcccctcctaggtactcaggtacaaacactccatccttctggtttgcagcctccttcctgctccagaggttccagggggacttgaagagaagagcccag

SEQ ID NO: 463224 - DNA, 509 bp, Homo sapiens
gacgcaacaggggaggatcacttgaggccaggagtttgagaccagcctgggcaacatagtgagacctttccaccacaaaaaaaaaaaaaaaacccttttttgactaggtgggcatgccagcatgtgcctgtagtcccaggtattcaggaggctgaggtgggaggattgtttgagcctaggagttggaggctgaaaaagaaagagagaaagggagaaggaaagaaagaaagaaaacagagccttgcctggctctcagctgtgtgcctaaggagggtgttttggggcagctgggcaggacagcaggaacacaatgtaagtggcagctgtaggggacagcatatgggtcacagaaggagcatccttggcatgcaggacccaccctgtcctaagttcagtgaatcattgccgtttcccytcctaggtactcaggtacaaacactccatccttctggtttgcagcctccttcctgctccagaggttccagggggacttgaagagaagagcccag

SEQ ID NO: 463225 - DNA, 605 bp, Homo sapiens
gaaacattctggagagagggagggatttcttaaggatttaggctggtggaggaaaaaggattctgggggagaggcaccaacagcaccaacagcaggaaagagggatgagcctggagtttgtaatgcaatgaccatcttaccctgactggagtggaagggcctaggtgtagtggaaataaaatggatgagaaacagggctggaatcccacgggccttcacagtcagatggaggtaatctgcgcaatccaatgcyagttactggctgccacttttatagaactggattgagaagcccaatcagaggcagacatgaaaaagtctacttcaacatagataggaccctcatccctttccccgctgcctgactttgattccaaaacacagaatctgtatggaccagaaaaccaggcagtcagaccacagagcatcttcttacagaaggaaaaaaaaggctgtgccttctccaccctccctccttcccttgcccctcactgacacctctctttatacatccgtttggagagttctatttccaaaaccagtgaggcagacagtgagaggatagagaaagagggggcacctccaggaagggccctggagccagt

SEQ ID NO: 463226 - DNA, 576 bp, Homo sapiens
atgcttggggagttatgggccatggtgtctctgcagcaaacacacagcytgcatttcaggggtgcctctgttcctggggcaccacagcatgcggatgcctccagctgagccagggctgctcctgtgtcaagttaatgcttgatccctaatagataattccagtcacaggctcgctggcaggcctggggttctgagcagggcttgggctggctgtggtcaggtggaagctatagagggaatgcttctcctggcaggtgctgggcccaaacctggagggccattggaacagcaagcatggaggactcactgagaaaaacactaatgcatttccaaatgggtgtctgagagagtttctccaaattcacacaggtataaaattcctggaccaattccaaaagtaggtacagcatgtgggtttagccttggataaaggctcgagggcagtgaacaaagtgaactcttccaggacaaatacattctctagctgcataatacagcatcccaccggaaccatgcccaacaaatgggcattgtcaagtccaaaacattgctagggccacagtccctccagcccag

SEQ ID NO: 463227 - DNA, 576 bp, Homo sapiens
atgcttggggagttatgggccatggtgtctctgcagcaaacacacagcttgcatttcrggggtgcctctgttcctggggcaccacagcatgcggatgcctccagctgagccagggctgctcctgtgtcaagttaatgcttgatccctaatagataattccagtcacaggctcgctggcaggcctggggttctgagcagggcttgggctggctgtggtcaggtggaagctatagagggaatgcttctcctggcaggtgctgggcccaaacctggagggccattggaacagcaagcatggaggactcactgagaaaaacactaatgcatttccaaatgggtgtctgagagagtttctccaaattcacacaggtataaaattcctggaccaattccaaaagtaggtacagcatgtgggtttagccttggataaaggctcgagggcagtgaacaaagtgaactcttccaggacaaatacattctctagctgcataatacagcatcccaccggaaccatgcccaacaaatgggcattgtcaagtccaaaacattgctagggccacagtccctccagcccag

SEQ ID NO: 463228 - DNA, 606 bp, Homo sapiens
catcatgacagcaatcatagaccagggccaatcctccctgaagcagaacattccttcttcattctggcaaatttgcaaggctgttacaccggatcttgaagatacatagtggaaaatgatgttattaatgtaccgatgaaaaaaatggaaccacatatatcctagctttaaatagcaactttttcccccctcaagaaattaccstcagaggagcttatgtctgcggctagatattttgagatttgacttttttttccccctctccttgtatttctgctttcctaggctcacctccacctctgtagccagctccctagtcattggtccagggcaggtatatgtcagaaccctaccaggaatagcctgcaagttcttctggctttgattttccaaacagggccttaggttggggacacaaagtctttgccaagttgggggaagaggggtggggtgtgctgatgggtaaagcagagagacatgcttctagaaacaggaagacaggaagggaaaaggggtctgtcagcaccaggaagacaggactctggcaggaccccagtgagttagctatgtggtctggaagcagtgaggacttgctaggcaagacag

SEQ ID NO: 463229 - DNA, 452 bp, Homo sapiens
cagaatttaggggtctatttatataatcatagagggagggagcactctttccttcccttcccttcccttcccttcccttcccttccctccctccctccctctctctttctctctttctctctttccttctctctctctctttctttcyttctttctttctttctttctttctttctttctttctttctttctctctttctttctttccttctttcttttttttttttttaaatagagttttgctcttgttgcccagactggagtacaatggtgtgatctcagctcaacgcaacctccacctcctgggttcaagtgattctcgtgcctcagcctcctgagtagcttggattacaggcctctgccaccacacctggctaattttgtatttttagtagaggtggggtttctccatgttggtcaggctggtcttgaactcccgacctcaagtgatc

SEQ ID NO: 463230 - DNA, 582 bp, Homo sapiens
cttctttataagtaggtgtgagtgtttaactcatttcatcttctagttgcacataagcattcacacattgagacatgtaccaactcattataaattacttccccttttatttcttttttatatccaagttaggacagtatattgatttctataaaattatgtatgtaggtggattatgttacagctatgaatgtcatttcaaaataataaagaggtcatttcaaatatttgttataaaacagaggcctgggtctgacagtgctgcagtgccgagaggtaaagcttccaggtctttttccacattccttacaggcactctgatgactaaagccaggaattctgcgaatcctatgtattctttccayctacatagtttgtgattgttttgttttgagacagggtctcactctgctgtccaggctggagtgcagtggtgcgattacagctcactgcagccttaatttcctgggctcaagtgatcctcctacctcagcctcctgaatagctgggaccacaggtgcataccaccatgctagctaatttttgtactttttttgtagagacagggttttgccatattgc

SEQ ID NO: 463231 - DNA, 615 bp, Homo sapiens
tgtgttgctattcctgaaattgcactctccacgcaggcagagctaggttctaaatattacatttgtaagttatccagggcctcccgtggtagagaagattgttacctacactgaaggccacctagaaggagttctaaggcaaggtctccatggtttcgaaagaactgggagggtcaggctggtgagtcactctttgctgtgtggggttggctctgagacgtgatgcctggtctgctttcagaaggcagccgggttttcagggaaagcagtgagcatgatcccagaggccccagggagtctggtctgctcatttgtttgcttttccgaaacaggggaatamatcactgtaggatctgcaggtacctaaggtttcatttgtaatgacttgggcagtggcttccctgatgctgacaatttcaaaagattttttcagcctcgtggctgccatttctcccaggaaccagtaaacccgacccccttggaagccgaacatctgaaagtttaggtttttaaatctgcccagtccccaaacccagaatgcccccaggtgactccccccagccccattcatctcagagcccacatggacagagatgtagttttcatcagacagca

SEQ ID NO: 463232 - DNA, 615 bp, Homo sapiens
tgtgttgctattcctgaaattgcactctccacgcaggcagagctaggttctaaatattacatttgtaagttatccagggcctcccgtggtagagaagattgttacctacactgaaggccacctagaaggagttctaaggcaaggtctccatggtttcgaaagaactgggagggtcaggctggtgagtcactctttgctgtgtggggttggctctgagacgtgatgcctggtctgctttcagaaggcagccgggttttcagggaaagcagtgagcatgatcccagaggccccagggagtctggtctgctcatttgtttgcttttccgaaacaggggaatacatcactgtaggatctgcaggtacctaaggtttcatttgtaatgacttgggcagtggcttccctgatgctgacaatttcaaaagattttttcagcctcgtggctgccatttctcccaggaaccagtaaacccgacccccttggaagccgaacatctgaaagtttaggtttttaaatctgcccagtccccaaacccagaatgcccccaggtgactccccycagccccattcatctcagagcccacatggacagagatgtagttttcatcagacagca

SEQ ID NO: 463233 - DNA, 642 bp, Homo sapiens
ctgtgctttctcctgtactgcactgccttccgtgggagagaccagcccggccacctgagtaatctgcacagccacccattgatgacttctttaccattagtgttctcaggaacctgaatttttatcatgtaaaaggctttggaggagggagagggcaataccatgtgatctgccccaagctacactgtatacaatggtgagcaatgggggaatttccatttcttccttcccttcctccctccttcccaggcaaggcgctggtgccaaccagggatgtacaatgtgccaagtggccactgctattagagactcaagtcttgtgcacctctgtgtaaatgataatagcagtgaccacctggacactgaatacccactcagcctcccacagttctgaataaaccygctggccagaggcgtggtctcaattagcctctcctgggccctcaagctccctgcaggcttatccgtgatcctgccagtagctggacccagcataaaatttaatcggcagaaaaggaagaaaagggcagcaaatgccttttttacttgatatagcaggggagcttctttccatgggacagtagagggagggcttctgattaatctgcttgccctaagctctgcccttccctcgcctcctct

SEQ ID NO: 463234 - DNA, 580 bp, Homo sapiens
gcattatttaaatgcaatttagatattgaaagtatctatcaaaatagaaattgaaaacacatggatgttgtgacaaggtcagattgatttctctatttatttgtcatggatttgtagccaacagttggtgcaccagtagggtgcaccagtggtctatggaccccactgtgaatagggctgttctagatttcagtttaaaagtcatctatttaggggactttcctggacagctcatctaaagcagattcttgcacacacacccagtgctgttagtctctcttctgtacctcctattggtctccagtgtggcacagagaatttgtgattagatgtaacgtgagcagtttcttatcttgaaatcagtctgttgcttagctgatgagtaatttcttccacctctctgaccacccatattccctgctgaaggtactttgggcacctgcctatgattgcggggacagagcagctccctaccaccctgtatcagaaaacaacacctgagcytacaccaagactcaagcagattttagtcaccagttctcagtggtagaatccaatctgtagcatcagggtggggttg

SEQ ID NO: 463235 - DNA, 595 bp, Homo sapiens
attactatacttaggtaacagaataaagaggctcttatttcagaaagtccaaaatgcarattgtccaaacataatagtctcccttatctatgctggaggaggtgccatagtgctgataacgcaaagcaggaagagacgatggaggaattctttctttctttccacttagtgcatcaggcttgctttctagcttcattgtgctttgggcaataggattagttgcccttccctgagctcagacagtgccgatgggggcctggatgtacctaaagacaggcgggaagtggtttgagatttatttgcctgtaagcaaatgaaaatgctccagccacatgctggtagtggagacagcatgggcttctgcggctgacacccccaaatcacaaggtggcctttgctgcctggccctgggggccctctgagccacccaccctcagtgctgtgaacagcattcaccaaaaggggcagggagtcacctgcagaaaaaaatcagagctggacagatggaagggtgacttcagtgggagaaggtggctctgagtcccctgccagtgcgcagggaggctgggtgactgtgtccccaggaagccccatc

SEQ ID NO: 463236 - DNA, 486 bp, Homo sapiens
ccttgctacacatgagagagactgtgaagaaatggtaatcaaggatgtgatgcgattatagagacaccatatcagaatagttaagagtatagaatttgrcattagaaaaatgtggaattgaatctcatttctgtaactttgttgtggatggaaccagtaccttaacttctgtagggactttttttttttcacctacttaatgattatacctttaactaaattcctagagtcattgtaaggcttaaataaaataatgcatatggagtggttagtgaaggtttggcagggaaattttaggttaaaaataatcaacatgggtattgagactcttttctacctcttatcttctttggatattgacatactttggtatatattggtagaaaaaaatctttggttatcttcttggaaagagtgctagacttttgcacattaaacctttcttggaaggagatgagggagaatgatatttccttttcctgttag

SEQ ID NO: 463237 - DNA, 486 bp, Homo sapiens
ccttgctacacatgagagagactgtgaagaaatggtaatcaaggatgtgatgcgattatagagacaccatatcagaatagttaagagtatagaatttggcattagaaaaatgtggaattgaatctcatttctgtaactttgttgtggatggaaccagtaccttaacttctgtagggactttttttttttcacctacttaatgattatacctttaactaaattcctagagtcattgtaaggcttaaataaaataaygcatatggagtggttagtgaaggtttggcagggaaattttaggttaaaaataatcaacatgggtattgagactcttttctacctcttatcttctttggatattgacatactttggtatatattggtagaaaaaaatctttggttatcttcttggaaagagtgctagacttttgcacattaaacctttcttggaaggagatgagggagaatgatatttccttttcctgttag

SEQ ID NO: 463238 - DNA, 548 bp, Homo sapiens
tctaaaaagttataattattataagtataaacttacaggctctgagcaataaaccaaattaaaggtaagaaagctgccatggaatctcaatcttgcaacccaggctgttagaaacagacatgatggtgatccccaaatggaaacctgccaaatgataactccaaagaaaggcatagtcattctagctcaacagamaacaacaacaacaatccctctgtttcttcatagaagaaatcttcttctggtagatttatatttgctatagaatttgtacatctggaggggattaatagactcattctctgggcccaggtatgcttttggaatgaaatctctgccctcaggtggaaattaaaagcaaaaaagagaagttggcaggttgtttaggtagaggaaagattcttgttgatattccctaaccaggatacctgttttctaccatttaataaatggaagtcaggaaggaaattagaaggatctgctgttgtacttgataattgaggtagctataaaaatataacagcatgcctgtggaaagtgtcctaaca

SEQ ID NO: 463239 - DNA, 615 bp, Homo sapiens
ttaacctcaatcagattcatgaaaagcccataaaatttttatgggagatgtaccagcttggaccaaaaaaatagaattcaaaatgaagaggccactagttctccagatttcaacaagaaaaaagcatgatgacaaagctacctagctacacacatggaaaactaattatatcttagtgggcacagacataagcccacagctcagagccaagagcagaagaaaacaggataaaagaattactttcaggaagcagaagttggtcctaatataagaacatgtttttctagagttgaagaacctgacaatatgggcccttcaagcttgatgctggtcctatgatggatttgagtatattttgtacgtaagagaaatgtgaataatttggggcccaaagagctagaaatttacaaagtttacaagtcaattgtggtaaattgcaaaacacagccatattcttccatttctattatacaagcctctttgcactatgactttggcatttgtctcatcaatatgagtaatctactttttcrcttcttgcacttgagatgaactgtgattagctttaactagtagcatgtggaggaagtaacattgtatgacttccaagccaag

SEQ ID NO: 463240 - DNA, 570 bp, Homo sapiens
tacaggctcaaatataacaatgagtgtcccgataatcaacacatacaaatatagccatgtaggccttccaggtaaggagaatgtaatttatatgaaaggacattgtttttttcctaacaatacaatcggataatttatgtgtgaaactgttatctttttctataaacttaataaatatcttttttctcctagagggagagttatctttttgtgttatgtacagctctctacttcaacattaaccatacattagcaccagaaaaytttcttccatgagtggaaaatttgattaatttcttgactttatattggttattttcatttcttagaccaatgatctacaaaccctaatgagcatatcacacagagctatcagtaaaaattttgagtatgcatttcccaagaaatattgatttatttataaggtatacgcaagtagtatactagttgaacatattgtgaatactacaatacataaagaaaaatttatttagaggaaggatgaaataaatattaatgaaagctccaatattttgttttctccctcatggatcattttgaataacccac

SEQ ID NO: 463241 - DNA, 570 bp, Homo sapiens
tacaggctcaaatataacaatgagtgtcccgataatcaacacatacaaatatagccatgtaggccttccaggtaaggagaatgtaatttatatgaaaggacattgtttttttcctaacaatacaatcggataatttatgtgtgaaactgttatctttttctataaacttaataaatatcttttttctcctagagggagagttatctttttgtgttatgtacagctctctacttcaacattaaccatacattagcaccagaaaattttcttccatgagtggaaaatttgattaatttcttgactttatattggttattttcatttcttagaccaatgatctacaaaccctaatgagcatatcacacagagctatcagtaaaaattttgagtatgcatttcccaagaaatattgatttatttataargtatacgcaagtagtatactagttgaacatattgtgaatactacaatacataaagaaaaatttatttagaggaaggatgaaataaatattaatgaaagctccaatattttgttttctccctcatggatcattttgaataacccac

SEQ ID NO: 463242 - DNA, 413 bp, Homo sapiens
ctgaatacaaaagtcaagaccatgtaatgcgcaattccagggaacacaccattcacaagagccacagtgtacatatacattgtggcaaagttgcagagaaaatggagtgragggacagcaggcagtatttgcacaaaaaatcagcagtccttggtgagcagttaatatttggatggtgacagagagggaggattctagggaaactatgagatttctggtttagaggaatgtaaaaatctgaggattatgcttcaattgtttggcaagtgtttttatggacagaaatgccaaccaccccaccttttacccttgtaatctgaattatatataaaacaaaaaaaatggctttggctctgggtccatggagtgagtgaaatggctcaacaaaagtgaataactggaatgttactgta

SEQ ID NO: 463243 - DNA, 413 bp, Homo sapiens
ctgaatacaaaagtcaagaccatgtaatgcgcaattccagggaacacaccattcacaagagccacagtgtacatatacattgtggcaaagttgcagagaaaatggagtggagggacagcaggcagtatttgcacaaaaaatcagcagtccttggtgagcagttaatatttggatggtgacagagagggaggattctagggaaactatgagatttctggkttagaggaatgtaaaaatctgaggattatgcttcaattgtttggcaagtgtttttatggacagaaatgccaaccaccccaccttttacccttgtaatctgaattatatataaaacaaaaaaaatggctttggctctgggtccatggagtgagtgaaatggctcaacaaaagtgaataactggaatgttactgta

SEQ ID NO: 463244 - DNA, 543 bp, Homo sapiens
gtcagcctttcacatccgcagagccttctttccctaataggaaatgtctgctggtgactttctccccagagcctgcgttggcatcaggccaagggctgagtcctgccctcctcatctcaggggctgccacccctgtcattttcctgtttgtttagactgctagaargagaacgtactgccctaggtttcaaagcctcagttaagtctccctgcacctaatgagttctgctttgaaaatccatcagcctcagacgcggctctgtctgaccctgtgattctctccttggctcagtaatcaggtggggaccaccagaatggagcacgactcctcttccggccgctccctggcaggtggagtgatggtctgtccttactccaggttgcaggagcagctcattagagggagtgacacacagtctcccagagctgctggctggggctgttgctgggcaaggggctagggggacagaactggtattatgggcctgggatggctgggtattctggggttcccagccaaaagtctcctgcaaggccagtagc

SEQ ID NO: 463245 - DNA, 560 bp, Homo sapiens
atctagttacacatgatcttgacatatacattcaatatggaaaaaatgtagattttttgaaagttacaagttctaagtytgattctactaccaatccattttctgttcagctttattctaccttgtaaggaatatgattcttattctgttaagagaaacaaacaaacaaatagctgtctgcctgcctccagcagctttaattttctttaatttttaatattaaattactttgtatccgttatagtatttctaaggttttggtataattgctctattagctttgtcaaattagttggaaagttaactaccatttattatagaacagttaacacacaggaattaaccattcattaaaagttgttaaaatattgcctataaatccatctagccaagggaatttctggcagctagttatctggcaatttttaaaattttttttagtgattactggatattttaaattttctcattttaggtaattttggtaatagagtttttccttaagaatcattcattttatgcagattttttaaaaccttgacataatattattcaataat

SEQ ID NO: 463246 - DNA, 575 bp, Homo sapiens
tatcttggcacccccttgtgaaatgggatgcctgcctctgcttctgagagtggtagggattccacctcaaatcttccactcaagggagcgctccctccctgcccccagtggcatacaacctcaggagtagggctgtggctgggctttcgggatgaaaattcagtgactaaggtcagggtggtgagggtgaacctccgacaaaagctgtagacacactagttgttggattcaatcattcagctgatcaccagggtgtgactctttctttctctttaaatgtcagattctgttctccctcctgctaatattaaaagtgatcgtgtgtccaattggcacagaacaaattttacattgctaacaggttccatggcacaatgcaaagggcccatgtatcagtacttgcagtatccacagagggctgtggtaatccctttccctayatatagctgtgactgtcaccatccaacctgtgggtggtatgctgtcgccacctgcataccttacaggattcatgtgtcacctaacagcttcccgctgctgccctagctaaagcctggtatgtaggaagagtggca

SEQ ID NO: 463247 - DNA, 505 bp, Homo sapiens
acatgcctggcttgtttgaagaacagaaagctggctagtgtgacagagaccttaggcacctgggggaacagtggcacaagatgaggacagaggcaacatagaaggcctcatcacacaggccaagtytaggcatttgagttttattctaagagtaatgagactgcattggaggattttaaggttttctctcagctgagcctcattcccttttttcagtgtgtgcaatgcaatcatatccaaaagatgtgcaaatttagtattgccaccctgttaacaactaaaacctacagcttcagcaccataagatggtaaggaaagaaaggaaaaaaaaaaaaccccaaaaccaaacataaaaacaaacagaaaaaaacccacagctacctcaattggacaaaataatgggatcctaaagaaaccacgaatgctagaatttattcatttgacaaattttgttgttgatacccagtctaggctttaagcggtgtgaccttaggcaagtcactca

SEQ ID NO: 463248 - DNA, 505 bp, Homo sapiens
acatgcctggcttgtttgaagaacagaaagctggctagtgtgacagagaccttaggcacctgggggaacagtggcacaagatgaggacagaggcaacatagaaggcctcatcacacaggccaagtctaggcatttgagttttattytaagagtaatgagactgcattggaggattttaaggttttctctcagctgagcctcattcccttttttcagtgtgtgcaatgcaatcatatccaaaagatgtgcaaatttagtattgccaccctgttaacaactaaaacctacagcttcagcaccataagatggtaaggaaagaaaggaaaaaaaaaaaaccccaaaaccaaacataaaaacaaacagaaaaaaacccacagctacctcaattggacaaaataatgggatcctaaagaaaccacgaatgctagaatttattcatttgacaaattttgttgttgatacccagtctaggctttaagcggtgtgaccttaggcaagtcactca

SEQ ID NO: 463249 - DNA, 539 bp, Homo sapiens
ggggaataataggtccttctcatataatgttgttttgaggagtaaaatgtttgtaaaatgtgtgcatcacatggtaaacatgatatgtgtttgctattattctataggcaaaggcacaattgactgatacatttgttcatctattttacaaatatttcttgagtacctgtcatgtgcttggtgctgtaccaagtgctgagatgcaattatgagcaggccagactttgtccctgcctggcacctggcttcttgcaccttactctrtgtgaaaacaggcatgtggttgctgaggagggacccaccagctttggccaatgtatgcggaaaggggcaaggaacggtacaaaggttgctttattacaccgggagccactgggagtccaacccaggtcctatcccctagaaggccccctggagtctgcagataatattcaaatataaaaagaatttccttggaagaaccatctggtggcagtgagcatgggcacccattgggtcctcagcctctgctgccatctagttagttgacatcatgttat

SEQ ID NO: 463250 - DNA, 397 bp, Homo sapiens
atggtgtggtgggaaagcagagagaaatgtggttggccacagtctggggctgtgatgaggmtgaatgtagccaaatgatggaggttgaggaaagtagtctttttaaaatttaggtaaaagggagacagactgaaatttgtctttctctggatgcaatgcaatgtgagcagaggattaaaaagtggccggatgactcagggagacagagaggtcagttgggggagtcattgtagtagctcaagtgagaagagataaaaacctggactgaggatggccagtgagcctgactggattaaaaggagcaaggcagcccagcccctctgagtgagctgcttttgtggccttctagtacagaatgagaagaggttcttggctgggctagcttggccatagttat

SEQ ID NO: 463251 - DNA, 622 bp, Homo sapiens
gctccatcagggagatgggagctcagtctcaaatccatctccctgactgactaaaactaagggtttatgtagcagggaagaaatgtaacaatgtgtaaggaaacaagaactagggagaggcaaggaggcatctggtgccatgctctggtgcatttcaattctttgatactttttttgagaagctctgaaggaggaaggaactcagataaaacaaatacaagttttaagctttaacagcacaagggccgatttctatgtttatcaaaaagaacagtctatgggagtatcargttggtttcaatattctagatattctgtttaagaatagtgggaaggacacaacactttttaggaagattccatctttatgagggttaagaaactcaaatactttcaagagccagcaggtaaagtacattagtgaagcaaatcaggtgtataatagaaggggtggcatgtccaaagactcagaaattcaatttaaaaaatagtcagtgccagttgaaacacatataccagctaagttcagccatcaggatgctcctgtgagattcttggtctaagtgcttaaatttaagtttcaatgctggaagattttggaaagtcctgactgaggaagaat

SEQ ID NO: 463252 - DNA, 622 bp, Homo sapiens
gctccatcagggagatgggagctcagtctcaaatccatctccctgactgactaaaactaagggtttatgtagcagggaagaaatgtaacaatgtgtaaggaaacaagaactagggagaggcaaggaggcatctggtgccatgctctggtgcatttcaattctttgatactttttttgagaagctctgaaggaggaaggaactcagataaaacaaatacaagttttaagctttaacagcacaagggccgatttctatgtttatcaaaaagaacagtctatgggagtatcaagttggtttcaatattctagatattctgtttaagaatagtgggaaggacacaacactttttaggaagattccatctttatgagggttaagaaactcaaatactttcaagagccagcaggtaaagtacattagtgaagcaaatcaggtgtataatagaaggggtggcatgtccaaagactcagaaattcaatttaaaaaatagtcagtgccarttgaaacacatataccagctaagttcagccatcaggatgctcctgtgagattcttggtctaagtgcttaaatttaagtttcaatgctggaagattttggaaagtcctgactgaggaagaat

SEQ ID NO: 463253 - DNA, 593 bp, Homo sapiens
  misc_feature (1)...(593): n = A,T,C or G
aatgattttataaggggtttcgccttttgcttggttctcattctcgttgcctgccgccatgtaagacttgcctttctccttctgccatgattgtgaggcctncccagccacgtagaactgtgagtccattgaactttttctttataaattacccagtctcaagtatatctttattagcagtgtgaaaacagactaatacactgcttttccaatatgcatcagattagtccactgtgttcactgccttctgcagactcgatgaacacakgtcaaaccctctaagtacgatgggaggaaagtacctaactctctaacaactttttgtaaagaaatgcttcaatttccaatcatacttcaaccccaatccttttagatctcagaggtatatgagggataagggtaataaaaccgggctagccatgtcctttgcaagttttgcttggttggcttcagccactaccaagacagaaagagtcccatgaaagatccttattattattattattattatgaattatgcatttcttatgattcccttaagagctccctttccataccctttactcccaaggacttgagagctcttttatttg

SEQ ID NO: 463254 - DNA, 455 bp, Homo sapiens
attgcattttttaaaataaaatatctaattttacataaatattacttgtaaagattagtgcacatatatgaaaaatttccttcatatatttaagtctatgtttttgaggaatcctaataaacagtttaaagtaagataagaaayggcaaacttatatctcattacagattttatataccaacatgggctagttctcatgtagatgaaagagccttaatatatagatttcaattaaacccataagtagcaaaatactataaatttaaaccagtggaaaaaaaactgttacaactcaattttcattatacagaattgaatatatacaaaaaactgtgttggtgaattgataaagtgaaaatcttatccttcattagcccacactaatttttccactttcttgcctcaaggggagatacattattaacatggttctccatccaataccacaaaacttt

SEQ ID NO: 463255 - DNA, 455 bp, Homo sapiens
attgcattttttaaaataaaatatctaattttacataaatattacttgtaaagattagtgcacatatatgaaaaatttccttcatatatttaagtctatgtttttgaggaatcctaataaacagtttaaagtaagataagaaacggcaaacttatatctcattacagattttatataccaacatgggctagttctcatgtagatgaaagagccttaatatatagatttcaattaaacccataagtagcaaaatactataaatttaaaccagtggaaaaaaaactgttacaactcaattttcattatacagaattgaatatatacaaaaaactgtgttggtgaattgataaagtgaawatcttatccttcattagcccacactaatttttccactttcttgcctcaaggggagatacattattaacatggttctccatccaataccacaaaacttt

SEQ ID NO: 463256 - DNA, 574 bp, Homo sapiens
cctatcagccacaaatacaagctaaactttaaatcttgttggactgggatgagataaaaaatattaatagtgaatggatttacaaacaatgataaaacaaaaagcagagctgagaaagccaacaagaggtggagctgaaaatatgtsctgagagccaaatataaaaactgtgtcatttggaggagtcattatgcaggatccatgggtatgaagcttgctattaatagggctgaaccagttcatacaagcagaaagaacataatcaaaggcataggggtaaaaattagatggagttttctgtccctttatctcataagcatttactttgttgggttgtttctggacatacttctagcatctttatatccatacattatattgcacagggaaccaagaacttaacaagaagtggggtaaaaaagaacagaaagatgtgaatggcattatatgaggagcttgaacacaaggaatgcaactatgcacaaatgtaattttctgatggaagaaagattccaagaacccgtggatttcaagtatatattataagaatgcctttgacgaaaaaaaaaagaaa

SEQ ID NO: 463257 - DNA, 590 bp, Homo sapiens
ataaactgcaggtttggttggcatcaataaagtatggagggaatgtatttggacatcaggagaaggagaatgctgtcacctggaaggcagctaaaaagtcacaaaagatctcaatgaggccagtgatgccaatgggagctgctgggaattgactcttttaagtgtgatgtacaccaatctagatatacagtgatgacaaacaraaagagcccagcagcttcacagtcacccatgtggaatcctttacatccagcagttaaagttaggactaatttaaaagaaaagaacagccagtttgccaagggcaataacagaaggaaatgcctttagagaggaaaaggaaaacggaggcagatggtgtttgtggaagcaaaacagtctcctctctactatacttttaaaagtatagcctatcctggaagtagaaattagagatttaaaatggacccaacatgactctaaagttacgggatttgagcattaatgaagcccactatttatacttgtaatattcttctgcaacttatttagtgtggcatatttattaattcaacaaatgattattgaactctatgctaggcactgtgctt

SEQ ID NO: 463258 - DNA, 609 bp, Homo sapiens
aattatacttggaggctgcaggtagaaataaaggcccacttgagatgatttccaagctttggcccagtgacaaaaaataatcaagatctgatattcaatcttttcccactcaaactttatttttgatttaaaattgaatgtacaaatgcaaaatatgttgccttttaaacttcaagaaacatattatattgctgcctaaacaaacataacattgcttgctgggtggtgttatgttgggattctatatgtgaagtgacgagcagagaaacatgactccactgtatattattattatgtcctacaaaatacaatgcactgattgaaagaaaaatagttattttcaatattcattcttgtacccactgaaaaaagttattatccrccttctgtttgtcctaatatgcttgaaaatcttgagcaatgtgcacacaattaaggtgtgttttaactttatatgaattataagttatggatacatacatgatttttttattgtcaggggaaaagaaagcttagctagaattttcaagtaaaccacttcaacatttcccaaggaaggagccactcactattatttgcttgagaaataaaccattgtaatctcttaaa

SEQ ID NO: 463259 - DNA, 609 bp, Homo sapiens
aattatacttggaggctgcaggtagaaataaaggcccacttgagatgatttccaagctttggcccagtgacaaaaaataatcaagatctgatattcaatcttttcccactcaaactttatttttgatttaaaattgaatgtacaaatgcaaaatatgttgccttttaaacttcaagaaacatattatattgctgcctaaacaaacataacattgcttgctgggtggtgttatgttgggattctatatgtgaagtgacgagcagagaaacatgactccactgtatattattattatgtcctacaaaatacaatgcactgattgaaagaaaaatagttattttcaatattcattcttgtacccactgaaaaaagttattatccaccttctgtttgtcctaatatgcttgaaaatcttgagcaaygtgcacacaattaaggtgtgttttaactttatatgaattataagttatggatacatacatgatttttttattgtcaggggaaaagaaagcttagctagaattttcaagtaaaccacttcaacatttcccaaggaaggagccactcactattatttgcttgagaaataaaccattgtaatctcttaaa

SEQ ID NO: 463260 - DNA, 508 bp, Homo sapiens
ccattctcctgcctcagtctcccaagtagctgggactacaggcacccgccaccacacccagctaattttttttgtatttttagtagagacggggtttcactgtgttagccaggatggtctcaatctcctgacatcatgatccacccaccttggcctcccaaagtgctgggattacaggcatgagccaccacaccctgctcatctttgtttttttacttaggattgccttggatatttgggctcttttttgattccacatgaattttaaaataagtttttctagtctgtgaagaatgtcagtggtagtttaatagcactgaatctataaattgctttgggcagtatagtcattttcacaatattgcatttatattcatgaaggatattggcttgaagttttcctttttgttgttgtatttctgccaggctttggtatcagaatgatgctgatctcataaaatgagttaracaagagtctctttttttttattttttggaataatttcag

SEQ ID NO: 463261 - DNA, 449 bp, Homo sapiens
tcaattagttcagattttctacagagatgttcatattatctgctagcaaagccttatttcttgtttctcaatcagtatacatttttatttccttttcttattgcataagctaggattttcagtaaaatgttaaaaaggagtggtgagtgggaacatttttttctcatacctgatcttagtgagaaatcttgtaggttctcaccattaagcatgatgttagctgttaggtatttttgtagatattccttattaaattgaaaaagttcccttctattcctagcttcctgacagttttaatcataaagggtattgaattttgtcaaatattttttcttcatgtgttaatatgataatgtgatttttctttagcctactgatatgatataaattaaatatattaattgatttttaaaatgttaagccaawcttgcatacctgggatagataaa

SEQ ID NO: 463262 - DNA, 575 bp, Homo sapiens
agagaaaagtcatggcattataataaaaagttgaatttcttgatatatgctgtagattgacatttgcagctgcagttgtctgccatttcaagataaaagaattcagtgtaaggaccactgtaaataaataaaaggaaatttttgaaaccatagatgcaactacaccagcaggaaggaaaaccattcttcttttttttttgagaaatacctttttataccctattgaaaatgcagtttttatccatgtaatagtccattctaacactgctatgaagaactacctgagactggataatttatgaagaaaagaggtttcattgactcagtttcgcaggcttaacaggaagcgtggccrgaaagcctcaggaaatttacaatcatgatgtaagggtgaaggggaagcaagcaccttcttctcatgactggcgagagggcaagagtgaaaggggaagtgccacacatttttaaacgatcagatctcttgagaattcacttgctctccaagaaaagcacagggaaatctgccctaattatcaaatcacctcccaccaggcccctcctacaatttgacagga

SEQ ID NO: 463263 - DNA, 575 bp, Homo sapiens
ttttggacatatacttagtgtagaattgctggatcctgctccatttgtagttttttgaggaacacccacatgttctccatagtggctgtaccaatttaattcctactagtggtgtaggagggttaacctttctgtgcatcctcaccagcatttyttattgcttttttgatccaagccattttaactaggatgagatgatatcttgcggttttgatttctattttcctgataatttatgatattgagcatttttttcttatacctgtgggccatttgtatgtcttcttttgagaaatgtttgtttacatttttttgcccattttaaatcagattattattattattaccgctattgagttgtttaagttccttatatattctggttattaatcctttgccaaatggttagttcagaaatactttctcccattctgtgagttgtcttttcactttgttgattgttttctttgctgtgcaaaagatttttagcctgatataatcctatttgtctatttttgctttggttgagtgtgattttgaagttttacacaagaaatctttgcccagacaaacgt

SEQ ID NO: 463264 - DNA, 473 bp, Homo sapiens
agtctttaatccatcctgatttgatttttccatatggtaagacacagaggtctagtttcattcttctgcatatagttacacagttttctcagcataatttattacaatgatcatgctttttatttgtatgttcttgccatctttgttgaagatgagatggctgtaaatgtgtagatttatatcaacgttccctattctctttcatttgtccatgtgactgtttttatgcgagtactatgctgatttggttactatagctttgtagtaaattgtgaagtcaggtaatatgacgccttcagcttttttctttttgctcagtattgatttggctttttgggggtctttcattccatatatatattaagacttttcttatatttctgtgaagaatgtcattggtatattgatagaawttgcatgaaatctgtaaatagctttggaatagtattgccattttaacagtattaattctt

SEQ ID NO: 463265 - DNA, 577 bp, Homo sapiens
agtattgccattttaacagtattaattcttccaatctatgagtatgaaacattttctactgttttgtgtatcctcttcaatttctttcatcagagatttatagttttccttctayacatcattcacttctttggttagattgcttcttaggtatttcatatttttgtagctattataaataaaatagtttccatgatttagattttagattatttgctgttggcatatgtaaatgctactgattttcgcatgttgattttctgtcatgcaaatttactgaattggttatttgttttaacaggtttttttgctggactttttagtggtttccaggtataaaatcatgccatatgtgaacaaggataatttgacttcctccttttaaagttagatgtcctttattcctttctcttgcataactgctctgaccaggatttcgtgttatgtcaaataaaagtggtgaaagtggccattgttgccttgtttcaatccttacaggaaaggcctgcaatttttcccccttcagtaaaatgttagcttcgggtttgtcatatatgatttctattattttgaatta

SEQ ID NO: 463266 - DNA, 613 bp, Homo sapiens
tctaactttttgtacccataaccatctctgcctttccctgcaaatcccttctacctttccccacctctggtaaccatccatctactctccatgaccttgagttcaattgtttgtatttttagattccacaaataagtgagaacatgtgacatttgtctttctgttcctggcttatttcacttagcatagttatcaccagacccatccatgatattgtaaatgactggatctcattcttttttatggctgaatagtattctattatgtatttgtatctcactttatttatccattcatctgttgatgaacacttaagtggcttccaaatattagctattgtaaacatttttgcaataaacataggagtgcagatatctctttgatatacttatttcctttcttttggatatatacccagcagtcagattgctggatcatatggtagctcaatttttatttttgtgaggaacctccaaactgttcttcatagtggttgaactaatttactttcccaccaagagtgtactagggwtcccctttctccacatcctcgccagtatttgctattgtctgtcttttggatataagcgattctaactggagtgagatgata

SEQ ID NO: 463267 - DNA, 569 bp, Homo sapiens
tttcttaatatcattttctctttctttattgtaagcatctagtacataatacattatacatattacatgcaaaatgtgagttaattgattattttatcaataaggcttctgatctacagtaggctattagtagttttgctcttgggaagtcaacagttatatgtgaattttcaactgtcagrgtgggggctggtacccaaacccctgcattattcaaaggttaactgtattgatatcaattttctgtcttaaatcattactctctctttactcactttttattactatttgttagtcatattctccttatcagaattgctgctatcttatggattgaggatttctagaagtaagaaactatgtctttttaaactgcttaaccagtaccagtacaaatagatgcttgataaatatgagtgtgagagccagagagaaagaataatgatatatccctaagatatacattaataatataaagataatttactttaagttgtatgactagatttatgtgaataaaagcagaattaaacatcactgaatagtgtacagtgtctactgtgagcatt

SEQ ID NO: 463268 - DNA, 624 bp, Homo sapiens
gatttatggctctctaacttagacaatttcgttcatcaaaactagtcttctcaattagtggttcaaatagttcatttctcaatgagttatctaaatagttgcaactgcataaattcaaccacattgttaagcttgtttgaaaaataagaaaaatgctcacttatcaatttgaccagacatttctcaaattttaacattattttaaatcataaaactatatggggcatgctagctttttaaatggatttgaagattattatctctagatgcctttaacattttgaaaggatttgaagcctggtggaagagatatagaggtaaacactctgtgatacccttacaaaaatattaaccattctaaaaggtatacaggaattgaaaaactgaaagcaattggaaatttttcacttaraaaataaatatgctaagacatcaaacatatagaagaaatacgtataatggtgcatgtgatcatagctatacaattattacagaaatatataaaatggaaaattctaaaaatattttaaatatttaagttacatgactgtttctatcaccacattcagtatgacctgaagcaaattatttcaccccatcacttacatggcattaaaaaaataa

SEQ ID NO: 463269 - DNA, 559 bp, Homo sapiens
ctgtttctatcaccacattcagtatgacctgaagcaaattatttcaccccatcacttacatggcattaaaaaaataagcatcaaattagaatgcctactctctcaaatgtgtttgaatcagctctgtctgaaaaagaaagcatttcatttcttcagcagacttttgctagtgtacgtatagtctaggatcatatgaaacaattagttcagaaaggccataaaaatattttacagaaagaaagattaatcaaaaatcccagtctctagtgtgtacgaagctatgtcaagtaaaatataatttattacagatgaaaaagttattaataagtaatattgataaytgaaagttccatagagggcaatattcaagataagttaatcatcaaagaaataagactttttacatttaagagatcaggaaatcaaatagaaagtaacttaacacacatattttagggtttctcaatcttaacactgttattttaggcaaataattctctattgtctttttttgtggtgaactgtcctgtgtattgtaggacgttcagcagcatccttg

SEQ ID NO: 463270 - DNA, 566 bp, Homo sapiens
gtatatataacatttttagtgtatgtatttcccatgaagggaaattaacccctctattagaaaggaaactcaaattttaactagcaatatagcatttagtaawtttttctgagaacaaacatttctctattggaaaaaaactttcacttctatacatagaaaaataccaatgctttagaattaaattgatttattaattatgttcttatatgatttgtcaatattgaatttcattctgatgaacttatattcaagaaatagagctatattctagatgtattgttcataaataatatctgtcattgtgagagacttagtggttttattagagactcttttataaactgatagcatttaagggtactcaggtagagtaagttttcttctttaaataattcaattttataaaatagcaatgaaatcctaatagtttccaaaacaaactaataatttgggtatttatgtttggcagcaccactgataacacaatatgtgaacaaatattctcttaactttacagatatgcttagatcaaatctctttattgttctttctggttatgtaaa

SEQ ID NO: 463271 - DNA, 503 bp, Homo sapiens
gtcacatcttacatggatggcagcaggccaagagagagcttgtgcagagaaactctcgcttttaaagccatcagatctcatgagacccattcactattactagagcagcatgggaaaaacctgcccccatgattcaatcatctcccaccgtgtccccctcacaacatgtaggaatcctgggagctacaaaatgagatttggatgaagacacagagccaaaccatatyaccagcccaggattcatttctgcatttcaagtactatgacttgttacttagataaacaattaaaatactagcttgagaaatactgtttgttataattaaaattgttttcctttgagccctacatgaaattatacccacttaagtatcaatgagcaatatattgacagtctcttactttcatggaaaggagatcacaatgtaaaatatttttaaaattttgtcgctttttaataattgaagcaatatggcatgaaccagttctattcagtgcagtca

SEQ ID NO: 463272 - DNA, 620 bp, Homo sapiens
agttgcctttgtccatagttcctagctaagtcactttaggctgcggctttggagtttcatcctgattctttgtgtctctactgaactaatatgaaaagtttacctttttggagaataatcaggatagtgttttctatacctggcaactctactcacctgttcctgcaagattgcaatttgaagtcaagatataccctcacctggaggaggagtttaaacaataaatgacaattaatatcaaagtaaattatattagaatatgacgaaaaaytgctggaaactctgtttacaatttcagctacgaaagaagagaaaattttaattttcacatataatataatgacattctaattaaaatgtccatggacaaatgaacagaattaatgaatgacatgtatgaggaatggcataactttcaaattaagtaggcatgcttgaaaatctaagatgcactattcagttgctgtgtgaccatgaacaacatgtaggaaaaaattacaacattccattgagttttctggaaatgtcaaatgctataatatatgtgcatagaaaatagaagaggttctatggcatagtaaatctaagcacattctggtggttattattactaacatact

SEQ ID NO: 463273 - DNA, 620 bp, Homo sapiens
agttgcctttgtccatagttcctagctaagtcactttaggctgcggctttggagtttcatcctgattctttgtgtctctactgaactaatatgaaaagtttacctttttggagaataatcaggatagtgttttctatacctggcaactctactcacctgttcctgcaagattgcaatttgaagtcaagatataccctcacctggaggaggagtttaaacaataaatgacaattaatatcaaagtaaattatattagaatatgacgaaaaactgctggaaactctgtttacaatttcagctaygaaagaagagaaaattttaattttcacatataatataatgacattctaattaaaatgtccatggacaaatgaacagaattaatgaatgacatgtatgaggaatggcataactttcaaattaagtaggcatgcttgaaaatctaagatgcactattcagttgctgtgtgaccatgaacaacatgtaggaaaaaattacaacattccattgagttttctggaaatgtcaaatgctataatatatgtgcatagaaaatagaagaggttctatggcatagtaaatctaagcacattctggtggttattattactaacatact

SEQ ID NO: 463274 - DNA, 620 bp, Homo sapiens
agttgcctttgtccatagttcctagctaagtcactttaggctgcggctttggagtttcatcctgattctttgtgtctctactgaactaatatgaaaagtttacctttttggagaataatcaggatagtgttttctatacctggcaactctactcacctgttcctgcaagattgcaatttgaagtcaagatataccctcacctggaggaggagtttaaacaataaatgacaattaatatcaaagtaaattatattagaatatgacgaaaaactgctggaaactctgtttacaatttcagctacgaaagaagagaaaattttaattttcacatataatataatgacattctaattaaaatgtccatggamaaatgaacagaattaatgaatgacatgtatgaggaatggcataactttcaaattaagtaggcatgcttgaaaatctaagatgcactattcagttgctgtgtgaccatgaacaacatgtaggaaaaaattacaacattccattgagttttctggaaatgtcaaatgctataatatatgtgcatagaaaatagaagaggttctatggcatagtaaatctaagcacattctggtggttattattactaacatact

SEQ ID NO: 463275 - DNA, 603 bp, Homo sapiens
actttcaaattaagtaggcatgcttgaaaatctaagatgcactattcagttgctgtgtgaccatgaacaacatgtaggaaaaaattacaacattccattgagttttctggaaatgtcaaatgctataatatatgtgcatagaaaatagaagaggttctatggcatagtaaatctaagcacattctggtggttattattactaacatactaattatcctgtactttggaaacattctctctgtggctatgtacttcctggaacttgatagagaaaataaggctcatctaataatttgtgcattatgttgacaaaaaaagaaaactgctgttatttatctccgaatgtgctaatatgcaaatatcaagttagggtcaactgactgtgactgcatggggaggtagcataaggtttaaatcagaggtttgtactgataaaacaacctagatgaaaaagaagacagataccaactttatttctgtagaataaattcaactaatgaaaataayataacacattatataaattagattgttaatttcaaatttcaaatataaaattggaatatattggtggaatgataaaaaagaaataattacttaaac

SEQ ID NO: 463276 - DNA, 659 bp, Homo sapiens
tgtagaaaatgcatctacatgctacctataaacttctgcactcatttttaacttgagtgcttttgtggtctaaagtaacagattaaagttttgccagcatttttggagccagcatctaatatattttatcgctattcatagatagtaataaacaaagtgagttattgtattaaaaaattagttatattacattcttattgtttattcttttaatatttctgtcacagttgtttatttcatatttacatctatgtctttatgaaacttttaataacatattccagttaataagctgtgaaatttsatataatttatcaaaatatctatctagtttgaacatcattaatctgtcctaaatttaagaactttctaaatcttatctctatggtagtccaacatgcagctctttttatcttgatattttgccatttatcattatcttatgtttatacatgtttagccagctcactacccatgtgacagttctcagatccaggtcaattttaattcattctgtatgtcaatattcatgagatgtagcattgaatgtgtttctttactctagccagaatatttgtgttttggtcttctaaacaaactaaatttgtgttgtaaaagatgctattctcaaaagcaaatagaactataaaaatatgatt

SEQ ID NO: 463277 - DNA, 562 bp, Homo sapiens
cccgtgttttccaaaaccttgtgcagaaagctcttaatggacatcataaaatgtttggagatttgataagttttctgaggactttagtattgcattaatgaaagttaattcagttctaatctgtgattcttggtggttagaacagggatttaataccagcgttaagagtcaatattagtagtaacggtcaaataacaccatcacaggaatagttttggagactttatttttttttcaacccaaattttgtattaaaatgtaactttaataaaactaacacatgctactatgtttctgggactagtaacagacacactgtagacattagggacaaagctcctcccctcatgggctgcctaatggcttggcctggtttcatgctgcttttagtaaatgtggggctctccagcctgacttgaaaagtaaagaatataaaagtttctgtttatgctgcctatatggctttattatcaggccaaaggcataaagggaagcctcatctcttctaattagagtcaagcctagattaygaaagagctgcagaattttttcaggggtggag

SEQ ID NO: 463278 - DNA, 516 bp, Homo sapiens
aaaatcaaatggggataatgggcaagatggctgattacaaacagctgtggtctgtagcactcgtggagaggaatgaaggaacaagtgaaaacagcaccttcaactaaaatatccaggtactcacaatgggactaataagggaaacaactcgacccacacagaataaagaaaagcaaggtgggcatcagcacacctggaagygacatgaagccaagggaacccccaccccagctaaggaaagcagtgagtgattgtgcagccctggcaagccatgcttcccccacggatctttgcaaccctgggtcaggagataccctcatgagcccacatcactagggccttggtccaacacagagttgtgtagaatcttggcagagcagctgctcaggcatgcacagagacccaggagttttacatactccagccccaatatccctggcaaggtgggaggttcctactctcctctatgaagggggataagtccagggggcccaagcaacacagttctgcaggccc

SEQ ID NO: 463279 - DNA, 557 bp, Homo sapiens
acatttaaattttgcttgctgacattaaaatcacagtgtaatataattatggtaaagaatttagagcaactactcatgaatcagaattaatatagttgccagttcataatctagtcagtaaattcaatttcatgtttaaaaaaatagaaatcttcacgtwtgtgagttatttaatcagtataaatttttggatataaatgaatcaaatattaattgctaatttaatatttttttaaaaaatagagatataaaaaatagatgcagatggcatgtatatcataacctggaatgcaagatgatacagattacagcactaggcttgctgtttaagtgaaaaagagatatatacttatacaattgttctgctaaaactaagaagacctattattttctacctatattggaagcatgtaagtgctcaacagggagcaaaatgatttatgatagtggaggtagcacaatgttctggtaaagaaattaagataaaattaggctgaatatcagaaactgccttgacaaaatgcagtaatcttccaaataaattgggggatctgtac

SEQ ID NO: 463280 - DNA, 557 bp, Homo sapiens
acatttaaattttgcttgctgacattaaaatcacagtgtaatataattatggtaaagaatttagagcaactactcatgaatcagaattaatatagttgccagttcataatctagtcagtaaattcaatttcatgtttaaaaaaatagaaatcttcacgtatgtgagttatttaatcagtataaatttttggatataaatgaatcaaatattaattgctaatttaatatttttttaaaaaatagagatataaaaaatagatgcagatggcatgtatatcataacctggaatgcaagatgatacagattacagcactaggcttgctgtttaagtgaaaaagagatatatacttatacaattgttytgctaaaactaagaagacctattattttctacctatattggaagcatgtaagtgctcaacagggagcaaaatgatttatgatagtggaggtagcacaatgttctggtaaagaaattaagataaaattaggctgaatatcagaaactgccttgacaaaatgcagtaatcttccaaataaattgggggatctgtac

SEQ ID NO: 463281 - DNA, 560 bp, Homo sapiens
tgaaacttgccttaatttgaatgcttagtccatttatctgtaccaattttaaaaatatagattttcaaaagtattaatctccaataaaagtaataaaataaaataaaataaaatagaggagggaaaaagcaaagaatggtagagtaaaagaaaaaatgctacctataccttatcttaaggttgagcttaaatagctttcgagatgcttttacaatgcctcacagaattatgtcagatataacacatggaaagagtgaaaaaaatacggcctctggtgcagttcagctggcttccaacccttagaattgtgagttcaaaatgaaaaaawatgaaagtattcaggaacagaggaaagatataccaatcatactagggaagactcattaagaaaaaaatattttaacagtctcagggcagaaaggacttcacagtaataagaaagggcaaacaaaccacatttacataactgagccttagttataagacaaatcaggtagaggataaacgcagcacatagtctgttcatgtatatcagcaacacggaatataaacaagaccat

SEQ ID NO: 463282 - DNA, 397 bp, Homo sapiens
atataatttatagagacttactctactggatcagaaacattataagtctatagttaaatacaacccagtaggtagtgttttttaaactctaataaagtcatattaaactacagtaactacctgtagaggcatttcacttgtttgcccctcagtgccaagttgttttctaatttcaccaccttcctgagcatctgcatcataattccagccacctgtggatatttctaactagcttttttgccagaatctcaatttygacataaaaaggaaaagcggccatcattttctgaaaataaacctgctcatcctcctgtaatctgtgtctttatcacgggcagagccactgttctttttatgtgactataaaagaaagtgtgatctctgcctcttctttttc

SEQ ID NO: 463283 - DNA, 627 bp, Homo sapiens
ttttctaaagacaagtgtctttcacttagaggaacttagctgatggatgacttgtacagatccaattagtcttgtttcagattataggcattcagaaagaggtatcttttaatggttttttgggaccgtgggaattttgttacaatatctgtcacatcttccagtaaaaaagtgatagcaatttttttctctttggaggtctttttaaaatgccttctttcctcattgctacagatatgttcttgcataaatctttgaagyaagccaatgtcttctagaatctcattaaatttcatgactttccattccttgtgttgaaaatatattccattttttacataacattttaaacattatcccttaaaaaggtaaaggatgttcatagggaatcagaaagtttgtaaaacacaaataataaaaattaaaataatccataatgataaaattgtcacgttttatcctgtttattttgcttagagagtgatagagcctttgttgggtgatcatacacttgttattgttactgaagagtgtggggttctggtaagcatgttctgagaaagagagagatattttgtttttctctaaagtgcttggatcttctatgagttgatttacactagcatt

SEQ ID NO: 463284 - DNA, 589 bp, Homo sapiens
gatccatatcaagctcaatcatccatagtttacagaatccattttctatccattttagaaaattggaaagatagtggctaatttccagccttctaaggtctcttgacgtcttcccaaacaacagacctatcctgtcctcgatctcaaactagtcccaaatatagctgaaaggtattttggttttatttttgcctttttgtttctttgccagctgtgggtcattttgtcaaaattctgtctgtgttactttcttatacatttttttgtgtccttcttcttattctgtcctttaaaacctgggtttctagagcagtcatttgcaggtaagggtgaatattggaatcacctggggagatttttaaaattkctcatgctggcttcccaccctagacaaattggataaaactttgagaaataatagaagcatttgtgtttttttaagaccccagtggacaaccaaggttgaaactatagcagaagaacacaagtagttttgtttgtttgtttgtttggtggttttcacaattgttgaggttttctttctctttatcattggcctcacctgtatctgcatggtgagatttgaatg

SEQ ID NO: 463285 - DNA, 528 bp, Homo sapiens
tttgtaacaaaatatgccaacatttggaagattttagaatttcagtgaattatttcttttcttcaaatggccaatgcatgatgttacaaaatcacacatcagcaaatgatccatttaaaatgtaagatagaccagtgaaatttaatgtagtagaatgtaaaaagaaaagtcattgttgatggtttcagattccacattttataagttttaagaaactataactacaccaagttttggtgtagcatcaaaaaaatatacaattacaggaaaaggcttttaaaatacttctgcttttcacrgtgatacgtctatgtgactgtatgaggccagattttcttcatctaattccaccaaaacaacatcttataaagtttgggtgcagaaacagatatgagaatccagctgtcttctattaagccagacattagagatttctaaaaatgtaaaacactgccactgttgctaatttctttgtttttaaaaaaagtttttattttgcatgaaaatgtttgtgttagtatataatga

SEQ ID NO: 463286 - DNA, 376 bp, Homo sapiens
cttgatatgttgcccaggctggtctggaacaccttgacacaagtgatcctctcagttcagcctcctaaagtgccaggattacagatgtgagctgccgtgcactggccaaactctgtatttttgaagaaaagagatacacgattcagtcattagaacaaatgtatccaaatgtacaagtgaattaattttgcctagactgayaactatagtcctatgtacttttatgggatttaggaatcaggataattagttcaataaccaacaaaactcaagtcgctggaaaccagaagacactcatgcatatttctctattatacaattaaaatttgcaacttggtgaagggtccattggaaatacatccttttaaaaccagtg

SEQ ID NO: 463287 - DNA, 531 bp, Homo sapiens
tcacctacattcaccagctccattttaaaataatttttggtttattttaagaatcaaatacaccttcttcttggtataaagatttataaccattgagactattctaaaggaatgtgctcttggctctggaggcaattccaaaggaggaatttccaaaatattttgagctatgactgcatcattgtgtagtgatgcccagtggaaaaatattttttaaagcagtagaactgttccttaaaagttactcatagttacgagaggctgascaaccaattcacgattgtgacttcctttgttttgggaaaagttagcagaataaacacttcagtttgtccaagaacaataatttgtgtaatgagcgtcatcctcaatgttactttaaatgtaggctgagaagtaatgtgttctgtttaacataaatagagtccatttttagtgggacattgtccttgctgcatctttgaatatggatttagattttagtgactgtctctgaaactgtcttgggaaggtgtgtgtgtgtgtgtgtgt

SEQ ID NO: 463288 - DNA, 559 bp, Homo sapiens
ttgtatttacaaaatgagtgattgttgccttagagatcaggcaggacattgccagtaatgagggcagactgcagtcaggaagtcttgtttgaattaatagtaagtgaacttcaagacagcagaagtcactgcttgtcccagatgtctaatgatgagtaagtgaaacaggaaagcaaggagaactagcgctgcttgcctactgtgtggcagctcttcacatcctctttcctttcatctgcatacaactycacagggacagggattattgtcaccatttcacagatgctccgagcagtattaaatcaactgtcaaagtccatatcactagacattggcagagccagcatttatggccagctcagttgtattcaaagcctcatcatttgcttatgccaagaaagactggatgacttggtaccaaaggtggtccatgtttatggctttgggcctggcatcttcagaagtgtcttagtttgggattgtgcatgctggtgccattttcctgattcacaggtctcctcagcaagcactggagaaggcatcctcaagtataaagcat

SEQ ID NO: 463289 - DNA, 589 bp, Homo sapiens
agtgtatatatatatattttaattttactataagagataaggtctttgtctgtcacccacgctggagtgcagtggtgcaattatagctcactgcagccctgacttcctgggctcaggtgatcctcctgcctcagcctcctgagtagctgggcctgtaaatgctaaaaaccagctgccagcacgttcagctaatttttctactttttgtagagatggagtcttgctatgttgctcaggctagtcttgaactgagctcaaccaatcctcctacctcagctttcccaaatgctggaattacaggcatcagccaccatacccagccttgcatattgttttggtggcatctcagatgaccttgttagctggattttcttgtcagaaatcgaggataaaaaggatttccawatcacttttatacaggatgaaatggagctttggtcgaaaccttaagccaccaaactctttttgggttgggtgagagctgtaggttgatgagccattatatcaaataacaattatgactggcacttgaaacggtgggggtgggagagagggaataaatagtttggatgctggcttggactgctgg

SEQ ID NO: 463290 - DNA, 538 bp, Homo sapiens
aagatgatcatctatgtacccatcgggacatttttaaagggacaagtggaatgagcgaagactttgaagacagtcttgtctgccaggcactcagatcatcaggaagcagaaaaggagatgcaagatcaggttgagaggtattttgtgcaggaatacacattcagtgttataatgtaattgaaaaagagtctatttcagaggcatcagcttcacagccaccatggtttaacctcacctgtggtgtgagatggacagtgggtatgggtggcccctcctatgggtgggaagcacagtgatgtgttgggcacctgagcagggctgccaagattttctaaagcattctgtggaccattctgtgagcycctacaaggggttctgagctccttgccctgggatttgatccaatggacctatctaactggtatctccaatgtcagaggtgagtgagagcttctgtttgtttgaactctgcctgacctcagtctcagtgcttattttgaaccaggaactaaatgtagaggaaaagtatggaggacaa

SEQ ID NO: 463291 - DNA, 555 bp, Homo sapiens
  misc_feature (1)...(555): n = A,T,C or G
nnnnnnnnnnnnnnnnnnnnnnnatatttaacaattttatgtcctgggggtgagttttggtagcacaggaaaaaagcttcttagccaatataattgaaactataagtgggtcagttactaaaaataaggataataatatggaacaaagaaacattaaaaatgttacatattcatatggtttggctgtgtcctcacccaaatctcatcttgaaytgtaattcccacaattcccacacatcgtgggtggaacccaatgggaggtgattgaattatgggggcaagtttttccctagctgttctcgtgacagtgaatgagtctcccgagatctgatggttttaaaaatgggagtcttcctgtgcaagctctctctttgcctgctgccatccatgtaaaacatgactttctcctctttgccttccaccatgattgtgaggcctctgtagccacgtggagctgtgagtccaagaaatctctttcttttgtaaatttcccagtcttgggtatgtctttatcagcagcatgaaaatggatgaacacatatatatattttaaga

SEQ ID NO: 463292 - DNA, 610 bp, Homo sapiens
atatgtttctggagttgatcaaacaggttggttgagaaggcttcttacagtgtttcatggtattacagctagccccaggaatgcccatatccacctatagaaccactcctttgtgaaagatttcttaaaaagatatatgtaagacagttctctgggggccttggactaacccatttcttcccatttcttacttgttctcaataataactgatgagtgtgctgggaatgcaatatcttgagataagggggagctgactggaacagcctgggctctgttccagcctctcctagaaaaaggatgtcccttcaatggtttagcttaatgagtcctgtaaccacagggtataaaactcagggcaggatgctttttcgggtccytcagctgcgatgcaattggggcatacacagatgaaactccatctgccatgggcaattttcctgagacttagggagacacaggctcatcgtgaattccagggttctgttgtcccttgctgcctaagtaataaattcacttcatgtaacttgcgtgtgtgagtgttctgtctcagcagacttgggcaagtaaccagcgcatagtgagcctgatgtgcaatatacataagaaaga

SEQ ID NO: 463293 - DNA, 620 bp, Homo sapiens
gtgggaaaacttcagggttggcattgggttgatrtcacttcctttctccatgcctcagagggtttgtgtgtgtgtttatgtagaagaggaagatatttataaagctcgttgcccattttgcagagtcatcttcattaatttcagagtatgtgtgagggaggcccatagctcaagtttgaccttttaatcttcattcttggcttgttggggattaaagatagactaggcttaacaccaatagtacctgcccttaacagggtttctgagaagcaaagtcattgacgacagagtctccgtatggtaatgctacttcctccttccagaattttcacagaagctttcctttctgacaatgaaaaataaaatcacctcagacatcagaaatacttggccttttattttcattttctcacttgaaacagaacctgagataccttgttggactcagagttctccttgagtgtgacattagggactaagaaaataagcagcagcttgattttttaaagtatagttgccactgctgacagaagtcaaattataacaccagaaaagtctggttttgattcctgccatcttcctgggagagtgggtggcttggttgataaagctgcactctc

SEQ ID NO: 463294 - DNA, 620 bp, Homo sapiens
gtgggaaaacttcagggttggcattgggttgatatcacttcctttctccatgcctcagagggtttgtgtgtgtgtttatgtagaagaggaagatatttataaagctcgttgcccattttgcagagtcatcttcattaatttcagagtatgtgtgagggaggcccatagctcaagtttgaccttttaatcttcattcttggcttgttggggattaaagatagactaggcttaacaccaatagtacctgcccttaacagggtttctgagaagcaaagtcattgacgacagagtctccrtatggtaatgctacttcctccttccagaattttcacagaagctttcctttctgacaatgaaaaataaaatcacctcagacatcagaaatacttggccttttattttcattttctcacttgaaacagaacctgagataccttgttggactcagagttctccttgagtgtgacattagggactaagaaaataagcagcagcttgattttttaaagtatagttgccactgctgacagaagtcaaattataacaccagaaaagtctggttttgattcctgccatcttcctgggagagtgggtggcttggttgataaagctgcactctc

SEQ ID NO: 463295 - DNA, 620 bp, Homo sapiens
gtgggaaaacttcagggttggcattgggttgatatcacttcctttctccatgcctcagagggtttgtgtgtgtgtttatgtagaagaggaagatatttataaagctcgttgcccattttgcagagtcatcttcattaatttcagagtatgtgtgagggaggcccatagctcaagtttgaccttttaatcttcattcttggcttgttggggattaaagatagactaggcttaacaccaatagtacctgcccttaacagggtttctgagaagcaaagtcattgacgacagagtctccgtatggtaatgctacttcctccttccagaattttcacagaagctttcctttctgacaatgaaaaataaaatcacctcagacatcagaaatacttggccttttattttcrttttctcacttgaaacagaacctgagataccttgttggactcagagttctccttgagtgtgacattagggactaagaaaataagcagcagcttgattttttaaagtatagttgccactgctgacagaagtcaaattataacaccagaaaagtctggttttgattcctgccatcttcctgggagagtgggtggcttggttgataaagctgcactctc

SEQ ID NO: 463296 - DNA, 578 bp, Homo sapiens
tctgctttggttagctattgctgcaaaaatgtcactccaaaactcagggacttaaaacaacacgcttttatccccatggatctgagagttgtctggcaaagggttgatcaggcagtgctgggctggacacagtgaggccatggctaagatgcagaggcagaatgcctactgctcaccatggtttataaaaaggggaagagcagagctgaagggaaaggtaaggagctcagctttggagacaatgattttttttctttgagagagtctctctctgtcccccaygctgtagtggaatgatacgatctcggctcactgcaaccttcacctcctgggttcaagcaattctcctgcctcagcctcccaagtagctgggattacaggtgcctgccactatgcccggctaatttttatatttttagtagagacagatttcactgtgctggccaggctggtctcaaactgctgacctcaggtgatccacctgcctcggactcccaaagtgctgggattacaggcgtgagccactgcacctggccaagacattgattttatgatgctagtggaacaatcaggtgaag

SEQ ID NO: 463297 - DNA, 578 bp, Homo sapiens
tctgctttggttagctattgctgcaaaaatgtcactccaaaactcagggacttaaaacaacacgcttttatccccatggatctgagagttgtctggcaaagggttgatcaggcagtgctgggctggacacagtgaggccatggctaagatgcagaggcagaatgcctactgctcaccatggtttataaaaaggggaagagcagagctgaagggaaaggtaaggagctcagctttggagacaatgattttttttctttgagagagtctctctctgtcccccacgctgtagtggaatgatacgatctcggctcactgcaaccttcacctcctgggttcaagcaattctcctgcctcagcctcccaagtagctgggattacaggtgcctgccactaygcccggctaatttttatatttttagtagagacagatttcactgtgctggccaggctggtctcaaactgctgacctcaggtgatccacctgcctcggactcccaaagtgctgggattacaggcgtgagccactgcacctggccaagacattgattttatgatgctagtggaacaatcaggtgaag

SEQ ID NO: 463298 - DNA, 541 bp, Homo sapiens
ggcacctcccccatctctcttttcctcctgctcccagccatgtgaagtgtcagctccccttctccttctgccatgattataagtttcctgagacctccccagaagccaaacagatgccagaatcatgcttcctgtacagcctgcggaaccatgagccaattaaacctcctttctttacaaatggcccagtctcaggtatttctttatagcaatgcaagaacaaactaatacaatagttcaccgcaatctcaacgtcctgggctcaaacagtccttccacctctgcctcccgagtagctgatactacaggcaaaagcaagtgtactgatcttaaattaacctttgatgtcatcagtcttgtggtaaacaggaaaaatgtgctaggcattgttttgyttctattttttaaacctggtgagtaggcaagcgggtggccaggctctttggtatcattgaaggagctaagagagtagaaagatcccaagagaagaggaaggtgagagcttatcccaggcagcaaaattctcaatctgtgctcacct

SEQ ID NO: 463299 - DNA, 524 bp, Homo sapiens
ggcacctcccccatctctcttttcctcctgctcccagccatgtgaagtgtcagctccccttctccttctgccatgattataagtttcctgagacctccccagaagccaaacagatgccagaatcatgcttcctgtacagcctgcggaaccatgagccaattaaacctcctttctttacaaatggcccagtctcaggtatttctttatagcaatgcaagaacaaactaatacaatagttcaccgcaatctcaacgtcctgggctcaaacagtccttccacctctgcctcccgagtagctgatactacaggcaaaagcaagtgtactgatcttaaattaacctttgatgtcatcagtcttgtggtaaacaggaaaaatgtgctaggcattgttttgcttctattttttaaacctggtgagtaggcaagcgggtrgccaggctctttggtatcattgaaggagctaagagagtagaaagatcccaagagaagaggaaggtgagagcttatcccaggcagcaaaattc

SEQ ID NO: 463300 - DNA, 588 bp, Homo sapiens
gcattgtcttagtacattcatgctgctataacaaaataccttagaccaggtaatttataaagaacagaaatttatttcttacagtttgggaggctgggaaatccaagatcaaggcatctgcagattcagtgcctggtgtgggcctgtttgttatacagtgccttcttgccaygttctcacatggcagaagagatggaaggcaaaaggcactacagtgttccctttaacctcttttataagagcactagtccatttataagggcagagccctcatgacttaatcacttccccaaaggccccacctcttaatatcaccaccctggggtttacgttccaacatatgaattttataaagacacctgtattcaaattttatagcacacattatatctggttttctttccgatgtctcctttcacaagtattcttttccatatttcaaaggaagtcatatttctctggattctcaaatcttactgtgccttgccccagagtataaaaacttcaagggtgccaaacaaacaaacaaaaaaaatagttttaaactatcagtgtttccaaagctcatttattcaaatgaccataaac

SEQ ID NO: 463301 - DNA, 350 bp, Homo sapiens
gtgaaggataaaaaactacatatggggtacaatgtacactacatacactacttgtatgatggatgmagtaaaattttcaacttcatcactatgcaattcatccatgtaaccaaaaaccacttgtactccaaactctattggaatttttaaaaagaaagaaataaaaaaatacatttagtgtaacctaagtgtacagtgttccaaagtctacagtaatttacagtagcatcctaggccttcacatttaccactcactcactgactcacctagagcaacttccggtcctgaaagctccattcttggtaagtgccctatacaggtgaaccattttgtatcttttatacggtat

SEQ ID NO: 463302 - DNA, 485 bp, Homo sapiens
aatagaactagtacatggtttgaaaatacttaaaggaagataaatatccttgcctctgtgagggccraacctcatgactgggaaaagtgcagtcagagaaaccatgaattacatttataattttgctgtgaatcttgaatcccttagtttcagtcaagatatatgaagtcaggtttatgactaagaaagccactgtttctctttcatgcaatgaatcagagggaataggcagttagctagagctaagcatagattagcagagacagaaacgctgagctgtcaaatacttcaaaaccagtagcagcaaacaaaatatccaagtgctgctctaaacttataagactattacaaacctaggaattttcaacacccaaagcaacataagtcttaaaggtatcttttggaatatgaaaaaccagagtcatgctataaagtgataataataagatatttctttcttatttatagttctttaacacttgctt

SEQ ID NO: 463303 - DNA, 570 bp, Homo sapiens
ggtaaagtattttacatgggtcacacaagagacaaaggtagttgttttctaaataacttgcatcacaatatgcacagtaaatatacccagatgcagctgcagaacagagttagctcctttccaaacttcacttcgtaagcctgttttcacatctgttgaacatggcaatctctcatagtgagccagtggcttcttcggttcttaactcagaaaatttctaatatgacttcatactgcaataagttattgtaaaggtaagctgttcaaatacagttactgaccatgatgtctatagcagagcacagtgtagtgtgaaaatctggacttctgtgtggaatatatcaactctattctctagcgtaaggaactttattctctagaataaagaacatgccatgaatagtgcatgcaaaacactgctttcactcacggtagagccatgaaccttatatccaagagctataactatctgtrtgaatatcaggatctatattttgattatcataaattttgctttttatatcaaggcttaagcaaccagcagttatctatcttggtagattattgaaa

SEQ ID NO: 463304 - DNA, 585 bp, Homo sapiens
tggtttccattacataaaatytacacatttggatttgagtcctacctctgccaccttctgaacatgcgactttaggcaatgtgtttaacctggctgaaggtttctttatctgttaaatggggatcatgatagcaccaatcgtgttactattgaggctcaggaaagatactgcaagattatgtgccttgcccacagtaggagtctataaatattagctgtaatcatcattctcaccaccaccactgtcattatcgtcactttcactgcattaggtactctcatctcagccctttctttcatagctgatgtgggtgaacttctaactttattttattcaacaaatatttattgtgtgccaactatgtgtgaggcagtgatccaggtgctggggtagaggaacaagtaagcaaacaacaaaagaaaaaaaaatccctgcttggtggcttacattccagtgggggatttcagactccatttcaatgtattagccatggccatgcaaagggtgagcccatgaagtcctcggcccaaatctctcccaatgagctcacttttgaaattggatttgccctatattggattttt

SEQ ID NO: 463305 - DNA, 583 bp, Homo sapiens
ggctcactttacaatctcatctgtaaaaaaaagcaccgaatctaacagaagtttattctgagaaggtagtgtattacctctttcatcaaatagaacaatgattctcattaatgggaagatattaaatgtgagattttcaaacaacatgaggttttctgttctttctacaaataattyttcctctaagcaggacatataagtagaatggtacatactttcatggcttgatgaagcttctctgcaaagaaagctggtttgcttgtggcgcacttcactgttagagaagaaaattttagttgatgtatttaccatgaaaaaaatgaaatatccatatgaaagaaacaggaaatatagaattttgccaacagtgttctatccctcatcatcattcttcacctctcatctcccaatatagggcagttaacttctgagaaggtatttgtgactctctagatggtggttttgaatattcttttccctgacgatcaatttttttattaccttaaatacatctcaagagcaacttcagtagtttgcgctatccaacatatattctccttgggagtggagaagccactaggtg

SEQ ID NO: 463306 - DNA, 583 bp, Homo sapiens
ggctcactttacaatctcatctgtaaaaaaaagcaccgaatctaacagaagtttattctgagaaggtagtgtattacctctttcatcaaatagaacaatgattctcattaatgggaagatattaaatgtgagattttcaaacaacatgaggttttctgttctttctacaaataattcttcctctaagcaggacatataagtagaatggtacatactttcatggcttgatgaagcttctctgcaaagaaagctggtttgcttgtggcgcacttcactgttagagaagaaaattttagttgatgtatttaccatgaaaaaaatgaaatatccatatgaaagaaacaggaaatatagaattttgccaacagtgttctatccctcatcatcattcttcacctctcatctcccaatatagggcagttaacttctgagaaggtatttgtgactctctagatggtggttttgaatattcttttccctgacgatcaatttttttattaccttaaatacatctcaagagcaacttcagtagtttgcgctatccaacatatattcyccttgggagtggagaagccactaggtg

SEQ ID NO: 463307 - DNA, 616 bp, Homo sapiens
atgtcaggttacacggcaaaggggaactaaagttgcaaacagtattaaggttgctaatcagctgaccttaaatcagagattagcctggatcatgtgggcaggcctaaggtaatcacaagaaaccttaaaactggaagaagcagtcagaaagggcgatgtgacaatgrggcaatgttggagacctgctatgctgctggcttcaaagataaagggagagggtcacaaccagcaaatctgggcagtgtttgaggccggaaaggcaaggtgatggattcttcctgacagcctccagaaaagaattccatactgctgacacccagattttaacctagtgatggttattttgaatttgttacccacagaactctaagatgatacatttgtgttgttttaagccactaaatgtgtggtaatttgttagagttgcaatgaaaaaaatacaaattttccgtccccaaaatttgaaaaccaactccagagaaaaataacattgctgtttagtcaagtgaatggttgattttgtaattgtgcaagaagtattttaaattgaaattataattaaggagtatcatttctcatactgactggggtaagattatggagacatagtcgagcc

SEQ ID NO: 463308 - DNA, 616 bp, Homo sapiens
atgtcaggttacacggcaaaggggaactaaagttgcaaacagtattaaggttgctaatcagctgaccttaaatcagagattagcctggatcatgtgggcaggcctaaggtaatcacaagaaaccttaaaactggaagaagcagtcagaaagggcgatgtgacaatggggcaatgttggagacctgctatgctgctggcttcaaagataaagggagagggtcacaaccagcaaatctgggcagtgtttgaggccggaaaggcaaggtgatggattcttcctgacagcctccagaaaagaattccatactgctgacacccrgattttaacctagtgatggttattttgaatttgttacccacagaactctaagatgatacatttgtgttgttttaagccactaaatgtgtggtaatttgttagagttgcaatgaaaaaaatacaaattttccgtccccaaaatttgaaaaccaactccagagaaaaataacattgctgtttagtcaagtgaatggttgattttgtaattgtgcaagaagtattttaaattgaaattataattaaggagtatcatttctcatactgactggggtaagattatggagacatagtcgagcc

SEQ ID NO: 463309 - DNA, 482 bp, Homo sapiens
attcaagaactgaaagaatttcagagactatattaaagaaaattacgtaaatgagttcaaraataatcaaccctgagaaaagatcataaatggacaaaaaccaggcacacacaatgcctttgcattgcattcatttcattataaagacaatgagtaagttgaactgtctcattatttcatcacttagctttgtctcaactgtcaggtatgaaaaattactgagaagaataaaagttttgaaaaggaaaaaaatttgaaaagtatgaacacactatgagtgctaactccagaatagctggtttttcaagaattatacaggaaactgagtaatgatgtagtagttagaagcaaaagtgtagttctgaggttctcacacactcccaaaatggagaaacaaaggggatacttgtagttctatgggattatacatataggagttcatgggtgatttttcagcactaaaatgtagctgtatatgggtt

SEQ ID NO: 463310 - DNA, 603 bp, Homo sapiens
ggactctctcttttgcccccttgccttctgccatggaatgatgaagcaagaaggctctctccagatgccagcccctcaatcttgaacttgtcagccttcagaactatgagaaaataaatttctcttcattataaagtacccactctcaggtattctgttatcgcagcacaaaacagactaaagcagatgcttacccatctattcattccacaattatttattaagttaatgttgactattccctagggacattttagttaataaaatgttcattttgttatttacctcattttgcttrtcgcttatttagagtacaggtagaaattaccctttaaaagcatgtattgggttttgtaaagtaactcttaaaggttttctccttccctcaaataagcactcagttacttgaaaaaattaaaagacaacagaaacaaactgttcaattcaaagtttcaaactatttaccccaacatttctggagcagtttaaaaatatacatatattttaaaacacgtgtcagaatttaagtatttgatatttttacatacttagcttttcataagtccgttgtattggtgctttttatcatatgataggataata

SEQ ID NO: 463311 - DNA, 565 bp, Homo sapiens
acaaacaaacaaacacctgcactttaggagcttaaagccgtgactggaagttaaaaacaagtttattatatgactcagcaatctaagtatttatcaagagaataaaaacatgttcatacaaagatgtattcacaaatattcataacaccttgttcgtaataccttaaaattggaaacagttaaaatatcttaaaaacagatgaatagagaacttcataggatgggagtactcagcaatagagagaaatgagcttctgaaatgcraaactatggattaatttcagaaatattatacttggcaagagaaaaatttaaaaaggccatatataaaataacaccacccgaataattttatttctgtgaaattctagaatatagaatagactaacatacaacaatgtaaatcaatgattgcttggagcagagggtgggggtgaaaagtattttagagggatgaaatgtgttgtatcttgattatgctggtagttacacaagtgtatacacctatcaaaattcattgaactacacactaaaaatgagtttattttagtgaatgtaacatata

SEQ ID NO: 463312 - DNA, 565 bp, Homo sapiens
acaaacaaacaaacacctgcactttaggagcttaaagccgtgactggaagttaaaaacaagtttattatatgactcagcaatctaagtatttatcaagagaataaaaacatgttcatacaaagatgtattcacaaatattcataacaccttgttcgtaataccttaaaattggaaacagttaaaatatcttaaaaacagatgaatagagaacttcataggatgggagtactcagcaatagagagaaatgagcttctgaaatgcgaaactatggattaatttcagaaatattatacttggcaagagaaaaatttaaaaaggccatatataaaataacaccacccgaataattttatttctgtgaaattctagaatatagaatagactaacatacaacaatgtaaatcaatgattgcttggagcagagggtgggggtgaaaagtattttagagggatgaaatgtgttgtatcttgattrtgctggtagttacacaagtgtatacacctatcaaaattcattgaactacacactaaaaatgagtttattttagtgaatgtaacatata

SEQ ID NO: 463313 - DNA, 493 bp, Homo sapiens
gagtgccaggaaggcagatcatctgctggataattagcctttctgtcctacagcacaaacctcctgtgaggttaaaagaatgaaggagctggctgccttctttaagtggacatgaatgtaaaaaagatccatgaagcacaaaacacaaattctgtctcgattagctatgttgattcacagcttgtagcctctcctcataacctgaaatacctgataaaggasggcacgctccatcaaaacatactgtccaatttgtgagtggttgaaggagtgccccaaacctccatcggcggtctggcctttataatcttacacgcacagtgttttattcctgaaaactaaagctgaaggagaaaacttaaattacaaatgtcatcactcatttacttaaaaattatctccttctgtatatgcagatgcttcttattctcttgcaatctttccaagccctttgcactagctgtattctttagcacattaaagaaataaaatc

SEQ ID NO: 463314 - DNA, 493 bp, Homo sapiens
gagtgccaggaaggcagatcatctgctggataattagcctttctgtcctacagcacaaacctcctgtgaggttaaaagaatgaaggagctggctgccttctttaagtggacatgaatgtaaaaaagatccatgaagcacaaaacacaaattctgtctcgattagctatgttgattcacagcttgtagcctctcctcataacctgaaatacctgataaaggacggcacgctccatcaaaacatactgtccaatttgtgagtggttgaaggagtgccccaaacctccatcggcggtctggcctttataatcttacacgcacagtgttttattcctgaaawctaaagctgaaggagaaaacttaaattacaaatgtcatcactcatttacttaaaaattatctccttctgtatatgcagatgcttcttattctcttgcaatctttccaagccctttgcactagctgtattctttagcacattaaagaaataaaatc

SEQ ID NO: 463315 - DNA, 493 bp, Homo sapiens
gagtgccaggaaggcagatcatctgctggataattagcctttctgtcctacagcacaaacctcctgtgaggttaaaagaatgaaggagctggctgccttctttaagtggacatgaatgtaaaaaagatccatgaagcacaaaacacaaattctgtctcgattagctatgttgattcacagcttgtagcctctcctcataacctgaaatacctgataaaggacggcacgctccatcaaaacatactgtccaatttgtgagtggttgaaggagtgccccaaacctccatcggcggtctggcctttataatcttacacgcacagtgttttattcctgaaaactaaagctgaaggagaaaacttaaattacaaatgtcatcactcatttacttaaaaattatctccttctgtatatgcagatgcttcttattctcttgcartctttccaagccctttgcactagctgtattctttagcacattaaagaaataaaatc

SEQ ID NO: 463316 - DNA, 490 bp, Homo sapiens
agcccatgaaactatttttccctcctacacctccaggtctgtgatgggagggcctgctgtgaaggtctctgaaatgccctagaggcattttccccattgtcctggctattaatatttggctcctcctctttacttatgcaaatttatgtagctggcttgaatttctccacagaaaatgggwttttcttttctaccgcatagtcaggctgcacgttttccaaacttttatgctctgcttcacttttaaatataagttccaatttaagagcatctctttgtgaatgcatataagcatatgttgttagaagcagccaggtcacattattgaactctttgctgcttagaaattttttctgctagataccctaaatcgtctctctcaagttcaaagttccacagatccctagagcagtggcacaatgctgcccatctctttgctaaagcatagcatgaacgacctttactttatttcccaggaagtttctcattt

SEQ ID NO: 463317 - DNA, 567 bp, Homo sapiens
aacttttcaagacatggtacaataagacaaagagaaacaacaaaaagttaagaagtgggagacaaagttacagggtagagtttttattagtttccttttgtttgtttgtttatgcaatcagtgttaatttgtcatctgcttaaaatatatcatagtatttgcaagcctcacagtaacctcaagtaaaaatcatgcaatggatattcaaaaaataagaagcaagaaatgaaaatataccaccaatgaaaatcaccttcactgaaaggaaagcaggatggaagagaagaaggaaaagaccacaaagcaaccagaaaacaaataacaaaatggcaagcataagtctttacttctcaataataacattgaatgtaaatggactaaaatatcaataaaaaactatgaagtagctggrcgaataaaaagcaagacccaatgatctgttgcctacaagaaaaatatttcatctataaagatacacatagactaaagataaaggatggaaatatagttcatgccaatggaaaccaagaaaagagcaggagtagctatacttatatatcagacaaa

SEQ ID NO: 463318 - DNA, 560 bp, Homo sapiens
agaaacatcacagttaatttgcactatagaaaaaaatgaacctaattaatctttacatatgatgttatccactggctgcaaaatacacattcatctcctcagaaaatgtaccattctcaaagaaagaccatgtggtaggtcacaaagcaagttttaaaacattcaaaaaattgaaataatacccagcatcttctctgaccaaaatggaataaaaatagaaatcaataacaagagaaattttagaaactatacacccacatagaaattaaacactgtgctcctgaatgactgatgggtcaatgaygaaatcaagaagaaaattgaaaattttcttaaaacaaatgataatggaaacacaacatagcaaaacctatgggatgcagcaaaacagtactaggaaggaattttacagctataagtgcctacataaaaaaaacttcaaataaacaatctaacaatgcatcttaaagaactagaaaagcaagataaaaccaaaccccaaattagtagaagaaaagaaataataaacatcagagcagaaataataaacatcagagcag

SEQ ID NO: 463319 - DNA, 560 bp, Homo sapiens
agaaacatcacagttaatttgcactatagaaaaaaatgaacctaattaatctttacatatgatgttatccactggctgcaaaatacacattcatctcctcagaaaatgtaccattctcaaagaaagaccatgtggtaggtcacaaagcaagttttaaaacattcaaaaaattgaaataatacccagcatcttctctgaccaaaatggaataaaaatagaaatcaataacaagagaaattttagaaactatacacccacatagaaattaaacactgtgctcctgaatgactgatgggtcaatgatgaaatyaagaagaaaattgaaaattttcttaaaacaaatgataatggaaacacaacatagcaaaacctatgggatgcagcaaaacagtactaggaaggaattttacagctataagtgcctacataaaaaaaacttcaaataaacaatctaacaatgcatcttaaagaactagaaaagcaagataaaaccaaaccccaaattagtagaagaaaagaaataataaacatcagagcagaaataataaacatcagagcag

SEQ ID NO: 463320 - DNA, 269 bp, Homo sapiens
tccagaagataatggggagccctagagattttgagctagggagtgacataatcacatttatattttagaaaactgaagtcargtaggtaggtaggttcccacttgtgaagacatttctttaaccctgggaggaggcaggaattagggtgtgcatttgcaatgggtcttgcagagccaactgagtatgactgctcccttggttaattttctggaaacaatcagccaattatgaatcaaaggcctctgtagctccagcccaaaactaattg

SEQ ID NO: 463321 - DNA, 583 bp, Homo sapiens
tccctaggcagcacacagcaggtaggtcctggatccggcccaggaaaccattttttcctactaggtctctgggcctgtgatgggaggggctaccatgaagaattctgacatgcccagaagactttttccccattgtctttcaaatttatgcttatacaaatttctgcagttacttatgcaaatttctgcagccagcttgaatttctctccagaaaatgggtttttgttttctactgcatcatcaggctgcaaattttccaaacttttatgctctatcacctcttgaatgytttgctgcttagaatttcttctgccagataccctaaatcatctctctcaagtccaaagtttcacagatctccagggcaggggcaaaatgcttccagtctctttgctaaaacataacaagagtcacctttgctcctgtcccaacaagtttctcatctccatctgagaccacctcagcctggactttattgtccatatcactatcagcattttggacaatgctattcaacaagtctctaggaagttccaaactttccccatgatggcagaaaggagaagtgttgagcaaaggggg

SEQ ID NO: 463322 - DNA, 586 bp, Homo sapiens
aacatgtaaatatcctgggaaaaaataactgatgtgatcagggataggcttcacccatcatactatttcaaaagaaggaaagagctaaactaatgtgttgagagggactctcaggtaggactctgtgagagagatctgtccttgggctggaatgagaagtggtaggatggatgttttacaggcacatttatttaccttacagtggggtgcattagtttactcattcaatagtggtatttgggtataaaagaaggatctaggagtaagtcataaaaatacatatttctcattaaaattaatattatagagaagttaggaaacgagaaaaaaataaatataaaatagaaaaatatcgatagttttacctctcaagtatatattttatgtcttaacatatgtgctaacaattttgtatatttctttccagcccttgttctatgcattacttttttaaaacstagttgagattaaattacagcataattttgtatcctgtcttttcattatcattataccctaagcactttgcatattactataaactttaatattaaaatagctaatatattttaagtattgataatca

SEQ ID NO: 463323 - DNA, 595 bp, Homo sapiens
tcccatttaatctccacataaattagtaggtactattactgtttttatattacaaaggctaacactgaggcttagaaaagttagttcatttgttcacagccacacagctaaaagtggaacagttgggatgtaaatccaggcttgccaggctgctaaacatgtattactattttttcaaggatgatattatgtgatagtttaattgaaagtgttttttcttacttaatgatacatgaaatatggaggatcttacaattaatggcaccttagcataaatgaaacttagttgtattaatctaggattactttttatacctctacaaatctctatgcctttacccmatcagttttgaaaacatattttattttcttttttttctccatgcgtgacctgctattgtcaatggccatttggaattcccaaaggattggtagaggtatgcagttgggataaagcattaaggataccaaccaaatgactcaccagggaaaacctgagctctgctcttaaatctgtctgtattcctggccaagatgcctcatctcctccttagtgctctcagtcttcttctactttaatgttatttttaatgac

SEQ ID NO: 463324 - DNA, 595 bp, Homo sapiens
tcccatttaatctccacataaattagtaggtactattactgtttttatattacaaaggctaacactgaggcttagaaaagttagttcatttgttcacagccacacagctaaaagtggaacagttgggatgtaaatccaggcttgccaggctgctaaacatgtattactattttttcaaggatgatattatgtgatagtttaattgaaagtgttttttcttacttaatgatacatgaaatatggaggatcttacaattaatggcaccttagcataaatgaaacttagttgtattaatctaggattactttttatacctctacaaatctctatgcctttaccccatcagttttgaaaacatattttattttcttttttttctccatgcgtgacctgctattgtcaatggccatttggaattcccaaaggattggtagaggtatgcagttgggataaagcattraggataccaaccaaatgactcaccagggaaaacctgagctctgctcttaaatctgtctgtattcctggccaagatgcctcatctcctccttagtgctctcagtcttcttctactttaatgttatttttaatgac

SEQ ID NO: 463325 - DNA, 568 bp, Homo sapiens
agagttggaagtgagaaagaaaggtgaaagatgattaaaaatatttgtcaatttkcctcaggtgaaatcaacaaagttttaagtgatgaaagtcagagggaaaagcagagcatcttcaatatcttagctgagaagagaggaggtgttgagagaaagatactggattacagttcacagtacagccatggttgatatcattggcctaggatgagctgctatgtctcaaaagagtgatgaggataatttagaagccaacagaaatgactacatattaactgttcacatctaatgaatgtgtctagcagttaagcttcgtaacccattaaatgtctgcatttctaaagacacacaatgaatagatcagttagtatttttgtgcatctatggaagaattggggagtagatcacttaaggcccctagtggggccttaaaagagttagtttgtcgacacctaggaaaattcagtttgtcaccaaacacatttccaggttaggttgatttactgcaatgttgatatcttcttaaaatttttttactccaccatagtttccttggtgatgactagta

SEQ ID NO: 463326 - DNA, 568 bp, Homo sapiens
agagttggaagtgagaaagaaaggtgaaagatgattaaaaatatttgtcaattttcctcaggtgaaatcaacaaagttttaagtgatgaaagtcagagggaaaagcagagcatcttcaatatcttagctgagaagagaggaggtgttgagagaaagatactggattacagttcacagtacagccatggttgatatcattggcctaggatgagctgctatgtctcaaaagagtgatgaggataatttagaagccaacagaaatgactacatattaactgttcacatctaatgaatgtgtctagcagttaagcttcgtaacccattaaatgtctgcatttctaaagacacacaatgaatagatcagttagtatttttgtgcatctatggaagaattggggagtagatcacttaaggcccctagtggggccttaaaagagttagtttgycgacacctaggaaaattcagtttgtcaccaaacacatttccaggttaggttgatttactgcaatgttgatatcttcttaaaatttttttactccaccatagtttccttggtgatgactagta

SEQ ID NO: 463327 - DNA, 553 bp, Homo sapiens
gtacacaactattgaacatattttaatttgttccacaatattgggtggagggagtgcaatatttcttgatcttctctgagctacacccacctacaagtggaaagttaaatcagttggaagtgcaggggagaaagggacacacacacacacacacacacacacacacacgaagctggcaacaaacacactaatgtctgatgactctacatttttgctaaagagcacatcagaagaaaaacttgttagtttggttccctggggacaagtggcataccaaagagattaaatgaccagatctggagtgcttttaggcagaggagggggccactctaaatctcagttctctaatttgttttaagaattagaatagaaaatacctggcatttaaaaagatattttagctgtaatagtcatagtgtattcttactgcacagatgactataggcaagattcttagctttactgagcttgtttcctcatgtctaatctcctcctggagtttctcatacttaattttgaaatrtactgtttataactgacacaaagtatgtgc

SEQ ID NO: 463328 - DNA, 532 bp, Homo sapiens
  misc_feature (1)...(532): n = A,T,C or G
tgtgctcagggcacactggtgtgaactgtgtggagctcaccaagactgacttcagagtccccagaagtccctgaatgcccctcttccattccatttcgccactccctctccagccctttcggctcccaatgctctgggctgtctcttcctctatttcccgtggagaacagcctttaggagggattattttcttattaaactagagttcctttgttccctctccgagacagtatctgtatttaggccttatctctccagggagggaaaggcttggtccacacaagtctgctgagttgaactgaaggatttttccaagcattagcagatttgagtgcaggaaacgctgggtgaaggcgccctccaggtcctttgtatctccccccagccrggcagttaataatcctggactatttgccgactaggatcctttctctgggaaacagcaaaaggtaggaggaggtaggccaaatggtttctcagattngtttccattctcagaatcggtgaagtctataaagcaggcgccgacacc

SEQ ID NO: 463329 - DNA, 662 bp, Homo sapiens
ggtgtggcctagactgagtaattagaaaaaggctttgggaggagatgacctatggtgttcaacagatatttgctgaatgaattaatgagtgaatgagtcattcatgcaaagaataggagcaatggcagagagtgtttggaaatacttttgctataatagttaatackaatagctgcttttgatttgctcttatgtgccaggcactgtgcttaattatttatatttacctaaaagttgaatcttcacaacaacccaaagaattaattaattagaataactccattttttagacaagagttgtaatgacatttatggtaaaaaaaatggaactttttacttaaaaatctttaatgttcttattactcctttaaatctcaagcacttaaagaacaacatttggttataaattaatcaaagtgctgggaaaggtggtggtctgtctcattcacctaattttctatcaaaatagatttgttaaagttctgtataaagataatagcttcttcatttgctctgttcatgtgttacaattagatcatagaaagtcagaatggaaagcaaccttggaattcaactagtccagcagtagtgttttataaatagacttaggcataaagaaattaaatgaatctttttaaaaatactggatttttgtagtgagc

SEQ ID NO: 463330 - DNA, 473 bp, Homo sapiens
aataactcttatgcatcatcccatataaagccatataaagccttaattccaggctcataaatcaaatagtcaatacaaaaagcacttatgagttacctcctgtggatcttttgctaaaacacaatgcaatttagtagttagaggtcctaaactagtagaaaagtatttcaaggrgatttgtttgaatatttcccgtgggagaaggaaagaagtaggattgggtagagggaagaagtgaaatgcaaaacagtcacaagtcctcatgcaatcctcatagatgccctgagtctttagatagcccctcagaatcctaacaccttggggcaagggaactgggtctttatttcccatccaccagtgatcagatgcaggttggccctgggagtgagccatgatcttgggcaaagcagctttcataagcttagggcagtttccagagaatgatgcagttgagagctgtcagctgctgtcaa

SEQ ID NO: 463331 - DNA, 473 bp, Homo sapiens
aataactcttatgcatcatcccatataaagccatataaagccttaattccaggctcataaatcaaatagtcaatacaaaaagcacttatgagttacctcctgtggatcttttgctaaaacacaatgcaatttagtagttagaggtcctaaactagtagaaaagtatttcaaggggatttgtttgaatatttcccgtgggagaaggaaagaagtaggattgggtagagggaagaagtgaaatgcaaaacagtcacaagtcctcatgcaatcctcatagatgccctgagtctttagatagcccctcagaatcctaacaccttggggcaagggaactgggtctttatttcccatccaccagtgatcagatgcaggttggccctgggagtgagccatsatcttgggcaaagcagctttcataagcttagggcagtttccagagaatgatgcagttgagagctgtcagctgctgtcaa

SEQ ID NO: 463332 - DNA, 568 bp, Homo sapiens
tggctccaaacatgtctttgattgtatcgccattctctttctagggaaacctgtttctctaagacagatgtcctctccctttctgcatgctttatcatatttcacatgtattccaattgttttcctaaaagattacatttattttctgcagctatcaactgagatatcagttcttgattgtgctttgattcttcattctttgaattctccctttcccatatctctccatccagtaccttcttggattcaattgtttctctagacaaggttttcacactttcttctgccagaatcmtttcaagttccaagcatcaaatcttacctttaagattcttaagagcacaaaatatagctctgctgttgctttctggataggcaagtgtaggcttatttggggagtgtcgtagatcactcttaaggaaaggcttatcggatggatgtactacatttggagatgaagaatgctgaacaggcttccctaaggccctgatggttcagttaagatgtttgagaactgagaaccagaagcagcagagaccaacgccacccagggagcctccacaggtct

SEQ ID NO: 463333 - DNA, 580 bp, Homo sapiens
aaggcaatgcctagtcgagccatgggagtggggccacagcagacagtccccactaggtcaatgtccagagagccatggggttggggccaycacagagagcccccactggggtaatgcatagtgggatcagggctgcccttgagacctgtagagccatcagcatgcaacatcagcctgagagagctgcaggcatctgactccaactccgagagaagctgtgtgggctgcatcctgtgaagtcatggggatggacctgcctgaagccttgggagcccaatccccaccccagtgtgttcagaagacgggatatggagtcaatgattattctcaagcctcaagatttaatgttgtttgtcttactgggttttgaacttatttgggacctattactcctcccttctttcctatttcttcctttgggaatggaaatgtctgtcctacttgtattttggagacacctaacttgattgatttcgcaggtttacagctggaaagcaatttgcctcaggatgaaacacacctttgattctcagccatgtttgatattgatgatacttagatgaggctctggactttagac

SEQ ID NO: 463334 - DNA, 580 bp, Homo sapiens
aaggcaatgcctagtcgagccatgggagtggggccacagcagacagtccccactaggtcaatgtccagagagccatggggttggggccatcacagagagcccccactggggtaatgcatagtgggatcagggctgcccttgagacctgtagagccatcagcatgcaacatcagcctgagagagctgcaggcatctgactccaactccgagagaagctgtgtgggctgcatcctgtgaagtcatggggatggacctgcctgaagccttgggagcccaatccccaccccagtgtgttcagaagacgggatatggagtcaatgattattctcaakcctcaagatttaatgttgtttgtcttactgggttttgaacttatttgggacctattactcctcccttctttcctatttcttcctttgggaatggaaatgtctgtcctacttgtattttggagacacctaacttgattgatttcgcaggtttacagctggaaagcaatttgcctcaggatgaaacacacctttgattctcagccatgtttgatattgatgatacttagatgaggctctggactttagac

SEQ ID NO: 463335 - DNA, 590 bp, Homo sapiens
accatgtagcctgagctgcacatcatgaagtgttatctgacccaccaagccataaagttgggtgtacacagcagcactccatcatcagacggggtgatgtgtatgggactgggtctgaacaggccctgaggcacaagtaagtaatatgaagaaatggccaaatatccatggtcctcacccctgctctactgccctctgccaacctgcacctataccctcatgcaaagttctctaagaacagctgacagataagaagacccagaactgtttacagatgattctgcataatacacaggcaccaaccaaaagtgaacagctgcagcactacatcccctttctggaacatctgtgaaggatactggtgaagggaaacagtgggcagaacttcaagcaatgcaactcgctgtccactttgcttgggaagaggaatggccagacatagaagtatacagtaattcatgatctatggccactggtttagctggaaggtcactgayttggaaaaaacatgttagaaaattgatgacaaagaaatttaaagaagtggtctgtgaacagacctctctgtatggacaaaaaaaaaaaaagtg

SEQ ID NO: 463336 - DNA, 573 bp, Homo sapiens
cattttgtttagctttctataatatttattatttctaattacaaaagtgagatattacttatagcaagtgaaatagtgcagagatgtgtcaagataaagttcctagtagtctccccattcaccaccccatctaactctttccatttctagcccatgaggcaatctaattaacaggttggtgtccctgcttctccatgttcatacacacacacacacacacacacacacacactctgtatatacatatagtttctgtatttttcttttcaaaatagaatcatattgttaaacacatattgctcaacaacttgcatttgtcagtgtacaaatcaataaagatcgaagttatttacaataagaatgcccttgatatttcataatttattcaagcattctccttttgaggtctttacaaacaatgcagacaacatttttgaacttttattcttatatgttgctgtacttctataaaaatggagttctaaaagctgggttgcagaatcaaaatgtatatggatgyataattgcaaaagatattgccagattacttttcaagattgtagtaaccacggt

SEQ ID NO: 463337 - DNA, 476 bp, Homo sapiens
cacaacagggtttttcaaggtagatgaaactgtcttctactagaaggagatgccatctagaactgtcatagccagagaggagaagtcagtgtctggcttcaaagcttccaaagaygggctgacttttttgttaagggctaatgtagctgatgactttaagttgaagccaatgctcatttatcattctgaaaatcctagggcccttaagtaaaaatctactctccatgtgctctataaatggaacaacaaaggctgaatgacagcacatccatttgaagcatggtttactgactatctttaagtccattattaacacctactcctcagaaaaagagttctttcaaaacattactactcattaacaatgcacctgatcacccaagatacctgatggagataaacaagaagacaaatgttgttttcatgcctgctaacacaacatttattctgcagtccatggatcaaggagtaatttt

SEQ ID NO: 463338 - DNA, 380 bp, Homo sapiens
  misc_feature (1)...(380): n = A,T,C or G
gagtccagtggccagcagacttaagacacaggaaaagcctgtgtttcagtttgagtctatcttagtcagcgcatgctgtcataacaaaataccatagactgtgtggtttagacaacagaaattttttctcrctgttctggtggctgaaagtctgagaacagggttcctgaatggtagagttctgctgagagccctctttttggcttgtaggtagctgccttctggctgtgtcctcaggagttggagggagaggggtntctggtttctcctcttcttatctcctcttatgatgggaatagtgttctattcccatcacgggggccccatcctcatgatctcatttaataacctctcaaaggccccacctccaaagaccatca

SEQ ID NO: 463339 - DNA, 380 bp, Homo sapiens
  misc_feature (1)...(380): n = A,T,C or G
gagtccagtggccagcagacttaagacacaggaaaagcctgtgtttcagtttgagtctatcttagtcagcgcatgctgtcataacaaaataccatagactgtgtggtttagacaacagaaattttttctcactgttctggtggctgaaagtctgagaacagggtkcctgaatggtagagttctgctgagagccctctttttggcttgtaggtagctgccttctggctgtgtcctcaggagttggagggagaggggtntctggtttctcctcttcttatctcctcttatgatgggaatagtgttctattcccatcacgggggccccatcctcatgatctcatttaataacctctcaaaggccccacctccaaagaccatca

SEQ ID NO: 463340 - DNA, 611 bp, Homo sapiens
gtcttgaactcctgacctcgtgatccacccgccttggcctcccaaagtgctgggattacaggcatgagccaccgcacctggcccaacagatgtttattttatttaattaattaattwatttattttgagacagagtcttgctctatcacccaggctggagtgcaatggcacagtctcagctcactgcatcctccgcctcctgggttcaagcaattctcctgcctcagcctcctgagtagctacatgttcaatccatttggagagtatgttttcaaccagctggtttccctggaaggcagctagggaaagtgagtgttagtaagtttgagtcagacaagggtttgttagtcttcccctcagcccttgtgcagcaactcactcctcgggctgtgggccatgacagaaagggaaggactactttgcttcctcactcttgctgagtgagagcagctggatcagaggacagtgaacgtctgctcaggattacagtcattcaggcatacctaggagatgtccctaggccccagacattgcttgagaagctgggagtagcttacatttgtctgaggcagggtttcttaaccttatcactattggcatttgggctgggt

SEQ ID NO: 463341 - DNA, 611 bp, Homo sapiens
gtcttgaactcctgacctcgtgatccacccgccttggcctcccaaagtgctgggattacaggcatgagccaccgcacctggcccaacagatgtttattttatttaattaattaatttatttattttgagacagagtcttgctctatcacccaggctggagtgcaatggcacrgtctcagctcactgcatcctccgcctcctgggttcaagcaattctcctgcctcagcctcctgagtagctacatgttcaatccatttggagagtatgttttcaaccagctggtttccctggaaggcagctagggaaagtgagtgttagtaagtttgagtcagacaagggtttgttagtcttcccctcagcccttgtgcagcaactcactcctcgggctgtgggccatgacagaaagggaaggactactttgcttcctcactcttgctgagtgagagcagctggatcagaggacagtgaacgtctgctcaggattacagtcattcaggcatacctaggagatgtccctaggccccagacattgcttgagaagctgggagtagcttacatttgtctgaggcagggtttcttaaccttatcactattggcatttgggctgggt

SEQ ID NO: 463342 - DNA, 611 bp, Homo sapiens
gtcttgaactcctgacctcgtgatccacccgccttggcctcccaaagtgctgggattacaggcatgagccaccgcacctggcccaacagatgtttattttatttaattaattaatttatttattttgagacagagtcttgctctatcacccaggctggagtgcaatggcacagtctcagctcactgcatcctccgcctcctgggttcaagcaattctcctgcctcagcctcctgagtagctacatgttcaatccatttggagagtatgttttcaaccagytggtttccctggaaggcagctagggaaagtgagtgttagtaagtttgagtcagacaagggtttgttagtcttcccctcagcccttgtgcagcaactcactcctcgggctgtgggccatgacagaaagggaaggactactttgcttcctcactcttgctgagtgagagcagctggatcagaggacagtgaacgtctgctcaggattacagtcattcaggcatacctaggagatgtccctaggccccagacattgcttgagaagctgggagtagcttacatttgtctgaggcagggtttcttaaccttatcactattggcatttgggctgggt

SEQ ID NO: 463343 - DNA, 578 bp, Homo sapiens
catattaatgttaggcaggtaaactggaaacaaaaagaaaccatttaatattagggatactttcagaacatttacatgcgtagtgctgatatatttaaaaagggcaagaggagatcatagttaacaacggaagcatgaagaagagcatgcgggactgcatggcacatgtagtataaatgagtaccttgaataaattttgcccccaaatgaccattatattattagtgcatagcgaggccaaattcttctgaaagaagttgcagatctggagtggattttatctaagtatcatggaagggacattattagagtgtctcctagtcactgktccctatttaatatgtcaaaatttatgttatggctcttggtagacctaatgcttaattccctgacaaattccctgacaaaacttgggtgaaatggaaatgttattccatttgaaaatggacatttaccatggcctctttgtttcataaagcacattttgaaagcatagtaagcagtgattgttattgcatgtgaagataagccaagctttgtcaagattaacctaagtaaaggtcctaattgtaaaagaa

SEQ ID NO: 463344 - DNA, 613 bp, Homo sapiens
ctgccttcctttctctctttctctcccttcctcccttttccttccttcaccttttttccttccccctttctctcagcatagaacaaaccaaattcccccagcaaaatcctgcaattctccagccttcctactaatattatgatttgtaggmgtttttagtataagctttcctttattgttcattgatgcatttgcataaattcatatttatataaagtttatttccctttctaaatctataggtaaatagttttctaaaatcttatttcagggttaagagataatgattcaagtgaatggtagaaagttataaaggtaaataacaatagaatcaaaaataatataaccattaaaattagggagaaaaggagagagagaatagaaaagagaagaaagacaggtataaattagctaaatgtccacctattactaaataatttctaaaataagtgaataaatatatgctgacataaaatccccataagaatgactaaatttctgcagacagaaaatttaagcaaacagaaaaacactaaatgttgtcaaagctgtggagcaactagaactcccacacactgctggtgagaatgtatgctggtacaaccactttaga

SEQ ID NO: 463345 - DNA, 626 bp, Homo sapiens
acagtagcagtgacaggtaaaattcaattgtcatttaccaaaatccttgaaagaaataaaggtaaaaggraaagttgttcaagttgggaagatcagatggttagcttttttaggaaaaagatcaaacacccatatatgacttagaagtgtcccccacccccaccccgttatcatgccaccctctaccttggttttcttatctactaacagtctcccatatgcgtcacacatattgccctatattggactaattccattctctcattactctgagcccttgcagattctgtgccctttacttggacagttcctgtttttctccccatcaaaccagtacacacccaagaatcaacgaccgcattcacagacaaattttcctaactctcttttccttccaggactggcctttgtatatgcatccctagcactctctaataatttggagatttcttaactgtcttttcctactaaactcaaatccttgagagtagtaaccattcatctttttttctccagccctaactcagaactgagtatctaatagatccacactaatatttactatgaaaaaaaagtaatattatgtaatggatgaaagagtgagtagacgaatggttaaagccaaa

SEQ ID NO: 463346 - DNA, 626 bp, Homo sapiens
acagtagcagtgacaggtaaaattcaattgtcatttaccaaaatccttgaaagaaataaaggtaaaaggaaaagttgttcaagttgggaagatcagatggttagcttttttaggaaaaagatcaaacacccatatatgacttagaagtgtcccccacccccaccccgttatcatgccaccctctaccttggttttcttatctactaacagtctcccatatgcrtcacacatattgccctatattggactaattccattctctcattactctgagcccttgcagattctgtgccctttacttggacagttcctgtttttctccccatcaaaccagtacacacccaagaatcaacgaccgcattcacagacaaattttcctaactctcttttccttccaggactggcctttgtatatgcatccctagcactctctaataatttggagatttcttaactgtcttttcctactaaactcaaatccttgagagtagtaaccattcatctttttttctccagccctaactcagaactgagtatctaatagatccacactaatatttactatgaaaaaaaagtaatattatgtaatggatgaaagagtgagtagacgaatggttaaagccaaa

SEQ ID NO: 463347 - DNA, 384 bp, Homo sapiens
gaattcaggggccagtatcagsgctgcaaagaagctctgatccacactgaaggaaaaacttatgttgaggacattcattaaacatggcctacttattaagttggatggggaatgtggcttaaattcaccaaattggctattttctcctagatggttttatgtttcctatctagctcagaatcggaaaaatcaataacttgacttttgttccaagatggccgaataggaacagctccagtctacagctcccagcatgagcgacacagaagacaggtaatttctacatttccaactgaggtaccgggttcatctcattaggactggttggacagtgggtgcagcccatgaagtgtgagctgaagcacagtggggcatcatctcacc

SEQ ID NO: 463348 - DNA, 577 bp, Homo sapiens
caccaccacatcaatgttcctcttgatttttcaaaataaaaagttgagggaaatgtttgtcctcttcaccccataaccactgtgcctgcctcccctccccactgcacaatgccaggagggctggggggtcctgcccaaggtcctgtgcccccagcagttcccgccaagacaggcactgggagggagggagatgggggacaatttgggggttcagcttccctttgcctcagcctccacccagatgccagagtgaccttcccaggctctggttcccagcccrgcccattttccccctcctcccagagcctccaactgcatgtgaaattaacagggcctccgcctctgcctccctcggtgggtctgggctctgggctctgggttcagggctcagggttcagggcagggtaggaacgcaggcagtccttgcacagcttgttccctgggtcactggcccgcatcctgaccccactggagttcctctgaccgttccagcctccaggcctttgtgctctgccaggaacacttcctcacctcacccgttccacccagggaaaccccatccatctttcaaagccta

SEQ ID NO: 463349 - DNA, 561 bp, Homo sapiens
ccttgatttggtgttctcctccttccgctaggaatrgggcttcctaagagctgaagtgtagtgattgcttttgctcttctgggtctagccacccagcagagctaccatgctgcaggctggcactggagagtgtctgcaatgagtcctgtgatgtgatccatcttcaggtcttgtagccatggataccagcatctgctctggtggagttagcaggggagtgaagtggactctgtgagagtccttggttgtgtttttgtttagtgcactggttttgtgttggctggcctccagtgaggagttggtgctttcaaggaggcattagccacagtcttatagggaggatgcaaacttgccctagggacacctagtttctcaggtattcaggtattcaggtttctcaggcagtggcagggccatagagttcccaagagattatgacctttgtcttcggctaccagactaccagggcaggtagagaaaaaccaccagttgggggcagggatagaggtgtctgagctcagctgctccttgagttggacttgctgtggctgctgtgggggc

SEQ ID NO: 463350 - DNA, 237 bp, Homo sapiens
caacccgggcaagagtgaaacgtcatctcaaaaataaataaataaataaaaaggaacaataaataaataaataagcaagcagagctcatgtgaatgaactgagcaagacytcactcatcaccaagtggatggaactcagacattaatgaggggtttgaccccatgatccaataactgccaccaggccccacctccaacattggggattacattttaacatgagatttggagggaaca

SEQ ID NO: 463351 - DNA, 595 bp, Homo sapiens
gggggccagctgcagctccaggttttatgaacactttgatagaaaccacattaaatagcaacactagttcacacattaattttgtcatgttaaattccagcttgggcacgyagggagttcatgagatattgacttttcatcatcgtcattgcagaaaatatgatttttttttctggctcagccattagcagacataatgaagtagaatagtctcaaagtgccttaagaaaactcaatctggtcacacgtttttctggctttggagttcagtgaagcaggtgagggtcaaggattaccagagaaatactcaaatcgttccctaagtggcagtggaagttggactctttcttctcattgcaaactttggtagctgtgtggcctcactagtactggtagatttttttttcttttgctgattgccactgctttgttattttcttctggtgcaatatctgaacttcattggctacagatatctcactcttttgcttctattggcacccaagttggagagggtacaaatgacccagtcaccacttaatagattcatatggacaaaaaaaggtgtatcatttgagctgcagaaacctagagt

SEQ ID NO: 463352 - DNA, 611 bp, Homo sapiens
actagctgtgactctgtatcttcattacacatgattatggctagtgtgctggtccctagtattggtggcctctacttcaccatcatgctgatttccccaacccatcctctcagaaaaactgtcaatggtcagtagcttccagtgttttgctttggggtcgatagacgttaatgtgttccaacaactcctgaaaaggcagtgagtgatgaaaacctcttgtcatgttgggcttttgcacatattcaaccatgagctgctcctcttggcttgtaatcataattagaggattttttttaaagtgcagagcaagcatctagtttttaatgcacagaatattttaggcttctctctcaaatttggcttcatgaccagattattttcaatgactctatgatyttcttaaaaggcctataaaacaaaaataaggttatcatttcactttaggctattaaatatgatttatctattccagtctgttgctgtggaaatagatacaacacaggagccttggcagtatgacaagcaattaagacaccaagacgtttagccatgtatgagtattttctcacagtgagacctcaaagcttagcctgccactgacattgttagtc

SEQ ID NO: 463353 - DNA, 611 bp, Homo sapiens
actagctgtgactctgtatcttcattacacatgattatggctagtgtgctggtccctagtattggtggcctctacttcaccatcatgctgatttccccaacccatcctctcagaaaaactgtcaatggtcagtagcttccagtgttttgctttggggtcgatagacgttaatgtgttccaacaactcctgaaaaggcagtgagtgatgaaaacctcttgtcatgttgggcttttgcacatattcaaccatgagctgctcctcttggcttgtaatcataattagaggattttttttaaagtgcagagcaagcatctagtttttaatgcacagaatattttaggcttctctctcaaatttggcttcatgaccagattattttcaatgactctatgattttcttaaaaggcctataaaacaaaaataaggttatcatttcactttaggctattaaatatgmtttatctattccagtctgttgctgtggaaatagatacaacacaggagccttggcagtatgacaagcaattaagacaccaagacgtttagccatgtatgagtattttctcacagtgagacctcaaagcttagcctgccactgacattgttagtc

SEQ ID NO: 463354 - DNA, 460 bp, Homo sapiens
ataataatactcaatagacaatgtctaaacttgatccaataaccgtgtgtgtgtgtgtgtgtgtgtgtgtgtgtgtgtgttttgaacattttggaaaatagacataaatatcagaggaaagagttacagatttgaaagagtttgccactagggaatgaagttgatcagggtaggtcaaggaactgttttttattaaaggacttttagcattttggacttaaaaaaacttactgtacagattttttaaaaatacatatatttttaaaaatagtggaatatatctatttattagggtttcttcctagagctatgcaggggttattatgagtgttgattttgccaaaggttagatttcactacaacttaaatgtgcttttggactttcctgtgttagactttatccatttttagktgattcaccatctttgtacagccatcagtgcttttgcaatcattcgaa

SEQ ID NO: 463355 - DNA, 321 bp, Homo sapiens
ctttgtctttgatacaggtgactgaatctctattcaaagtgaaacatttagtgaaggcttagcgaaaactctggactggtgttagatgcacagagcacaagttaccttgtaacaattagtacatacacaacacacaggytgttcagtgcacgagaacactagtggagatggcaaatggaagctgaaatccacagtccttccaccattcaccaagccatgcacctttgcagggggatgtgtctgtggggaggtctttttccaattcagataaaggtaccatatgtcattacatgataaagatgcctttgtcaaaatccgatt

SEQ ID NO: 463356 - DNA, 629 bp, Homo sapiens
ttggtagtgacctagctgtcatttctttctttttcactgtttatatttctatcagatttccacaacaggacgtttacacataataaccatgggttgtctaaatccagttcctatataacatttatttaaaaatttctgtggacttgacaaattcagacaggagtttatagataatagtgayatgactattattgcagaatgaattaaaatcatgtttaggacaaatgcactttaatgcaatagattgtggttggttggcattaaatatttagtagaagaattctgcttaatattagtgtaattaaaggacactgatgtaggtaggtatgcatatatatacatatctaagttatataaaggactttattaacgcttaatacaggatatttgtacatacataaatatgctattatcttatatgaaaaactacaaatcctattggttgtatttctgtttattgttaatgtttctaaaacatttggagaaaatgatattactcttataatgcattctttgtaagcttctcatgacagagatgttgtaatctctgtcagttggttgattataaagcacaacccatgtaaatatctgtactagatgagtttgttgatcatgggctgatgagattt

SEQ ID NO: 463357 - DNA, 629 bp, Homo sapiens
ttggtagtgacctagctgtcatttctttctttttcactgtttatatttctatcagatttccacaacaggacgtttacacataataaccatgggttgtctaaatccagttcctatataacatttatttaaaaatttctgtggacttgacaaattcagacaggagtttatagataatagtgatatgactattattgcagaatgaattaaaatcatgtttaggacaaatgcactttaatgcaatagattgtggttggttggcattaaatatttagtagaagaattctgcttaatattagtgtaattaaaggrcactgatgtaggtaggtatgcatatatatacatatctaagttatataaaggactttattaacgcttaatacaggatatttgtacatacataaatatgctattatcttatatgaaaaactacaaatcctattggttgtatttctgtttattgttaatgtttctaaaacatttggagaaaatgatattactcttataatgcattctttgtaagcttctcatgacagagatgttgtaatctctgtcagttggttgattataaagcacaacccatgtaaatatctgtactagatgagtttgttgatcatgggctgatgagattt

SEQ ID NO: 463358 - DNA, 600 bp, Homo sapiens
accagtctcccaccacatggaatccagcagctgtgtaattcttccatttccttctgatttattagctcttcactgcctttatttccttctctatgcagtgtagacactgtggtccattattttaactaatctccttttaaagaggcctttcaattcactagttcctttactcttcccctcacctagcaaatctctatcttcatgtcactcaaagaactgacatctgctgcagaaaatggcaaaactgggctgagcacggtggctcacgcctgtaatcccagcactttgggaggctgaggcaggcagatcacgaggtcatgagtttgagaccagcctggccartatggtgaaacctcgtatctactaaaaaaaaatacaaaaattagccaggcgtggtggtgggtgcctgtagtcccagctacttgggaagctgaggcaggagaattgcttgaacctgggaggtggaggttgcagtgagcggagatcatgccactgcactccagcctgggcaacagagtgatacttcgtgtcaaaaaaaaaaaaaaaaaaaaaaaccaagaaaatggcaaaacagaagaggtgattaccaccgcacatgtg

SEQ ID NO: 463359 - DNA, 578 bp, Homo sapiens
aaaaaaaatattcaacatcactaatcatcagggaaatgtgaatcaaaatcataatgagatatcatcttacaccagttagaatggttactactaagaagtcaaaaaacaatggatatcrgtgaggatgcagagaacagggaatgcttatacactgttggtgggaatgtaaattagtacaacctctctgaaaaatggtatagagatttctcaaagaactaaaactgcaacctccatttgatccagcaattccacttccgagtatccacccaaaggaaaagaaattatgtaaaaaaaaatacctgcactcacatgtttatcacagctctattcacaacagcaaagtcatggaatcaacctaagtgattacataaagaaaatgtgataaatgtatacaatggaatactattcggccattaaaaagaattaaatcatgtcttttgcagcatcatgggtggaactagaggccattattttaaatgaaacaactcagaaacagaaagccaaatacctcctgttctcacttataagtgggagctaaataatgcgtgcatggggacatacagtgtagaataacagac

SEQ ID NO: 463360 - DNA, 358 bp, Homo sapiens
agttgacaacctagtacttgtgactgagtctaagtagggagcattcttgtgggactgagcctctgacctgtgggatctgatgccatctccaggaagatagagtcagaattgaattgaattagaggacacccagcttgtgtctactgcagaatccactacagaatctgcaggattttkttttccggtgtgtagggaaaaccccccatacatttggtgtcacaagtggtattgagtgactatgtgagagtgtggactagaaaaacgtagttcaatttttcctatagcctatatttggtgtcaggagtgtgtataaaaaaagaaaaaacactttgctttgggtttctcttatctattaatg

SEQ ID NO: 463361 - DNA, 595 bp, Homo sapiens
tttgctcatgttgcccaggctggagtgcaatgacacagtcttagctcactgcaatctccacctcccaggttcaagagattgtcctgcctcagcctcccaagtagctgggattacaggcacgtaccatcacacgcggctaatttttttttttatttttagtggagacgyggtttcactatgttggccaggctggtctcgaactcctgacctcaggtgatccacccgcctcggcctcccaaagtgctgggattacaggcgtgagccaccatgcctggcccacacatttttattctaaacatttccttgaatagtacctctttatcttcatgaatgtagtagggcacacaggtgaattgttttctatgcctgtgacaagggacaatttgaaagtaatgaagcatagcacattaaacgcctttcttcaaaggaatctatgaagcttggcctaaaatcctgtggttctctgtttcaacacaatctcatatcttttaaattctgtttgtaaactatttttttaattttttgagagcatgtcagtgaataaattattttagccaattcatagataaactgagcttcaaagaaagcataaggt

SEQ ID NO: 463362 - DNA, 527 bp, Homo sapiens
gtatgaacttcatggtcaggggaagcagctaaagatgataggagcccacaaggcagccagccagtcaccacactcttctcaggccgggccctgaccccacagcagagcctcagggagtaactyactgcatcatatgcaatagtttatgcagagctttaccgacaaagcaatacgtgtggtaaaaaggaaagacatagagccttggacttttagatgttcatgaatattttcatagtttgctttggttctggccctgtaattactaggctgctgaacaactggagatttattgtggaattactaatgtttcaaatgtagtttctattgattccctcctccacgtctttctctcaaacctaaaaaataaaattgaaaaaaatctattcaatgtgttaagggggttgccaatttaagttcacttgaaacacacaatggtcaaaaaaacctttcatggtttcttcttatgctgaagacaatttaaccaaattgtacatacaaagtatgatgctttagagtactagttaaac

SEQ ID NO: 463363 - DNA, 604 bp, Homo sapiens
agtgggtcactcgctcagtaaccttctaccttctgtaccatgtgctgccatgagtaaattattaccaactgcagggcaaagggaaagcatccccttacccttcggaagatttgctgaaaaatcaactcacaaaaaggcagattaatgagaaaaggcatacacatttattaactaccatgcacacagaaagaattacagagtgwttgtccaatatctcaatgggggttcacatgcttaaatatcttactgattagaggacagggagatggaaaaatataggtgattttagagggatagtatatgatttttagaggaatccaagtgtgctgccccgtaagcatatttcctccctgctgaccatgtccctgcaatagaagactgctgtcatgaggccagatcattggttaagggtagaatagagaatccttggagaatagaggcacgcatcctgccataactggatctgcaacatttccgatggtcacaagccttggtgtggagcagagtcctgagatgctcatcaatataaatcacagaagctggattacacttggagagtgttattctattttatgcaatgcaggaaaaaataatggctagtttg

SEQ ID NO: 463364 - DNA, 604 bp, Homo sapiens
agtgggtcactcgctcagtaaccttctaccttctgtaccatgtgctgccatgagtaaattattaccaactgcagggcaaagggaaagcatccccttacccttcggaagatttgctgaaaaatcaactcacaaaaaggcagattaatgagaaaaggcatacacatttattaactaccatgcacacagaaagaattacagagtgattgtccaatatctcaatgggggttcacatgcttaaatatcttactgattagaggacagggagatggaaaaatataggtgattttagagggatagtatatgatttttagaggaatccaagtgtgctgcccygtaagcatatttcctccctgctgaccatgtccctgcaatagaagactgctgtcatgaggccagatcattggttaagggtagaatagagaatccttggagaatagaggcacgcatcctgccataactggatctgcaacatttccgatggtcacaagccttggtgtggagcagagtcctgagatgctcatcaatataaatcacagaagctggattacacttggagagtgttattctattttatgcaatgcaggaaaaaataatggctagtttg

SEQ ID NO: 463365 - DNA, 621 bp, Homo sapiens
ttaaatatttgttacagcagcaacaaaagtatacagtatagagtattggtatcaaaaktatggcgtattggaaccaagatctatgttagtttcctattgctgctgtaacaaattaccacaagcatagtggcttagaacaacaaacttttattattttacaggtttagaggtcagtagtccaaaataggtcttacagagctaaactcaaggtagcagctgagttgcattctttttggaagttctaggcaacagtttatttcagtgccttttctggcttctagcagccacctgaatgctttgattcatggtctcctttttctatcttaaaagccagcaatgtaacatcttcctgaccctacttctaccctcatatctctttcagtaaccaggttctctgattttaaggactcatgtgactagactgggaccttctggataatgtagagtagtctttccatcaaaaagtctgtaactttatcacatctgcaaagccccttttgccatgtaaggcattaactcacaggttccagggattctgacatgaacatctttaggaggccattgttctttctaccataacatcttccattaaatttttactaggcatttgatgttctttga

SEQ ID NO: 463366 - DNA, 621 bp, Homo sapiens
ttaaatatttgttacagcagcaacaaaagtatacagtatagagtattggtatcaaaagtatggcgtattggaaccaagatctatgttagtttcctattgctgctgtaacaaattaccacaagcatagtggcttagaacaacaaacwtttattattttacaggtttagaggtcagtagtccaaaataggtcttacagagctaaactcaaggtagcagctgagttgcattctttttggaagttctaggcaacagtttatttcagtgccttttctggcttctagcagccacctgaatgctttgattcatggtctcctttttctatcttaaaagccagcaatgtaacatcttcctgaccctacttctaccctcatatctctttcagtaaccaggttctctgattttaaggactcatgtgactagactgggaccttctggataatgtagagtagtctttccatcaaaaagtctgtaactttatcacatctgcaaagccccttttgccatgtaaggcattaactcacaggttccagggattctgacatgaacatctttaggaggccattgttctttctaccataacatcttccattaaatttttactaggcatttgatgttctttga

SEQ ID NO: 463367 - DNA, 621 bp, Homo sapiens
ttaaatatttgttacagcagcaacaaaagtatacagtatagagtattggtatcaaaagtatggcgtattggaaccaagatctatgttagtttcctattgctgctgtaacaaattaccacaagcatagtggcttagaacaacaaacttttattattttacaggtttagaggtcagtagtccaaaataggtcttacagagctaaactcaaggtagcagctgagttgcattctttttggaagttctaggcaacagtttatttcagtgccttttctggcttctagcagccacctgaatgctttgattcatggtctcctttttctatcttaaaagccagcaatgtaacatcttcctgaccctacttctaccctcatakctctttcagtaaccaggttctctgattttaaggactcatgtgactagactgggaccttctggataatgtagagtagtctttccatcaaaaagtctgtaactttatcacatctgcaaagccccttttgccatgtaaggcattaactcacaggttccagggattctgacatgaacatctttaggaggccattgttctttctaccataacatcttccattaaatttttactaggcatttgatgttctttga

SEQ ID NO: 463368 - DNA, 575 bp, Homo sapiens
gtctttccatcaaaaagtctgtaactttatcacatctgcaaagccccttttgccatgtaaggcattaactcacaggttccagggattctgacatgaacatctttaggaggccattgttctttctaccataacatcttccattaaatttttactaggcatttgatgttctttgatgygactggaaatgtttttataatttcaattttcaattgtttgtctctaggaaatagaaatttagttgatgcttgcatattaacccggtgtctaatgatctttctaagttcatttactacttcaaatatgtgttggacttttgtatattctatgtatataattatattgcttatgaatgacagttttaaagttcatgtcatttataatttatatgtactttgcttgttatgctaactagaaactctagtacaatgttaaatagaagtgcttaataaggaacatctttgtttacataactcaggaggaaagcattcaatatcttactattacttataaagttagtgatgagtattttatagataacctccaccagaagatctttctgccttgtcctgatattc

SEQ ID NO: 463369 - DNA, 494 bp, Homo sapiens
aatcacatggcaatctgacaaaagttttggagaaaaaggtaatactcaataccgmccccagtgtaaaactttcatagtcttttccggtaggagcataagttggcaccacttttctggtggacactttagcagggagtctcagaaacattttatgaaggttcaaaattctgccattatgggctgaatgtttgtgtcctcaccccaaaaattttgtgttgaaatcctagctcccaaggtaatggtagtaggatttgggggagggtttgggaggtgattagatcatgagagtggaggccccatgaatcggattagtgccactacagaagaggccctggagggctccctcgccccttccaccatgtgaggacacagcgagaagatgccatctatgaaccagggagcaggccctcaccaggcaccgaatctatcaacaccttgacctggactttctagcctccagaactatgagaaagacatttctgttttttataagc

SEQ ID NO: 463370 - DNA, 542 bp, Homo sapiens
agcctcagccccacgaagtgctggaattacagacgtgaaccaccatacctggcctaatagttttaaataaatgaatgaatttaaaaaccaaaggcayaaacacacaaggaaaaaaaagtcaacacgcttaccaactttgggaagatggaaaagtgatggacaagtggtaactgagtggcagtcaggcaaagatgaatcctcagcctgtggagaattggtgtgtggaagccaacaagaagcaagctggttggaaacacagaactctggaaagatcatgaatgaaggcactaggtaaagctgaaagcatgggcacatggtggataagagaactaggagagctgactaatgtctttggaaaggaacaatccccagatcccagttcccactctacagagtcggactaatatccctctcatgtaatgtagctcatgagtaaactgtaacatttgaagattaaagggggcactagtcataggtaatgcaggaacaacggaatgatcacatgacaaacagtgtgctagcaccagagtcatagaagagat

SEQ ID NO: 463371 - DNA, 542 bp, Homo sapiens
agcctcagccccacgaagtgctggaattacagacgtgaaccaccatacctggcctaatagttttaaataaatgaatgaatttaaaaaccaaaggcataaacacacaaggaaaaaaaagtcaacacgcttaccaactttgggaagatggaaaagtgatggacaagtggtaactgagtggcagtcargcaaagatgaatcctcagcctgtggagaattggtgtgtggaagccaacaagaagcaagctggttggaaacacagaactctggaaagatcatgaatgaaggcactaggtaaagctgaaagcatgggcacatggtggataagagaactaggagagctgactaatgtctttggaaaggaacaatccccagatcccagttcccactctacagagtcggactaatatccctctcatgtaatgtagctcatgagtaaactgtaacatttgaagattaaagggggcactagtcataggtaatgcaggaacaacggaatgatcacatgacaaacagtgtgctagcaccagagtcatagaagagat

SEQ ID NO: 463372 - DNA, 542 bp, Homo sapiens
agcctcagccccacgaagtgctggaattacagacgtgaaccaccatacctggcctaatagttttaaataaatgaatgaatttaaaaaccaaaggcataaacacacaaggaaaaaaaagtcaacacgcttaccaactttgggaagatggaaaagtgatggacaagtggtaactgagtggcagtcaggcaaagatgaatcctcagcctgtggagaattggtgtgtggaagccaacaagaagcaagctggttggaaacacagaactctggaaagatcatgaatgaaggcactaggtaaagctgaaagcatgggcacatggtggataagagaactaggagagctgactaatgtctttggaaaggaacaatccccagatcccagttcccactctacagagtcggrctaatatccctctcatgtaatgtagctcatgagtaaactgtaacatttgaagattaaagggggcactagtcataggtaatgcaggaacaacggaatgatcacatgacaaacagtgtgctagcaccagagtcatagaagagat

SEQ ID NO: 463373 - DNA, 560 bp, Homo sapiens
catttctttaatgattagtgatgctgaaaattttttatatgcttgtgggaaatttgtataacatctttggagaaatgtctatttaaatcctttgctctttttaatggtgctatttggattttctttgttctttattaaaaacaaacaaataaacatacaaacaaacaggttctcactctgccactcagggtgcagtgcagtggcatgatcacggctcactgcagcctcaacctcccaggttcaagtgatcctcccacttcagcctcctgagtagctgagacaacaggtgcatgccaccacaactagtggtatggtttggctctgtggccccacccaaatctcaccttgaattttaataatctccatgtatcaagggcaggaccagctggagatagttgaatcatgggggcagtttcctccatactgttctagtgatagtgagtgagttctcacgagayctgatggttttacaaggggcttacccctttgcttggctctcacttctctcacctgccaccgtgtaatatgtgtctgttttgccttctaccataattgtaagt

SEQ ID NO: 463374 - DNA, 614 bp, Homo sapiens
ctaaactactgcacctacccaaaatcaaaaccaaagcaccttacccaactgacacgataggaaacacctataagaacaagtttttccctactaaagctacttcataaaattgaaagaggtgactatttcaccagatgggcagatatcaatgtatgtacacaagaagcatgaaaaagcaagtaaaaaagacacctccaaaaattcctcattaacagactccaaggaaaaaatctatgaaattcctttgcagtaattcaaaataatgaccttaaggaaactcaatgacatagaagagaataaaaataaataattatacaaaatcagcaaaaacaattcatgatctgaatgagaaattcaacaaacagatagrtatcattgaaaaggaccaaatagaaatctggagctgaaaaacttaatgaatgaaataaaaaataaagtcaagagcttcaacaaccaactagatcaaacagaagaaagaatttctgaaatggagatagggcttttgaaataatagataaaaagaaaagaataaaaaaattaagaaagccaacagaacaccattaagtaaacaaatctttgtattgtgggttttccagaaggaggaaagatgggaa

SEQ ID NO: 463375 - DNA, 551 bp, Homo sapiens
atttgtccagtttttaatgggattgtttgtttttatcttgttgctttgtccaagtttcttacagattctggttattacttctttgtcagagacatagattgcaaatattttctcccattctgtaggytgtgtgtttactcagttgattatttattttgctgtgtaaaagacacatagatcaatgaaatagaatagagaatccaaaaataaaaccacacgcctacaaccaacttatctttgacaaagtcaacaaaaataaacaatggggaaagaacaccctattcaataaatggtgctgggaaaattagctagccgtatgcagaagaatgaaactccagccctcttaccatatataaaaattaagatgaattagaaacataaatgcttgacctgaaactatagaaatcctagaagaaaacctcggaaaaactcttctggacattggcctagtcaaataagttttgactaagaccccaaaagcaaatgcaacaaaaacaaaaataggaaatcccattattattcaaatccagaatttcctaggcctatttttt

SEQ ID NO: 463376 - DNA, 551 bp, Homo sapiens
atttgtccagtttttaatgggattgtttgtttttatcttgttgctttgtccaagtttcttacagattctggttattacttctttgtcagagacatagattgcaaatattttctcccattctgtaggctgtgtgtttactcagttgattatttattttgctgtgtaaaagacacatagatcaatgaaatagaatagagaatccaaaaataaaaccacacgcctacaaccaacttatctttgacaaagtcaacaaaaataaacaatggggaaagaacaccctattcaataaatggtgctgggaaaattagctagccgtatgcagaagaatgaaactccagccctcttaccatatataaaaattaagatgaattagaaacataaatgcttgacctgaaactatagaaatmctagaagaaaacctcggaaaaactcttctggacattggcctagtcaaataagttttgactaagaccccaaaagcaaatgcaacaaaaacaaaaataggaaatcccattattattcaaatccagaatttcctaggcctatttttt

SEQ ID NO: 463377 - DNA, 475 bp, Homo sapiens
tatcttgggtactttcacaatacccatgatttggtactaaatcattaaatcatgtactaaacgttttctggatgccatcagtttctgaaagaatgatctgtgtcaattaatcttaaaaggattcttaaagtaaaaagattttcaaataaaaagcaaatgtatgcaaatataaatcccacaagtctacaaaaagggttcagagccagctaatcactcatgcccctccacacacatacacacacccttaaccctcacttaacatgactgcatgactctttccacagatgcttctgtgatcacttcagccatgatttatctgtctccacctaataayggagttttgataacagatgatctcagtctcatagaatgagtttgttctcacaccattaatttaaaagaacaatgaacagtcaaggggtacataagaacaaaactctgttctgtacaaggagttggtattcagtgtgacact

SEQ ID NO: 463378 - DNA, 563 bp, Homo sapiens
ccatatccttccctactctgtagttatattaaatcttgatgcatgaggggaggcctaggaaggagaatcatttgaaccaaggaatttgagagcagcctgggcatcgtggtgaaaccccacctttacaaaaaatacaaaacttagccagttgtggcatcaggcacctgtaagtcccagctacttgagaggctaaggtgggaggactgcttgagcaacctccacaacagcaacctctgttgtggaggtygtgctttagtcctctgtatatgacttaatattcaaagcctagatttggaaattctggaaaaacccttttattgctcattaagccaggctcttacaaataataaaaaaaaacttcttttgagattatcatctcaccatagacttcaaaaatacctattttgaaattcaaaacagaacattgatttctttggtcttggcagtgtctgccctctgctgcccttggaaataagatcaggcttaagtctgaatcttcacagcagaagggctgccagggacaaaccttcattactcagaggaataatgcaataggttatact

SEQ ID NO: 463379 - DNA, 563 bp, Homo sapiens
ccatatccttccctactctgtagttatattaaatcttgatgcatgaggggaggcctaggaaggagaatcatttgaaccaaggaatttgagagcagcctgggcatcgtggtgaaaccccacctttacaaaaaatacaaaacttagccagttgtggcatcaggcacctgtaagtcccagctacttgagaggctaaggtgggaggactgcttgagcaacctccacaacagcaacctctgttgtggaggtcgtgctttagtcctctgtatatgacttaatattcaaagcctagatttggaaattctggaaaaacccttttattgctcattaagccaggctcttacaaataataaaaaaaaacttcttttgagattatcatctcaccatagacttcaaaaatacctattttgaaattcaaarcagaacattgatttctttggtcttggcagtgtctgccctctgctgcccttggaaataagatcaggcttaagtctgaatcttcacagcagaagggctgccagggacaaaccttcattactcagaggaataatgcaataggttatact

SEQ ID NO: 463380 - DNA, 563 bp, Homo sapiens
ccatatccttccctactctgtagttatattaaatcttgatgcatgaggggaggcctaggaaggagaatcatttgaaccaaggaatttgagagcagcctgggcatcgtggtgaaaccccacctttacaaaaaatacaaaacttagccagttgtggcatcaggcacctgtaagtcccagctacttgagaggctaaggtgggaggactgcttgagcaacctccacaacagcaacctctgttgtggaggtcgtgctttagtcctctgtatatgacttaatattcaaagcctagatttggaaattctggaaaaacccttttattgctcattaagccaggctcttacaaataataaaaaaaaacttcttttgagattatcatctcaccatagacttcaaaaatacctattttgaaattcaaaacagaacattgatttctttggtcttggcagtgtctgccctctgctgcccttggaaataagatcaggcttaagtctgaaycttcacagcagaagggctgccagggacaaaccttcattactcagaggaataatgcaataggttatact

SEQ ID NO: 463381 - DNA, 523 bp, Homo sapiens
atttgccaacgtaaatccagctgcttgttggggaaagttagctgcctgctctccaatgctcctgtaaagtagctgtctggcaaagggatctggacacacctccttgggaatgagaagagagaagggctcacacttggaaagaggttttcttcccattgtgtactgccagagttagtccacaaaatgctagaggcaaaccttccggtgccagggctgtatgcacatccagaacctcaacagctcagcttgcacggtgtacacactggcacatgcacaggccatacacagaagtgccctaacaattatttcaagctgattagcttatgatagagagctgttggtgggtgcggggggtgggaaggaggtaaagcaggacttactcacagttacaggcagaaaggaagctggaacgctgccaccaattccagaggcctgaacatctagggtgtgttttacttgtcatctttatcagtattcattttgatgaataaayggtatgattaatagagacgctgagttgtag

SEQ ID NO: 463382 - DNA, 620 bp, Homo sapiens
tatgctgtctcattctgtaccaattaaaaattccataattctatgagtattttaccaatgaataccaaatttttaaaaaaacttggatcattctgaaacttgagtaattgaaatgcctcccaaactgttttattttctgaatgtaaaaagcagacccttgagtcagtctcatgcctagaaggcttgccacttagggttagcctagaaaacagttttttggtgaagtttaccycttaaaatgcccatcgtttcagcattagcaactgaactggctagaagagcctgctgctgcaaggatctgtgtgcatagagggaataaaatggagtggacagcaagcaagggagcgggattattggagagatacagcaaatggaaagaggcaagtgtaactgaatggaaaaaaaaattctccagagagagtggagaaaattgttgaaaggaaaacataggaaactttatctcagggatttattccaagaattaaattccagagaagatgcatttccacaatgctttctcagtccatacttaggctgtgctgcagtgatgatgattattcaaaataagaaaattgtaatatcctgaagaatcaaacaaaagttaaatgatttttattgtt

SEQ ID NO: 463383 - DNA, 458 bp, Homo sapiens
ggctgtgctactgctgcagataactagcccaacccatccctttatttcagcccatcccttcgtttcccataagggatacttttaattaatctaatatgtatagaaagaatgctaatgastggcttgctgttaataaataacgtgggtaaatctctgttggaggctctcagctctgaaggctgtgagaccccggatttcccacttcacacctctgtatttctgtgtgtctgtctttaattcctttagcaccactgggttagggtctccccgaccgagctggtctttgcacttctcacttctggatataggcctccctagagggttttttttttcttttttgataggatcttgctctttcatccaggctggtgtgctgtagtgtattcatggcttgctgcagtcttgatctcccagactcaagtaatcctcccatctcagcctcctgaatagctaggacc

SEQ ID NO: 463384 - DNA, 571 bp, Homo sapiens
acaggggctataatggctttgcttgkgctcagaggcctgacattcctgtcttcttatattaataagaaaaacaaaacaaaatagtgaagtgttggagtggtgaaaaattttgggggtggcatggagagataataggcgatgtttctcagggctgcttcaagcaggattaggggcaatgtgggaacctagagtgggagagattaagctgaaggaagattttctggtaaggggtgatattgtggagttgttagaaggaggattttttgtatagaattattggtaatgtcctggatgcggttttgtatgaattgagaaactaaatgaaagacacaaggtctgaagaaaagaaggagaaaaatagatattgaatgactagaaattgggagtgcccaggatgtccaattagagtgtccaaggggattcaatgttactgttttcttgattggtgagttttttggctctatccttgagtttttttataccatgccagattgatttagataaaaacaacactcttcatttaaaaatatacagagtcccccttccccttttttttagcagtgagtaagtc

SEQ ID NO: 463385 - DNA, 581 bp, Homo sapiens
aaagaataggacttcatcagggtgaaagtattggagtgtactttgtcaatgaagatcttctatccacttaaacagagacttaagggtggcagtttgaggtaaaaccaggcaccactgaataccaagagcctgagaaactgcttgggtgattggactagtaaaggccggtctgttatcggactgtatagaggtgggaaggccaaaccgaggaattatgtctgacagaagggaagaaatgaccatggtggcctcctcagaccctgtgggaaaggcctctacccatccagtgaaagtgtctacccagaccaagacgcattttagtttcctgactcaaggcgtatgagtaaagtcaatttgccagtcctggttgggggcaaatccctgagattgatgtgtagggaaaggagggggcctgaacaatccctgaggagtagtagaatagcagatggaacactgagaagtgatttccttaaggatagatttccatggtggaaaggaaatgagargttctaagagtcaggctagtggcttgtaacctacatgggagaagctatgaaatgacgacagaatagaatgggcct

SEQ ID NO: 463386 - DNA, 508 bp, Homo sapiens
gcctgggcaaggagaccagtgaagggcccagctgctctggtcccagaaatccaggcgaaagcccagagaggcatccagtgaagatcaactccccttgaaggggtggctctgccccttccatcttccaagtagtgaccccacagcccccaaagcttggtcagtgttgagctggtcctcgattcccccagcaagttcacgggggtcagtctggctgtttagtacggtttaagaggcactcttgaatactgggtatatgccaatctccggaagactctgggcattaaaagataaagaggagtccgtctctgccccagggtttatacaaatgagactcagagagcaggtggctagctctgggaagtgcctgggaaggccwtcctggcagtggaggtgctcttggccatgctggtctccatgctgcccaagcagggtcttgccaggttctggatgccagggccaggatgagggaggtgggggaggactgtggggttctgagaaagggtcatct

SEQ ID NO: 463387 - DNA, 511 bp, Homo sapiens
caccatagctaagcctgaggagataggaaaaggagataagggggaaaaggtcccaaatgaacagccctttttttgttttacctggggagcagggctgtktgatgggagcttggcacttcctaaatccaccccgaagacaataggtcacattcagcggggctcctgccccactggctcccccaaggcggccctggaggagggggacgaggcagaggagggggacaaggcaggacaagctcctctgagcttgctgtcctgctgcttatggggctgggggtcaggccaaagagcctcttggacaatgggagctattgaggccacctgaggggtgtgctcttggggatgcttgctttgaagattggagatctagggggtgggaagacagcagtcctctgaacacccctgaggaaggggaagaaccatgtctgggaggccctgggagcctttaggcggttttggtttgtggtggagacctggttcccagttctgtccccaatgttaagttgcttgt

SEQ ID NO: 463388 - DNA, 511 bp, Homo sapiens
caccatagctaagcctgaggagataggaaaaggagataagggggaaaaggtcccaaatgaacagccctttttttgttttacctggggagcagggctgtttgatgggagcttggcacttcctaaatccaccccgaagacaataggtcacattcagcggggctcctgccccacyggctcccccaaggcggccctggaggagggggacgaggcagaggagggggacaaggcaggacaagctcctctgagcttgctgtcctgctgcttatggggctgggggtcaggccaaagagcctcttggacaatgggagctattgaggccacctgaggggtgtgctcttggggatgcttgctttgaagattggagatctagggggtgggaagacagcagtcctctgaacacccctgaggaaggggaagaaccatgtctgggaggccctgggagcctttaggcggttttggtttgtggtggagacctggttcccagttctgtccccaatgttaagttgcttgt

SEQ ID NO: 463389 - DNA, 511 bp, Homo sapiens
caccatagctaagcctgaggagataggaaaaggagataagggggaaaaggtcccaaatgaacagccctttttttgttttacctggggagcagggctgtttgatgggagcttggcacttcctaaatccaccccgaagacaataggtcacattcagcggggctcctgccccactggctcccccaaggcggccctggaggagggggacgaggcagaggagggggacaaggcaggacaagctcctctgagcttgctgtcctgctgcttatggggctgggggtcaggccaaagagcctcttggacaatgggagctattgaggccacctgaggggtgtgctcttggggatgcttgctttgaagattggagatctagggggtgggaagacagyagtcctctgaacacccctgaggaaggggaagaaccatgtctgggaggccctgggagcctttaggcggttttggtttgtggtggagacctggttcccagttctgtccccaatgttaagttgcttgt

SEQ ID NO: 463390 - DNA, 387 bp, Homo sapiens
ctacagaattttgtttcttttaccaggaatgttaaattttgtcaagtgatgttttggcatctgttgaaatggtcatttattttcttcttcaatagtctgttagcatggtgagttaattgattgattttttgaaagttaaagcaggatagtttaaatttactgtttttactttcttacttcccattctcctctcaacagatggctgtctatcatccatasctctcatgtcacatagctctcttgctaagctaatgctcttcattttgtataatgttttcaatctttattttacatgatgtctattaaacatggccaccttctagaaatatactttcctggttttctttttttattttatggtcactgcccccaatttcccttgtcttc

SEQ ID NO: 463391 - DNA, 648 bp, Homo sapiens
atgtgaacaattacactcaaaatattaagataaaattttaaacaacactatgtaacataaacatcagtaatattataggcttttattatgaagcttttgatatagagagtcatttattgtatcatgagtgtgtggttttcagtatgagattagatgaactgaagtttagattggggaagctaaatggcctatagatctgatatgaaaatcttcaatgagaagcctaccttggcctttcaagggcatattcttgaaaagttctgtatatgtttaatattatcaatcaaatcatgtttcaattgtctcatggttaaatctggggtaaaatgtcaaatatattgactatttaattttcactaactatattgtcatttgaaattttatataaaaatgttaggcataaataggaacatagatatttgcaaagtttygatctaagtttatgagaatgttagtctatcaaaatggtaccattttaattagcagttcaataaacacctgtaagttacgaaatggctgtcaatgaatttgctttctatgaaatattttatcagaaatcagttttgttccatagtccaggattagtttgagatacccagctgtgcatagtttaacgggttcaaaagggacctgaagtcctagggctga

SEQ ID NO: 463392 - DNA, 595 bp, Homo sapiens
ggcataagtcacagatgttggcctcctttggattgtctccgaggctttcagtattggtccctatgaactgggcaatcacatcgtgcttaaaacaggtctgttgtctaagaaattaggattctaatattcttactttgttgcagaccaaaaaaaacttctttgggttgttgtttatttttatttatgtttttagtagatgccaggtaaggaaggaaaatagctgtgatccttgtggtgaaactctgcatcttggctgtaatggtggttacatgaaygtacacatctgataaaatcacatagaatgaatcatacacacacacagacatacacaaaattgcatgtaaaacggacgagatctgaacacagtcaatagtttgtgtcaatgtcaatttcctgcttgtgacgttatactctagttatgcaaagtactaccactggggaaagctgagtaaaggatgcatctttctgtattatttcttacgacctgcaggtaaagctacaattatcacaaaataataagtttaaaaagattaaactattaaatacaatttaaagtatctgtgcagttctttttgtctttagaatacacttcact

SEQ ID NO: 463393 - DNA, 595 bp, Homo sapiens
ggcataagtcacagatgttggcctcctttggattgtctccgaggctttcagtattggtccctatgaactgggcaatcacatcgtgcttaaaacaggtctgttgtctaagaaattaggattctaatattcttactttgttgcagaccaaaaaaaacttctttgggttgttgtttatttttatttatgtttttagtagatgccaggtaaggaaggaaaatagctgtgatccttgtggtgaaactctgcatcttggctgtaatggtggttacatgaacgtacacatctgataaaatcacatagaatgaatcatacacacacacagacatacacaaaattgcatgtaaaacggacgagatctgaacacagtcaatagtttgtgtcaatgtcaatttcctgcttgtgacgttatactctagttatgcaaagtaytaccactggggaaagctgagtaaaggatgcatctttctgtattatttcttacgacctgcaggtaaagctacaattatcacaaaataataagtttaaaaagattaaactattaaatacaatttaaagtatctgtgcagttctttttgtctttagaatacacttcact

SEQ ID NO: 463394 - DNA, 595 bp, Homo sapiens
ggcataagtcacagatgttggcctcctttggattgtctccgaggctttcagtattggtccctatgaactgggcaatcacatcgtgcttaaaacaggtctgttgtctaagaaattaggattctaatattcttactttgttgcagaccaaaaaaaacttctttgggttgttgtttatttttatttatgtttttagtagatgccaggtaaggaaggaaaatagctgtgatccttgtggtgaaactctgcatcttggctgtaatggtggttacatgaacgtacacatctgataaaatcacatagaatgaatcatacacacacacagacatacacaaaattgcatgtaaaacggacgagatctgaacacagtcaatagtttgtgtcaatgtcaatttcctgcttgtgacgttatactctagttatgcaaagtactaccactggggaaagctgagtaaaggatgcatctttctgtattatttcttacgacctgcaggtraagctacaattatcacaaaataataagtttaaaaagattaaactattaaatacaatttaaagtatctgtgcagttctttttgtctttagaatacacttcact

SEQ ID NO: 463395 - DNA, 363 bp, Homo sapiens
ttacatttattcagagattgtatttattcacattgcatgtatgactaaagttgttaaatgttaagatgttttaaggaaatcagagagttttctccacctcaagtttgagaatatgaaatgcttcacaagtgtaactaaaggaaaacattgtagagattcattttttrcacatggtttaaagtatctactcttaaaagttgtagaattgacatatttattacaaagtataggcttcattgtgttgaaatgccaagagatgatgattctagcaacgaattgcttcaagtaaattttactcatggcattgttttaaaaaatagaagattaaatttaagaaacagtttcttaactcaaaaaataaat

SEQ ID NO: 463396 - DNA, 363 bp, Homo sapiens
ttacatttattcagagattgtatttattcacattgcatgtatgactaaagttgttaaatgttaagatgttttaaggaaatcagagagttttctccacctcaagtttgagaatatgaaatgcttcacaagtgtaactaaaggaaaacattgtagagattcattttttgcacatggtttaaagtatctactcttaaaagttgtagaattgacatatttattacaaastataggcttcattgtgttgaaatgccaagagatgatgattctagcaacgaattgcttcaagtaaattttactcatggcattgttttaaaaaatagaagattaaatttaagaaacagtttcttaactcaaaaaataaat

SEQ ID NO: 463397 - DNA, 363 bp, Homo sapiens
ttacatttattcagagattgtatttattcacattgcatgtatgactaaagttgttaaatgttaagatgttttaaggaaatcagagagttttctccacctcaagtttgagaatatgaaatgcttcacaagtgtaactaaaggaaaacattgtagagattcattttttgcacatggtttaaagtatctactcttaaaagttgtagaattgacatatttattacaaagtataggcttcattgtgttgaaatgccaagagatgatgattctagcaaygaattgcttcaagtaaattttactcatggcattgttttaaaaaatagaagattaaatttaagaaacagtttcttaactcaaaaaataaat

SEQ ID NO: 463398 - DNA, 617 bp, Homo sapiens
ttaaaagttgtagaattgacatatttattacaaagtataggcttcattgtgttgaaatgccaagagatgatgattctagcaacgaattgcttcaagtaaattttactcatggcattgttttaaaaaatagaagattaaatttaagaaacagtttcttaactcaaaaaataaatcgttcatttcctattaaatgataaggatcaagctttcaatttgatgttaaaagagcttctgtgtagatgctggttttagaatttttatcatttttgactacatattattaaacacagaaacgggagaaattttgcarttggtatagtagggaataattgggaaaaattattttaacacaatattttaaacatttggcctcctttgagaacagtgatgcaaaaatattttctgtatattctaatacaagcaaattttaatctcttcattgggtattttgagtatttaacatatttaatttacatctgtttttttatgcctgtttggtagattctgaaatcttttcctccacctctgcggacctgaaatgaatctgaatcctttatctgggcactgagtgctatggttgagtggtttaatctctgtccctgggagcacaaccaaat

SEQ ID NO: 463399 - DNA, 617 bp, Homo sapiens
ttaaaagttgtagaattgacatatttattacaaagtataggcttcattgtgttgaaatgccaagagatgatgattctagcaacgaattgcttcaagtaaattttactcatggcattgttttaaaaaatagaagattaaatttaagaaacagtttcttaactcaaaaaataaatcgttcatttcctattaaatgataaggatcaagctttcaatttgatgttaaaagagcttctgtgtagatgctggttttagaatttttatcatttttgactacatattattaaacacagaaacgggagaaattttgcagttggtatagtagggaataattgggaaaaaytattttaacacaatattttaaacatttggcctcctttgagaacagtgatgcaaaaatattttctgtatattctaatacaagcaaattttaatctcttcattgggtattttgagtatttaacatatttaatttacatctgtttttttatgcctgtttggtagattctgaaatcttttcctccacctctgcggacctgaaatgaatctgaatcctttatctgggcactgagtgctatggttgagtggtttaatctctgtccctgggagcacaaccaaat

SEQ ID NO: 463400 - DNA, 617 bp, Homo sapiens
ttaaaagttgtagaattgacatatttattacaaagtataggcttcattgtgttgaaatgccaagagatgatgattctagcaacgaattgcttcaagtaaattttactcatggcattgttttaaaaaatagaagattaaatttaagaaacagtttcttaactcaaaaaataaatcgttcatttcctattaaatgataaggatcaagctttcaatttgatgttaaaagagcttctgtgtagatgctggttttagaatttttatcatttttgactacatattattaaacacagaaacgggagaaattttgcagttggtatagtagggaataattgggaaaaattattttaacacaatattttaaacatttggcctcctttgagaacagtgatgcaaaaatattttctgtatattctaatacaagcaaattttaatctcttcattgggtattttgagtatttaacatatttaatttacatctgtttttttatgcctgtttggtagattctgaaatcttttcctccacctctgyggacctgaaatgaatctgaatcctttatctgggcactgagtgctatggttgagtggtttaatctctgtccctgggagcacaaccaaat

SEQ ID NO: 463401 - DNA, 590 bp, Homo sapiens
tccacatggctggggaggcctcacaatcatggcggaaggcaaggaggagctctctttttgcctgccgccatccatgtaagatgtgacttgctgatttgttttaaaaagtgacacagagcacgtttttgaagttagcgataaattggccatttgaaatgaggaagctatggaatgtagatctgttttgaaactgcaggaaggatcacagaacaatgccccgttctgatgaatcagtagaaactagaagacagaaaagcatgtcatgtactctccgtaaagtttgcttgctggcactattcctgcttcagcattgaaaaagtacaytcattaaccaactgaatacaaaaacagtgccttccacagttcaattatgctgctttaggcatactaaattagctgtctcctgaagtctatccacagcttcagaaaacgattcctggaaataaggagtattgtgtggacttgaaatgaatcagaaaggaaatgaaagtgaaacttgggaatgaaaaagcttgggttatgttcatacagcagtatgtcatcctgacaatatacagaatggccattatacagtgtgcactaaactgagt

SEQ ID NO: 463402 - DNA, 590 bp, Homo sapiens
tccacatggctggggaggcctcacaatcatggcggaaggcaaggaggagctctctttttgcctgccgccatccatgtaagatgtgacttgctgatttgttttaaaaagtgacacagagcacgtttttgaagttagcgataaattggccatttgaaatgaggaagctatggaatgtagatctgttttgaaactgcaggaaggatcacagaacaatgccccgttctgatgaatcagtagaaactagaagacagaaaagcatgtcatgtactctccgtaaagtttgcttgctggcactattcctgcttcagcattgaaaaagtacactcattaaccaactgaatacaaaaacagtgccttccacagttcaattatgctgctttaggcatactaaattagctgtctcctgaagtctatccacagcttcagaaaacgattcctggaaataaggagtattgkgtggacttgaaatgaatcagaaaggaaatgaaagtgaaacttgggaatgaaaaagcttgggttatgttcatacagcagtatgtcatcctgacaatatacagaatggccattatacagtgtgcactaaactgagt

SEQ ID NO: 463403 - DNA, 594 bp, Homo sapiens
aatggaaaataccagaaatataaccattcctaagttttaaattccactctgttctgacttgcatgatgaaatctctcactgtcccgctttgtccttcccaggatgtcaactacctctgtccggtggatccactctctagatgctatcctccccttagtcacttagcagctctcttggttctcagattgaaagaaaacatagtgtamactggggctggtcctatccaaggtttcagtcaccacttcgagccttggaacgtatttcccttggggaaggggagattactgtaaattgttttatcttactattatgtgaccttagcataatgttacagatgaccactctttccttaaaatattattgatttttggtcttaatgtcacctctgtttcctgttcttcctgatactcccttgttctccactccatccaacttttacatgacattactcttcaaggactgctcctaggcccttgttttagtaagtcctctaacctcatgattgtgtcatgctattttccaccaagtagcaagatccatgtttttaaaaatttgaataagaccatagcattgtcctaattaaggcctcagtaa

SEQ ID NO: 463404 - DNA, 594 bp, Homo sapiens
aatggaaaataccagaaatataaccattcctaagttttaaattccactctgttctgacttgcatgatgaaatctctcactgtcccgctttgtccttcccaggatgtcaactacctctgtccggtggatccactctctagatgctatcctccccttagtcacttagcagctctcttggttctcagattgaaagaaaacatagtgtacactggggctggtcctatccaaggtttcagtcaccacttcgagccttggaacgtatttcccttggggaaggggagattactgtaaattgttttatcttactattatgtgaccttagcataatgttacagatgaccactctttccttaaaatattattgatttttggtcttaatgtcacctctgtttcctgttcttcctgatactcccttgttctccactccatccaacttttacatgacattactcttcaaggactgctcctaggcccttgttttagtragtcctctaacctcatgattgtgtcatgctattttccaccaagtagcaagatccatgtttttaaaaatttgaataagaccatagcattgtcctaattaaggcctcagtaa

SEQ ID NO: 463405 - DNA, 547 bp, Homo sapiens
tcatggcggaagtcatgtcttacatggcggcaggcaagagagcttgtgcaggagaactcccatttataaaaccagatctcaagagacttattcactaccatgagaacagtatgggggaaactgtccccatgattcaattatctctacctggccccacctttggcaagtggggattattacaattcaacatgagatttgagaggggacacagccaaascatatccatcatcataatcaaatactcacgatcttattgaaaaatcattagtaaaaatatattaatgattgattgaaaacaaagaggaatccattttcctagctggaactgatctgtattattttccttttgttttgttttgtttacagatttctcactgagaaactccacatttatttgtggactaatggagttattttgtgtcaccccactagaatataagcacataataggtccatgatacatacttgtaggataaaagaaagaagctatcaatcaaaacatagcttgcttatcaaggcctgaggtcataaccttagagacacagat

SEQ ID NO: 463406 - DNA, 479 bp, Homo sapiens
ttgtaagttcatgaataccattcctaaattctgctctttaatacacaaagccctacaacgatgtgccttctgcaatatactcrggccttggtgaactgtgtttctcaagcaagaaacgtaagcaactttttggctcctctctattccttaatgacaatatccagacaattacattattctgttgatactagtttgactcagtttatttctctcccctggcagaagtattaaagatatggagacccagtaagaacatttgaatgcccacattttattgtgtttggggacaaggaaaaatgtaaactctgtcttcagtcagtagggtttgattgccccaaacttgcagaaaaactcattccctattctaccatatttctgtagagaggagctctatttcccataatgggttgagttatgcaacactgcctggcccccctcacttccaactcccaaagtcatgtccacttgaaacctatgaa

SEQ ID NO: 463407 - DNA, 479 bp, Homo sapiens
ttgtaagttcatgaataccattcctaaattctgctctttaatacacaaagccctacaacgatgtgccttctgcaatatactcaggccttggtgaactgtgtttctcaagcaagaaacgtaagcaactttttggctcctctctattccttaatgacaatatccagacaattacattattctgttgatactagtttgactcagtttatttctctcccctggcagaagtattaaagatatggagacccagtaagaacatttgaatgcccacawtttattgtgtttggggacaaggaaaaatgtaaactctgtcttcagtcagtagggtttgattgccccaaacttgcagaaaaactcattccctattctaccatatttctgtagagaggagctctatttcccataatgggttgagttatgcaacactgcctggcccccctcacttccaactcccaaagtcatgtccacttgaaacctatgaa

SEQ ID NO: 463408 - DNA, 484 bp, Homo sapiens
ttttgttccagtcatcaccttgttacctargtactttgttttctttgttgtgttattgttttatacggtctgcaaattgtatgctttcaagaggttctattctggtgcatatcaaactttttttcaagatttagaactccttttaacatttctcatagggctggtcttgtactaacaaattccttctgcatttttgttgttgttgttgttatttctccttcatttatgaaacttaattgtgctggaatcaaaattcttgactgacagtttttctgtttaaggagattaaaggtaagaccccattccttctggcttgtaaggtttctgctgcaaagtctgctctttgtctgataggtttttctttataggttaccagaagcttttgtctcattgctcttagaatactgtccttcatgttggctttagatagcttgaagattatatgccttggaaatgtcctttatgcaatgattctcccaagagt

SEQ ID NO: 463409 - DNA, 484 bp, Homo sapiens
ttttgttccagtcatcaccttgttacctaggtactttgttttctttgttgtgttattgttttatacggtctgcaaattgtatgctttcaagaggttctattctggtgcatatcaaactttttttcaagatttagaactccttttaacatttctcatagggctggtcttgtactaacaaattccttctgcatttttgttgttgttgttgttatttctccttcatttatgaaacttaattgtgctggaatcaaaattcttgactgacagtttttctgtttaaggagattaaaggtaagaccccattccttctggcttgtaaggtttctgctgcaaagtctgctctttgtctgatargtttttctttataggttaccagaagcttttgtctcattgctcttagaatactgtccttcatgttggctttagatagcttgaagattatatgccttggaaatgtcctttatgcaatgattctcccaagagt

SEQ ID NO: 463410 - DNA, 582 bp, Homo sapiens
gatagctgtgctagagccaacagatagttatttgttctgcttttaacaggaccttctaatgcctggccgtgtgctgtgtcatttcatcctcacgtgagctttggcagttataaatgcctacctggtgtttatttactcttaagtttctgggtggtgatcctgcgctccattctgggtcaaaattattgaagcctattgtgagaaattaatatcctatggcagatcattttttcactataaggaattagaaatgacagttgtttcttattacttctttcttcttagaaaaggcacatggaaatttgactacaaaaggaaaaaaacataccaaaaggattgacaacgcatttcatcatgtcctgtcagtttctgagattattcttcaactgttttctcctccataagtgttgcataaatagcttgagtttaaaaattaatgaaaatgaacaacaaaagtagattgaacaaggrttcctcagattagactcattttccaaaaacaacctaaaaacaactattgatctgctcaaaaaaattacaccttttgttgttcagaagagatgaaaggaaagaggtgttgga

SEQ ID NO: 463411 - DNA, 582 bp, Homo sapiens
gatagctgtgctagagccaacagatagttatttgttctgcttttaacaggaccttctaatgcctggccgtgtgctgtgtcatttcatcctcacgtgagctttggcagttataaatgcctacctggtgtttatttactcttaagtttctgggtggtgatcctgcgctccattctgggtcaaaattattgaagcctattgtgagaaattaatatcctatggcagatcattttttcactataaggaattagaaatgacagttgtttcttattacttctttcttcttagaaaaggcacatggaaatttgactacaaaaggaaaaaaacataccaaaaggattgacaacgcatttcatcatgtcctgtcagtttctgagattattcttcaactgttttctcctccataagtgttgcataaatagcttgagtttaaaaattaatgaaaatgaacaacaaaagtagattgaacaagggttcctcagattagactcattttccaaaaacaacctaaaaacaaytattgatctgctcaaaaaaattacaccttttgttgttcagaagagatgaaaggaaagaggtgttgga

SEQ ID NO: 463412 - DNA, 600 bp, Homo sapiens
ctgctattaagagactttgatgcattcttcagtatgtcaatttcatttttcaactctagaatttgtttgatttcctccaattatgaattcctttgttatatttatctgataagatcccaaattccttctctgtgttatcttaaatttcattgagttttctcaaaactgctattttgaattctctgtctgaaaggtcacatatctccatctctctgggattggctcctggtgacttatttagtttatttttgagatcatattttcctgggtgatcttgatgcttgtggatatttgttggtgtttgtgcattgaagagttaggtatttattgtagtcttctcaggctgggcttgtttgtacccatccttcttaggaaggtttttcaggtatttgaagggacttggatgttgtgatctaagtttttggtcactgccgccatgtctgcattaggcggcagccttgtagaggtataagcctgcagactcatagaggtacaagsctgcagactcatagaggtactgccttggtggttgtggatgagatcctgaagaattctctggattgccaggcagagactgtcatattcttgccttactttctc

SEQ ID NO: 463413 - DNA, 557 bp, Homo sapiens
acaagataaatgaaaaatcagacaacagctacatccaagagcccttatttattttattaatcactcaatttttcttaaccaggactgttttcgaaatgtatgtggtgcatgcataccccctagtggggaatctattcagcagcacaaattccacagagacaactttcatggaaagtttttatcaatgaacacatttgacattgtcagctcccaatccttcctgaaagatttctaatgagaagaaaatttaaattcctcaattaaaaaatagattaaagtagcaatcattcattgagtcaacattaattaatgagtgtctaatgcaaaccagatattgttttaggagctctgttttaaaaggacacattaagtttaagatactattggattattcaagtggagatgtcagmtatgcagatacaatttcaggggaaaatctcccaagaggaaaagtagttacagaagagtcctgaggatttaaccgtgggatgcaccaacatcctgagatcttggagaggaaaagaaaccaacaaagactgagaatgagggggcagtca

SEQ ID NO: 463414 - DNA, 557 bp, Homo sapiens
acaagataaatgaaaaatcagacaacagctacatccaagagcccttatttattttattaatcactcaatttttcttaaccaggactgttttcgaaatgtatgtggtgcatgcataccccctagtggggaatctattcagcagcacaaattccacagagacaactttcatggaaagtttttatcaatgaacacatttgacattgtcagctcccaatccttcctgaaagatttctaatgagaagaaaatttaaattcctcaattaaaaaatagattaaagtagcaatcattcattgagtcaacattaattaatgagtgtctaatgcaaaccagatattgttttaggagctctgttttaaaaggacacattaagtttaagatactattggattattcaagtggagatgtcagctatgcagatacaatttcaggggaaaatctcccaagaggaaaagtagttacagaagagtcctgaggatttaaccrtgggatgcaccaacatcctgagatcttggagaggaaaagaaaccaacaaagactgagaatgagggggcagtca

SEQ ID NO: 463415 - DNA, 589 bp, Homo sapiens
attacctacaaatcaatggatattttaggagaaattaaaaagggatgaygtactctgttcaaaaaaaaggtttgaaacccagcacattcctgtgggctttgcatccccagcctaggcatctctgtttaaagaggcagcttagtgataagggaggaggagagaatttctaagaaggggtagaagtgtagacttatatttatatatatttttaaaaagtttttattgtttagcagcttcagtaaggtataatttcaagatcataaaattacccagggtaagtgggtatagataagtatataggtcatttattttgagtgaatttttagagttttgtatctatcaacacaattcagttttagaacattttttaatatctcttacttcattttgggttgctgtaacagtacctgagactggctaatttatgtgtattagtctattctcacactgctataaagaattacctgaggctgggtaatttataaagaaagcaagtttaattggctcatgggtccacaggctgtacaggatgcatggctggggaggcctcaggaaactttcaatcatggtagaaggtgaagtaggcatg

SEQ ID NO: 463416 - DNA, 416 bp, Homo sapiens
ttggctaattgcctcccaggttcaagtgattctcctgcctcagcctcctgagtagctgggactataagcacgcaccactatgtctggctaatttttgtatttttagtagagacagggtttcaccacgttgcccagggcagtcttgaactcctgaccccaagtgatctgcctgccttggcctaccaaagtgctaggattacaggcatgaaccactgtgccgggccagaaagtcttagcatcttagtaacatttacatttggcctccctcgtgtgccsttagctattcattaccagagggcaaagatggttagaacatgatttacccaccctaaaatgcattgaaggcatcagagggcaccgtgggccacaaggcctggtagccacaaatgttcagtggtggctggagctcatgatgc

SEQ ID NO: 463417 - DNA, 450 bp, Homo sapiens
tttagcaaaaatcccccatctgtgttatctggtcatcctcagtmtctgatcaaattccccatccctcacccttgataccacgttggcttgccttgaaaaagaagtctgttgagtttgtttagcaagacttcctccagccttgatgtttcctcttaggaatgttccactgaccttcacccttctccttggctataaatccagccttgtccttgttctattcaaagttgagcccaacctctcgctcctactgcacaatccccattgcagtagtccctcctgaataaagtcttccctatcatctttaacaaatgtcatgaaaaatgtttgaatagttgttctcttccaaccttttctttatttctacttacatcttctcactctcctatgcatatatcagcagctggcaaacttatgccaaggtgattaaaaatgtatagatgtgatacttgg

SEQ ID NO: 463418 - DNA, 468 bp, Homo sapiens
agaattctgcttagtcagtttagcaaaaatcccccatctgtgttatctggtcatcctcagtatctgatcaaattccccatccctcacccttgataccacgttggcttgccttgaaaaagaagtctgttgagtttgtttagcaagacttcctccagccttgatgtttcctcttaggaatgttccactgaccttcacccttctccttggctataaatccagccttgtccttrttctattcaaagttgagcccaacctctcgctcctactgcacaatccccattgcagtagtccctcctgaataaagtcttccctatcatctttaacaaatgtcatgaaaaatgtttgaatagttgttctcttccaaccttttctttatttctacttacatcttctcactctcctatgcatatatcagcagctggcaaacttatgccaaggtgattaaaaatgtatagatgtgatacttgg

SEQ ID NO: 463419 - DNA, 450 bp, Homo sapiens
tttagcaaaaatcccccatctgtgttatctggtcatcctcagtatctgatcaaattccccatccctcacccttgataccacgttggcttgccttgaaaaagaagtctgttgagtttgtttagcaagacttcctccagccttgatgtttcctcttaggaatgttccactgaccttcacccttctccttggctataaatccagccttgtccttgttctattcaaagttgagcccaacctctcgctcctactgcacawtccccattgcagtagtccctcctgaataaagtcttccctatcatctttaacaaatgtcatgaaaaatgtttgaatagttgttctcttccaaccttttctttatttctacttacatcttctcactctcctatgcatatatcagcagctggcaaacttatgccaaggtgattaaaaatgtatagatgtgatacttgg

SEQ ID NO: 463420 - DNA, 551 bp, Homo sapiens
aatttggcatatctagtaaagttgaggacatatttgtagacctttttttatggataactcctgaataagcacacggaagacagggtaaaatgttcaaagyggtagaaaaaatataaatggtggtatgttcacagcatttaaaatggatcaagatttcaaaatataatggtgagtcaaaaaagcaacttgctttttctttccaagttgtggattagaggcttttagcatgccttggctacttggaaatagtaagatagtacatagagatcaactcttttagttttaattcaagaaggaaaatgagaatccaccaaaatcatgaaggacaccccagatcccagagaggagaacgtgagcaaacaggccctgtcacagcatccagctgataaaagtgagtaaagccccagtacttgagagaggccgggagcctccctctgtgactcacctttccacgggatccgagcaacccaggctgaggaagagtgctttgtttcccccaagcccctgagctatcttggggatagacttggaggtgctgagagagaaagaca

SEQ ID NO: 463421 - DNA, 551 bp, Homo sapiens
aatttggcatatctagtaaagttgaggacatatttgtagacctttttttatggataactcctgaataagcacacggaagacagggtaaaatgttcaaagcggtagaaaaaatataaatggtggtatgttcacagcatttaaaatggatcaagatttcaaaatataatggtgagtcaaaaaagcaacttgctttttctttccaagttgtggattagaggcttttagcatgccttggctacttggaaatagtaagatagtacatagagatcaactcttttagttttaattcaagaaggaaaatgagaatccaccaaaatcatgaaggacaccccagatcccagagaggagaacgtgagcaaacaggccctgtcacagcatccagctgataaaagtgagtaaagccccagtacttgagagaggccgggagcctccctctgtgactcacctttccacgggatcygagcaacccaggctgaggaagagtgctttgtttcccccaagcccctgagctatcttggggatagacttggaggtgctgagagagaaagaca

SEQ ID NO: 463422 - DNA, 391 bp, Homo sapiens
aattaataaactgtttctaaaatgtatataaaaatgcaagagatctagtataaacaaaatttgacaaagaataacaaagttggaggactaacactttttaatttcatgatctattatacagctacagaaatcaaaacagtatggtaatggcatcaaaatagacagattaatgcaatgaaatagacctacacattgatcttcaatccatttttgacaaagatccacaggcaatcttgtgaagagaagatagtcattttaacaaatagtgctgaaaaaattggatatccatatgcaaaaayatgaacttcagttcataccatgcaccacatacagaaaccaatccaaaaaggataataaacttaaaggtacaacttaaaactgtaaaagtctt

SEQ ID NO: 463423 - DNA, 419 bp, Homo sapiens
tcaaaatccaaatgagcttttgcagaaattaataaactgtttctaaaatgtatataaaaatgcaagagatctagtataaacaaaatttgacaaagaataacaaagttggaggactaacactttttaatttcatgatctattatacagctacagaaatcaaaacagtatggtaatggcatcaaaatagacagattaatgcaatgaaatagacctacacattgatcttcaatccatttttgacaaagatccacaggcaatcttgtgaagagaagatagtcattttaacaaatagtgctgaaaaaattggatatccatatgcaaaaatatgaacttcagttcataccatgcaccacatacagaaaycaatccaaaaaggataataaacttaaaggtacaacttaaaactgtaaaagtcttaa

SEQ ID NO: 463424 - DNA, 531 bp, Homo sapiens
gtgctcttaaaaaatgaaacctgtccccagtctgcagtcttccctgcttgctaataatgctgccaagagatgccccagaattgtaggtagggctaacagtagtcccctgtataaaccaataaaatgcattttctcagataaataaatgtcggttgggttcccagataaatacacagaatttgccttaaagtgcccatatggtgactaaaaatggtacacgcatagtgaaaaaatgatatattgctataaatacccagtacagaatttcaactacctttggtttaaatagacttttgggagctagttcacaaacctgcataatattattattttggattgcaggtaaaaattgatttgtaaggaacttttggggtgtgctttttctatgtacctaatgcagcaaggtgggcaggataaagagaatatctgcattttacagaggaggagkcaactaagatcaagcgagcctgtccctatggcaaagtttcagggatagacacaataccagtactccaggtccagacaagatct

SEQ ID NO: 463425 - DNA, 610 bp, Homo sapiens
  misc_feature (1)...(610): n = A,T,C or G
gcggtggctcacgcctgtaatcccagcactttgggaggccaacgcaggtggatcacctgaggtcgggagtttgagatcggcctgaccaacatggagaaaccccatctctactaaaaatacaacattggccgggcatggtggcacatgcctgtaatcccagctacttcggaggctgaggcaggagaatcgcttgaacccgggaggtggaggttgtggtgagccaagatcacgcattgcactgcagcctgggcaaccagtgcgaaactccatctcaaaaaaaaaaaaaaaaaaaaaaaatcagccccaaccctgganagctattgagaaaagttcttnaggagtgaggtcttcctatgctagtctgaatctgttctntcccatgcctggggagcaagggcacaaagagaccaaaaggaaanctcaggttggaagcagtcatgtagatttttgttaggggatatatatatayatattttcctcccaaatttggtcctgaaatcgtgattatttgattattttcttaatgaaaatttaaaaaattaagtccctatatcatacacacatatatacacatatacagatacacagtcagggttctccagagaaacag

SEQ ID NO: 463426 - DNA, 610 bp, Homo sapiens
  misc_feature (1)...(610): n = A,T,C or G
gcggtggctcacgcctgtaatcccagcactttgggaggccaacgcaggtggatcacctgaggtcgggagtttgagatcggcctgaccaacatggagaaaccccatctctactaaaaatacaacattggccgggcatggtggcacatgcctgtaatcccagctacttcggaggctgaggcaggagaatcgcttgaacccgggaggtggaggttgtggtgagccaagatcacgcattgcactgcagcctgggcaaccagtgcgaaactccatctcaaaaaaaaaaaaaaaaaaaaaaaatcagccccaaccctgganagctattgagaaaagttcttnaggagtgaggtcttcctatgctagtctgaatctgttctntcccatgcctggggagcaagggcacaaagagaccaaaaggaaanctcaggttggaagcagtcatgtagatttttgttaggggatatatatatacatattttcctcccaaatttggtcctgaaatcgtgattatttgattattttcttaatgaaaatttwaaaaattaagtccctatatcatacacacatatatacacatatacagatacacagtcagggttctccagagaaacag

SEQ ID NO: 463427 - DNA, 552 bp, Homo sapiens
cccacaaatcaccactcccaaaccataccactttttcaagcttcttgaagggaaagataatgtttcatccatagtgagtcttgactggtgagatgaaaaatcaggtagaataaacacrcctgatgccattgtattacagaaatataggggcttacgctgatcttctgaaaacatgactctcaattttgaggacccaaatcagtccaaattttaaatgtcaattttccatgataacgtaataataactccggctcacaagcaatgattctatgtgattctctaagatagctgttagatgacattgtgaatatattatgttttcttttttttttctcagctcacttttaccaaatacattttattttgttgtatttattttataaggatgtttactgcacaaatagattttaatctaggttttccctttgcttccttcttccttctccctttttatctttctttccttcttgtttcttttcctccttttgtattttctttctttcccatcctttcttcgtcctttcttcctcctatttatccatgcatccatcc

SEQ ID NO: 463428 - DNA, 573 bp, Homo sapiens
gtagcagaatagttgaaatttccagaaattgtaaacatccttctaacaagaattggtctccaggtgttagcattctcatagctgagttcagaaattggcatgagttagcttactagtgcaagcatctcttgttgagggcaatttgtaactttatttgaaaaggattttcattttctaagcaaaattcaaaagcactgcttgctccccaccacagagaatttctaaagctttcagaaagcatttcacctgaataaaatatgaggctatatgataaataggtggaccttgaaaacttgaacactgagatgcttatctaatcctgaactatgcttcagtggaataacttgattaacttccaaggtttgacactgtttccrgttaagccagaatgtctcctaggaacaactacttagctgttatattggtgctctccttcaaaaaatcaaaacagtgcagatgatagaaagtaatttttaaaattttgtaatgtacacttgtgggtgtacatttagatatacgcatgcaggattaacctgagatatgaggacatgatgagcaggctaataatttggt

SEQ ID NO: 463429 - DNA, 588 bp, Homo sapiens
gggattgtttacttagttgaggaagaaaatttaacacaaatctagagctcatgtttttccagagtgataccaattaaatgagattatttaatgtttaagaacagaaaaaaatgcaattcatgatttacagatgggctttgacagagtggctcttctggggtagtaaaaaaaaaaaaccattgagtggtactatgtatattgctttctttctttcttttttttttttttttcttttttttgagatggagtctcactctgttgcccaggctgsagtgtagtggtgcgatcttggctcaccgcaacctccgcctccgggttcaagtgattctcctgcctcagcctcctgagtagctggggctacagatgctcgccaacatgcccagacaatttttgtattttcagtaaagacagggtttcaccatattggccaggctggtctcaaactcctgacctcatgatcctcccgcctcagcgtcccaaagtgttgggattacaggcgtgagccaccgtgcccggccgtatattgctttctttaggtgtactttcatccagcttagctgacaactgtcctgcaccacttcttgaact

SEQ ID NO: 463430 - DNA, 588 bp, Homo sapiens
gggattgtttacttagttgaggaagaaaatttaacacaaatctagagctcatgtttttccagagtgataccaattaaatgagattatttaatgtttaagaacagaaaaaaatgcaattcatgatttacagatgggctttgacagagtggctcttctggggtagtaaaaaaaaaaaaccattgagtggtactatgtatattgctttctttctttcttttttttttttttttcttttttttgagatggagtctcactctgttgcccaggctggagtgtagtggtgcgatcttggctcaccgcaacctccgcctccgggttcaagtgattctcctgcctcagcctcctgagtagctggggctacagatgctcgccaacatgcccagacaatttttgtattttcagtaaagacagggtttcaccatattggccaggctggtctcaaactcctgacctcatgatcctcccgcctcagcgtcccaaagtgttgggattacaggcgtgagccaccgtgcccggccgtatattgctttctttaggtgtactttcatscagcttagctgacaactgtcctgcaccacttcttgaact

SEQ ID NO: 463431 - DNA, 598 bp, Homo sapiens
tttaatgtagacacttcctttaagaaagggagagctcattatttttctgatatagcttattcttttgctggacagctcaaaagattagcaagattttaattacattgctctgaaatcttctaaggtacattcatctattggtgctagtcctttggaagacatagaaaacatactctatgaatgttaaccatcattatcataactgtcattataaacccatatgatatcctcatccctgaaaaaaatcatccttgaaaagttaatatagccataggggaaaaaataatgtttagagttagaagtcttcagtatgcatcctaccttcagtgattwattaatccgtattgattctgaacctcaattttttaatttcccatgcaagaatttctacctcaaaatgatattctctgtaaaatgctaccattgcctttttttccttcaaatttttattaatatttttgctgtgataatcttctcattcattacaacctcttcccccaatttaaagacctgtaaggtaaattctgaaatgacagcccatcacagcctatgtcatcctctgacttgcacctgtgtcccattcacccctctatgaaca

SEQ ID NO: 463432 - DNA, 588 bp, Homo sapiens
gaaggactgtcaagagggattacaaagagcataaggaaactttaggggagatagatatgttcattatcatgattgttaatggttttacaggtgtattcacaagtcaacatrtcagattgtccaatttaaatatgtatgtcagttacacctcaataactgttaaaattcaatttgagaaatgtgacaatatagataattacaggttgctgtagaagctcagaggaagagcatctactcttgactcatgagtcaggggagagttcccaaaagaagtggcacccaaggtgagacttgatgaaaaaggcaggataggaaagatgtacatgtcactctctcccatcctaagtaccaacagacctcttcattactgatagcattctctccccttgaacctacaggtcaccttgttctgtgttttcttagatttcatatttgtttacttggcattcattcatcacagggccaattgtattagctatattttcttattttctgtattcttgatgctctgacatttgggagccttacaaacccctgggagagactgccactcctacagatggctatatcctaaagagcctaagacta

SEQ ID NO: 463433 - DNA, 588 bp, Homo sapiens
gaaggactgtcaagagggattacaaagagcataaggaaactttaggggagatagatatgttcattatcatgattgttaatggttttacaggtgtattcacaagtcaacatatcagattgtccaattkaaatatgtatgtcagttacacctcaataactgttaaaattcaatttgagaaatgtgacaatatagataattacaggttgctgtagaagctcagaggaagagcatctactcttgactcatgagtcaggggagagttcccaaaagaagtggcacccaaggtgagacttgatgaaaaaggcaggataggaaagatgtacatgtcactctctcccatcctaagtaccaacagacctcttcattactgatagcattctctccccttgaacctacaggtcaccttgttctgtgttttcttagatttcatatttgtttacttggcattcattcatcacagggccaattgtattagctatattttcttattttctgtattcttgatgctctgacatttgggagccttacaaacccctgggagagactgccactcctacagatggctatatcctaaagagcctaagacta

SEQ ID NO: 463434 - DNA, 443 bp, Homo sapiens
agcaagaatgcagggggaatgtaaaatggtgtggtcactggaaaaaggtttggcaatttcttgtgaaccaaacattcaactactgtrtgacctagtaagtgtgctcttgaacatttacctcagagaagtgaaaatttatattcatgcaaaaaatctacccatgaatgtttatggaaactttatttgtaatagcccaaaacagggatcagcccagatatccttcaagggatgaatggttaaataaactgtggtatgtgcacaacatggatactagtcagcaatttaaaaaaaaaaaaaaaaaaagaatacatataaaaacttggatgaatctccagggaattaagttacatgaaacagacaattccaaatattacatactataagattccatttatatgacttttttgaaataacaaaatttcagaaatgaaagccatattagt

SEQ ID NO: 463435 - DNA, 357 bp, Homo sapiens
taaatgtcacttttcctttgctagggtgaggaccctggttaggatagctagctccacttgttgagagggagttctgcctgttgagaggtagtatggggtgggagagcattggattttaggagtttatatcagcaatgatggctgaacatggctccctaaaaaaggttccattaatgaaccatgtaggtcttccccaaaaaggggtttttgaaatgtgttggaaggtggtaggggagagggagtctaaaaggtccaggcaggagtgagagagcttagagttggaagtgcttacaggaaggagggtggctgggttgagagctttacmtctctggaaggtgattagatggtttcccatga

SEQ ID NO: 463436 - DNA, 604 bp, Homo sapiens
gtggttttttaaaaaaatttaagagtgtgcactgggagcaatacatacatacagatgagaggcctaaactatttagggcactgtggaggccttacccccaaaagagcatatcctcaggacaccgtgaatttttctgttaactaagaacccaaaatctcagggacttatgccttattttttattcacctagatgtctactgcagtttgacaggarcttctgctactaatggttacttagggacacaggctgatggaacagtcatcaactccaatgacaccaattactaaccgagagggattaaaagggctctgaggatttggcactaacatgcaaatactccacccaaaagtggtacaccctgctctgctcacatctcactggtcaggattacttttgtggcctcacccagctaggaaatacaatccttccaggtactaggttatgacctgtacaagtactgactccactgcatcatgaaggcagggtaacagtgagccccataagttggagaggtggccaggggcctcaggaaaagaattccagaccaaggcaaaaacatgtgtgaaggccacataatttcttcctggagtggacctctcttct

SEQ ID NO: 463437 - DNA, 450 bp, Homo sapiens
gatcttagggtttagaacaatgattctatacttaaatttctacaggaagaggaatgcaaatgaataagatagatgtatgtatagaaaattatttctctactttaaggggaaacaaacaaatgcaataataatacccaaatgtgaccttggtatcagacagagactggctcactggggagcaaactcagctctggcctgtgttttcatgcaggaatatgaatccagcaktggtaggtcttccaaatgttgaagaaaagccaacaatcttaatgtgagagctattaatttctgactgtattgcccaactaaaaacaatcattttataaacatcgttcatgagttgacctatgggtatcaatatgtaatctctactttaggaaagcaataaacatatagttactccacacaaaaactttcccacatttttagagtccaaaatttataagtaaa

SEQ ID NO: 463438 - DNA, 625 bp, Homo sapiens
cagaggaatcttaagtctactgttatagtatttcctaatatctgaaatgcatatataaagaagacatagttggaaattagcacaacacacacatttgtttaatggtctgtgaatgagggccattacagagggaaatgccaaggaatatgtcctgacagtggtcctgtatatcaagatattaaaacaaaagcagtaatataaatctggcataatcagagagattagtgacaacaaagcctttaaataatcaagggctgtcatttctattacatatttacataacatatgttttctactctaaagaagaaaattagatcttgaaatctgaatgaaggctgggaaaggtagttggaaggaatagataaaaaagggttcattaatgggtacaaaaatacagctggataaaaggaataagatccagtatttggtagcaaaataaggagactctagctaataataacatattgtatatttcaaaatacttagacaatctggaatgctctcaacacaaagaaatgacaaatgtccaatgtgagggtatyccagtcactccaaactgatcatttcatgtagtatgctcatatcaaaatatcacatgtatgctataatacgcacaactattata

SEQ ID NO: 463439 - DNA, 556 bp, Homo sapiens
aaggtgattctgttatgttttagcaaagagactggtggcatttttccctgccctagacattgtgagactttgacctagagagattatttagggtgtctggtgaagaaattctaagcagtaaagcattcaaaggtgacttggatgctgttaaaagcattccttttaaaagggaaacagatcataaagtttcagaaaatttgcaggctgcaatgcagtagaaaagaaaaacccatttttgggggagaaattcaagccagctgcagaaatttgcataagtagcaaggaacctaatgttaatccccaagaccatggggaaaatgtctccaggctatgtcaaagattttcaggggagctcctcccatcayaggcccagaggcccaggaggaaaaagtggttttgtgggctgagccctgggtccccatgctgtgtgcagcctagggactaggggccctgtgtcccagctgctctagccatgacttaaaggggccattatagagctcgggccatggcttctgatggtgcaagccccaagccttggcagcttccacgtggtgtt

SEQ ID NO: 463440 - DNA, 556 bp, Homo sapiens
aaggtgattctgttatgttttagcaaagagactggtggcatttttccctgccctagacattgtgagactttgacctagagagattatttagggtgtctggtgaagaaattctaagcagtaaagcattcaaaggtgacttggatgctgttaaaagcattccttttaaaagggaaacagatcataaagtttcagaaaatttgcaggctgcaatgcagtagaaaagaaaaacccatttttgggggagaaattcaagccagctgcagaaatttgcataagtagcaaggaacctaatgttaatccccaagaccatggggaaaatgtctccaggctatgtcaaagattttcaggggagctcctcccatcacaggcccagaggcccaggaggaaaaagtggttttgtgggctgrgccctgggtccccatgctgtgtgcagcctagggactaggggccctgtgtcccagctgctctagccatgacttaaaggggccattatagagctcgggccatggcttctgatggtgcaagccccaagccttggcagcttccacgtggtgtt

SEQ ID NO: 463441 - DNA, 593 bp, Homo sapiens
cacctacctactcaagggctcttaagatacaactagaggaaatgatgtggttgtgtggaattttgaggttcctggaaaagcaaaaatggatctggtttttactcacaggtaggctcctagtaccctcatcacagggttctcctgaagcacatgcaaattctttggattgaagagttcatgtaagtgggttcaatgtaatcaatgcaatgttaagccagataggttccaaattagagtaaccctcaggaactccagaactcacctagcaggaactgcaacagggatgttgaatgaacgtatcattagtgtcaatatcacaacttgtaaataagtctaccctgagcttgtttagtcttctagggagatgggtgagaagaaatttaggctaaaattaaaggtgtagtttcccagagaaagtttcatataaaagaggtagaaasagcaactgtggtttgtaagggaagtggatggaagacaaacaagaaatttcaaaagattttatattcataaaaaaaaccaggttaatatataaaaactaattagagaattgagaaattaaacacgtcattgtcaaaatataacattcattaaat

SEQ ID NO: 463442 - DNA, 543 bp, Homo sapiens
aagaaatcctgccagtgagctgaatagcagtgtttctcccttggtctgtgatagggatcagatgaaagtcttctaaaactaataaaagaatgttagtaaagttatttatctctgtgcagatgatggagaagtggaattaagttgagaaaaatattctaagagcataatggacaatcatgggactctgaacatgtgacatactatatttttttttctaatttttcccttatgacgtgtaaaaatcaaattacgcaaagcagcaawgtctgagaatctgtggttcaaataaatcaatcagaaataagcttttaaagtgcagtctgtttttcaagagttggctttattaagtaaaatgagaatgacctacagatatttgccatatcaatttttgtgacatgtttgatagaaggcattttctgtccgtgaggagttttatctaatcaaattttcttaatacggcccacatttgatgcagtcacagagactctaaactccatctttactgcttttcctcctctgagtttgttaaatacagcgcagcca

SEQ ID NO: 463443 - DNA, 571 bp, Homo sapiens
cctctgactcatctttatcatccacagcactataattaagaagtgggttttcaataactattagataattaagaattaattaataaaggaatttctaatttatcctaaactcacaaaacatattttaggaaaacatttttacagaagagtattacatcatacattctaattgatctcaaattagtgcaccattaactttgtccattaggatgagaaattaataccttattagctccagatgagccttaaatacagtcatgcactgcaaaatatttcagtcagttacagaccacatatgtcaaagtggtcctataagattatacaatatttttactwtaccttttctatgtttacatacacaaatacttagcattgtgcttctgttgcctgcagtattcagtacaataacatgctgtacaggttcatagcttaggaacaataggctataccatacagcctctgtgtgtagtaggctacattatctaggtttatgtaaatacactctataatattcacacaaggacaaaatcgcctaatgatgcatttcccgaatgtatccccattgttaagt

SEQ ID NO: 463444 - DNA, 560 bp, Homo sapiens
  misc_feature (1)...(560): n = A,T,C or G
attattttcataaagttgaacagttttacacataattttaaaatacttgtttctaatttggctcttattattttaagaatttaggcactttaacttatttggtcataagtgatcattttcacattgaaatccactaacatgaaaaataaaaacatacaaatgtcttttgctgcgcatatggtaaccttttctagtttgagagtcccacttgttaactggctaggactgatataccaaaatatggtataatattttgagaaagattttaccttatgcatttgagcaattttctttctttgccttgggtgttcatgtctgtgtgtgtgtgatagtgtgacaatgattgagattgctttagtatatggaattacatattgctatctgtgaawatagaaattgtgtcctttgtctctagtacccgaaaattttcaagagatactagaaattttatcctcttgacattttatataaacaaacctggcttatttaaaacaaacataattgagcagcatattttagtcttggcaccccccagatgtttaaaagtcgnnnnnnnnnnn

SEQ ID NO: 463445 - DNA, 475 bp, Homo sapiens
gatattgaacatctttttatgtgcttattttctatttgtatatcttttttggttatacattatatattatttctatcaatacaaatgtaaaaaaaaattgcctttaagaaaaccattgtaggctgtgatgactcctttagtgtgaaccccacctctgtggcttaccagctatgtaatcttaaggaagtcacttaaaatttctcttcctcagttttcttctttatagaatggtctaactaagatgttggaggtatttaatacattygtgtatttaaagtccttaaaattgtgcctgggagataatcagaataaatgatatgttaacaaaaacaaacctttccaaaatcttcttctgtttgtctcctcattctcagttgctagctcatcttaaacagagaattataagacattaatctaagtatattagatctattaattcagtaagtccttacaacaaccttagaaggtagcccta

SEQ ID NO: 463446 - DNA, 617 bp, Homo sapiens
atgtggttgcttaattccctttagcctcttggctactgctgtttatttttctttctgagtctttcttcctggcccaatatcttaatgaaagcatgacttctatctcagttctcatctgtcttttctttcctggccttgtcctttmcctagatggacttatccagacctatggctttaagtacctctatatgctaatgattttttaattcatatctccagctatgaccactctactgagatcttgagttttatgtccatctgcctacttgacagctgcacttaaatatcctattggcttctgactttgacattgttgttcaaaactaatcacttcattcctgtctgcctaatactccaaacctaactctcccttagtcttcctaaacttagggatgctaagcccaaagtttagaagtttgttttaaattattctttcttctactctatttatgcaagccatataaacatgaagataacaaatcaagtcacagatgaccatcttcattgctgtcatgtcaatccttgagattctgcagcatcctctattcttgttttactcttgcttcttccatacagcagacaaagtgatcgttttaaagtataaattagattttact

SEQ ID NO: 463447 - DNA, 617 bp, Homo sapiens
atgtggttgcttaattccctttagcctcttggctactgctgtttatttttctttctgagtctttcttcctggcccaatatcttaatgaaagcatgacttctatctcagttctcatctgtcttttctttcctggccttgtcctttccctagatggacttatccagacctatggctttaagtacmtctatatgctaatgattttttaattcatatctccagctatgaccactctactgagatcttgagttttatgtccatctgcctacttgacagctgcacttaaatatcctattggcttctgactttgacattgttgttcaaaactaatcacttcattcctgtctgcctaatactccaaacctaactctcccttagtcttcctaaacttagggatgctaagcccaaagtttagaagtttgttttaaattattctttcttctactctatttatgcaagccatataaacatgaagataacaaatcaagtcacagatgaccatcttcattgctgtcatgtcaatccttgagattctgcagcatcctctattcttgttttactcttgcttcttccatacagcagacaaagtgatcgttttaaagtataaattagattttact

SEQ ID NO: 463448 - DNA, 617 bp, Homo sapiens
atgtggttgcttaattccctttagcctcttggctactgctgtttatttttctttctgagtctttcttcctggcccaatatcttaatgaaagcatgacttctatctcagttctcatctgtcttttctttcctggccttgtcctttccctagatggacttatccagacctatggctttaagtacctctatatgctaatgattttttaattcatatctccagctatgaccactctactgagatcttgagttttatgtccatctgcctacttgacagctgcacttaaatatcctattggcttctgactttgacattgttgttcaaaactaatcacttcattcctgtctgcctaatactccaaacctaactctcccttagtcttcctaaacttagggatgctaagcccaaagtttagaagtttgttttaaattattctttcttctactctatttatgcaagccatataaacatgaagataacaaatcaagtcacagatgaccatcttcattgctgtcatgtcaatccttgagattctgcagcatcctctattcttgttttactcttgcttcttccatacagcagacaaagtgatcrttttaaagtataaattagattttact

SEQ ID NO: 463449 - DNA, 587 bp, Homo sapiens
gttctccatcctctttttttatgcttttatgcctcttctcttttcataattagcaatctgagagacagacatcaatgaaatttaagaaatgcatgcatagtgctctttcgggatagcacacagtctgataaaatttctmatttcaataacatagtttcaggagagagctgcttgattctacaaacttatcatattttcattgtgatattttaatgaaattaaatcttattcatggaatttaaattaccaatatcccactgttttccactccaaatctatcctttcagcactcttagaagtctgtctctcatgtacttttatacaccatttcatttctgcctttgctattattctctttcatcataatcatgttattgacaacaaagagggctttttaaaattttctctcttcaaattcctttttcttcttcactctattttaaatgaatgtataaattcataaaaccactatgcaatgtgtttgcttagtgtacttcataaagtgactctggatctttaagtatccccaaagtgtgcctacattttatataacatgaaatataatttttagacttttaaaagagagg

SEQ ID NO: 463450 - DNA, 587 bp, Homo sapiens
gttctccatcctctttttttatgcttttatgcctcttctcttttcataattagcaatctgagagacagacatcaatgaaatttaagaaatgcatgcatagtgctctttcgggatagcacacagtctgataaaatttctcatttcaataacatagtttcaggagagagcygcttgattctacaaacttatcatattttcattgtgatattttaatgaaattaaatcttattcatggaatttaaattaccaatatcccactgttttccactccaaatctatcctttcagcactcttagaagtctgtctctcatgtacttttatacaccatttcatttctgcctttgctattattctctttcatcataatcatgttattgacaacaaagagggctttttaaaattttctctcttcaaattcctttttcttcttcactctattttaaatgaatgtataaattcataaaaccactatgcaatgtgtttgcttagtgtacttcataaagtgactctggatctttaagtatccccaaagtgtgcctacattttatataacatgaaatataatttttagacttttaaaagagagg

SEQ ID NO: 463451 - DNA, 576 bp, Homo sapiens
tctgcctttgctattattctctttcatcataatcatgttattgacaacaaagagggctttttaaaattttctctcttcaaattcctttttcttcttcactctattttaaatgaatgtataaattcataaaaccactatgcaatgtgtttgcttagtgtacttcataaagtgactctggatctttaagtatccccaaagtgtgcctacattttatataacatgaaatataatttttagacttttaaaagagaggtgagatttgatccatgggttgattaatctgccataatgagctgtgcaatgccaacttttcacagcactactaatccacaactatgcaatgttatacttgaaagaaagtatgtgtccctatagagtatargttttcatttaaaactccatggtcatcttaccattgagcttgaaagatcaacttgcagttgtttcaaatctagccacaaagccgtatttgttgattctgtgctctcttgctctctttctctctcacgcacacataaacacaagttcctttaatctattcttattttccacttactgcctttgccttaaagtttt

SEQ ID NO: 463452 - DNA, 559 bp, Homo sapiens
tgagtatggtgggggaaggtatgacaaattatctggtgccaagtaaacggtagtttgtagcctaaacatgcatttatagatattgttctgggaaatttgccaaagggagcattttgcttagtaagtttcaagagtgattttttttttaatgtcaacaagcaaaacaaaagaggttcctaaaaaacaaagggcagaaaagtggaatctttacttgactgtttcaggtaaaaagaaaggagaaaattatctctttagtagaatatattcatattttaaataaatcttcagcttttcatactttgggactactaaacaaaaaagacatatttttgctttatttatttatttrtttatttatttgcccccattaagcagttgcctgtaagaggcaaacagtttcaggataaattaacaaaataatattctttcacctatgaaatcacttgacttttctcttgaaataattcattaatatatcaatgaatgagttttatattactttataataaatgacctcaagctgtcacggcttaaaacaacaactattgcatttgctcat

SEQ ID NO: 463453 - DNA, 559 bp, Homo sapiens
tgagtatggtgggggaaggtatgacaaattatctggtgccaagtaaacggtagtttgtagcctaaacatgcatttatagatattgttctgggaaatttgccaaagggagcattttgcttagtaagtttcaagagtgattttttttttaatgtcaacaagcaaaacaaaagaggttcctaaaaaacaaagggcagaaaagtggaatctttacttgactgtttcaggtaaaaagaaaggagaaaattatctctttagtagaatatattcatattttaaataaatcttcagcttttcatactttgggactactaaacaaaaaagacatatttttgctttatttatttatttatttatttatttgcccccattaagcagttgcctgtaagaggcaaacagtttcaggataaattaacaaaataatattctttcacctatgaaatcacttgacttttctcttgaaataattcattaatatatcaatgaatgagttttatattactttataataaatgacctcaagctgtcayggcttaaaacaacaactattgcatttgctcat

SEQ ID NO: 463454 - DNA, 574 bp, Homo sapiens
gtcatcagctagtattcacttaacctctctggagttcagtgtcctctccaaaatagaagtygtagtaaatgctctttgaggtctgcactgtatctgtgattctgtgcttctagggacttcatgccaattttgaagaaaccagtcatacttctgaaataataaattttgcaattgtatgctgctatgtgagctgccatcagagaaaactgaaggaagggacatgaggttacttagagtcaaaaccaaaaacctctgtaatcatgtagcagccccttcatgttgtacatgttctgaaaaatgtttgtgataggaattctgggcatctttatttaagatcaagctcaatagtgtccacactgttgacatttgtaacatttgtcctgagttactcttagcactaatcagttcatgtgctgcataggttcatgtgtgcatggaaattcttcaaatctcagatccttagcattccttagagacactccatacctatgtctgtttctcaggtttatccattacacagttatgtgaggaaatggacttgtcatatagacagtctcattcactgcattaagtc

SEQ ID NO: 463455 - DNA, 481 bp, Homo sapiens
gtcaatgaatgcctcatctcttaaccagcaagtcagtttatggatgattcagtagtccctcaattccttggattgaaaacctgggcatttttttctcagatgatatatgtgtctgctttcagaatcagaatttgcctaaagctcttaagcagaaagataagtacagatactttatcagtcagacaagcatgttggaaactttcagaccattggttctatgatgattagcaactttcttaagttttctgttttagattagtcttctaaaaaataacgagagagaatctgtataaattacatgacagcattcatttatctttaaaattctactgcatgactaaaggatctcattccagaaaaaaacagtcacgggaattattcatgttgatcagaaattggccagagatatattgytctcaaattgggacgcttcatgaatagactcagcacttaaattgagattaaactagaaggtatgtgc

SEQ ID NO: 463456 - DNA, 559 bp, Homo sapiens
ggcatcttggttgctttaaagttttggtaattataaataaagttgctataaatatttatgcacaggtttttgtgtagacataagttttcaactcctctgggtaaatatcaaggagtgcaattcctggcttgtgagtatgtttagttttgtgagaaactgaccaaaagtctttcaaagtgtgtatagcattttacattcccattakcaatgaaggagagatcctgtcactccacattctcaccagcatttttggtgttgctagtgttctggattttgaccattcaagtaagtgtgtagtggaatctcattgctttaattttcatttccctgatgacatatgatgtgaggcatcattttctatatttatttgccatctgtatatatttttgggtctggtgcttgttaagctgcttggcccatttttaaaatcaagtttttttttttttcttattgagtttcaagggttctttgtatattttggataacagttcttaatcagatgtgtcttttacaaatatttcctcacagtctgtggtttgtcttttcactctcttgatag

SEQ ID NO: 463457 - DNA, 513 bp, Homo sapiens
ccatcaaagctttcttcatttctgttacagtgtttttgattctagaatttatttttatcttccttaaaatgtccatttctttgcttacattacccatctgttcttgcatgycatccactttatctattaaaggccttaacatattaatcataattgttttaaatttctagtctgattatttcaacatccctgccatatctgagtctgcttttgatgcttgctctgcctcttcaaactgtggtttttttgcctttttgtatgcctggtaatcttttctttataggtggacacgatatagtgggagaaaggaactgatataaataagcctttagtaacacagtggcaagggaaacaaggggaaacaccgtccttgtttcccataccttgccactgaattactaaagtcctacaactaggtctcagtcatagtgagcctgaacttctggactgtgaacttcacaagtgcttctcagtccaccctcccacctcatgtaggacagaatggccagagta

SEQ ID NO: 463458 - DNA, 613 bp, Homo sapiens
gggtgtggtggcgcatgcctgtaatcccaattactcgggaggctgaggcaggagaatcgcttgaacccaggaggtgaaggttgcagtgagccgagatcatgccactgcgctccagctgagagacagagcaacatttcatttcaaaaaaaaaaaaaaaaagattttaaacataaaatacattaaattaatattaggtagtgtgattgctaattatatgtatcaccttgactaggccatgtgtttcccctatagatatttagtcaaaaattttcctgagtgtttatatgrggatgtttttggatgagattaacatttaaattgatagactaaataaagcagattgctcccccttaacagagctggtctcatctaatcagttgaaggcctgcatagaaccaaaggctgaccctactcttcacccccagtaagagagaaatgtctcacctgagggcctgaagaccttcaaactgcaacataggtcttcttggctctacagcagctggctgacctttgggttcaagcttgtatatgacatccggtctgtggattttgaatttactatcctccataatcacatgagccaattctttataataaatctcattgtatatgc

SEQ ID NO: 463459 - DNA, 545 bp, Homo sapiens
gggattcaatgtcaaactcataaatcacagacagctacaagtatctttgtactggaaagagttatatccaaatgatactcattgagacttaaaatgtaaattatgagctaattattcataaaaatattcacagtgaattataaacacctaccagtggaaacattacatcaaatawcttttgctaaaatttaccacatttattccaaattggattttataacaagtagaagtctttaaaatactaagtggtcagaaaaatacataatgtgagactgacatattttcagacttaagtcacattggtatgaatcaaaacaaagttataccaactaaaatacataaaagagagagccactgaaggaaaagcatcacaagacaccgcaacacacttcagttcatctgggaaatctagaattaagtgtcaaagcggcttacttaattgaatcttaatttcaaaatacacatttcaggtacaagcatttccacttacccgcttcattatggtcttaaaatgtggcaacataaagacattacctttattattt

SEQ ID NO: 463460 - DNA, 534 bp, Homo sapiens
tattcatttgaaaatattggtgttgccggggatggtggctcctgcctgtaatctcgtcagtgttggaggctgagatagaagcatcccttgaggcttggaggtccagcaacctgggcaacatcaccagaccccgtgactattttttcaaaaactgtagctggatgtagtgttctgcacctgtgatcccagctacttgggagtctgaagcaggagaattacttgagcctagaagtttgarcctgtagttagctatgatagcaacattacactgtagcctgggtggcagagtgagaccccatctctaagaaaaatcaagtcaaataagataagatacaatcaaataaaatgttggtctttttcttgcaattacgcttttctaatttgttttgcttttttaaaaaatttaagaaatgacagtaatagttggtttatataaggctttcagaaactggcttcatcttctgcagccctttctctgtctgcccctttttctggcattactgcgctgctggtgatgcctctgtcaccatcctt

SEQ ID NO: 463461 - DNA, 534 bp, Homo sapiens
tattcatttgaaaatattggtgttgccggggatggtggctcctgcctgtaatctcgtcagtgttggaggctgagatagaagcatcccttgaggcttggaggtccagcaacctgggcaacatcaccagaccccgtgactattttttcaaaaactgtagctggatgtagtgttctgcacctgtgatcccagctacttgggagtctgaagcaggagaattacttgagcctagaagtttgaacctgtagttagctatgatagcaacattacactgtagcctgggtggcagagtgagaccccatctctaagaaaaatcaagtcaaataagataagatacaatcaaataaaatgttggtctttttcttgcaattacrcttttctaatttgttttgcttttttaaaaaatttaagaaatgacagtaatagttggtttatataaggctttcagaaactggcttcatcttctgcagccctttctctgtctgcccctttttctggcattactgcgctgctggtgatgcctctgtcaccatcctt

SEQ ID NO: 463462 - DNA, 349 bp, Homo sapiens
atggctataatatcactttacctgccatatatgccataaaattgttcttcatattatttatctaagattataatttcatatagaatgctttcaaactatgttcagttgaaactgagaggatcatagtttatagatttgtttctttgatatgccataacataatatctgtttaaacaattattaaatatttactcttaaaaatacttgacttactagttcttacatttctgcagatgtaagaaatgcctagaaaygacaataaatatgttaaatgtatttggaaatgaagacttcagttgccatggagacttaaatacagatcaactgaaaatggatattctgtttaaga

SEQ ID NO: 463463 - DNA, 620 bp, Homo sapiens
accttacccccaacctcctgctctctgaaacatgtgctgtgtcaactcagggttaaatgtattaagggcggtgcaagatgtgctttgttaaacagatgcttgaaggcagcatgctcgttaagagtcatcaccactccctaatctcaagtacccagggacacaaacactgcagaaggccgcagggacctctgcctaggaaaaccagagtcctttgttcacgtgtttatctgctgaccttctctccactattatcctatgaccctgccacatccccctctccgagaaacacccaagaatgatcaataaatactataaaaaaaaaaaaaaaaaaaaagaatatattttctaaaagttgctacaattcaataataaaaagactaatatccaaattttaaaatgtataaaagctttgaactgacaatttacaaaataagatatatggcagatcagcacattagaagatgcccagcatcattaatcatcaaggaagtgcagatcaaaatcgccccctgacctaccagaattgctaaaatgaaamaggctaatcactactaatgcaacagcaactctcatacactaccgtatggtgtaaagtgatacaaccattttggaaaactgtt

SEQ ID NO: 463464 - DNA, 488 bp, Homo sapiens
attaccactagacctgtcttataagaggtcagtgagggagtgctaaatttgaaaaagactattaccagccaccaccaaacacacttaattacatagatgagtaatactataaagcaaccacaccgtcaagtctgcatagtaactagctaacaacatgatgacygcatcaaacctgcacatatgaatattaactttgaatgtaaatgggctaaatgtcccaatcaaaagtcacagagtggcaagttttataaagaagtaagacccaactgtatgctctctgcaagggacccatctcacttgcagtgacacccatgggctcaaagtacagggattgagaaaaatctaccaagtaaatgaaaaacagaaaaaagtaggggttgctattctaatttaagacaaaacagacttgaaaccaacaatgattgcaaaagacaaagaagggcattacataatgataaatgtttaattcaacaagaagacttaactat

SEQ ID NO: 463465 - DNA, 488 bp, Homo sapiens
attaccactagacctgtcttataagaggtcagtgagggagtgctaaatttgaaaaagactattaccagccaccaccaaacacacttaattacatagatgagtaatactataaagcaaccacaccgtcaagtctgcatagtaactagctaacaacatgatgactrcatcaaacctgcacatatgaatattaactttgaatgtaaatgggctaaatgtcccaatcaaaagtcacagagtggcaagttttataaagaagtaagacccaactgtatgctctctgcaagggacccatctcacttgcagtgacacccatgggctcaaagtacagggattgagaaaaatctaccaagtaaatgaaaaacagaaaaaagtaggggttgctattctaatttaagacaaaacagacttgaaaccaacaatgattgcaaaagacaaagaagggcattacataatgataaatgtttaattcaacaagaagacttaactat

SEQ ID NO: 463466 - DNA, 653 bp, Homo sapiens
ctcattattttggtcttttctaagtcatatttgcatttctatgtgttttgaattgtttagaaatccacaaagraagtccatagtgatgggctaggaatcaagggaccaagttggagtaattgcaaaattagaagatcacaccttaactattgggtctcctaattaagtgatcatggaacaacttttttattctcaaaaatggtaatatctacctaatagataaaggtaacatatgtagagtattaattaacgaggcaacatatgtaaagcatttgaaatgtagtaagcaatcaaccatatcagaaaattctccacttccaactttagctctgtaacaagtagaaaagactatttggttttctttgacaaaatattggggttattgagacactacaagctgaagtggcaaatacactcactcccttaacatattctataaaaattatacaattaattgttaatacaaagctaaccctaaaataaagaaaatcatcacataaaatgtaaaccaaaagttaaaatgagaatttgggagctgatatacagaatattttttacctcagtgcaataaaatacaaatttaaaaattacaggaaaaaataaggattacattggaaaaaacacacacacatgtatgcacagaagcatacaca

SEQ ID NO: 463467 - DNA, 560 bp, Homo sapiens
aaaactagttctgacggtaattgccagaatgttcccattgtaactttgctgtatttatgtttgaagttaattaacaatttgtgaagagattctttgagactatcatgcttctcatcaaacttctgtcacttttttctcaacattgataatttcctccctccattatttcttttatatttattacctggcattctactataagaaaaaactttttcttccttcattaattaatatttctgtaggttcatgggttattattttattcaatagattataatctattgttatgattctttgttttgctaccctgtatttggccagtgaaagcctctgggaaatacagggggctcttgtatgtttttgatatctcttcatcattccacgagtacctccttatatcttgtcagwtatcaagatgtgaaactatttttttggtatgtaaaggctcatgaaaatgtctctttgtgtggatgtaatttctcttttaattttataacatctatatacttttggtaaatagagttttttttttttattgttgccaatagccatacttctta

SEQ ID NO: 463468 - DNA, 563 bp, Homo sapiens
ataggagacaattcagtgaaggaaactttcatcgatattttaaaatgaaaactgaaggcacaaaaagtttctaaaaaagcaaaataatcattaattgattcagtaggtaattgaatcaattgaattgattcagaggattatgtatgtaaagtagtaaaaaagtatatagatgttcaaataaaatggatctgaatttgagtcccagytccaccacttactagctgataaccctgcagattttatttaaaatctctaaacttcagcattctcattcgagtaattaccatagtatgttatcaaactcataggtctgttgtgatggttaaataatacgatgtaaataaagtgcttaaaccaatgtctagtacatggtgagtgttccataaatactaactcttataatcacttttattattgttaataaattaaaaaaataaagtaattggttctttacttagctttgctttctttcattcatttagtcatcaaatttctgttgagctcctttgttccagcctgtgtgctcagtcctagagagaacatcaatgaacaaaacagacatg

SEQ ID NO: 463469 - DNA, 563 bp, Homo sapiens
ataggagacaattcagtgaaggaaactttcatcgatattttaaaatgaaaactgaaggcacaaaaagtttctaaaaaagcaaaataatcattaattgattcagtaggtaattgaatcaattgaattgattcagaggattatgtatgtaaagtagtaaaaaagtatatagatgttcaaataaaatggatctgaatttgagtcccagttccaccacttactagctgataaccctgcagattttatttaaaatctctaaacttcagcattctcattcgagtaattaccatagtatgttatcaaactcataggtctgttgtgatggttaaataatacgatgtaaataaagtgcttaaaccaatgtctagtacatggtgagtgttccataaatactaactcttataatcacttttattattgttaataaattaaaaaawtaaagtaattggttctttacttagctttgctttctttcattcatttagtcatcaaatttctgttgagctcctttgttccagcctgtgtgctcagtcctagagagaacatcaatgaacaaaacagacatg

SEQ ID NO: 463470 - DNA, 509 bp, Homo sapiens
tttcatacaccagtacccaaatgaacaaactagtaatacattcaccttcacttatggtgtcaagattcaactatgtactgtatgaaagaatataagcctcctacagaataataatgtatacatttcacagcatttaaatgagaccattttctgaaagaaccatgacatttaatttaccgttagataaaagtaaaagatgaaaataatgttcttttcacaacacaactcttaaaacatttgtggttttatacaatcagcwtattagacattcaaaagcatcactatatatatctactcaaaaaacaatattctaattatctggcaaaaaatcaacatcttctgaacagtttttgtgggcaagtctatagctacttacaagtgtgcaatgaggattaactccagcaagtctggaattcaccaggactgtttcaacaaagcacctgcaaggcactgatctttggccatgaaacataccaattaacagtattgctttttaaccatgagttgat

SEQ ID NO: 463471 - DNA, 581 bp, Homo sapiens
tttcaagattgttttctctctttccrtaaataatgccattcatatcttgataggtactgcatgaaatctgtagatttctttgggtcgtatggtcatgttttcaatattaatttttccaatctgatatggtttggctctgtgtccccagacaaaccttatctcgaattgtaatccctacatgtcaggggagggacaaggtgggaggtgattggatcatgggggcaggttttatgtgctgttctcatgatagtgagttagttctcaagagagccgatggttttaaagtgtggcacttcctctttctcacacacattccctcctgccaccttgtgaaaaaggtgcctattttcccttttgcttctgccatgattgtaagtttcctgaggcttcctagctatgcttcctgttaagcctgcagaattgtgaattaattaacctgctttcctttataattacccagtcttaggtggtattctttatagtggtgtgagaatggactaatacacaatccatgaacatggatgtcttcccgtttttaagaaaagaaaaggagagaagacccaaatttacaaaaacagaaa

SEQ ID NO: 463472 - DNA, 595 bp, Homo sapiens
tcctttataattacccagtcttaggtggtattctttatagtggtgtgagaatggactaatacacaatccatgaacatggatgtcttcccgtttttaagaaaagaaaaggagagaagacccaaatttacaaaaacagaaataataaaggagacattacaactgatactacagaaatacaaagtatcattagaggctattttggtcaagtatctgccaacaaattagaaaacttagaggaaatgaataaattcctcaacccatataacctaccaagatcgaatcaagaagaaacagaaaagctgaacagaataatcagaagcaatgagattgaattagtagtataaaatctcccaagaagaamagccttacacaggatcacatcaaagctctatttcacaaccttttaaaggagaactaacacatattcttctcaaactattcaaaaaaattgaaaaggtagtaatttatacaaaccaattctatattatattcaattcgctttagaaagaagccaacatcaccctgatactgaaatcagacaaagacccacaaaaaaagaaaactgtaggtcattagctctgacgcagttttgcat

SEQ ID NO: 463473 - DNA, 609 bp, Homo sapiens
ttctttgtacgtctggtagaattcaactgtgaataaatctggtccagggtttttttttttttttttttttttttggttggtaggatatttattacttctcaattttataactcattattggtctgttcagggattcaatttcttcctggttcagtcttgggagggagtatatgactaggaatttatccatttcttctagattttctagtttatgtgcatagaagttttcatagtattgtctgatggttgtttgtatttctgtggggtcagtggtgatatatcccttatcatttttgattatgtttgtttgaaacttctctctttttttctttattagtctatctaraagtctattttattatttctttttttttcaaaaaacagctcctggatttatttatttttgaagggatttttgtgtgtctatctctttcagttcagctgtgatcttggtttttcttgtcttctgctagtcttggagtttatttgctcttggttctctagttcttttagttgtgatcttaggttgttaagttgagatctttttaactttttgatgtgagcaattagtgctataaatgtccctcaactccgtatcccagagattct

SEQ ID NO: 463474 - DNA, 565 bp, Homo sapiens
tcctgtacctggaggtattgcccttgaaggctatgaaacagcaaagatggcagcctgcccctttttctggaagctctatcccagagggttactaacctgttgctgccctaaatgtgcctgtaggaggtggctggagaccctagttgggaggtctcatccagtcaggaggaatgggatcagagacccacttaaggaagcagtctggctactttttggtagagcagctgtgctgtgttggggatctgttcagcccccaatccattagagctctccatggcccacagactggaccggctgacatgccttaacagagaaggtggcagcctgccccaccccactggcactgcagcccagggagtaattagaactctgtcagctatagaacatggatggggatgggtggaggccctaactgtgaggacttgccccatgtagaagagtggattgcagtcccwttttaagaagcagtctggatatgcctctacaaaatagtcataacttgatgcggaaccgtttataatagtctgtttttatgctgctgataaaggcatacccaagacgttat

SEQ ID NO: 463475 - DNA, 506 bp, Homo sapiens
tggaacaaagagtaaacaaaaagtaagatggcaggtaaaattcccagtacttcagtaatatctctatcagtaacttgaatatatattcattaaaaaattaagactacgtggcttatacttgtgttgctcatatcatacacaatttgtatgtaataacacaggaagtgtgaaaatggaagtatgaagagagatatacgcaaatgctatacaaaaaaagggataactgtatggatctcagacagaggtgaagagggcttcaaaagagagtgatraataccctggcccttgacttctttgtctttcttcttccctcagttatttgaaagtagatgagatgaacatcacctatttgtttctcctgtatcatattctccactgtcagggtagccaatatcatgatcatggtctctttattggaaaagggtctctatgatcttagtcttccagtactttttttttacatacacaggtatacatgaaatttaggaaattctatctccctgaca

SEQ ID NO: 463476 - DNA, 554 bp, Homo sapiens
gcttattatcagattgttcaatatgttttataatttacatttcctcgcaggaccacctacatgggcgtgtgatgtacasttgcacaggaacccatgcttagagggtcccatgcttagtttaatgtttcttgttcttgccattttgaaattcttaatgattttgaaaaattttgccctggaccccataaatgatttacctggccctggttgaatgcgaaaactagaagaataaaataacatcaagttaagagtattttgtaatgggagatatggaaaggtatgtgaaagcaatgattcaaatggaaatctcgttttttctaatatcttttcctttattctctatttctcattggatattgtgtatataaatctaggcaatattttctggttgcatattccatggggaaggtgaaacttttagctaaggaggtttatttaacagctgaagtgggtatgactctgatcacataaaattcagccatttcttgccttggctgcttttgcctttatatgggaatatgtcactagttcaactggttgagtctcactggttg

SEQ ID NO: 463477 - DNA, 504 bp, Homo sapiens
ctcatttgatcttgcttttatttatgtcaaactttctggactggataagcctcctgaaccactcacctttcacccaggataaaggcttcttgccactaagtcctcagcatcataagaaggttgagctttcctacctactttgtatttctgattgacttctgcaaatattttcttaggttctggctcttaaactttgcctgttttcttaaacttaatatttcacatatcccaaattgataagttgagctttgggttttataatccacatattctgcacaaataaattagtgcttttgcttcgcagttgcaactctattgtctgcaacctaagactcagaatcycaggacccacattcatgctaaaggatagagcatatattacaatccattcttgtatattactatcttatgaaaatttttgcttttaccacattatcactttcatttttttcaacctagagcagtctggtcttattccccatgctcaagaaaaactgtccccag

SEQ ID NO: 463478 - DNA, 598 bp, Homo sapiens
cttaaaattcaacttaagtttatctatagtatatttttaaagcaatgaaagtacataaaacattttagaaagattcacatcaagaagttgtaattcatttctaaagagcttttggcctattaaagattagttttacaatgcctgaacaacttacccaagttagggttgtcagttcagcaaataaaaaacagaactaccagttaattttaaatttcaactaacagtatttttagtacaattatgtcacatgtggtatttttaatatacattacaaaatccactgtttatttgaaattcagatttaactgggcatcctggttttatctgacaactctaacccaagtgaaasctttcactgtcatgatagctaatttatgcatctctaatgtggtatctataaattagggaaataaatctaagtatacaaactcaacgtctatgaaatatatttctttgtaataaatcttaatttctgcaatgatattttcttagtgcaggcagaataattaatttaagtcaatttagggttttctccacttccctcagttgcattaaagttctggggtttgatataatgcaaagacacggtaaggaggtc

SEQ ID NO: 463479 - DNA, 586 bp, Homo sapiens
tagttcagtcttgttaattaatataaataaaaatacaaagccatttccatatcttttaagtctcttgcaatctataagtttctctggtgtcttgcatttgtttttttwtaaaaaaaaacatattgaagaccccaaaacattttgacctgcagagttttccgtggtttggattttgtggaatgaatattcttggtgcacttctacttgttattctgccctctgtatttcctgcaaactaacaggcccagaagcatatcaagttcatgtctgatccctttggcaagactaaaggaagtagtgtgttctttcattaataggtcaagtagttccacgttttatgattctaaaactattggtgattactcttagaactgttaattatttggagttgtaatttagtcacattctaattatataaattctttctaaatttagtaattgaaaaacaattataaatacatgatttaccttatctactatttggttaccaagtaatactattcctataagaaaagcaggattatttatcttgtttgccagtttttaaggttatcatccactgtatattttgcctatatttagtctt

SEQ ID NO: 463480 - DNA, 586 bp, Homo sapiens
tagttcagtcttgttaattaatataaataaaaatacaaagccatttccatatcttttaagtctcttgcaatctataagtttctctggtgtcttgcatttgttttttttwaaaaaaaaacatattgaagaccccaaaacattttgacctgcagagttttccgtggtttggattttgtggaatgaatattcttggtgcacttctacttgttattctgccctctgtatttcctgcaaactaacaggcccagaagcatatcaagttcatgtctgatccctttggcaagactaaaggaagtagtgtgttctttcattaataggtcaagtagttccacgttttatgattctaaaactattggtgattactcttagaactgttaattatttggagttgtaatttagtcacattctaattatataaattctttctaaatttagtaattgaaaaacaattataaatacatgatttaccttatctactatttggttaccaagtaatactattcctataagaaaagcaggattatttatcttgtttgccagtttttaaggttatcatccactgtatattttgcctatatttagtctt

SEQ ID NO: 463481 - DNA, 595 bp, Homo sapiens
aattcctctacaaacttccctggagcctccataaagcagccaaactttctcttgcataaagtcaaattggacatgggaaaaggcatatatctactctgattgttcctccatctctgtcagttacctcccacaatggatacaggtttgattttgggggctgatatggggccccactcctagtggcactggttgggcttgcttctttgggcagtgaaggacgtaggctagactttgttggataaaggggaaggatgcctggtgaccttggggtggaatcttgcactataaaactggcagggccctactcagaaccaggggactaagaggctctgaggggggtgcaggccttctacaggtagcagctaggaggggttcatctaggatatctggcagttatsctaggagcatcatgagccagacacattctatagctgtccctgaggtcagtatcctgctagagggccataaaagcctacacataaggaatatctccctatttttctttctttttacagaacaagcctaattgtaaagtaacattataaggtaaacaaccacatccaggccaaatctgttggttcaccaatttgtgttg

SEQ ID NO: 463482 - DNA, 579 bp, Homo sapiens
ttacagtgatgttcataaactttggctagttaataaatgttagcaagtaatattcctgtaaattaatagaaagtcaaacaagtgttagctcatcgctcatgaaaatcttccatttcagtagttctcaaaactacttctacattaaaaattatctggtgagttttaagaaatatgacatgcaaagtccaccctaaaccaattaatttcaaatccctgagaataaggcctgaacattggtattacatgaaagctccctgggtgttttggatgtgcagccacagtgaaggactgtgtagttttctcccctctatttttcattcttttcttgtctgcctttttctcttcttagtccagacttggctgaaagattacctttctcagtaatagacagagttaattggaagcctctgtttttattgaagctgccaggctatatttcctgtggaaaagcaaattggcttgttcctgacagccactgccttacctgtttctctgaatcaacagataaattaaggtacaaacatattcaaacagatagcaatagmgttttctctgcaggctcaaagtggttttaagtta

SEQ ID NO: 463483 - DNA, 592 bp, Homo sapiens
aataaaataagattgtttataagttgataattgttgaagctgtatacatgtagatttgttgtattattctgtctacacattttgtggtagaaaatacataaaaatttcccatcttaactttttttttttttctgagacagggtctccctctgtcacccaagctggagcgcagtggcatgatctcaactcattgtaacttccgcctcctgagactacaggtgcatsccactgcacctggctaatttttgtattttttgtagacatgaggcttcaccacgttgcccaggctggtcttgaactcctaagctcaagcaatctgcctgcctcagcctcccaaaatactaggattacaggcatgagccaccacactcagcccatattaaccatttttaagtgtacagttcagaagtgttaagtatattcacactgctgtgaaacatctccagaaccttctcatcttgcaaaactgaaactctatacccattaaacaacaacaacccatttctccccttcattccctggtaaccaccattctacctctgtttctatgaatttataatttttgatactgacaccaacaacctaactgtcc

SEQ ID NO: 463484 - DNA, 592 bp, Homo sapiens
aataaaataagattgtttataagttgataattgttgaagctgtatacatgtagatttgttgtattattctgtctacacattttgtggtagaaaatacataaaaatttcccatcttaactttttttttttttctgagacagggtctccctctgtcacccaagctggagcgcagtggcatgatctcaactcattgtaacttccgcctcctgagactacaggtgcatgccactgcacctggctaatttttgtattttttgtagacatgaggcttcaccaygttgcccaggctggtcttgaactcctaagctcaagcaatctgcctgcctcagcctcccaaaatactaggattacaggcatgagccaccacactcagcccatattaaccatttttaagtgtacagttcagaagtgttaagtatattcacactgctgtgaaacatctccagaaccttctcatcttgcaaaactgaaactctatacccattaaacaacaacaacccatttctccccttcattccctggtaaccaccattctacctctgtttctatgaatttataatttttgatactgacaccaacaacctaactgtcc

SEQ ID NO: 463485 - DNA, 529 bp, Homo sapiens
gatacgctaactaagaccagcaaaaaagtcagcaaaagtgagaagaatcaaacacaggwggtagaagagggagtcgacgagtaataattatggcctcagatccaactgcagcatcaggatattggcccatcccactaacctccctgttataggtcttcttgggtttgcaagtggccaccaatttgaagactcagtgacagaacagaaaggaattcttctggggcacaagtggatcagaaggctgcacggtggattccaacaaagtccagggccctcaccatgtttcttcctgtctgatggtttcttgcctctctctgcctgagaacatattcttgctgcagagtatgctccacttgcatacaggggaggcctgcagtgatggagaattaatatccccagaaatgaccctcgaccaatgagaaatgggaactatggatcaataccccaactatctcactgctcagtgcggggattgggaagcatggtccacacagtctcttacaggactgcccagtagcccacagcacag

SEQ ID NO: 463486 - DNA, 551 bp, Homo sapiens
actctaatggcaatgagcatacctaacacacagacattggtttctagataccgttctttactaataaatgcaagggcttccgagtctaatcatgaggaaactgcatgcccaaattgagagagattgctacaaaataactggcctatactsttcaaaagtgtcaaggtcatcaaagtcaaggaaagactgaggaacttgttcaagtgtgaaataggtgaaagaaacaggacaactaaatacaacatgtcgttttactgtaaggaacatttttggagtaatcagtgaagcttgaatgaggtctgaggaatagagggcaagtagtaatatctcaaccataatttcctgatttggggtaattttcaagaatatctttgtgggaaatatacactaaattatttggcgtaatggggcagcatttctgcaagttactctaaaaaattcaagggaaaatattctttttttctttttctttttctttttttttttttttgagacagtcccgctctgtcacccagactagagtgcagtggtgcaatctcagctcactgcaa

SEQ ID NO: 463487 - DNA, 504 bp, Homo sapiens
tcttgttgctgcaaaagtttaaaaaagaagaaaaatgaaacatcagaattatatttattasttgggaacattagttattgacctattgagaaactgtaaacctacctcttgtcttgaattttaggatgtgaaataggttctgtgattcatgttaaaataattcgtttacactaagtggtgaaccactggtaaatttcttcagatgagtgaaccaaattaagagaaatacagaataatgacaggaaaacatatgttacagaagattgtgacactataccatttacattatttacgttcttgaaaattacagtatatggtatatttctaaaaaaacactgctatactctattataatcatgataaaagttacttatactttatttaggtcttgtttgaagttcattgtagtatactttgaattataaaatttacctatttaatcctgtagttttcaggctttgctgctcttcaaagagaaagtctagttttgagttgaaatggcac

SEQ ID NO: 463488 - DNA, 629 bp, Homo sapiens
ttctgtaccatttgtaggattggaagcctactgagtacactgatctttatatcatttctcctgtgtagtgttggtggcttacgtaatcattctcctgtgccactagaggaacattgtattcttttgacctaaccaaaattttgttccataaagtcactttcacttgaatttagcatggtttctgtcttcaaattagagaagaaatacakcatccattcccaaacagtggaatcagtcagagctgccaagaattatctttctggagccagttcctgtaacctagtctatagaccaagaacagtgttaagcaaatattattttcagactcataagctatttcttgtgctgtttaagaaaggaaaatgtggatatcttctggaacatctaacttgcaaaattttactttttcagttccccagaagtattgtacgttgtgcactaaacttgcaaatagctatactcagagaagtatttgttccttttagtttttgtcttttaatttaaaaaaatcagtaattaatttgctgttacctttctagacatttgcacgaggcagaaataagtctatgggttttttttaatcactctttgctaaagaataaaagtaattataattcctatatactcta

SEQ ID NO: 463489 - DNA, 608 bp, Homo sapiens
ttttttaaagccacacttccaaagtcttgttattttatttctatactttcagtttgatttgtataggaagttctgtcggcatttgttgccatgctgtaatcaaaatgaggtctgtaaaagtggaaattatattagttatcaattcaaatagaaaatcgtttgttgtatattcagagatttataatactgactaaatgacatttcatcaaacatctcaggagtcagaaaaaaaatctttatggcataattttcttcttttcaaaatgatatctaaaccaagggcgtaatctttaaggtgaatttaaaatagccgcaacacaaatctagtttactcaattctgccctctaaaactccttttagttgcaggttcttttgcattatttcaaactctaatcctctgagcgggtaattaacrgaccagaaaagccatttgtggaaaagaagagccataagggtgaaaatatttcttcactgaatgatctttaagaagtaaataattacaaacggaaaggatttgggatgaccaatctaaaactgaggataattagaaggaatagagtatgaaaatcgaaatgcttggcatgtacaacaattctcatatcacaac

SEQ ID NO: 463490 - DNA, 571 bp, Homo sapiens
ctccagtcatgctccaaaaaccattgggaatcttcagcagatcattagatatgctacaataaagctttggtgcattttcttttcttccttaaattacttcttcactgtcccatcgttccccgtcaccgatggcactgcattattattgcagctcccctgaaacttgcactagagctatgtctccaggccacaggatgccattttcaattgaagcttcttcttgaaaatataaattaagaaaatttcattatctcctgccaggggccattattcaccacagttctaaggaagattaaaaatgcaaaatctaccgccttgaacaaatattccagcattcaacagaaaagctcagtatatcatgacagaaactaaaaaattaaagtttgcttaaatttgaaattatacaattactaattaaagaattagttcaatcctttattgagtctgcatcttcgatgaagattgcttcatcaatttaaatattttagtggctatttattcattaaacttcaattacaaaatactagcaatggtaagactytttttttttcctgagttactttctgtctgt

SEQ ID NO: 463491 - DNA, 582 bp, Homo sapiens
atttggcatgtgatagagaatactgattatattaattttattgtatttttgtactcttctactgatagaattttggctggtttcacagatgtctgtccttttgattttcataaatataataacgtagggacttttttgttgtaaagagcaatgttttccttatgtgattcattaatcatcaaaggtttataatattttaaatctttacttttgagtgttacttacttttcaacagaattataaaatatatacaatatataatttatacttattttccttcaatatgtgatatcaattaaatctcaagtaaataaagactttgatattctattccctaactacattgtaattttagtttatcaaataacaaaattcagccattttcaatgaatggaaagcaaaatacactttctacatcttctattgaacttgttttaagttcttttttaaataaacattttaaaatgtattatttccatcctttacatttaatttakttcagtaaaattatcctttccttaggggaaaaaagcatacagctgtatataaattgtagtttgagtagtcacaacgctaatgatt

SEQ ID NO: 463492 - DNA, 513 bp, Homo sapiens
tatattatggtagtaataatctaggtgtttgactggaagtgaagtggattactgtaaatgaaattttaaaatgtcctttccattttacagataacacaaaatgacttttttcatgtctctggcgataaggataaatttgccacacatttaaatggtgccttcacccttcccatcctggctcatgaattaataattcagtgacattaatacaagaagataaatgataaaaaggttaaggcgaagggccaaccatacacacatacttcttttagcacagttartacttctctgccaaattatagctaaatctttttaacagttttcagtagcatttttacagtctaagttgcagcttatgcacacacaatttcacacaattcaggcttaataaatctcctgctggtaccagtcattctaggggattaaagtgcaacatctgttaatattaataatgttttatatagtcatatgtattaaagaagcctctactccattattagtctcctgaaaaac

SEQ ID NO: 463493 - DNA, 471 bp, Homo sapiens
tattcaacatgtgttccttgcttccaaaataatattagtaccgctacatacaatctttagttagtgttgcttatggagaggtatttattaacaacaaaagggaataaggtgatacaatttttataatgattatattgtgtcttccatcaatataatggatactttatgatgaatatattggtgcctcaagttgaattacaatgcctaacatacaagtagaattttccacgatctttttgtaggaacgccaggtaatccttttgtctataaagttgctgtagacttttaaaatcctaccttaaggataattaaaagcaaaactaggccgggtgcagtagctcacacctgtaatcccagcactttggcaggccaaggcgggtggmtcacgaggtcaggagttcaagaccagcctggccaatatggtgaaaccccatctctactaaaaatacaaaaattagccgggcattaagg

SEQ ID NO: 463494 - DNA, 613 bp, Homo sapiens
cccacacaaacaaaagctgagggatttcaccaatgccaggcctatcctacaagaaatgctaaaggaagttcttcaatcagaaagaaaaggacattaatgagcaataaataatcacagaaagcaataaataatcactgataatagtaagtacacagaaaaacacagaatattataacatggtaactgtagtgtgtaaactcctcttatcctaagtagaaaaactaaacaatgaaccaataaaaaataataactacaacaacttttcaagacatagtacaataagacataaatagaaacaacaaaaagctaagaagcagagagatgaagttaaggtgtagagtttttattggttttctttttgctcctttgtttgtttatgcaaatagtgttaaggtaggaatgttaattaggtcaaccattgtgcaaagcagtgygacaattcctcaaagagctaaaagcagaactatcattcaatccagcaatcccattactgggtatatacccagaggaatatgaatcattctaccataaacacacatgcatgcaaatgttcattgcagcattattcacaatagcaaggacatggaatcaacctaaatgcccatcaatgaca

SEQ ID NO: 463495 - DNA, 563 bp, Homo sapiens
gaaattataatccatcaagctacagtacattactaaaaatcatagagaatgttctgatcaagagtcagcaaattttttttttctgtaacaggtcagactgtaattagtttaggctttacaggcaatatggtctctgttgcagtgaattaactctgccactgtagtgcaaaagtagccataaagaatatataagataataactgtggctgtgttccaataaaactttatttacaaacacagatggcaaaagcaactactcatcaacaaaaatctgcartgaggaggtacgtcaaagagacatgggagccaactgaaagagctccacatagctaaatctagaacaatttgaacaacaaaataaagtaatattataacccaaaatataaaataaatatccatattcactattaataagcaattgatcaataaatggggagaaaagacaaatatctcatgcagaatacaaataattgatgtagatattccatcctcatggaggtggagcataactctccactctttaagtgtgggctgcacatagtagtgacttccttccaaaaact

SEQ ID NO: 463496 - DNA, 579 bp, Homo sapiens
tatgtcgttagctggttgttttgtcagcttgattgtgtgattgctttatagtgcctgtggcatatgtgcttaagtgtgtttatgtggtagcaggtgttgttattttgattccatgtttagcatgcccttaaggacctcttgtaaggctggtctaattgaaatgayttctctcagtgtttgcttgtctgagaaggattttatttctatttcacatttcaagcttagtttggcaggatatgaaatcttacttggaatttcttttctttaggaacactaaacagaggtcccctgatttcttctggcttttaaggtttctgctgagaagtctcctgttagcctgatggggtttcctctgtaagtgacttgactcttctctctagctgcctttaagattttttattttgtagtgaatctgatgactatgtgccttagggatagtcatattgtatagtatctagccagggtcctttgtatttcttggatttgcataccaacttctccaagaagattagggaaattttcgtggactgtattctcaaatatattttccaagttgtttatctctctcctctctcagga

SEQ ID NO: 463497 - DNA, 553 bp, Homo sapiens
tcctgcctcttccctagggaagggcacacccacacacagagtgcctgaatgcaacttaataatcccaccactcatacgcacagtgtatgtattcagtagcagagagagatgtccttgtatttctttcctttctttctctcctctgtccctctcttccctgccacctctttccccaatcttcatccttctttcctttcacaacacaagatcttttctgcttctggtttctgatggccttcccaatgccagggtgccaaagtcttcmctaatgttctcttctgccctcagtggatggcccaggtgggatggttgcgtgcacccctttttccagggccacatttctgccctgcttagctgatatttccagtcattcattcaacaagcatgggctgaacccctctcaggccaggccctggctaaatactggagactctgggagaaagaagttgtggttcctacctcccaaagatacatagttagttgagaagacagccacaaaaatcagtgatgaaaatgcagtggtgtcagtgctacgtgaagaaagcacaggggc

SEQ ID NO: 463498 - DNA, 646 bp, Homo sapiens
ccagagggagggctgtgatgctgagcacatagcaaggggcggagcctagggctctgggggcaagggtgatgacgtgcatgctcaggccatggtagggccaagggaaggagaaccccaaatggtggtcttacagctctgtagggcctatgggcgtagaagttacagggtacagtgggaagagttaacaggctagccacctgaagacgtagcctatttgtcacctctctgtacctcttccttttctttttttaaaatgaggcctcactctgtcaccagggctggagtgtagtagcacaatcacagctcactgcagcctcgacctcccgggctcaagcaatcctcccacctcagcctccagagtagctgggactacaggcgtgcaccaccatgtccagctaatttttgtattttttatattttgtagagataggtgtctccctatattgcccaggctggtctcaaactccttggctcaggcaatccttctgcctcagccttccaaattgctggtgtgagccaccaccgcccctggtcctggctctatacttcttactcattaatgacagcaatatttaagatactgaatgtaattattaataaaatatagcagacactaatagttawacagtacttactatgtgccctg

SEQ ID NO: 463499 - DNA, 590 bp, Homo sapiens
cccctgtcctctgctctccagcccagcaggaggcagcctaggtaagggtaagcctgttgctctcttgctctggttacctggagaatgtgcaaggctaggctgggccattcatcactgtcaggggcacaggaattcgagggaagggagcagcacctgtcctcatctgtcactgaccccagcctagctcctcatctcagagggccagtgggcctgggggagggcgatgggatgcatctttgccaggtcctcctcctggttcccgagtgaacacactagacacgtcaggccccacaaacaccgggaataaagttcctatggaggaacaccccaagccgagagtgcatttgggcaaccgaggagcagagggaaggacaagctgcttcctcagtgctccagccccctagctctgagccctctctggactccgagctagcatcctgcmtcccacccaaccatggaggttaaagggtcaggttctgggctttcttggctgataaccccaggcctaccaggagagagaccacgagcctcttggggcatcccgaggacagaataggggctggacccagctggccagataaccactggca

SEQ ID NO: 463500 - DNA, 583 bp, Homo sapiens
gcagtgtacagggagcactgtatttctcagatttccttcagtgtactggaccagagatcaactccccaaccttttgcgcaaatcccttgcatagcctgtcattctctatcttttgcttattgtgcacacagggatgttgtgagttttgaagatggtatagatatctgagtgctgtgccaagtgtatttcagagacatctactcatctcttggctgagaggataccagggtcttaccacatctgagagcttagttcattgcagtcactttagagggtatctgaagaaaaagcactgygtctagaagtatcaaagatgggttcatgtgtgtgctgaccagaggaggcagtggagaatcatatgcctgatgcctggactcagctgcttccatggaaagatctggatagaggtaatgcctgccgaaggccaggctggtctgcacagcacaagactagggtacgttagatccctttcccccaaagttctgatatttgcctattgtcttggagatcttggcacaaagcaagatcataacttacatctctgcaagttcttttatatgtaggtcctccccacaagatttta

SEQ ID NO: 463501 - DNA, 631 bp, Homo sapiens
taattcttataacttaaaccaacaatttccatcccacttcaccttaccctcaattactgctatccagaaacaaccatgtaggacacattttggtctttcttttggtagtcaccttcatgtttttaaataacatttttgtaatgttactttcttatatttttacatgttggttatcktctattattgtcttcctgctaggtaagatgaggcttccgttctcttatacctcccaattcttctcctattctcacttcatcttcctaatatagttgtatcatgatttttgatcagttgaatattcattgaatttttaagactgtgtaaatatttttcacaacgagacatgtagtgaactacaattatacatttttttgtaaaccctttttttcatctgggattaataattgtcagtttcttgttcacttaattttctgtatatctatcattaattcactgatagagcataaaactcctttcaatgtgttcaaacatattcttttttcttttcttccttttttatttctcctgctctttcttcttttccctcctcctcctccctactctatttcttccttctgcacagacacgcgcgcgcgcgcgcacacacacacacacacacacacacacacac

SEQ ID NO: 463502 - DNA, 515 bp, Homo sapiens
aactcctgtgtggccactatccactacagtttctagatgttttgagttttttaaaggagagagaataatggaaaagagaaacatagccaatagccattaaaatttaaaaaacttaatgaatttttatcatcttaataaatatatatcaagaaaacctcactttattacaacacattcatatacaagcatctattagctaagttttgaacatcaaatgtttatcaaatattgaaaataaaggacaaaacattactagactatttaactataacacaagaaaatgttttaaaaattggtctttgtggacaattgtccaaatgatcctactcatacactgtatgaatgagacctatatttaatattaatagcaataataaaaaaagctttatcttggagaaactgggagggcttacttatttcctccgtttggcatttggtttctgtgaagtattatttgaacaggyccaagtcaattagtaaacttggaaactggaatacagtttagcaggaagagt

SEQ ID NO: 463503 - DNA, 563 bp, Homo sapiens
catctgatctttgacaaagtcaacaaaaatacgcaatgggaaaagggctccttattcaataaatggtgctgggatagctggcaagccacatatagaagaataaaactggacccctcctctcaccatataaaaaattaactcaagctggattaaagatagaaatgtaagaactcaaattacaagaatcctagaagacaacctagaaacaccattctggacataggtcttgggaaataatttatgactaagtcctcaaatcaattgcaacaaaaacaaaaattgacaagtgggacctagttaaactaaagagcttctgcacagcaaaagaaactatcaacagagtaaaaagacaacatacaatggtagaaaatatcacaaactrtgcctctgacaaaggtctaatatcaagcatctataaggaacttaattcaacaagcaaaaagaaaatagccccattaaaaagtgcgcacaagacatgaacagacacctctaaaaagaacacgtacaagtgggcaacaaatatatgaaaaaatgttcagcatcactgaacaccagagcaatgc

SEQ ID NO: 463504 - DNA, 605 bp, Homo sapiens
ttaattcaacaagcaaaaagaaaatagccccattaaaaagtgcgcacaagacatgaacagacacctctaaaaagaacacrtacaagtgggcaacaaatatatgaaaaaatgttcagcatcactgaacaccagagcaatgcaaatcaaaatcacaatgagataacctctttacaccacttagagtagctattactaaaaaatcaaaaaacaacagatgctggcaaggccgcagagaaaagggaatgcttatacactgttagtggaaatgtaaatttgttcagccactatggaaagatgtttggagacttctcaaagaacttaaaacataattaccattcaactcagcaatcccattactgggtatatatccaaaagaaaataaattgttctaccaaaaagatgtatgcacgtgtatgttgatcgcagcactattcataatagcaaagacatggaatcaacctaggttcccatcaacagtggattggataaagaaaacgtggtacatatacacaatggaataccatgctgccataaaaaaataaaattacctcttttgcagcaacatggatgcagctggaggccattatcctaagcgaattaacaca

SEQ ID NO: 463505 - DNA, 487 bp, Homo sapiens
tgatcgcagcactattcataatagcaaagacatggaatcaacctaggttcccatcaacagtggattggataaagaaaacgtggtacatatacacaatggaataccatgctgccataaaaaaataaaattacctcttttgcagcaacatggatgcagctggaggccattatcctaagcgaattaacacaggaataggaaacctaataccatatgttctcactaataagtgggagctaaacattgggtacacattgacataacgatgggaacaatagacactggggactaatagaagagggaaggaggagaggrgaaagggttgaaaaactaactgttgggtactatattcaggacctgagtgatgggatcagttgtaccccaaacctcaacaacacacagtacaccaatgtaacaaatctgcacatgtacccctgaggctaaaataaaagttgaaattattttcttaaaaatggaaaggctaaattcc

SEQ ID NO: 463506 - DNA, 552 bp, Homo sapiens
tcctttttctacactttgtgtgtgtgtatatatattctaacatatacatatatataatgttaaaaactcaatcatcagaggaggattaaacagctgataagggataatagtagtggtaatagcattcaaaaacgtttgctctgttcacttactgtcaattacctcatatttctttcatttattgtacttatcacaatctgtagttattttgtttattcatttacttgtttattttctttctcyccctctccaatgtaaggtcctcaaatcatgtctttctgttcattgttttattccctgcatcttgcagaattcttgacatggtaggcactcatcatatacttgttgattaagtacagtaatgagttaagcaaggtaagaaagagctccagcgtcactctagggcctctatgtgttaaaccatgtgatgagatattttcatatgtatataatatgtacacatatataggcaaaccctgcagaatgtctccctaatgaatatattcctaatggaatggctttttttattctcaaaattttgtaaaatgtact

SEQ ID NO: 463507 - DNA, 657 bp, Homo sapiens
atctttttaaatataggtgatggaacagttgcatatccacaggttaaaaaaaattaacttacctaaacaccccacatacatgaaaaaaaagccctcaaaattggtcatagaatcacatgtaagatgtaaaaccataaagcttttaaaagaaaacataggagaaaatctatggagcttaatgcttggttatgaggttttagacatgacacaaaaagcccaatccataaaaagtaattgacaaatttaacttcatcaaagtcttaaaatttgctctgcaaaagaccctgttaagaaaataaaaagacaagcaataaccttamagaatgtatttgcagactacacataataaataaaatataaaactctgaaaattaacagtaaaagaaaaaaattatccctgtttacagacagcataatcttatatttagaaaaacctagactccactgaaagctgttagaattggagatcctagcccaaacaatcaggcaagacaaggaaataaaaggtgtctaaataggaaaagagaaagtcaaattagctctctaagctgacaatgtgattctatgcgcctagaaaaccctaatgattccaccaaaagacttccagatttaataaacaacttcagcaaagtctcaaaacacaatcccattcatgac

SEQ ID NO: 463508 - DNA, 600 bp, Homo sapiens
tcaataattcagtaatggtgcttggatagctggctagccatatgcagaagaatgaaatggacccctgcccttcaccatgtataaaaattgactcaagttcgattagagatttaaatgtaagatccaaaactttaagaatcctagaagagctgggcgcagcggctcacacctgtaatcccagcactttgggaggctgaggtgggcggatcatgaggtcaggagtttgagaccagcctgacccacatggtgaaatttggtcaccagtaaaaatacaaaaattagccaggtgtggtggcatgcaccagtaatccgaactactcagtaggttgaggcaggaaaacagcttgaacccagaaggtggaggttacagtgatctaagatcacgccaatgctctccaagcctgggcaacagagtgagactccatctcaaaaaataaaaagaaaaaaggaaagaaaggaaaaagaatcctagaagaaarcctagaaaacaccattctcaacatcaccttggaaaataatttatgactaagttctcaaaagcaattgaaaaaaacaaaaaccaaaaattggaaagtgggacttaattaaacttctgcacca

SEQ ID NO: 463509 - DNA, 601 bp, Homo sapiens
atgactatattgctatacagtgtgacactattattgttggtaagattcagccaccttattaaataagtcataggatggtactgatactgatgatcaaatgtattgagagattgagttaagcctcctcaggatgtattaccaatggaaaatgactagcctaaggaagaattggatttagttaaccataaactaatttctaggctaaataattctgcagctgtaagattaaagtggtagatcaaggggagaaacaagtaacaaatcagtacaaaaatatgaaaatgtatgtaatggctttatgagatagattagttgtttttaaaatctttatccctaccccacactagctcctccaaatgtttttgagcatagcacaaccatrgtatgctgggccttccactgctatattttatctactataggtagagatctttcttcatactgatactatttctagatctgttatataaatgctatactaaatgtagatgctcagaaatatagaattgttttgctgaaagacagcctatgctaaggggtatggggtggaactgtgtaataaagggttaactcaaaaaatttggggttgttctaaccctgc

SEQ ID NO: 463510 - DNA, 568 bp, Homo sapiens
aaatggaaaatgagatcttgatgaccaggcatctataatcctctagctagaattgaaattggggagaataaattttgggtcataatccccttggatttcagtttgcaaggtaatatacccctgttttctttaatctcatatgctttcatgttggtttttaaaaaatcttatctgaaggatcaatggaaggtttttcacaaaactaggtcacaaatgctacctgtcagacaattgtaagatgacatcgattttaagatgcatccagattgcagagacgttaaaatgaggaaaagatatgcattttagaataaatgattagagcaattctcagactttacttcctgagaatttggtaatgggagaaagtttatattcaaatgcagggcacattgttgaaaytggtttttggagcatccttctgattcatttgaactcatcacagaacctctgataggctgtaccagacaatgaggctgaaatgaaactggctgaattagaaattggaaatagaatgtgggattaattttcagctttggtttggtggcagtattatcaggattaggttcag

SEQ ID NO: 463511 - DNA, 528 bp, Homo sapiens
ttcctgaagttgcaattgtttttttatttatgctttctatttctctagagacttctttgtccatatcctgtattattttttaaatttctttcttttttttgtttgagacagagtttgctcttgttgcccaggctggagttcaatggcatgatctcgactcactgcaacctctgcctcctgggttcaagtgattttcctgcctcagcctctggagtagctgggattacaggcctgtgccaccacacctggcyaattttgtatttttagtagagacagggtttctccatgttggtcacgctggtctcgaactcccgacctcagctgacctgcccacctcagcctcccaaactgctgggattacaggcacgagccaccacacctggccttttaaaaatttctttaagttggttttcacctttctctggtgcctccttgagtagctgaataattgaccttctgaattctttctctggcaattcagagatttcttcttggtttggatttattggtggtgagctagtgtgatct

SEQ ID NO: 463512 - DNA, 540 bp, Homo sapiens
ttatgtaaatctaaagctgttctaaaaagaaccatctactaatttaaaaagaattcctattgtcataaatgtcctgaagttattgcgtgcattctcattacaatgcaagcatggtaaatactttattttcttcctttgtttcaggtctattttgtgtttgacatgttttggtgctctcaggcagtacatctcaaattttcctgtgtctacaagtcaactgggggatcttgctaagatacaggttgtgatctaccaggtctgggggaaagcctgagatttttacatttttaacaagctccctggtgattcccatggagctggtacatggtccacacttggaatagcaggacctacaagcagacaaacaagactggagacccagactccaccctttgtactctgttttctttctttttcttttattgtagatacagggtcttactatgttggccaggctggcctcgaactcctggcctcaarcaatcctcccaccttggcctcccaaagtgctgggattacaggtgtgagttaccatgcctg

SEQ ID NO: 463513 - DNA, 614 bp, Homo sapiens
tagtttaggcatttataggcgacttgtgttaaccagctcaattagactctttaccttgttgcaaggacagagggctttctgtatcctgtgatccttggatcacacatgggcttggaaaatgaatgcaaggttttactgagtggaagtagctctcagcagatgtggaaaccagaagggagatggttttcccctggttcaggccgcttggcaccctgcgctctcctctgactgcccccaccaaactccatgtagttctgctgttttggtggcctgccagcatgctattgcctgttggtgcattcctctcaacgtccagccaccygtgtgttcctcccctgatacgttcctccgctgacatgttcctccgctgacatgttcctccgctgatatgttcctccgctgatatgctcctctcaaggtccagctgcctgtgtgttcttccgctgatctgctcctcttgacgtgcagccgctgtgtgtctgcctgctagcgtcccgggtttttataggcacaagatgggggcatggcaggcgagggtggtcttgggaaatgcaacatttgggcagcaaatgcctgtcctcacctagctttatgggagtggagccctaccgggg

SEQ ID NO: 463514 - DNA, 614 bp, Homo sapiens
tagtttaggcatttataggcgacttgtgttaaccagctcaattagactctttaccttgttgcaaggacagagggctttctgtatcctgtgatccttggatcacacatgggcttggaaaatgaatgcaaggttttactgagtggaagtagctctcagcagatgtggaaaccagaagggagatggttttcccctggttcaggccgcttggcaccctgcgctctcctctgactgcccccaccaaactccatgtagttctgctgttttggtggcctgccagcatgctattgcctgttggtgcattcctctcaacgtccagccacctstgtgttcctcccctgatacgttcctccgctgacatgttcctccgctgacatgttcctccgctgatatgttcctccgctgatatgctcctctcaaggtccagctgcctgtgtgttcttccgctgatctgctcctcttgacgtgcagccgctgtgtgtctgcctgctagcgtcccgggtttttataggcacaagatgggggcatggcaggcgagggtggtcttgggaaatgcaacatttgggcagcaaatgcctgtcctcacctagctttatgggagtggagccctaccgggg

SEQ ID NO: 463515 - DNA, 579 bp, Homo sapiens
acatacaaactaccaagactgaatcacaaataaatagaaaatctgaacagaccaataatgaacaaggagattgaatcagtaatgaaaaaacatccaaacaaagaaaagtcctggacatgatggctttactgttgagtttcatcaaacacttaaaaacctgaagaagaggaaacacttccaaattcattttatgaggccgtcattaccatagtagcaaagccagacaaagacactaaaagcaaaggaaattatatwccaatacccctgatgagcatagaagaaaaatcctcgaaaaatactactaaaccaaattcagtagcacattaaagagattgtttaccatgatcaagtgggatttacaccagggatacaatgatactttaacatacacaaatctataaatttgatacaccacataaacaaaatgaaggagaaaccccatatgatcatcacaggaaatacagaaagagcatttgacaaaatttagcaccctttcatgaaaatactctccacaaattcgctatacagggaatgtacttcagcacaataaaggtcatatatgacaaacccacagctagc

SEQ ID NO: 463516 - DNA, 579 bp, Homo sapiens
acatacaaactaccaagactgaatcacaaataaatagaaaatctgaacagaccaataatgaacaaggagattgaatcagtaatgaaaaaacatccaaacaaagaaaagtcctggacatgatggctttactgttgagtttcatcaaacacttaaaaacctgaagaagaggaaacacttccaaattcattttatgaggccgtcattaccatagtagcaaagccagacaaagacactaaaagcaaaggaaattatataccaatacccctgatgagcatagaagaaaaatcctygaaaaatactactaaaccaaattcagtagcacattaaagagattgtttaccatgatcaagtgggatttacaccagggatacaatgatactttaacatacacaaatctataaatttgatacaccacataaacaaaatgaaggagaaaccccatatgatcatcacaggaaatacagaaagagcatttgacaaaatttagcaccctttcatgaaaatactctccacaaattcgctatacagggaatgtacttcagcacaataaaggtcatatatgacaaacccacagctagc

SEQ ID NO: 463517 - DNA, 546 bp, Homo sapiens
gagtgtttgtgtccccttgaaaattcatgttgaaatgtaatccccaatgcaaaagtattaagaggtggggactttaggcagtgattaggtcatgatggctcctccttcatgaatgggattaaagcccttataaaagagacttcatatagcatttagctctttttgcccttctgaccctccccatgtgaagacacagcacccattccccaccaccccctggagaacagagcaatgaggcaccatcttggtagcagagaccaggctctcagcagacactgaacctgtaggcaccttgatcttgaacttagcattcgtaagtgagaaataaatttctattgtttataaattacctggttgctggtattttattgtagcagcacaaatggactaagacaaatgcacaatggggaaaaaacaatgtcttcataaatgatgttgggactagatatccacatgcagaagaatcaaattagacccttatctcacaccacrtatgaaaatcaactcaaaatggattgaagtcttaaatgtaagacctgaaaaatt

SEQ ID NO: 463518 - DNA, 593 bp, Homo sapiens
ttgcttccctggatctgattcttgattaccttgattttctctttttccactcaaatcaactcccacagcactgaggttcttgtggaccttggacctctcaaggatttgagcatggggcagggacattcctggtcctgcaggctctcagcttgcttccctggcctgtcccgcaatccctacccatccaccaggaggcctggcttccacttccttcagcttctccctgcccaaggcctgcccttgtgccggcagacatctcccacctccttcccagtcttccaggatctccttaatccaatttgtgtgtctatctcttagttgcccaggcctgtaaaacaaactcccacaaactcggtggtttaaaataacacacatttattatcttacagctctsgaggtcagaaatccaaaaatcagttttgctgtgtgcggatcaaggtataggcagggccgcactccctctggagtttgtgattacatttagggcctacctggataatccaggataatctccctatcccaaattccttgatttgatcatatctgcaaagtccttctgtcacagaaggttaccttcacaggttgcagggatt

SEQ ID NO: 463519 - DNA, 442 bp, Homo sapiens
gtatggattatcagttttgaaacttctttatttgtactacaattgaacaaataagtaaaaatgttgtaaatttaaaaattcctgtcagataaaagagttataaattgaaaaagagaaggcttgagaattgtgaaacctgaatatctgagacaggtctcagttaatttagaaagtttattttgccaagattgatgacacacatccacgacacagcctcaggaggccctgatgacatcaggcyaaggtggtcagagcacagtttggttttatacattttagggagacataagacatcaatcaacataggtaagatgaacattggtttggtccagaagggtgggactacccaaagaaaaggcaggacaatttgaagtggggagggggcttccaggtcataggtagataacagacagatggtggcattcttttgagtttcgcatta

SEQ ID NO: 463520 - DNA, 572 bp, Homo sapiens
cctcacaggctcattctattctgtcatcatttcataacctcttccatgtaggttataagccactagcctgtctcttagaacctctcatttcctttccatcatggaaatctatcctcaaggaaatcacttctcagtgttctatctgctagtctactactccccagggattgttcaggccccctcccttccctagacatcaagctcagagatttgcccctgcccaggattggcaaattgactttactcacatgcccacagtcaggaaactaaaatacttaaaatagattttccactacctatccaaatcctataaaactgccccacccctatctccctttactctcttttcagactcagcctgtctgcagctaggtgattaaaaagctttatttctcacacaaagtctgtttggtggtctcttcacacagacacaggtgacactctggagggggtgctcccagacctcagcaaattgttctattgatttgggccataaacttagcttatgctgataccaagcacctataggagattcrtcaaagatcaggggtacctccactcagaatcccttt

SEQ ID NO: 463521 - DNA, 552 bp, Homo sapiens
cttaagctgttccacgagcaatttaaaatctttaagggtttaaactgtcactcaaaaataagccaaagcctgggtgcagtggctcacacctgtaatcctagcactttgggaggctgaagtgagtggatcacccgaggtcaggagttcgggaccagcctgccaacatggtgaaaccctgtctctactaaaaatacaaaaattagccgagtgtggtggcatgtgcctgtagtcccagctactcgggaggctgaggcaggagaatcatttgaacccagaaggcagaggtttcagtgagccacgattgtgccactgcactccagcctgggagacagagcaagactctgtcaaaaaaaaaaaaaaaaaaaaagcctaaattacacaccaaacaaaaacaaaaaactaggaataaaaggataaataaataaaatataaattttttaaaatgctctaaagtgatataaatctataarttgcaattgtgtcgacatggatgaatttcaaaaagaaaaaacttaacaaaagaaccaaatcacagaaaaataaatatggtcc

SEQ ID NO: 463522 - DNA, 481 bp, Homo sapiens
gtgagaacaaaaaagaggattaaacattgattcccaataaattgaaaggattagtgttttctttggcatagaaacttgctgagaaactcaagatagagcagtgcattttaaaatggtaattgatgtcttaaaaacacacagtgtggtaggtttaaaaatgaaggcttgtagatgaaaaaaaaataaattgacaaaatagcttctctctgataccatctttcaaataactgaataagtaatgcacattttttaaatgagaattgctgatgtagtgacaatatactttctactaaaatgaactatttacttattctattcaaataacaacttgattcattgyaaagcattttgaggcttcttcagaatgaaagaatgtggcagctgtaagaattttctccatatacaaaggcatgaattttttccatatacaattgcataatttaggagaaaatcatctacctacacaggggctttgctttct

SEQ ID NO: 463523 - DNA, 418 bp, Homo sapiens
gctctctctggcactgccatggcagtggttctggccctgctgaccttggtctgtggaagaaccaaagagtctgagggctttactcgcacttccagcacaacacagtcaccatacagagaggagcccagtcttttctccctgggagcacttgagcccctgctcttccccaagtagaggccccagcttgggccagctgtgcagtcaccctaaccctggctgaacattcccagtggcagtggttccacttttctccaaggawgagctcccagagacaaccaaaaactcctctgccactgcagtggtactgcccttgctgcccttagattggggaaggagcaaagaccctgagtgctttaactacacctccagcaagctgaagttgccctaagaagaagagaccagtctgtctctcccatga

SEQ ID NO: 463524 - DNA, 522 bp, Homo sapiens
actctttaggaatttctatctcaaacactgcgagatgctcttgagagcacattgcagacaaatccctgcccttgggcacctcaccatctagtggggaagagaagatgtgagcatgggaactgctggtatgaagcgcggccccaggactgtgctgagccttcccatgtgttatctctgtccttacaatagttttcatccccttactctgaaagggaaactgaggttctcagagtgtctgcatgctcagggtctcccaggggctaagccagcatttgaggagctcagaggagttgggtgacttgcccatgckcaggcagctggaaaagccaggattggggccctaacctccttctccaagtctagaggctgggctgcctcctctcttccatagtctcatggtgaggcccactatgagacacaagcaccaaaactgctcttgagaaaaaatgaatgcactccctgtgtaccccctggtgtcatattaaaccacaggttgacttcaatacccattaagccattatc

SEQ ID NO: 463525 - DNA, 611 bp, Homo sapiens
ccagatgtctgtgaagactgaacgtaatgatggaaaaattttagttcggtatcccacatctgcaccaacaccaacatactcagggttgctccagggaaaaaagaaaatgaagaagaaaaaagatytacgttttaagtttagggatattataagggaatctctgttgatctaggtgcatcaattgttgtatatcctaacagatgcacttctggttattacatcaaaatatggtcaacacccctcctcaccctctttgccttctgctgtggtaggattagctgcaagcaacaggctgtcagaaagcgacatcttgcggcctttgtgggacctgccctccgggacacagtacttggtgttctcaaactcttgtcaagggcttaaaaaaggcacaaagcactactccctgtctacccaaaacagtcaggttactaatttgacacccttaaattcagtatattttaaatgtttgtctaacccattcatttagtgaaggcatgagaaactgattttctatcagcaaaatcatgtatttgtgttcagtataagtttattacatgcactaataaagcattatacttcaaactatttcgagttgtcttccatgtcaaaat

SEQ ID NO: 463526 - DNA, 606 bp, Homo sapiens
tgaccttgctcccaaccctgtgctctctgaaacatgtgctgtgtcaactcagggttaaatggattaagggcrgtgcaagatgtgctttgttaaacagatgcttgaaggcagcatgctcgttaagagtcatcaccactccctaatctcaagtacccagggacacaaacactgcagaaggccgcagggtcctctgcctaggaaaaccagagacctttgttcacttatctgctgaccttccctccactattgtcctatgaccctgccaaatccccttctgggagaaacacccaagaatgatcaattaaaaaaaaaaaagaaaacttggcaaaggatatggacagacaggaaatccagctggatcttcagcatataaaagatgctctaccacactggtaataagaaaactatactttaaaactacaagatactattttacagtctcagataggccaagttcaaaaatgaggagagtggctcgtgtctgggaggctgtggggtctgcgcggtcactcattactctccttatgccccctggggagatggcatggcaggcagtttaccttccaaaggtaacagttcacacactctttaacaaagcaattctgc

SEQ ID NO: 463527 - DNA, 606 bp, Homo sapiens
tgaccttgctcccaaccctgtgctctctgaaacatgtgctgtgtcaactcagggttaaatggattaagggcagtgcaagatgtgctttgttaaacagatgcttgaaggcagcatgctcgttaagagtcatcaccactccctaatctcaagtacccagggacacaaacactgcagaaggccrcagggtcctctgcctaggaaaaccagagacctttgttcacttatctgctgaccttccctccactattgtcctatgaccctgccaaatccccttctgggagaaacacccaagaatgatcaattaaaaaaaaaaaagaaaacttggcaaaggatatggacagacaggaaatccagctggatcttcagcatataaaagatgctctaccacactggtaataagaaaactatactttaaaactacaagatactattttacagtctcagataggccaagttcaaaaatgaggagagtggctcgtgtctgggaggctgtggggtctgcgcggtcactcattactctccttatgccccctggggagatggcatggcaggcagtttaccttccaaaggtaacagttcacacactctttaacaaagcaattctgc

SEQ ID NO: 463528 - DNA, 543 bp, Homo sapiens
cccacagtggtggggcttgcaaaaacttatgttccaaccattgggatggatgatgcccctctgtctagggctggtctaaatgcttcctctgtgggtgggtgtcaagcaagtttagcctggtttttctttctgctctgacagagcagcacagagttcaatgcagggtcccataatcactgcactctccttcctccagtgcacagattttccatgccacaggaccactactggggagtggaggaggggtggcttcagggattcaagactgtgttttctaccttcctcggtgcctctttcagcgataggaagttaaaaccaggtactgtggttgctcacctgattgttggctcttatgaaggcttttttttgtgtatgtagatagtagttaaayttggtgttcctgcagtgggggcgataggtgaaatttctattcagccatcttgctctgctctcccttgaccctttctgttttatctttatttttccatttcattaatttttgctcaaatcttgtgcatttctatctgcaagcttatttctaaa

SEQ ID NO: 463529 - DNA, 573 bp, Homo sapiens
tgagacaaaaaacaaaacaaaacaaacaaaaaccaaaacaataacaacagaagaacactcatttttacagagagatttgagcccatcccaacagagtacaatgctctttccaagctcatggacagcgtttgggaaaattagctgtgctaaaggagcaggaagcttcagcccctttcccagaattgctgttatacaaatcacattctctcaccagggagcaacaaaattagaaacatgcagtaacaaagaccatgttaaaagtgcattttggggccaggcatggtggctcatgcctgtaatcccagcactttgagaggctgaagcaggtggatcacccaaggtcaggagatcaagaccagcctgggcaacatgacgaaaccctgtctctactaaaaatacaaaaaattagccaggcatagtggcaagagcctgtaaacccagctactagggaggctgaggcaacaaaatcacctaaacttargaggcagaggttgcagcgagctgagattgtgctattgcactccatcctgagcgacagagtgagactctgtctcaaaaaaaagaaaaagtgtg

SEQ ID NO: 463530 - DNA, 332 bp, Homo sapiens
cgtccgcattgagattgaaaatgttccctgtgaatttgtgcagaactttgacccccwttaccccattatcctgggtggcttgggcaacagtgagggaaatgttggctacgtgcaggtgggtccctttgctacatatttggtgcctgaggctctgtggatttcccctccatcaatcatcttaccctctcgtcccctcagatgcgtctgaagaaacatcgctggtataagaaaatcctcaagtcccgagatccaatcatattttctgtagggtggaggaggtttcagaccatcccactgtattatatcgaagaccacaatggaagacaaaggct

SEQ ID NO: 463531 - DNA, 332 bp, Homo sapiens
cgtccgcattgagattgaaaatgttccctgtgaatttgtgcagaactttgacccccattaccccattatcctgggtggcttgggcaacagtgagggaaatgttggctacgtgcaggtgggtccctttgctrcatatttggtgcctgaggctctgtggatttcccctccatcaatcatcttaccctctcgtcccctcagatgcgtctgaagaaacatcgctggtataagaaaatcctcaagtcccgagatccaatcatattttctgtagggtggaggaggtttcagaccatcccactgtattatatcgaagaccacaatggaagacaaaggct

SEQ ID NO: 463532 - DNA, 332 bp, Homo sapiens
cgtccgcattgagattgaaaatgttccctgtgaatttgtgcagaactttgacccccattaccccattatcctgggtggcttgggcaacagtgagggaaatgttggctacgtgcaggtgggtccctttgctacrtatttggtgcctgaggctctgtggatttcccctccatcaatcatcttaccctctcgtcccctcagatgcgtctgaagaaacatcgctggtataagaaaatcctcaagtcccgagatccaatcatattttctgtagggtggaggaggtttcagaccatcccactgtattatatcgaagaccacaatggaagacaaaggct

SEQ ID NO: 463533 - DNA, 552 bp, Homo sapiens
gggggatggggtggggtggaatgtgtaaactgctaaataatataagyaaaatagctttttaaacaccacaaagaaaaaacaataagggagaaataaccagaaacaaaaattaaaaattaattatttatttttgcagaggaaaaagcaacagaaaataaaatcataaagattaacttgatccattttattcagctatatttgaaaacatttaacaaatggatagtttcttagaaaaatataacttatcacaacgagctccaaaagagttaggaagtttaaatagagtgaagacatggataaggttgttgttctgggttgaattgtatgcccccgaattcctgcgttgaagtcctaagccccagtccctcagattgtgacctcatttggaaacagggtcattgcagatgttagttaagttagaatgaggtcacactggagccaggtgggctgtcattcaacacagctggtgtccttctgaaaggggaagtctggacacagacccaggcacacagggaagatgccacatgctgattggagtaatgctgccacatg

SEQ ID NO: 463534 - DNA, 552 bp, Homo sapiens
gggggatggggtggggtggaatgtgtaaactgctaaataatataagtaaaatagctttttaaacaccacaaagaaaaaacaataagggagaaataaccagaaacaaaaattaaaaattaattatttatttttgcagaggaaaaagcaacagaaaataaaatcataaagattaacttgatccattttattcagctatatttgaaaacatttaacaaatggatagtttcttagaaaaatataacttatcacaacgagctccaaaagagttaggaagtttaaatagagtgaagacatggataaggttgttgttctgggttgaattgtatgcccccgaattcctgcgttgaagtcctaagccccagtccctcagattgtgacctcatttggaaacagggtcattgcagatgttagttaagttagaatgaggtcacactggagccaggtgggctgtcattcaacacagctggtgtccttctgaaaggggaagtctggacacagacccaggcacacagggargatgccacatgctgattggagtaatgctgccacatg

SEQ ID NO: 463535 - DNA, 658 bp, Homo sapiens
aacacctttttgaagtcactgtcctgaactcctcacatgctatgatttccctggtactttccagctcctaggagctctccttttcagcgctccagctgagcaagggtattatttacttcactctgcaccttgcttgtcatgaccatgcccacatccagcgtcaagcaataaaaggacagaaagagtaaaaaagcaatggagtgcacccacctgcttagaccatctctctagttatcaggaagtgaggtgccagtgggctgcaggggactggggcataagaaaatggagtaaagagaaaagagtttcttgcactctctctgcatgttaggagactgtttcctgctcctcagccagatcaggaaggcttctcctgagccctctctgtttgcacccaagtccacttccaagttcaggcstccttgaagacagactaagagacaccaaagaagggaaatggtaaaactcaatgccagatcagtgttactttgaattatggtgttttgttttgttttgtttcccaattctcctggggttatttggttttaaaactcttcaaatagcttctttatgtattctctctgatttagtgggagggacacagtgaaacgtgcttactccattttccccaaaactgaaattcccttaatttttttgaaat

SEQ ID NO: 463536 - DNA, 560 bp, Homo sapiens
ttttttcctaggctgtcaaatgtatgagcataaaatttttatagcatttttcatagatgcagcctcttttgtgatatttcttgtttcattcctgatattgstgatttgtgtgttatctcctttcatctttgttgatcatgctagaggattatcagttttattaatttttttaagaacctgttttttatttccttaatgttctgcattgctttcctgtttttaatttcatcaatttctgctcttcactttccgtcctatttgccttaactttattttactattcctcttttagttttttgactactggtttgagaactttccatattactaaggaaataatataaggatttagtgctataaatttctctctcagctctgctatagctgaatccctcaattttttttttaagacagggtctcattctgtcaccgaagctggactgcagtagcacaatctccacttactgcagcctcaaccttctgggctcaagcaatccccccatctcagcctcccaagtaactgggactacaggtgcatgccaccacacctggctaatttt

SEQ ID NO: 463537 - DNA, 560 bp, Homo sapiens
ttttttcctaggctgtcaaatgtatgagcataaaatttttatagcatttttcatagatgcagcctcttttgtgatatttcttgtttcattcctgatattggtgatttgtgtgttatctcctttyatctttgttgatcatgctagaggattatcagttttattaatttttttaagaacctgttttttatttccttaatgttctgcattgctttcctgtttttaatttcatcaatttctgctcttcactttccgtcctatttgccttaactttattttactattcctcttttagttttttgactactggtttgagaactttccatattactaaggaaataatataaggatttagtgctataaatttctctctcagctctgctatagctgaatccctcaattttttttttaagacagggtctcattctgtcaccgaagctggactgcagtagcacaatctccacttactgcagcctcaaccttctgggctcaagcaatccccccatctcagcctcccaagtaactgggactacaggtgcatgccaccacacctggctaatttt

SEQ ID NO: 463538 - DNA, 560 bp, Homo sapiens
ttttttcctaggctgtcaaatgtatgagcataaaatttttatagcatttttcatagatgcagcctcttttgtgatatttcttgtttcattcctgatattggtgatttgtgtgttatctcctttcatctttgttgatcatgctagaggattatcagttttattaatttttttaagaacctgttttttatttccttaatgttctgcattgctttcctgtttttaatttcatcaatttctgctcttcrctttccgtcctatttgccttaactttattttactattcctcttttagttttttgactactggtttgagaactttccatattactaaggaaataatataaggatttagtgctataaatttctctctcagctctgctatagctgaatccctcaattttttttttaagacagggtctcattctgtcaccgaagctggactgcagtagcacaatctccacttactgcagcctcaaccttctgggctcaagcaatccccccatctcagcctcccaagtaactgggactacaggtgcatgccaccacacctggctaatttt

SEQ ID NO: 463539 - DNA, 560 bp, Homo sapiens
ttttttcctaggctgtcaaatgtatgagcataaaatttttatagcatttttcatagatgcagcctcttttgtgatatttcttgtttcattcctgatattggtgatttgtgtgttatctcctttcatctttgttgatcatgctagaggattatcagttttattaatttttttaagaacctgttttttatttccttaatgttctgcattgctttcctgtttttaatttcatcaatttctgctcttcactttccgtcctatttgccttaactttattttactattcctcttttagttttttgactactggtttgagaactttccatattactaaggaaataatataaggatttagtgctataaatttctctctcagctctgctatagctgaatccctcaattttttttttaagacagggtctcattctgtcaccgaagctggastgcagtagcacaatctccacttactgcagcctcaaccttctgggctcaagcaatccccccatctcagcctcccaagtaactgggactacaggtgcatgccaccacacctggctaatttt

SEQ ID NO: 463540 - DNA, 505 bp, Homo sapiens
gcctcaccctctcttaaaagactcctcaagattgctttgctgttctaccctctttagtggttttaatatgtcaatttaaatgcaaattttgactttctgtctgtaatcatataaaatgttcggcactaaaattttaatcaggaatgtaattttakatagaggcggtaatggagtggcaggccacacataacagaatgaagcttccccaacgtggattcccagactatggaagtgctggcctccctgctcccagctgaaccgggaaaactctgccccactccaagaggtgcttctcaaagatgattcctgatcccaggcatgtcctgtgtcctgtcaccaatcctggtgcttcatcgtcctttaaaatccaaacgaggtgatctagtgttcttcctactgcgtcctctggtcttctagcatcctggataggccgtgtatgtttagaaagaggggctccaccctgtgcccggctaagatgatggctcatttatcaagaccatgctgg

SEQ ID NO: 463541 - DNA, 546 bp, Homo sapiens
ctagcttgaatggaattcagcattggtagacggaaccacaaatgccttctatttcttcccaaatatccttttagaacttcraactaattctagatagagtcttaaggtcaggtataaatgaactgctaagtatttatgcctgcataacacaatgatcaagaggcttcctgtgagcccaacattctcatgctttaatagaaaacttattgtaaaatttgcactctactctataacatagaaatgtctatcatttctataaatactatgcagtctcttctgatatatctgttatcctatcatacaagagcagatggctgggattttatcacagttagagggtgttttgagatgggctgcaaatcctctggagaatttgatttggagactcaattagtcatgacaagttaggttatgctgcagtaacaagttggctcctgaatctcaatagcttcataaaacaaagctttcatatgtccagtgttgggcattgggaagtgcaccaaatagtgcctcagggactcaggctatggaggcttcaccatccca

SEQ ID NO: 463542 - DNA, 536 bp, Homo sapiens
  misc_feature (1)...(536): n = A,T,C or G
aacatgaaactgaatactgcatattntnaccttgtagtaggagctaagcatttgacatggtttggatctctgtccttgccaaatctcatgtcaaattgtggtctccaatgttggaggtggggcctggtgggatgtggttggctcacagcggtggatttatcattaatgatttggcwccatccccttggtgctatttttgtgctagtgaaagagttcccctgagatccggttgtttaaaagcgttcagcgccgcccctcttgttctcttttgctcctgctcctgccatgtgagtcaccttactccgcctttgtcttctgccatgattggaagctttctgaggcctccccaggagcagaatccattatgcttcctgtacagcctgcagaaccatggacctctcttctttaaaaattacccagtctcaggcatttctttatagcagtgcgagaatggactaatacaagtgaactaatacatgggcataagatgggaacaatagacaagggggccactggaggggaaagacagggaggag

SEQ ID NO: 463543 - DNA, 284 bp, Homo sapiens
cctggtacttttgaaatttatggtccagaatatttacggaccatcaattgtggaccaatttacacattaaacctggtaaatgtttaatgtgtacttcaaagaaatatatgtactactgttgttggatgaagtgttctataaatgtcaaytaggctaagttagttgacaatgttgttcaggtcttctacattcttgttctatcaattattgccagagaggggtgttgcaatctccagttgtaattgtggacttgcctattttgccttgattagttctattggcat

SEQ ID NO: 463544 - DNA, 574 bp, Homo sapiens
cctgctgacccaggcaccaggccagccagtgtgaagactcttaagagcaagccaacctatggaccatascaggcagctggactagaatccctgaattgactgactagtgaagggctttcccagacaaagccagtcaaagactagaataagtctctacatcttcaaatgcccagacatcaatgtaaggcaacaagaaatgaaaaaccaaggagacataaacgtaacatcaccaaaagagcacaataatctcccagaagctgacccaaagaaatggagatgtatgaactgcctgacaaagaattcagaataattgttttaaaaagtaacatccatgaacttcaagaaaatactgagaaacaattcaatgaaatcaggaaagcaagttaccaaaatgagaagtttaccagagagattgaaattatatatttcttaaaaattaaacaaattctagagctgaagaacacaatgaatgaaaagaaaatgtaatagcatcaccaacagaattgaacaattagaagaaagaatttaaacctgaacatacaggttatttgaaaacatacagaagaaaaaaaga

SEQ ID NO: 463545 - DNA, 592 bp, Homo sapiens
attgctgatctgactcagtagggaagaacttcctaactgggtggctgatattattgatctcttcagccttgccccatttgcctctgttgggagtagcctttgttgttttgattctctgttacaggaggggtcccaacttgcagtgtgaaaaatactgttgtagtaacttaaaatgttaaaccaaaagatttcctgacgtgttttttgattcccgaaagtgataacactttcatggtacagaaaagcataatgaagaaaaaaatgcgtacactaaccactgataacattttagtgtatttcctttcggttttattctgtgcatatgcgtatggatttttaatagtaatgtgtatattttgaacaatataagattgggctctttttgtttaatcctgatgtagagtggtagacttctggttcatagaaatatagaaagaaaagataccacatgcktagatgtattctaccacttggaaataactcctagcttgaccatgtaacttcaaaaagttatttaacctttctgagtttccattttctcacatatcagatagagataaagacctctcctgcttagttctggggcagctaa

SEQ ID NO: 463546 - DNA, 558 bp, Homo sapiens
ttgttaagtgaatggagtcgttgtgaaatggagaaagcaccttagaaaaggatagtgcttgtgctgaccatccttctgtgattgttatcttttgactctctgaaatgagtaratgggtgaggcttttaattttaaaagtcaagtctagatattagtggtttcttaaagtatttgttaacttgtctctttcctttggtaagttatgacatagccttatcaaaatagtgacaactataattatgattgatagaaataaaaatctaacttgatatgcatttcagcttttaatacaaaagcaaataaattcctgtaagtggtataaatgaaagtgaggaaacatgcgttatgccctgctgtttgaaaggtatcatttgcactacatagaaaaacatcgtttctattaccttgaacattcaaaatcattcaaaaaagattatctctgactgttgtaattgactaggtatatggaaaatgatgacaaatctttagaaaaatataatctttctctagttgaatttagtaaggaaagagtagattatactgcagatttctcattac

SEQ ID NO: 463547 - DNA, 558 bp, Homo sapiens
ttgttaagtgaatggagtcgttgtgaaatggagaaagcaccttagaaaaggatagtgcttgtgctgaccatccttctgtgattgttatcttttgactctctgaaatgagtaaatgggtgaggcttttaattttaaaagtcaagtctagatattagtggtttcttaaagtatttgttaacttgtctctttcctttggtaagttatgrcatagccttatcaaaatagtgacaactataattatgattgatagaaataaaaatctaacttgatatgcatttcagcttttaatacaaaagcaaataaattcctgtaagtggtataaatgaaagtgaggaaacatgcgttatgccctgctgtttgaaaggtatcatttgcactacatagaaaaacatcgtttctattaccttgaacattcaaaatcattcaaaaaagattatctctgactgttgtaattgactaggtatatggaaaatgatgacaaatctttagaaaaatataatctttctctagttgaatttagtaaggaaagagtagattatactgcagatttctcattac

SEQ ID NO: 463548 - DNA, 624 bp, Homo sapiens
aatttagggaaattctttttatgttttctcagtttcttttctctttcttttgtttattcattctttctattatttgttatgtggttttgtgtagtaagtgtgcttgtgtttgtggtttcatcaatcttttatggctttgggttatgattcataattagaaattccttctccattccaagatttgaaagtaattctcatgtattttctttggctacttttgtggtttcattggaaatatgtaaatctttatatttatttgaaatatattctcatgaggatttagagcatgctttttaatatacagttaaccccttgaacaatataggtttgaactgcatggatctacttatacgtggattttttttttttttcctacagtaggccctccatatctggcaagtttcacgtccacagccaaatgcagatctraaatactgtattcatagaatgcgaagcctgaggatgtggaggaccaattttttgtatctatgggttccacagggctaattgtgggtcctgagcatgcatggattttggtggagtgtcctggtaccaatctcctgtaggtacccatggacgactgtatatgttttttcaggtggctgcctgttgttccaaaccagt

SEQ ID NO: 463549 - DNA, 561 bp, Homo sapiens
gtgtttgtggtttcatcaatcttttatggctttgggttatgattcataattagaaattccttctccattccaagatttgaaagtaattctcatgtattttctttggctacttttgtggtttcattggaaatatgtaaatctttatatttatttgaaatatattctcatgaggatttagagcatgctttttaatatacagttaaccccttgaacaatataggtttgaactgcatggatctacttatacgtggattttttttttttttcctacagtaggccctccatatctggcaagtttcacgtccacagccaaatgcagatctaaaatactgtattcatagaatgcgaagcctgaggatgtggaggaccaattttttgtatctatgggttccacagggctaattgtgggtcctgagcatgcatggattttggtggagtgtcctggtaccaatctcctgtagktacccatggacgactgtatatgttttttcaggtggctgcctgttgttccaaaccagtttattgaagtgcctgtcttttctctctgacttgaggtgtata

SEQ ID NO: 463550 - DNA, 620 bp, Homo sapiens
tactttcccatcaacagttgtttaagtgcctcattttctcttcagccttgccatcatctgttcttttttgactttttaacaaaagctattctgactggcatggggtggtatctcattgtggttttgatttgcatttctttgatgattagcgataataagcattttttcataygtttgttggctgcttgtatgtcgtcttttgaaaagtgtctgttcacatcctttgtccactttttgtttttttatttactttttgtttttatttttattcttatttttttaagacagagtttcggtcttgttgcccaggctggagtgcaatggcacaatcctggctcactgcagcctctgcctaccgggttcaagcaattctcctgcctcagcctcctaaatagctgggattacaggcacatgccaccatgccgggctaattttgtatttttagtagagatggcgtttcaccatgttgcctaggctggtcttgaacacctgacctcaggtgatccatccaccttggcctcccaaagtgctgggattacaggcctttgcctactttttaatggggttattcgtgttttgtttattgatttaataagttccttatagattctagatattag

SEQ ID NO: 463551 - DNA, 620 bp, Homo sapiens
tactttcccatcaacagttgtttaagtgcctcattttctcttcagccttgccatcatctgttcttttttgactttttaacaaaagctattctgactggcatggggtggtatctcattgtggttttgatttgcatttctttgatgattagcgataataagcattttttcatatgtttgttggctgcttgtatgtcgtcttttgaaaagygtctgttcacatcctttgtccactttttgtttttttatttactttttgtttttatttttattcttatttttttaagacagagtttcggtcttgttgcccaggctggagtgcaatggcacaatcctggctcactgcagcctctgcctaccgggttcaagcaattctcctgcctcagcctcctaaatagctgggattacaggcacatgccaccatgccgggctaattttgtatttttagtagagatggcgtttcaccatgttgcctaggctggtcttgaacacctgacctcaggtgatccatccaccttggcctcccaaagtgctgggattacaggcctttgcctactttttaatggggttattcgtgttttgtttattgatttaataagttccttatagattctagatattag

SEQ ID NO: 463552 - DNA, 540 bp, Homo sapiens
aagaaaaacactaaagagcatagtttgaaagacttttttccaaggaaaacataagaaaatcttattttaccttctcaaggaaaaaaaaatatacacacacacagtatatataaaatatatgcatgcctgtatatagatttgtatatatctgtatacacagctttatatggagagagacagaataaatctaaggtttttaaaagaagaatccaaaatagtcccaggctttttctcaaaatattaccatagtccccctttatccagrggggatacatttcaagacctccactggaggcctgaaactgcagatagtacctaattctgtatatactatgttttttcctatacaaacatacctatgataattgacctatgataaatctacctaatttaatttataaattaggcgcagtaggagattaaaaacttacttttgacatatgtttggcttctttttggcaaatccaagttgcctgcattactactcttgtgctttggggccattattaaataagggtaacttgaaaacaagctgtgtga

SEQ ID NO: 463553 - DNA, 551 bp, Homo sapiens
acaaaatgagtgaatcatattaaatactgcaatgtatcagcatgtatattttaaaggccccagagaatatgacttggttatctttggctaaaataaataacaatagcaaagtcactcctatgtgctcaacagttcatttccttttgttcctaggaacaaattaatctacattttccaatgtcttgcagttagatgggcttgaatgattaaactttgtttaatgcagtgtaggcaaaagtgaagtaagtcacttccaagcagcattagtttcctgttgctgcataagaaattgccacaagcttagcaacattaaaaaatacaaattagtcccagcgyggtggctcacgcctgtaatcccagaactttgggaggctgaggtgggcagatcatgaggtcaagagatcaagaccatcctggccaacgtaatgaaaccctgtctctactaaaaatacaaaaattaactgggcgtggtggtgcacacctgtagttccagctgcttggaggcagaggcaggacaactgcttgaacctgggaggctgaggttgcagtca

SEQ ID NO: 463554 - DNA, 585 bp, Homo sapiens
aagtaactgtggataaatagagtccctatgccacctaaaagcattccagtcctacatattatgtcaaccaaataaaatagcccagaatccccactgtgaggcaactggtccagagaattgagttcagtggagaaaaagaaccccaagcaataaggcatagaagtcaacaagcatatgtggtgagaggtaagccctccagcacaaaggcatgtctttagtgttgtcttatcaacaccaagagttaccacgttagagaattatgtgcttaaggctttacatcttttataaatataagttatacttcaagggataawttgtcataattccatgcattatcaaaaatagaactaaaatttccataagcaataagaacaataacaacaaaaaaggaatatctgttggaaccagccttagggattgaaattggagatttagtgctgtcaggagattttctctttttcctttctcttttttccccctctctcttctctctatccatttatttttcattctctttgcatatatgttccattctcttctgtaaatgggtttttcctatgtccagcaacctcatcctattgataa

SEQ ID NO: 463555 - DNA, 564 bp, Homo sapiens
ttaaatgataaactaatggtacagatgtaataataacactatatacacaggatgttatgagaattgcttgagttaataaatatgtgaatagtttgtaaataagatcatactagtgtaaaggtatatttaaaaatagtgtgtcatgggagttcctgattttgttaaaattgtaagaatttttgcttcagaccaatggtcttaatatcagccaagttattcacagagtgtttaatgagataatacaaacagcctttagtaaattgggcagaagcaaagagaattatgtcttagtaaaatttctggaaattttctacatagttctataaaaatctcagrgaacttctaacaacttgtgggacaatggaattaagagataaaattaaaaatataatctttatttctcaatgtaagctccatcaagttcgagacacttttgtaagtggtattaccaaccatttagtccattcctaaagaactgagagtcattggactttgaccacatcaaagcagtctttttttacattattaactaaacagaaatgagtgccctttaaagatttttta

SEQ ID NO: 463556 - DNA, 389 bp, Homo sapiens
cctttccaaaattttcttggacaccctgtgtggcattccttccccgagggtatgaggcaggacccctctgaaattagggtcttcaaagagaaagcagaagggagatagtgacctttctaggtcttatgtcttgctctgggagagagcggttctagatcctatgacctgccttgagggtgaggaattatgtttgggagaaggagacaggggagcaggagaaagtcagagagacttgtttctgagmctgtatctgaagccttccaacctccttttcttcaaattactcagcatgccaaaaccaccatactttggggtattgtgttctcagctccaactgtgactacagttaataataatatattgtatacttgaaatttgctaagagagta

SEQ ID NO: 463557 - DNA, 639 bp, Homo sapiens
gacaacatgcaacatgtgtctttctatgcctagcttatttcacttaacataatgacctccaggttcatccatgtttttgcaactgagaggatctcattcttttttatgcctaaacaatattccactgtgtatatgtaccacattttctgtattcattcatctgttgatgaactcttagattgcttccaaataatggctactataaatagtgccaaaataaacatgggagtgcagatatctcttcaacatactgatttccttacttttacatatatacctaggagtgggattactggattatatgctagctatatttatagttttttcaggaacctccaaactgtaatccatagtggttgtattaacttacatttccaccaacagtgaatgaggactcccttttctccacaacctccccaggcatttgttattgcccaacttttgaataaaagccattttaactgaggtgagataatatctcattgcaattttgattttcatttctctgatgatcaatgatgttgagtacmttttcatatctgtttgccatttgtatgacttctttagagaaatatctagtaagattttctgtccgtttttaatcagatcattagaatttttcctatagagttgtttgag

SEQ ID NO: 463558 - DNA, 528 bp, Homo sapiens
gataaagccttacagggcattcattcagtgaggctgaaatgcagcagtactgcaaggttttgagcacaataaagacaatgatctgatacatgtttcaaaaagtaaagacttttacctttttgagacagagtctcactctgttgtctaggctggagtatagtggcatgatctcagctcactgcatcctctgcctctcgggttcaaggaattctcctgcctcatcctccacgtagctgggattacaggtgtgtgcaaccacgtctggctactttttgtatttttagtagagatggggttttggcatgttggccaagctggtctcgaacttctgaccttaggtgatccacctgcctccgcctcccaaagtgctggggttacaggcgtgagccaccactcctkgcctcacaaagtatgactttgaatgctgtgttgaataataaatatgacaagattccctgaggggttgcgcataagatgtcagaggaaaagagaagttaagaacaactccaaatttctcaaagaacttaa

SEQ ID NO: 463559 - DNA, 543 bp, Homo sapiens
  misc_feature (1)...(543): n = A,T,C or G
nnnnnnnnnnnnnnnnnnnnnnnnnnnnnnntctctcactatgtgatatggtttgggtttgggtacccacccaaatctcatgttgaattgtaatccccagtgttgtgggaggtgcctggtggtaggtgattggatcatgctgcagatttccygcttcctgttcttgtgatagcgagtgagttctcccgagatctgattgtttaaaagtgtgtagcacttcccccttcactctcttcctcctgctcctgccatgtaagacgtgcctacttcccctttgccttccaccatgattgtaagtttccggaggcctccccagcatcatgcttcctgtacatcctgcacagccatgagaaaattaaacctcttttctttagaaatgacccagtctcagacatttctttacagcactgtgagaacgaactaacacaccatgtcacacacctgctcccctctgccttctgccatgagtaagagctccctgagggctcatcagaagccaagctgatgctggtgccaggctcatacagcctgcagaactatgag

SEQ ID NO: 463560 - DNA, 584 bp, Homo sapiens
tgaaaaaaatctagaaaggattttatgtcaacaagtgctaataamacttgtttttagttattgctatgctttatattaattcacagactatatcgcataattttttttttttgacatgaactctcactctgtcattgaggctggagggcagtggtgtgatcacagctcactgcagccttgacctcctgggctcaagccatcttcctccctcagcctcctaagtaactggactatagacacacacaaccatgcccagctaatttatgtatcttctgcggagacgggctctccctgtgttgcccagtctggtcttgaactcctgggctcaagcaaagttcccaccttggcctcccaaagtggtgggattagaggcatgagccaccatgcccagccctgcataattatttttaaccaagaactagaaatctgtttctcaaagtctgctccatggaccacctacaccaggatcaactgggggagggagagttgactaaaggccaaattcctgggcctcatcaaaccgatgcaatcagaatttctaagttctacctttgagatcctggaatgtgtactttaaggaaatg

SEQ ID NO: 463561 - DNA, 535 bp, Homo sapiens
ctggctgcaaggttccctgggttgaaatgaaagacttttttttttttttaggtgcccaatagagaactgaaaattggagggaaacagaaaggtaggcatgaaggagaattgtttttccccatcagaaacaaagtgctttgggaaaaagtaaataggtgtcaatagttaacagcttaaattwaaaaaaaaaaaaaaaaagccaatactgctatggcttatgtgaattctgaatctgatgaataaatggtgctgtcagatcccagtctttggttactcaaaagcacagctgtggtcttgctgcctcctccatcccacacagtgacctctgctgggctggcctcccggtctagggggtacctggggcccgggatagccctgtccaacttgaagccatcagcgtgattgggaagggtcacgagagttcctcttctgcagtttcttggttgagggctgccttaaagtgtgtccccacactttgagccagtcctcaacaccccactcatgtcctgggaaagatggagatcaaggtcatttg

SEQ ID NO: 463562 - DNA, 579 bp, Homo sapiens
tagcagatcaagtagtactgagcatctaggacaggagaagaatgacaattctgttggggagaaagacaaaggagcatgtgaacttgctaaaaatctcttaggtgcaagtagtggagaaggaccaagagttggttctccttcatacatagtttatctaaattgatgagtagacagtaattgttttttgaagctacatgttaacgtgttgggccatcattcgtatgactggtaactttaccagcgtttaaagcacagcagatggactgtgaagcctgactgtgggayccctggctcaggggccctccttgcccccaggctgaagacttcctagcagtaaagtttccctccttcatagatcctttgggaggcaggaagtggaacctacctgaaaggaaagggaggggtcgttgtaaggattcatggagagattcacggaccattcataggaaatggagaaaaactggctggcctcattagaaatggaatgagaaggtgtccccctggattgtgggttattcccctggggactcattcatctctgtcccccattgccacccatctctgcctcccattgccacc

SEQ ID NO: 463563 - DNA, 632 bp, Homo sapiens
tatcagttaaaaatggcaattttgtttttctccccttccctctaaaatgagagtagaccccccaccaaaaaaaagagataaaaacccacaataacagagaacagaaaaataggcccataggcaagagacttcaacaaatttcagcgaaaactcaaagtaggtagagaagtggtaactggcaaaactaagaggaagtcaagtcctagaataaaaagggggaatacaggcaagggtcctacagaacttcagattagttcaagattaagaaatatctagtgaaacagtggaaaggattaagacatgaactgaaatgggggattaaataaaagtctggacttgctgaagagtytaccatcccactccaaaagacagtcaagcattcacgcttcagacaaaagaaaattagaaggttcttccctaaagaaactgaacagtgccagaggaggttcctacattccagcatgtaactagatccctaaccaattactctaaacaaaaccagataatcaataagccccaaccaactcttacagtaattttttgtttatccatacatattaatggaaaataaaggatcgccagagactgcaacatgacataaaaccaaatacagagaaatacatgatcccaaa

SEQ ID NO: 463564 - DNA, 607 bp, Homo sapiens
taaaaaaatctatgttcataagggatattggtctataattttcttgtaatttccctgttggggttttaaattaggaatcagtcaaagagatacataactattcagatttttgtttcttcttgtgtcagtttcagaaagctgtttatttcaaggaattctcccatctcctcttaggttttcagatttattggcatgattatgtacctgaaagctatgaaatcctaaataaggctaagatactaattattactacaaaaaaagctaaaattctagtccagagggagatcaacttctgacaagacaaggtgagaagttccacaggcctactcaccagggaaactgatagaagttatgtttaaaacagccatttttatagcctctgaaatggtcctaagggcaaacagcaaaaaaatatctattcaggaatatctatgaaaattcagttagaataccaagagctagtggtacagtcatgcatcacttaaaatgacagaaatacattctgagaatgcatcctcaggcagtttcatcattgtgtgaatatcagaatgtwttacacaaacttagatggcacagcctactacacgcctaggctatatggtagagc

SEQ ID NO: 463565 - DNA, 573 bp, Homo sapiens
tataatgataggcattgccaagactttaattcttgaatgatgtcatagctataaaagatatcgtctttgctattcatagattttaaaatttacacttatttaaaatatcatagtttttttatactactgattttttttctcccrttaaattgtcaaactgtagtttgaaggtttggtgctagggttatttcatagttatttaatttgctttttagtaagatattctagtttcttagtattgtacttcttaatagtatactttaataaaagtaattgaatattaaacatttggttggtttcaagccaggagatgcagctttgataggttttgcttttattttatttattttattttattttttcactttcgttgctcaggctggagtgcaatggcgcgatctcagctcactgcaacctccgcctcccgggttcaaacaattcttctgcctcagcctcccaactagctgggattacaggcatgtgtcaccatggccggctaatttcgtattcttagtagagatggggtttcaccatgttggtgaggctggtctccaactcctgacctcaggtgat

SEQ ID NO: 463566 - DNA, 513 bp, Homo sapiens
ccttgaatgccacataagcatcttgggctttattctaagagctatgggaagctaatgaaggatttgaagcaggaggttgaaggatgaaacatgaaacatgagcttacccagtctttctgctttaaaaatgatcactccgcctgatcgatgatcaatggagaatagaatgcagagcgcaggagaagaacaaaaaaacaaaaaaaggactttggaagctattgtgagagatgatgatcaggcttgtgctacagaagtggcagtgggggtgaaggcaggagaaaagatttgagatacatttgggaggtgaaactgatcagactaggcaatggattagacgcrtgaggtagaagagacaaggatttcttgaacttctgagcagttgactatttgaaggtgatattttggtgacatggaatagctagggcaagaacagatctaagctccatgaggagtggaaattaagaaatatcaatcaagaaacgtcgactggacaccaaagtggagacagttgtc

SEQ ID NO: 463567 - DNA, 579 bp, Homo sapiens
tcgacaccagcttggccaacgtggtgaaatcccatctctactaaaaatacaaaaactagcctggcatagtggtgtgtgcctgtagtcccagctactcgggaagcygaggcatgagaatcacttgaacctgggaggcggaggttgcagtgagccaagattacaccactgcactccagcctgggtgacagagtgagattctttctcaggatagatagatagatagatagatagatagatgatagatagataggatagatagatagatagatagatagatagatagataatagatagatagatagaaaatgtcaactgggctctttacccctgcccaaactgctgcctccattactcagaatccttgggaatgaggccattgtccgaaaggccaactcttggccaagtatccaactggagaaaaatccctagtccaggctgactaggaaaaagggatggggctgaggctgaaagctattgcataagttggcagtaggggagctccagtatgttcttttccaaggccctctacaggcatccctggacacctcaggcttctcacttgcatgctaaaagcagaat

SEQ ID NO: 463568 - DNA, 577 bp, Homo sapiens
gcttcactggggtctcagtatgttctttctcttaatgggatttgagaagacatttggcagagttattcacagccatgtcatctcaaacaaagtggtaggccatggagagttgatgcaggagacacatggctccagggtgatctggggttgagggaggtctctggcgctggaggtagttcatggggtatacaggaccctgataggtggctgaggagaggtggacttgaggctctagggggttgacaagggcaagcactggttcagcctaagcactactgaagcaggaackgtatccactgagcatctggtccactctttccattttgacaaatatcaccaaattccccagcaaagggcctgcaccaatttatggttccatgaacaataggcaagtgtgtctttctctacccctgtgctaccactgtactatgtcttatgaaatttttggattttgccagtctaatagctgaaaatcatgtctcatttaaaatgtgcatttctttaattacaaaagtaagtttaggtcaaaggatacataattacagttagataggaggaataaatttcaagagttcta

SEQ ID NO: 463569 - DNA, 579 bp, Homo sapiens
aatgccatgcatttgtcacttttatcccggctggagtggagctggaggcattcagacatatcaatatgcaaccatgaatatcaggacatatatctttcgctgggaaaatgtacaaggggcttcagcctcaaaataaaactcttagccagagggaggacttagtgatctgaggaatgtcttttaagcctgagtctctctggaccaaagggtggaattattacaaggtaaataaatcagtcctgttcctcttctaggatcaggtagctttgagaactttagtgaccccagaaaccttggataaaccattagagcttgactgtaaatctgaaagcaatccttcttctcttttaaaaagaaaacctttgaaaatgatgtcaattatccccsccttaaaataaaattttattttattctataagtgcatgttcattgaagaaaatttgaggacaaaggatgacaaaaagaaggaaattatcataattctataacctaaatagagaaaaccatgctagcagctttctttcttcctctctctctttctctgcttctttctttatccctttgtcctttttttcctag

SEQ ID NO: 463570 - DNA, 515 bp, Homo sapiens
ttttaatatttaccacagtttctatccattcatctgttgatgggcataggttgattccgtatcttggttattttgaatagtaccacaataaacataggagtacagctatcttttcaatataatgattttcccttttggatgtgtactgagcaatgggattgctggattatttttagttttttgaggaatcttcatactgttttccataattgctatactacttcatattcccaccaacagagtatgagcgatcctttttctctacatccttaccagcactttttattttctgtttctttttataatatccattctacctggggtaagatgatatctcattgtggttttgatttgtatttccctgatgatcagtratgttgagcaatttttcatccacctattggccatttgtggtcttctcttgagaaatgtctagtcaagtcttttgcccatttttaaaatcagatttttttttgctgttgagttgagttctttatatattgtggtcattaatt

SEQ ID NO: 463571 - DNA, 515 bp, Homo sapiens
ttttaatatttaccacagtttctatccattcatctgttgatgggcataggttgattccgtatcttggttattttgaatagtaccacaataaacataggagtacagctatcttttcaatataatgattttcccttttggatgtgtactgagcaatgggattgctggattatttttagttttttgaggaatcttcatactgttttccataattgctatactacttcatattcccaccaacagagtatgagcgatcctttttctctacatccttaccagcactttttattttctgtttctttttataatatccattctacctggggtaagatgatatctcattgtggttttgatttgtatttccctgatgatcagtaatgttgagcaatttttcatccacctattggccatttgtggtcttctcttgagaaatrtctagtcaagtcttttgcccatttttaaaatcagatttttttttgctgttgagttgagttctttatatattgtggtcattaatt

SEQ ID NO: 463572 - DNA, 361 bp, Homo sapiens
cccactgacatcacagcacactgccattaaaagactggacacaggaagtgttcaataaattcccaagaaatagataggtaaaggaatggatggagaattttgcctttagaaagttttyttagtacaacctaccctaatcacactgttttaaatttaagctctctcatctctggggctcccaacctcctgtatcctgctctctctctctcgctttcctgtccataacacttaccctctcataacatactatataaattatttattgtgcactgtctgttccccacccccccgaatggaagtctactagacggatctctatttgttttaatctgtggatacaatcctaaaacagtgcttggcc

SEQ ID NO: 463573 - DNA, 361 bp, Homo sapiens
cccactgacatcacagcacactgccattaaaagactggacacaggaagtgttcaataaattcccaagaaatagataggtaaaggaatggatggagaattttgcctttagaaagttttcttagtacaacctaccctaatcacactgttttaaatttaagctctctcatctctggggctcccaacctcctgtatcctgctctctctctctcgctttcctgtccataacacttaccctctcataacatactatataaattatttattgtgcactgtctgttccccaccccccmgaatggaagtctactagacggatctctatttgttttaatctgtggatacaatcctaaaacagtgcttggcc

SEQ ID NO: 463574 - DNA, 597 bp, Homo sapiens
cttgttgtctaatatttatgtagtcaagtcctacattttcttaaattgcattttttttcttcctttgctttttggtttagaaatcccctcttcacccaaagatcaagcaaatatttatcctggttttaccactgttttatctcagttactttgtacttttatcttttacatttaacatttgaacttcatctaggtagtggttatgatgtagtgatcaattttgttaatttycaataattagcaacttacttcagcatgataatcatctattctttacccagtgtcatgaaatactaccttacttacgtaggtctattctgagggtttctagtatgttgcagtgatattttcattctttcacctataccatactctcttaattaatgcacctttaaaatatttttaatatcaaaaaataagtgcctcctttattctactgcttcaatttttatttggatttttcccatatttattttttcagaataacttaaaattcattttgccatggtttaaaagattctatttgaatgtttattagaattttgttttatttttgaattaattaaaaataaatcaaatctttaaaaagttgagact

SEQ ID NO: 463575 - DNA, 592 bp, Homo sapiens
taacatataagagtgggagaggaggtgaaaattctctcaaagggacaatggaaggctagaaagctccctttgttttagraaagaaatatgctattgcccattaatgccatgtcccatgacaagacttcctgtggacaggctatctctgtttggggctaggaaggtgttttcttacttaccatttgtacttttgtttcttaccattgcattttgctttatgaatttggttaggcagatggcccatcttacagatacagagagtaagtcccaggtattctagtcaggattcttggttgcaaaagttgaaagccactcaggctatctttggttgggcaatctagtgaacatgcaaggcctggagcacgagggcagctgagccttgcagggacagaaatttgtaagtcggagcccaggctgctttttctttcaacaccctcacagtttctcatctcttcttctctctgattactaggcttttgattggcctaatatggccaccagcctgactctatcccctgtcctttgaacttagagctaaccattaactatcatttttccataccctaaggttgagattctctcctggagtcag

SEQ ID NO: 463576 - DNA, 592 bp, Homo sapiens
taacatataagagtgggagaggaggtgaaaattctctcaaagggacaatggaaggctagaaagctccctttgttttaggaaagaaatatgctattgsccattaatgccatgtcccatgacaagacttcctgtggacaggctatctctgtttggggctaggaaggtgttttcttacttaccatttgtacttttgtttcttaccattgcattttgctttatgaatttggttaggcagatggcccatcttacagatacagagagtaagtcccaggtattctagtcaggattcttggttgcaaaagttgaaagccactcaggctatctttggttgggcaatctagtgaacatgcaaggcctggagcacgagggcagctgagccttgcagggacagaaatttgtaagtcggagcccaggctgctttttctttcaacaccctcacagtttctcatctcttcttctctctgattactaggcttttgattggcctaatatggccaccagcctgactctatcccctgtcctttgaacttagagctaaccattaactatcatttttccataccctaaggttgagattctctcctggagtcag

SEQ ID NO: 463577 - DNA, 592 bp, Homo sapiens
taacatataagagtgggagaggaggtgaaaattctctcaaagggacaatggaaggctagaaagctccctttgttttaggaaagaaatatgctattgcccattaatgccatgtcccatgacaagacttcctgtggacaggctatctctktttggggctaggaaggtgttttcttacttaccatttgtacttttgtttcttaccattgcattttgctttatgaatttggttaggcagatggcccatcttacagatacagagagtaagtcccaggtattctagtcaggattcttggttgcaaaagttgaaagccactcaggctatctttggttgggcaatctagtgaacatgcaaggcctggagcacgagggcagctgagccttgcagggacagaaatttgtaagtcggagcccaggctgctttttctttcaacaccctcacagtttctcatctcttcttctctctgattactaggcttttgattggcctaatatggccaccagcctgactctatcccctgtcctttgaacttagagctaaccattaactatcatttttccataccctaaggttgagattctctcctggagtcag

SEQ ID NO: 463578 - DNA, 592 bp, Homo sapiens
taacatataagagtgggagaggaggtgaaaattctctcaaagggacaatggaaggctagaaagctccctttgttttaggaaagaaatatgctattgcccattaatgccatgtcccatgacaagacttcctgtggacaggctatctctgtttggggctaggaaggtgttttcttacttacyatttgtacttttgtttcttaccattgcattttgctttatgaatttggttaggcagatggcccatcttacagatacagagagtaagtcccaggtattctagtcaggattcttggttgcaaaagttgaaagccactcaggctatctttggttgggcaatctagtgaacatgcaaggcctggagcacgagggcagctgagccttgcagggacagaaatttgtaagtcggagcccaggctgctttttctttcaacaccctcacagtttctcatctcttcttctctctgattactaggcttttgattggcctaatatggccaccagcctgactctatcccctgtcctttgaacttagagctaaccattaactatcatttttccataccctaaggttgagattctctcctggagtcag

SEQ ID NO: 463579 - DNA, 537 bp, Homo sapiens
tcattccctctgaactcgtctgcctccatctttcaaaaatcccctaacattcttatcagctttgcccatgttacagcaccagtgtacaccctcccctgctcttatattccaccagtagttttaacctgaccagggtggagggctggaggtgaggcaggtggaatctgtgatgagagctctggctttcctggaagttcaagctgaatttaaatcaaacccttcctctctatgcctggcctcataggtcatgttcaagaagtcagtgagatcattggggagatggatgaagcacagttctgcctggagtgacatctgatgggccaggtgacttctaggaaggccctccacactcaggctccctgttactactctccagtmgggagggtcccagcggctttgaggaaaccatcaccacagcgtgacatctcatcagatgtacccagtatgtgggtcacccacgagaagttgatgatcccctctgctctgcacccttcccaagttagaacctgccctccattccctgaagtcacctgagtt

SEQ ID NO: 463580 - DNA, 555 bp, Homo sapiens
gctgtgggggaagggacgttggttatcacttaaagcctgctgttccggagtggcctctcctgtgaggggccgactcaccaatgcggggaggtttggactcggtctgggcaaagcatgattagttcagtgttctgactcatgcaatgatgtcaggaccattgcagggcacataatcaggcactccagaraagaaaaatggccacgattaccagttggagaggaatatttcaaacaccttaagtcaataaggcttaaaactgggggctgtttctcctcctttctcaaggcagaaactgtcatggaaaaccccagtgctataaagtgcaccctcttacaggagcaagtccaacaggatctcaggagatgaaccctgggaggagcccccggttaggaagctttgcattttaagcggggcctgacttcacagcccacggctggcaaggcccatctgaggagagcaagctacccattagtctctatcacaacatttcatttgagggtgtgccaaggaaaaccacctgattggcaaatagtaaactcacttaatagcctctc

SEQ ID NO: 463581 - DNA, 548 bp, Homo sapiens
ccttttccaacagcatgtctcatcctgcacctagctcagtgcttctggtatctktcacagaacctggctcacgccaggcactcaataaatacttactgggggaatagtgggatggatggatgatatgatgtccatctgggtataattttatctcagagtagcttgttgttctagggtgtatgcatgtggggatagaggagcccacaagaaaggtctgagactcattaattcatctatttttccccctctagcacctacaccatggtcttgtacataataagagtttaataagtgtgtgctaaatgaaagaagataagctttgatcagaaatatgagtccaaggattcaggttttcccatgaaactttaatgccataaaggatttctgcatatgaaatttacccttctctgctcacctttacataattcaagcagcatgtggctccttggggacttctttggacattaagttctctctcaacagtcctaggattgaacagctgcatgtaagcaattaccatctatttgtcattaccagggggttatggg

SEQ ID NO: 463582 - DNA, 560 bp, Homo sapiens
aggtgaattatctcacctctctgaacctcagtgttgtcttaaaaaacatggatataattgtaatcatgtcattgggtgggtggttgtgcaaatgagataatgaatatgaatcaccaagcctatagtggatgctcaataaatggcagttgcttttatggttgtgtttttraattggtattattgtcaccactcagaaatgtacatgctggttctcagcctatgggcctaaaaacaaacacccataaaaggatttctctctctctgttcttctgggaatctttccaagttttgtttcctaattctgctggtccaccttgcctgttcctcatttatgactgatcatcatagatttgcatttctatgatccatcaagacgaggaaggagatgggaccagatggaaccaggattgagcaggaggctctactctggcactggactcccagaaagattgctatccatcctttatgccatgctcataggggcatggagaactcagactggaccctgtcatctcctgtattgcttaggaaagcatttggctgcaagtaacagaaaactt

SEQ ID NO: 463583 - DNA, 553 bp, Homo sapiens
aagcgcccagttttgttcaggtcagggaaatgaagcaccacccagtgggamtgggtgagaacaagccaattaaattgtgacattttattagtatcttgtccttgagctcatggcctaattgttgcaagtttgtccaggagaggacttctgaaaccataattctgttgctaaaactcaaactcataattttcatgctaaattgtccttcttctattcagagcccattatataattcaagagatacagcctgatgtgtaaagttcttgtgaagatgaagatgatggagccaagcctgctgggttgagccttgcccaggccaacctgctatggcccaggggtcaccctctcatccacccctcttcagccttgcaaaagccacaaccttgcaccttgtctcaggtggggttctcagggaaacagactctgagatggaaatttgcatacagggactttattgtgcagagtatgggaggagcgagtggtttcaagaacatctggaaggggacaaatgagggaaacaggactgggcagagagagaggttgagttgggatg

SEQ ID NO: 463584 - DNA, 464 bp, Homo sapiens
atgtaaggaaatgacttgttagctcttttaaagcaccccaaacatagtgactttaaacaataaccattcatgatgactcacaagcccgtcaactggctaggcagttctggcctgggagggatgacagtgcttccagcagtgcccccaccatgtgtctgctgtctgatgggaactgatttgtctagaaagggcccagctaggatggctcatctctgccttatgtggtctttcatcctctggcagcatagcttgggattgttcacatagcaacttggcaagtttccaagaaagggtttggggcttcttgaaaggtaggcctgggactagcacatcttcatttatgtcacattttggtgatcaaagcaagtcacaaggccagcccagatttgagggrtgaggaaatagattccacttctacctgggaggaggtgcaaagtcacattgtaagaagcatggacacagag

SEQ ID NO: 463585 - DNA, 598 bp, Homo sapiens
ctgtcattgtctactgcccatgtgggacatttttaccattttattgtttttttttaacttttattttcagttcaggagtacatgtgcaggtttgttatataggtaaactgcttgtcacagaagtttggtgtatggatgattttgacacccaggtaataagcataatacctggcaggtggttttttgtccctctccctccactttaaattggtggctggaagaaccactctcaggggcaaaaggggatgcctgtgaaatagcagccgactcgccaaytgaacttccaaatccatgtgtcaattagttcctggtgagcagtgcccccaagagctcagggccagctttctctccatgagtccaaggacaacctagaattaaagaatcacatcctgggttttggtgtctctgctggcctctaccatcaaaaggattcaattaaagtgacaaggattgaaatgcctctttataaagccaggtgattcttcccttcagatttatacattaatgttcaaaataaaagatcagctgtgtgcagtggcttaagctacaagacacatttagccaaacaagcatgtgcaagtgcagaaatttgagtttc

SEQ ID NO: 463586 - DNA, 598 bp, Homo sapiens
ctgtcattgtctactgcccatgtgggacatttttaccattttattgtttttttttaacttttattttcagttcaggagtacatgtgcaggtttgttatataggtaaactgcttgtcacagaagtttggtgtatggatgattttgacacccaggtaataagcataatacctggcaggtggttttttgtccctctccctccactttaaattggtggctggaagaaccactctcaggggcaaaaggggatgcctgtgaaatagcagccgactcgccaactgaacttccaaatccatgtgtcaattwgttcctggtgagcagtgcccccaagagctcagggccagctttctctccatgagtccaaggacaacctagaattaaagaatcacatcctgggttttggtgtctctgctggcctctaccatcaaaaggattcaattaaagtgacaaggattgaaatgcctctttataaagccaggtgattcttcccttcagatttatacattaatgttcaaaataaaagatcagctgtgtgcagtggcttaagctacaagacacatttagccaaacaagcatgtgcaagtgcagaaatttgagtttc

SEQ ID NO: 463587 - DNA, 630 bp, Homo sapiens
actgcaaagggcaatcaattagttaaatctctagttacagagttagatggtaaacctcattgcagaacatctcccagccttcatggctcctcttacattttgtgcaatcaatctatcaatcagcctttagtaagtacgtaactcatgttacaaycatgagatttccaaaggatacagaaaacatcaaacacccctccttgcccaccagaggtttttaaggaagacataacatacccatggaaatctgtggcaaatgcatggtacatacaccattcatggatctccttgtaccttaccagtggtagcccttggaattatgtaaattaagacagagatgtcagaattgcagaatcttagaagacccaattgccttcatgccccaggccaaaccttactcagtgagagagggcttttaaataatttacaagttacaaaattgtatctacctcccaggtccttcccactgaccccatcatgctgtcatcccaacactataccttccacattcccatgacaactcacatgacaaggagttggggagagtaggtttacttatccattcattaagcaaaagttcatggagaactactaagtgtgctaagttctggacctatagcagtgaacaaaaca

SEQ ID NO: 463588 - DNA, 582 bp, Homo sapiens
tactctgttcagtttttaatcctttattttgtaggtataataacatgtaataattggtaaaggatcattaaataatgtcttcaagtcataagaattgtactttgaaaaactaatttggcagaaggggtaagtaaaaggatgagaagtctgacatggagaaaccagtataatataatgaaagtctgaagtggtgtggtggcaataggaaaagaaaagatcaggatgagaaattgctttaaaaaataaaagtacattcttcataagcaaaaaaatagataaaaggagaaaatactctgagtagtactcttaatgagtgtgtattgaagagtttatcacactgaatggtaactgctgtccatttgtctcttgccccatcctctctcttcctttcccagatccattactttatctagttcatctttgagtactagagatattatggattttctgcagtatattacattttaaaraatcctagtacaacaaaatcaaatcttttaaaaattttaattttattttaagttccaggatacatgtgcaggacatgcaggtttgttacataggtaaacatgtgtcatggtg

SEQ ID NO: 463589 - DNA, 494 bp, Homo sapiens
aaagttatttttaaatggcagtcctctccaattttaagacattgtatttcctccgaactttcttttcttctttttgatatggagtctcactgtgtcacccaggctggagtgcagcggcacgatctcggctcactgcaacctccacctctcgggttcaagcaattctccttccttagcctcctgtgtagctgggattacaggcatgcaccaccatgtccagctaattttttgtgtatttttagtagagacggggtttcaccatgttggtcaggctggtctcgaactcctgacctcgtgatccacctgccttggcctcccaaagttctgggattacaggagtgagccaccttgcccggcctgaactttctaatagtctagagtcctcasgcagtttttttgaattgaattacaagtaccatgactagaaatatttcctgagtgtctactatgtctgcgaaacgaagaaattttagtaaagggtaagaccagtgatg

SEQ ID NO: 463590 - DNA, 618 bp, Homo sapiens
gttccttcaacttctgttataagagcactaatgtattcttgagggcagagccatcatgacttaatcactttccaaaaggcttcacctcttaataccatcaccttggggtttaaattccaacatgaggatcttggagggacacatacattcaaaccatagcagtaactgttgtctgaaagagggcagagacttctacacatccagaatgaatgttaatactagatataaaagcatgggcccaaggctgaggtggaccaagcttttcccacctgaaagagaagtagcaacaaataggacaccattggggtagtggttkggatgtcttccctcagcctacagtcacctgcctccctaatttctcctcattaagaggaaataaagtgaaaaataatttattgcccagtaaaccatacaatttggatcaacattttcaacattggccattgacttccctcgaatcctgttataatcctcctgcaaaacctttattcttggttttctagcccttgagtactttagaaaataagtgtgaaattatattcaaaatatggagtggacttttcaaaaatgtaaaatattacttcaaaatatattttggtgctatcctctcattattat

SEQ ID NO: 463591 - DNA, 618 bp, Homo sapiens
gttccttcaacttctgttataagagcactaatgtattcttgagggcagagccatcatgacttaatcactttccaaaaggcttcacctcttaataccatcaccttggggtttaaattccaacatgaggatcttggagggacacatacattcaaaccatagcagtaactgttgtctgaaagagggcagagacttctacacatccagaatgaatgttaatactagatataaaagcatgggcccaaggctgaggtggaccaagcttttcccacctgaaagagaagtagcaacaaataggacaccattggggtagtggttgggatgtcttccctcagcctacagtcacctgcctccctaatttctcctcattaagaggaaataaagtgaaaaataatttattgcccagtaaaccatacaatttggatcaacattttcaacattkgccattgacttccctcgaatcctgttataatcctcctgcaaaacctttattcttggttttctagcccttgagtactttagaaaataagtgtgaaattatattcaaaatatggagtggacttttcaaaaatgtaaaatattacttcaaaatatattttggtgctatcctctcattattat

SEQ ID NO: 463592 - DNA, 577 bp, Homo sapiens
tgccaattattgacaaggaagaacgctttaattggatgctgccgctgacgagatgggagctcagtctcaaatccatctgcctgactgactaaaactatgggtttatatagtagggaacaaatgcaacaatatgcaagaaacaagaactagggaggggcaagcaagcaatcataatgaatgaaggatctggcatctcattgtctggatgtggtgctctggtgagcttcagttctttggtactttgagaggcttgaaggtcatttactgaggaaggaactcagatcgaacagatgtaaggttcaagctttaagaccataagagtcaatttctatgtttacccaaacaactatctatgggactattgggttgttttcagcattatattgtatgtagtcttctgagtcttgatgatttttattgaacataggcttctgyggtttatatatgttactgcacacagtagaaatttttttcattttcactgtcatacaatattcaaatatgtgacagcaccacaatttttcatctatttcctgttagactctgggtgactttcagttttctgataatataaaga

SEQ ID NO: 463593 - DNA, 594 bp, Homo sapiens
aacattttacttctctttaaggattataaagtaataaagcctgttataaaacttcaagcagaagaactatataataaaaaatgaaagtccccctttactcacatcctaatgtgtctctctcctcctttgcaaaattccagttcccccaacacataaatgtaatttattgtgatactgatttatgctttcttcttgctgcartttctcctcactcatgtaagaaagtatcatggctactcaacttcctggccttaggaaatgtttatatgtgcaaagcaacagaaagttttggggtagggggcatgaagagaatggttgagtggtttcttaggagagtaaaaccttaaactccagggttcccagccttagcaatgatttgtcaggctcaaatatttggctttaagagaccacacatatgtgggcaatcaccatctcaaggtgaatgaggagtagataattgaaggtctcctctgaatatattgccctgtgcaaggggcccagaccttgcatgatttagaatgaagagttcataactaagactgaatatcctaacagctaattagatggaggaccaggattgaagattatataaaa

SEQ ID NO: 463594 - DNA, 547 bp, Homo sapiens
gctatttcatactaaaaggaacaagggctccttggagaaatgattgactccaggtctgggcaggaaatgaacccgtcaagtctgggacatcttaggagtgtcctccctgccagtgggtaacaagacttcacctccccccaaatctgtcagtaaagcccatgtagggagcctggacttccacgtccatctggtggtaaagaaatgcccctcctcccctctgctggggtggtgtcagctgaggtctagtgggagtcagaacttttgtcattacccagtggtcctgggtagtacggctacccctctatttttccatgcagagtcagtggagtccgtgtggagagtagtaacaaggcactcctgcccctcccagccaggaaggtatcaatggaggccttgcggagagccagaaataccactcctgcccagcagtartgaagagctcctcctactgtttgtcaaagaaggccaaggagggaacctagactattacctgcatctggcagtaagaaggcagtgcccccttctccttgcccaagtcatttcagaa

SEQ ID NO: 463595 - DNA, 504 bp, Homo sapiens
aagaagatatacaaatggccaacaagcatatgaaaaaatgctcaacatcactaatgatcagggaaatgcaaatcaaaaccacaatgtgataccaccttactcctgcaagaatgaccataatcaaaaaataaaatttatataaataaataaaaacagtagctgttggcatggatgcggtgcatcaagaaacacccttctacactgctgatgggaatgtaaactagtacaaccactatggaaaacaatgtggacattccttaaagaactaaaagtagaactgcaatttgatccagcagatctggatctagatactgcatatctacccagaggaaaagaagtcattatacgaaaaagatacttgcacacacatgtttatagcagcacaattcacaattgcaaaatggtggwaccatcccaaatgcccatcagtcaacaagtggataaagaaactgtggtatatgtatacacaaaggaatactactcagccataagaaggaatgaatt

SEQ ID NO: 463596 - DNA, 619 bp, Homo sapiens
ctgatccactggcctcttagctccttgaagcaagggttgggtttctcatctttagaatcctacaacactgtagtggattccctaggagagcccgagagtgtgcttcttgaggtgayttattgagggagggctctcaggagaactataagaaattaagggaagcaagatagggccagaagaaaactaggggaagatgtgatttcagaagtctcacctctgcctgatcccgtggggagctttggagtgtaaattacatcacagtttgtcccactcagagacaaggaggctgggctctcatagctgccacccctatcagtcactccttcctataagtcataccctaatgagagggaaggcagctcagggtgagtgagacatctcccatcaggccagggcaatgctccagaggaaggtacagccacacccacagcacctgggggcatcaccctaatgaagtgcactggcagcatctgctgcagtcatcagttttaaaaaaatattaaacagcatatgcaggcccttcttgtccagctgatttcatcctctgtagtggacactcccagaagccaagtctaatgaatcaatgaattagaaatcaatgtgtctcctgcagggctgc

SEQ ID NO: 463597 - DNA, 619 bp, Homo sapiens
ctgatccactggcctcttagctccttgaagcaagggttgggtttctcatctttagaatcctacaacactgtagtggattccctaggagagcccgagagtgtgcttcttgaggtgatttattgagggagggctctcaggagaactataagaaattaagggaagcaagatagggccagaagaaaactaggggaagatgtgatttcagaagtctcacctctgcctgatcccgtggggagctttggagtgtaaattacatcacagtttgtcccactcagagacaaggaggctgggctctcatagctgccacccctatcagtcactccttcctataagtcataccctaatgagagggaaggcagctcagggtgagtgagacatctcccatcaggccagggcaatgctccagaggaaggtacagccacacccacagcacctgggggcatcaccctaatgaagtgcactggcagcatctgctgcagtcatcagttttaaaaaaatattaaacagcatatgcaggcccttcttgtccagctgatttcatcctctgtagtggacrctcccagaagccaagtctaatgaatcaatgaattagaaatcaatgtgtctcctgcagggctgc

SEQ ID NO: 463598 - DNA, 619 bp, Homo sapiens
ctgatccactggcctcttagctccttgaagcaagggttgggtttctcatctttagaatcctacaacactgtagtggattccctaggagagcccgagagtgtgcttcttgaggtgatttattgagggagggctctcaggagaactataagaaattaagggaagcaagatagggccagaagaaaactaggggaagatgtgatttcagaagtctcacctctgcctgatcccgtggggagctttggagtgtaaattacatcacagtttgtcccactcagagacaaggaggctgggctctcatagctgccacccctatcagtcactccttcctataagtcataccctaatgagagggaaggcagctcagggtgagtgagacatctcccatcaggccagggcaatgctccagaggaaggtacagccacacccacagcacctgggggcatcaccctaatgaagtgcactggcagcatctgctgcagtcatcagttttaaaaaaatattaaacagcatatgcaggcccttcttgtccagctgatttcatcctctgtagtggacactcccagaagccaagtctaatgaatcaatgaattagaaatcartgtgtctcctgcagggctgc

SEQ ID NO: 463599 - DNA, 614 bp, Homo sapiens
taccctaatgagagggaaggcagctcagggtgagtgagacatctcccatcaggccagggcaatgctccagaggaaggtacagccacacccacagcacctgggggcatcaccctaatgaagtgcactggcagcatctgctgcagtcatcagttttaaaaaaatattaaacagcatatgcaggcccttcttgtccagctgatttcatcctctgtagtggacactcccagaagccaagtctaatgaatcaatgaattagaaatcaatgtgtctcctgcagggctgcccacccctgccaccttttcccacaagactacactgygcagacttcaatgggtgtccagcatccaccatcccatctgcaaagatcatggaagctgcaacacagaacattaactgaaatacaagcttgttcatcagggttttattttagcgccacactgcttccagtgaagaaaggacaggaaagaagtatggtggattgtttttttaactttgtagcacaaaagattgtggtgatccttccccaagagttgaaaataaaacatgaggagggaaaccactgcccccaaagccagtgctgctgatgagcaggtgtctgacatgcatgtgattct

SEQ ID NO: 463600 - DNA, 553 bp, Homo sapiens
ttaataacgtaaagtcctcattacagtaaatgtttcactgtctcctgtggctcaaggggcaagcasggagggcggctctgccttcctctattgatttccagaaagacctcttacttcccaattgtccaggtagcattgtcaactgaggtgttgtttttcctcaggtatgaagaccctctacagctttgtatttttccattacagaaattcccatttgttttctctttatgcagcacatcccacaggggtgcaaaggctggatgggtgagtgctattatgtggggcagcgagccggcaaagcctcgccaggcgtctctgctgacctggagtgatttcataagtgttcagaattgtcctcggctgattttcactgtccctagctgttaaggctgcagtgatagccccatattaattatcagctccatcctcagctgtcatgctgccattcctacccacggcagctcctaaatctgggctgcccattagaattgcctgggaaggctgttaaaatctaactcctgagacctgctgaattgtaatctgtcagaggaca

SEQ ID NO: 463601 - DNA, 551 bp, Homo sapiens
ttaactccacctaggagacagagaacagagcagtgaatgcaaaccatagttcccttgtctggggtcagcatttgtaacatgttgatgaaaaatatcctttgggaaataaggatggcagatgatgttggtgatttgactatctttagcttaatggagtcagatattcyagcaggagctactaagtattggggttctttcaatatctcatggagcaaagtggcaatttagttcttagtcctttgttggtagtcaaatatccttcctgtatgtttaacacaagcactctttcttctccccaccatctctccaccccccctgaaaataaaataagaaaagcattcacatcatatctacatacattctggggatagagctgctcttggagtgtttctgttttcctggtctctctggcatttgaagcagaaagactcagctcatattcatttttactactttccccagtcagaatggaagctgagatagatagcaaggtcttcttacacctttacctcatagaagttgatgatgttagtctggttgggagtcaacag

SEQ ID NO: 463602 - DNA, 551 bp, Homo sapiens
ttaactccacctaggagacagagaacagagcagtgaatgcaaaccatagttcccttgtctggggtcagcatttgtaacatgttgatgaaaaatatcctttgggaaataaggatggcagatgatgttggtgatttgactatctttagcttaatggagtcagatattccagcaggagctactaagtrttggggttctttcaatatctcatggagcaaagtggcaatttagttcttagtcctttgttggtagtcaaatatccttcctgtatgtttaacacaagcactctttcttctccccaccatctctccaccccccctgaaaataaaataagaaaagcattcacatcatatctacatacattctggggatagagctgctcttggagtgtttctgttttcctggtctctctggcatttgaagcagaaagactcagctcatattcatttttactactttccccagtcagaatggaagctgagatagatagcaaggtcttcttacacctttacctcatagaagttgatgatgttagtctggttgggagtcaacag

SEQ ID NO: 463603 - DNA, 551 bp, Homo sapiens
ttaactccacctaggagacagagaacagagcagtgaatgcaaaccatagttcccttgtctggggtcagcatttgtaacatgttgatgaaaaatatcctttgggaaataaggatggcagatgatgttggtgatttgactatctttagcttaatggagtcagatattccagcaggagctactaagtattggggttctttcaatatctcatggagcaaagtggcaatttagttcttagwcctttgttggtagtcaaatatccttcctgtatgtttaacacaagcactctttcttctccccaccatctctccaccccccctgaaaataaaataagaaaagcattcacatcatatctacatacattctggggatagagctgctcttggagtgtttctgttttcctggtctctctggcatttgaagcagaaagactcagctcatattcatttttactactttccccagtcagaatggaagctgagatagatagcaaggtcttcttacacctttacctcatagaagttgatgatgttagtctggttgggagtcaacag

SEQ ID NO: 463604 - DNA, 551 bp, Homo sapiens
ttaactccacctaggagacagagaacagagcagtgaatgcaaaccatagttcccttgtctggggtcagcatttgtaacatgttgatgaaaaatatcctttgggaaataaggatggcagatgatgttggtgatttgactatctttagcttaatggagtcagatattccagcaggagctactaagtattggggttctttcaatatctcatggagcaaagtggcaatttagttcttagtcctttgttggtagtcaaatatccttcctgtatgtttaacacaagcactctttcttctccccaccatctctccaccccccctgaaaataaaataagaaaagcattcacatcatatctacatacattctggggatagagctgctcttgsagtgtttctgttttcctggtctctctggcatttgaagcagaaagactcagctcatattcatttttactactttccccagtcagaatggaagctgagatagatagcaaggtcttcttacacctttacctcatagaagttgatgatgttagtctggttgggagtcaacag

SEQ ID NO: 463605 - DNA, 582 bp, Homo sapiens
tagatagcaaggtcttcttacacctttacctcatagaagttgatgatgttagtctggttgggagtcaacagagtgatggagcctgtcctgtccttgcacttgatctccacattcatagtgtagccctcggccttgacatttaatgtcacagggtggactttcttttccacattgcagatcaaattaaagttcacatctccttgctgctttggagtgaagaaaatatcaattgggaacctggttggggaacaaaacagcagattacctgactaggccaacttgtcaaaaccttaaaaaatatgagcctactgaattagcagattcaytacgaggaaaaggaaactccaaattatgatgacattttaagatttgtggctatagtaaccaaaacagcgtggtactggcataaaaacagacacacagactaatggaaaaagatagagatcccagaaataaagtcacacacctacaatcatctgatctttgaaaaagtcaacaaaaataagcaatgaggaaaggattccctattcaataaatgatgctgggatagctggctagccataagccagaagaataaaataa

SEQ ID NO: 463606 - DNA, 582 bp, Homo sapiens
tagatagcaaggtcttcttacacctttacctcatagaagttgatgatgttagtctggttgggagtcaacagagtgatggagcctgtcctgtccttgcacttgatctccacattcatagtgtagccctcggccttgacatttaatgtcacagggtggactttcttttccacattgcagatcaaattaaagttcacatctccttgctgctttggagtgaagaaaatatcaattgggaacctggttggggaacaaaacagcagattacctgactaggccaacttgtcaaaaccttaaaaaatatgagcctactgaattagcagattcattacgaggaaaaggaaactccaaattatgatgacattttaagatttgtggctatagtaaccaaaacagcgtggtactggcataaaaacagacacacagactaatggaaaaagatagagatcccagaaataaagycacacacctacaatcatctgatctttgaaaaagtcaacaaaaataagcaatgaggaaaggattccctattcaataaatgatgctgggatagctggctagccataagccagaagaataaaataa

SEQ ID NO: 463607 - DNA, 617 bp, Homo sapiens
  misc_feature (1)...(617): n = A,T,C or G
cactgcatttcagcctgggtgacaaagcgagactctgtcacaaacaaacaaacccgaaataagtgaattgtaaaagatgatggggtacaaaatcaatacacaaaaaacaattatatttctatattcttacagcaaatagtgaaattttaaaaagatactatttgtaatagcatcaaaatatataaaacctagaaataagcctaataaaagatgaataaagtctctacatagaaaaccaaataaatgctattgagagaaattaaaaaggacttaaataagaggagatttgctcrtggattggaaatctcaatatggcaaagagattaatgctccttttgatagacaggcctatgatggatctcaataatccccacctctggggattcccagcctcgcgtagtcttctcccatatgataccaggggctgacctgtgtgaccactggcatatggccagaaaagatggcatgtcacttgtgagattaaatgatgaaagactgtggcttctatnctttttctatttttttgagacagagtctcgctctgtcacccaggctggggtgcagtgttgccatctcggctcactgcaatctctgcttcccaggttcaagcaattcac

SEQ ID NO: 463608 - DNA, 427 bp, Homo sapiens
gatttgcatttcttgaattgttaatgaggtgaacctttaaaaaaaaacatgctggttggccactgaactcctcttcaggattttatttaaacatcccagcaaggccttccctggccactctatttaaaattgaataagacaaaagcaaaaacaaaacaaacaaacgaaaaccaacaaaaaaaaaamcccacttcttagccccttccctgtcttcttagcactcatcaccatctcacataccatagatttttatgtgattttgtctgcctacctgcccctgcaaaatataagcctcatgaaggctgaggcttttgtctgttttgatcacttaatgagtctcccacctggcagaaaggtgctcaaaaatatttgttttatgtgtgggtatgtttttgtttattttttatttctttattttttgagacag

SEQ ID NO: 463609 - DNA, 459 bp, Homo sapiens
caggttgacccttattcctaatatggagcctttyggagacctaacccaaaggccaggggatttaccaggacctcttttccttggcaggcctggagtcttaatttttgaaccccagccccatgagtctgtcagaagttttgctcagcttctcaaccacactgtcagctacaaataccctcgagggaagagcagccccaaatgctgggcccacttctctgtatttgtctcctctcccagatcttagcctgcaactcatgactgcctttgtggctctccagtgctttcagacacataggttttcaaaacgttttgtaaagattttctacttgtgggtgtggaattttatcaagtgatttttctgcatccattgacatgattgtatttctttttcttctttggtaggaccacacagtgggttacatattacattattgaatcagtttgtttggggcttaaatg

SEQ ID NO: 463610 - DNA, 547 bp, Homo sapiens
tttagttacttgctgggcctcacaggcccagtggtccacaggctgggccctcaggtgggctgtaacctttactgttgtgataatggctattagtctagaggcaacatgcttattctgaggcaggaagtagctgttaaattttcaaaccatttgctctggaaattgctcattcattatatatgagagcaggatgggaaaatgctggaggaataaatgttttctctctcaggttatttttcacttctctcttcattcccattctcatccccagtcccagaacctttgctttattattttctttgctgcatttgacttgctcctatcccaactttctttcaccttggaaggaaggaacatttaacgcaaaaagaaaaattaacatggaatctgaaaatagatggaaaaactctgtactctagatattagaacrttaagagctggcctcttcatattaaacagagatttattgattgcctgctatgtgctaggctgtgtgccatatccacctgctaaccatcctaatggagtttacagcccagttgcaaag

SEQ ID NO: 463611 - DNA, 609 bp, Homo sapiens
atagggttttgcacaggaaattcacaatgggcctttcctttagatcctagacatcttgggtctgggtgcctccggaccacccatcccgcctcccgccttattctcaatcgttttctacccggtgaagcggccacctttgaccatgacagacgacctggagcattttgtatttgtgatcccaccatccgaagatatatctctggatgaaaaaaaagaaatggaaatagaatcagactttttggccaccacaaacactacaaaggtaacacatgagcagtttattctcctaaccttggcaggacttcagcaggcagggagagaaggtcaccctccaccagaccaaaaatggagcctggcatgaggtgttctgctcactgggttattttcccttgactcgttggggatcctacctgaaaacctcatgtgagcatccctgractgcaccttccctggctctgacttgtcctacctcctaagaggaaacggataatgattgattctcacctaacaacctttgcagtccccattggagggtttagggaacttgtcaagttactctgcagcacatccacagtaagaaaataagcaaaactagcactcttaaaaaga

SEQ ID NO: 463612 - DNA, 609 bp, Homo sapiens
atagggttttgcacaggaaattcacaatgggcctttcctttagatcctagacatcttgggtctgggtgcctccggaccacccatcccgcctcccgccttattctcaatcgttttctacccggtgaagcggccacctttgaccatgacagacgacctggagcattttgtatttgtgatcccaccatccgaagatatatctctggatgaaaaaaaagaaatggaaatagaatcagactttttggccaccacaaacactacaaaggtaacacatgagcagtttattctcctaaccttggcaggacttcagcaggcagggagagaaggtcaccctccaccagaccaaaaatggagcctggcatgaggtgttctgctcactgggttattttcccttgactcgttggggatcctacctgaaaacctcatgtgagcatccctggactgcaccttccctggctctgacttgtcctacctcctaagaggaaacggataatgattgattctcacctaacaacctttgcagtccccattggagggtttagggaacttgtcaagttacyctgcagcacatccacagtaagaaaataagcaaaactagcactcttaaaaaga

SEQ ID NO: 463613 - DNA, 601 bp, Homo sapiens
cacaaatccagcatgcagactccacaggcaggggaagaactaaagccatacttgctttcacagctgggwggtgggtagcctggggcaagttctcagccctgcttgcccactgcctggaaacagactcaatgctgttggtgggggcatggtgggagtaagaccagccctttggattgcatgggagctgggtgaggcctggaactgctggctttagcccacttccctgacaacctgcacgactcagcagagggaggcataatcctcctaggtacataactccattgacctaggaacctcacccccatcctccacagcagccacagcaagaccagcccaaagagagtctgagctcagacatgcctagccctgtccccaactgatggtccttccctacccaccctggtacctgaacacaaagggcatatattcttgggagttctagggcactacccaccactggttccttcctctccatattaccacagctgatggtctctggaaagtgccccctcccatcaggaagccaaccagcacagaaatagagcattaaaccaccaaagctaagaatcctcacagagttcatttcacccccctgccacct

SEQ ID NO: 463614 - DNA, 564 bp, Homo sapiens
taacccataggaaaaaaggagaagtgccagctgtactcttgattttatgggaagtgcatggctccagggttctagtcttcaccctgtcactaacaataatgggaactgccatttactggccacctattatgtgccagggactgagtgagtggcctgtgtgttacaggcattaatccttgcartatctgtaggaggtattaatacatatcactatcatgtccacatcactaaatacaggccaagagaaggaagataagatgctccaagagaaggaaggtaagatgactggttactggcagaaccaggattcaaatttaggtcaggcctttacccactatgctaagcaggaagccttcagtacattgtgcctggtctcccagtctagagttccttctctgtaaaagaaggggaccatgcttgttggccttgagctttcctggtgcccgatttccactctgctcctactgcaaggacaagatccaaggacttgcttctctggccagtggcttaggtgataagacagaacactcagcaataacagtggtaattatcattatgataata

SEQ ID NO: 463615 - DNA, 544 bp, Homo sapiens
tgggtctgaatccaactcctcaaaaattaatgacctcaaccaagttacaagtttcattgtctgtaaaataagaataatagctgtacccctcatagggttgttgtagggattcgtagaattgtgtaaaggtttagaatagtgcctgaagcaagtacatttgataaatattagttgttcttgttattattattatgtttctacctaagatcctcatgtacatatttaattctgtctacatacacaggcttaacatgcattttttgccaagacctttggctccttcccttctctagaatatcaccagcaggtatcaagagtcctcaagatcggattctcaaaaatactaataccaggctctttcctagatgggccayctccaccctgggtgtgccaaggacatagtggtgaccatgaagtcagatgtacccatcaacctaaagaatatgcggatcaggtgcaagctctccaggattatgtttcagctccctacagaccagatccccgactgggatgaccgcatgcacacagtcaagtgggtggacgt

SEQ ID NO: 463616 - DNA, 558 bp, Homo sapiens
tttccagagtagctgtaccaatttatactcctacagcagagagcttattgatccatgtcctctccaacacttggcattgtcagacttcttgatttttatcatttgaatgaatgggaaatggtctcattatgagcctattttgcattgycctgatctctgatcacaaataaggctgagtatttcttcatatgattactagtcatacaagttatcccttgcaggaatgccttttcatgccttttgctcatttttcaattatgatacttatattttgtgtgagttgttttattttttataaactcttctgttcatattatttgtctgcaaatatccttaccaaatttatagtatatctttttttttttttttttgaggaggacagagttttgctctttcgcccaggccagaatacagtgacacaatctcggctcactgcaacctccgcctcctaggttcaagagagtctcatgccccagcctcccaagtagctgggattacaaacatgcaccaccacacccggctaatttttgtacttttagcagagacagggtttcacca

SEQ ID NO: 463617 - DNA, 488 bp, Homo sapiens
ctgccactcagccttggacttctagccttcagatttrggagaaaagaaacttctgttggttaggccacccagtgtgtggtacttgcaatggcagccctagcaaactcaaggaacgtgactaggagacggggtgggtggcagctgtcttctctcatcttctccttttaagccaaactagtggtctctgattagcttctatttcctggacaatgagacaggtccaagggcaggaaaaataacttcattcaatccattaatgcattcactcacatagcacccatttattgggcactattgggtctactgctgttccatgcactagttttacacatggggaatatttgatcaatgcctttacggggacttcttggctagtggtggaggcattgtgaagaaaataattacgtgtatgactgttacacagatgaaagcaagtaaaaacaaggtgggtacatttctaggatgaggttacagagaagcaggaaaga

SEQ ID NO: 463618 - DNA, 488 bp, Homo sapiens
ctgccactcagccttggacttctagccttcagatttgggagaaaagaaacttctgttggttaggccacccagtgtgtggtacttgcaatggcagccctagcaaactcaaggaacgtgactaggagacggggtgggtggcagctgtcttctctcatcttctccttttaagccaaactagtggtctctgattagcttctatttcctggacaatgagacaggtccaagggcaggaaaaataacttcattcaatccattaatgcattcactcacatagcacccatttattgggcactattgggtctactgctgttccatgcactagttttacacatggggaatatttgatcaatgcctttacggggacttcttggytagtggtggaggcattgtgaagaaaataattacgtgtatgactgttacacagatgaaagcaagtaaaaacaaggtgggtacatttctaggatgaggttacagagaagcaggaaaga

SEQ ID NO: 463619 - DNA, 488 bp, Homo sapiens
ctgccactcagccttggacttctagccttcagatttgggagaaaagaaacttctgttggttaggccacccagtgtgtggtacttgcaatggcagccctagcaaactcaaggaacgtgactaggagacggggtgggtggcagctgtcttctctcatcttctccttttaagccaaactagtggtctctgattagcttctatttcctggacaatgagacaggtccaagggcaggaaaaataacttcattcaatccattaatgcattcactcacatagcacccatttattgggcactattgggtctactgctgttccatgcactagttttacacatggggaatatttgatcaatgcctttacggggacttcttggctagtggtggaggcattgtgaagaaaataattaygtgtatgactgttacacagatgaaagcaagtaaaaacaaggtgggtacatttctaggatgaggttacagagaagcaggaaaga

SEQ ID NO: 463620 - DNA, 568 bp, Homo sapiens
gcgctttgcccacctctccatgtcttcttacaggtcagaccaattccatcctgctctctctgcttcagccaaactggcctcttttattccctatttactcagcttcctggactccacagagcttttgctcatgctttgctctgtgcctgaagattcttccaaccctcatccttctgaygacagctgtagtctccacctctgagaggcaacttctgacctccctacggtggtcccttactcccatcacattgcataaaactgtaatcaagtggttatgttggggaatctaccatcagctccgtaagtccaggatttggttttgtttggctcatggttgtatttccacatttgtgaaatacatatttgttcctaaatgagaacgatagatgctagaagttgaagtaaatttggcataaagtcagagaaaggtaaaatgtcacaatctgatatttggaggcagaatctaaaaacttcagttatatcaaaactgattttatatcgttttaggctggattgttgcagggactctttgggtaatctttaaaactgagttctcagagagccttgt

SEQ ID NO: 463621 - DNA, 568 bp, Homo sapiens
gcgctttgcccacctctccatgtcttcttacaggtcagaccaattccatcctgctctctctgcttcagccaaactggcctcttttattccctatttactcagcttcctggactccacagagcttttgctcatgctttgctctgtgcctgaagattcttccaaccctcatccttctgatgacagctgtagtctccacctctgagaggcaacttctgacctccctacggtggtcccttactcccatcacattgcataaaactgtaatcaagtggttatgttggggaatctaccatcagctccgtaagtccaggatttggttttgtttggctcatggttgtatttccacatttgtgaaatacatatttgttcctaaatgagaacgatagatgctagaagttgaagtaaatttggcataaagtcagagaaaggtaaaatgtcacaatctgatatttggaggcagaatctaaaaacttcagttatatcaaaactgattttatatcgttttargctggattgttgcagggactctttgggtaatctttaaaactgagttctcagagagccttgt

SEQ ID NO: 463622 - DNA, 613 bp, Homo sapiens
ttgctccatttcagcctgggcatttcacctgtggaaatatrttttcttcttgttttaaaactaatatacactcttttccttttttccccatgacaaaatttcagaactccattatctaccttgagtgacaattcattcttaaacaatattgtggttagcaattttacattaagcaagggtgtggtctcataaacagaggatccaggggaaaaaaagaggtaaaatagtattaagtacgtgtatgtgtgcacatgtgtgtgaatgtgtattagggctgccagataaaatacaagatgcctagttaaatttgagtttcagataaacaatgaataactttttagtataaatatgtccagtgtaatatttgagacatactaaaaaatatttgttatttatctgaaattcaaatttaactagacagcctgtatttttttctcctaaatctggcaatcctagtgtgtatgtgtatttacaagacacagcaaaattaagttttaaaaagcatttacttcttctacaacctgatttattggtatcaaaaatctgttttgttaggtaacccttcttcaggatccccatttttagttatttgaacaccactgctaataagctc

SEQ ID NO: 463623 - DNA, 622 bp, Homo sapiens
tgtaacgcaccaagtttgcatttcttggccatatattattacacggtgtgtaggtggaaaaaaaaatttacagattattttcctgtagaaaagggaatgctgccaggggcggtggctcaggcctgtaatcccagcactttgggaggccgaggcgggaggatcacgaggtcaggagatcgagaccatcttggctaacacggtgaaaccccktctctactaaaaatacaaaaaattagccgggcgtggtggcgggcacctgtagtcccagctactcgggaggctgaggcaggagaatggcgtgaacccgggaggcggatcttgcagtgagcggagatcgcgccactgcactccagcctgggcgacagagcaagactccgtctcaaaaaaaaaaaaaaaaagaaggaaagaaaagaaaagggaatgctgtcctgatggcatcaattttaaaactggagtaaaactctagaaagcagtagaattaacctacttattagtggcattcctagtatggataattacattcaacttgagaatcacccaaagtcgagaaaaagcatgatcaataagacccaaatacatgatcagtacatgaacaccaaacttgtattctagtagatagatt

SEQ ID NO: 463624 - DNA, 527 bp, Homo sapiens
ggaaagtggaaatgaaagatggctttcacattctgtatttggagaaaattttgccctgcagcttaacatttgggataattgtgacagagtgtggcataaagtcatttgaagggtgaggagggagtgtttctccccttatcagtgggctggtttctgtgtcttaggatactggcacagtgtgacatcagcaccagcagcaggagggccactgaaaagtgactttgctgaggcgtgttctctttttctgattgccagagcagaaagagtagaaagagtccaacactatgttgaggattgaaagtatttaatgrtttccagaagtgttgtgaagatttccttgacagggaagggaggagcatgagtttgggggcccacaactggatgagttagagttggacaaacgttatgcacaccttagcctattgagcattgtgttttctaagactatatatatcacttccacaatggcatgcttttagactaactcaaattagggcagcatgcatttgaagctgtgagaatgttag

SEQ ID NO: 463625 - DNA, 556 bp, Homo sapiens
aaatctccccatatcctctttcttaccccagactccggtaaccacaattctactctcgacttttgtgagatcaaatttttagattctatgtatgagtgagatcatgtgggatttgtctttctgtgcattttatgtatgttacatgttacaaagatccttaagaakggtagttttgtatcaacacatagttttagaagttcatataaacatgaaaggagaggttaagaaacagaaatatgttaacaaattaggggaaagtggggattaaattaccaaagattaaattgcttaattaagatcagagattggagaataattttagaggctaaatagaggagataacttgtcaaaggatgaaggattcaggatttccattacagcctaagaagcttcctgagattcaggacagagccttgagatcccctggattagtaatttgctacttaattatagatatttaaaacaatacagattgtacaggaacataaatacagacaataaatggatattaagtacatgggaaatgttgcctatggggaaaggggaaagagtaggt

SEQ ID NO: 463626 - DNA, 589 bp, Homo sapiens
aatagagaataagtagagaaggtttttaaatggataaaaatgataaaacaatgataatgtactaattttaatcaaatctttgaagtattttcatattcaaactactttgtgatttgttatgaagggatgaacatacgatgacacagttaagatttacacagtaatttatattcaaactgagagatgttcttagaatctaatatataaataaattcttgagtgatgttaacaaaacaacaattcaattctcccaagcctaatccagcaatataaaaaaaagtatgtgtgtgactttaagaaggttagtattatctttcaagttcacktgtgtgaaatagtggtaaacatgtgactttttgctctatgagcatatgtgcctacatttataaggagtttagctggctcattgttttagagatgtgcaaaaaatgatttaatttctatgactgcccatgtttatgtatcccatatgctggaattgtttagaaactatctcatcctatttttcgcggcaattttttgtaaataaatagcaataatggaccatagatttttatactggctttactccaaagatacaacaaaaagg

SEQ ID NO: 463627 - DNA, 571 bp, Homo sapiens
gtgagtgagtacaggaaccggtcggccactttggtgctggcaggagcaaactccgtgccggcctcacagcagcatcccaasggggtgcctgcaaccccatgaccccagagggtgtgttacaatgctctcttagttccaccatccacagacagcatgtgttatcagctcagtgggccctttgcctcctcatcatgtggggcagctgtcctccaccagagagggcaaaagggccagtgtgacagttgttctgggtacctgcactttgtgcatcccaaattcttgtccagtgcccaagaggaatgaggtaacatggatgaattgaaagatggtgagtgcggagaattttattgggcaatgaaagtggctctcagcagagaggagagctggagatgagatagaaagggcaggtcactctttcctgaagtcgagccacctttctgtctctctcttataaagtgaacgccgccactttccaatgtccagctgctgtctctcaagtcaagtcacctctccctgatgtccagccacttctctctactggctgagtctggggtctttataggcacaggat

SEQ ID NO: 463628 - DNA, 658 bp, Homo sapiens
tgaggtaacatggatgaattgaaagatggtgagtgcggagaattttattgggcaatgaaagtggctctcagcagagaggagagctggagatgagatagaaagggcaggtcactctttcctgaagtcgagccacctttctgtctctctcttataaagtgaacgccgccactttccaatgtccagctgctgtctctcaagtcaagtcacctctccctgatgtccagccacttctctctactggctgagtctggggtctttataggcacaggatgggataagggtgggtcayaggtagttttggaaaaggcaaaaatcaactggtaaaatgacatcattcagaaagaatcaatcaggagacagcaggcacacaaggatagaagttctcactttgggccgctgttttcaggcttttcagtttgaaggtgaggttttgccagggacccacccctgtctgtctaaagtttctctgcctcctgtctgtatcaattttaaaaaattaattgtttatctaaaattcaaatttaactgacagtcctgtgtgtgtgtatgtgtttgtttgtgtttcctaaatctaacaaccctactaaaaaagtgaatgaagactattctgttttatattagagggccatggaggctttgccacatttatcatttgtac

SEQ ID NO: 463629 - DNA, 594 bp, Homo sapiens
cagctgctgtctctcaagtcaagtcacctctccctgatgtccagccacttctctctactggctgagtctggggtctttataggcacaggatgggataagggtgggtcacaggtagttttggaaaaggcaaaaatcaactggtaaaatgacatcattcagaaagaatcaatcaggagacagcaggcacacaaggatagaagttctcactttgggccgctgttttcaggcttttcagtttgaaggtgaggttttgccagggacccacccctgtctgtctaaagtttctctgcctcctgtctgtatcaattttaaaaaattaattgtttatctaaaattcaaatttaactgacagtcctgtgtgtgtgtatgtgtttgtttgtgtttcmtaaatctaacaaccctactaaaaaagtgaatgaagactattctgttttatattagagggccatggaggctttgccacatttatcatttgtacaggatcttgcactgtatcatgtgtctattttttaaaaacattgccccccaaccccatcatttggaaatcaaaaaaatttctctttaagcatggtctggagtcaaatcccagcatca

SEQ ID NO: 463630 - DNA, 579 bp, Homo sapiens
ccctggcaatgtattatagttgcccgaaagaaaatgaaacttccgttacccaagatacactttaacttatacctttcaaactttcawaaacagaacatgaggctttatagactttttaggcagcacagtgcaaataaatctgttataggctctcatcatttcaatataatgactaaaagaccgggtccagccaggagtggtggctcatccctataatcccagcactttgggacatcaaggtaggaggaatacttgaggccaggagttcaagactagcctgggcaatgcaacaagtctccatctctgcaaaaagaaaattttaaaaagtaatataaaaaaccaggtccagaaaaggtaacactgagtaagggtattctccccaaattctaagtgtttaaacaggcatttgatgagacatatggaaaacaactacaacaaaggaaaaatctatgtaaatggtgtcagcccagcctgtttgaaaactgtaaaaataagtctggtctatatcaaagtgatgtcaaaggagttgcttgggggactttggtgaactctgctttccccataaccttaaccctaacc

SEQ ID NO: 463631 - DNA, 566 bp, Homo sapiens
  misc_feature (1)...(566): n = A,T,C or G
ttagtttggttcggaaacaaatgtcttctagaaagtctgcttactgtttgaagttgtatttattgccattttattgtttttttgttaaccccatactttatgtaagacctttgttttgccaaacaagttttgctgaccgtggtactttttagtcgtatattataactttgacaatagaggaacaattactaaatttccaactttttccagataatttaggaagtaggtaggtgcagatttacaagtatagagtggccatttagaacagcttgtgcataattgatatggcagttgacccccagacctctcctttgagtcttactcaataattctatcmttttgtcaaagcattagtaaacaatatagaataatttaaaatggaggacaaataagtgagtttaccttgtacccaacacagcaaataacttgaagaaatgtcttaggtattttggtttaatgaaaaacctctgaacctgtgtggctcactatgtattctccctctcaatcactgaccacccccttatctctcccacacccctcagggttcannnnnnnnnnnnnnnnnn

SEQ ID NO: 463632 - DNA, 455 bp, Homo sapiens
ttgattttagataagtaaggttttagatgcccaatagacatttaaaaagagttgccaggagaaaatttgaatacacacattggaaattcatatgtaagaaccaggaaagaattataacatatagatatgactttaaagtttatctttaataaagccatgggactggaggtgatcatgtagaaagcaaccatagatggaaatgaagtctgaagtctgagtcttcgattacagaggtaaatgasggggaaaaaaacaaaggagactgagaaggaaaagcacgtgaaagagaaaggaaacaatgcccttgattgaataaaaagggaggatagttctaagtagaggccttgtatgtaggattatgattagttcatccacagtaataatctttctaggtagactacatggggatagatgcacacaggtatgtggggagatgtggtgacaggagcatgaga

SEQ ID NO: 463633 - DNA, 491 bp, Homo sapiens
gttccttgtaaactacccagtttgtggtactctgttataacaaccaaaaatgaacaaagaagataccaataaaatttgttttacacatttaagtctataaataaaatacattgcaaaaaagttattctgrcattacaacttttgttcagctcattgtcaaaggaaatataagtttccctgaaaaggcttatttcatatttctgttacattttccgtaatagagtaatgatttggattcagtaaatacttgatgagctaatcttttatctaactaaacagagtatttaaaaaattctgctggcaaaataattacaaaacacatgtgggaaaaattaaacattaatataataatactattggatctactacttaaattcataatttattactgttttcattttcttggtagaacattttcagcaaaaatcaaggattcattaagaattaagacttaaaaatttctaaatgattggctaagagagccagagttc

SEQ ID NO: 463634 - DNA, 491 bp, Homo sapiens
gttccttgtaaactacccagtttgtggtactctgttataacaaccaaaaatgaacaaagaagataccaataaaatttgttttacacatttaagtctataaataaaatacattgcaaaaaagttattctggcattacaacttttgttcagctcattgtcaaaggaaatataagtttccctgaaaaggcttatttcatatttctgttacattttccrtaatagagtaatgatttggattcagtaaatacttgatgagctaatcttttatctaactaaacagagtatttaaaaaattctgctggcaaaataattacaaaacacatgtgggaaaaattaaacattaatataataatactattggatctactacttaaattcataatttattactgttttcattttcttggtagaacattttcagcaaaaatcaaggattcattaagaattaagacttaaaaatttctaaatgattggctaagagagccagagttc

SEQ ID NO: 463635 - DNA, 491 bp, Homo sapiens
gttccttgtaaactacccagtttgtggtactctgttataacaaccaaaaatgaacaaagaagataccaataaaatttgttttacacatttaagtctataaataaaatacattgcaaaaaagttattctggcattacaacttttgttcagctcattgtcaaaggaaatataagtttccctgaaaaggcttatttcatatttctgttacattttccgtaatagagtaatgatttggattcagtaaatacttgatgagctaatcttttatctaactaaayagagtatttaaaaaattctgctggcaaaataattacaaaacacatgtgggaaaaattaaacattaatataataatactattggatctactacttaaattcataatttattactgttttcattttcttggtagaacattttcagcaaaaatcaaggattcattaagaattaagacttaaaaatttctaaatgattggctaagagagccagagttc

SEQ ID NO: 463636 - DNA, 491 bp, Homo sapiens
gttccttgtaaactacccagtttgtggtactctgttataacaaccaaaaatgaacaaagaagataccaataaaatttgttttacacatttaagtctataaataaaatacattgcaaaaaagttattctggcattacaacttttgttcagctcattgtcaaaggaaatataagtttccctgaaaaggcttatttcatatttctgttacattttccgtaatagagtaatgatttggattcagtaaatacttgatgagctaatcttttatctaactaaacagagtatttaaaaaattctgctggcaaaataattacaaaacacatgtgggaaaaattaaacattaatataataatactattggatctactacttaaattcayaatttattactgttttcattttcttggtagaacattttcagcaaaaatcaaggattcattaagaattaagacttaaaaatttctaaatgattggctaagagagccagagttc

SEQ ID NO: 463637 - DNA, 589 bp, Homo sapiens
acaataataaaatgtcacaactwcacggaacttttaaaatcatcttttatattttgcccgaaatacttggtatatttacatattttcttgagtaaaagattctagggtaaaatggtaaatgtaggttaaaaaaagttgatcatattttgatgaatcataggaattttcaaagcccataagatattaatttccattgttaatttccaagaaaaggataagggtaaccatgtttccaaaaaagtatttgtttatgcaaaatttgtattaaaacataaaaccactgactttagtttggtactttttcccttacaatatggggtactaacttatccttaacattataaaatattatatttttatgaatgttagtaaattaagatacagcgaaatactacatacctgttaaatacaataaacgatgtatatttttgctgatattaaaagatcctatcatgaatgatggtagtcatctgtcaggtaaaaggcttgggatgaattctggatgatcatgtgttactgctcactggaaagggtttaatatgtgtcttggtctgtttgtgttactataaaggagtatcaaaggcgggta

SEQ ID NO: 463638 - DNA, 598 bp, Homo sapiens
tttagcaggatatttgattagactgacagtctgagagtcttttgcccactatgtgaaaactagtctctctaacattcaaactaattctatgaactgaaagtgaagacacaaaagattgtaaaagaaagaaatttttttttgtaaggtgaaccaatgtcactattggagttagtcatatagaaattgggtgacaccaaattaccccttatttcactaataatactcattaattttttaaaaagtgttcagaatatatacttctaacaagtcttaatactgagcaattactgctatgcatcagacagattatatatatatcacaggggaagaaaaattaagttttcctctacccttagttgttagctatgatggatccctgtaacaaaagacagattaacaatacaaaaaccaatagaaatttattaacatgtatattccacatgtccttgggagatacccrtggcatgagtaattcttaaagagagggcctggaagtatgacttaaatagcatttcaacaaacaacagtaaatttttagagaagtgacagacaaaggctaagaattttgagtttctacaggccgaaaattgtgagaagg

SEQ ID NO: 463639 - DNA, 559 bp, Homo sapiens
ttttaccctacaaaaacatgtaaagaccagatggctaacaaagaattgttaaaaacttcaggaaaaagttacttctgatgcttagaaygtgttccttgctattaaaaagaagaaaatctttctattctttaaaataaagccagtacactgatgccagaatctgacaaggatgatacacaaatataatttatggacaattttatatattaatattaataaaacaattcctttgactttacagtctatacctgtttatataaataagagctacataatattttagagtaaaataacaaaagcatttgaattaaagtaaggaagcataaaaagctgcttgatacattgcctttatttaaaattgtccatgtctactgattagaacccctgggactagaagcaagcatgttaattttaataagtctcgaagtaatttgatgcacctgaagtttgaaatccattacactcaaaagtgctttaaatttacaatacattgcagtgataacggtatttcacagaatgatgaaaataggaatatatataaacactctgtgaaagaagg

SEQ ID NO: 463640 - DNA, 559 bp, Homo sapiens
ttttaccctacaaaaacatgtaaagaccagatggctaacaaagaattgttaaaaacttcaggaaaaagttacttctgatgcttagaatgtgttccttgctattaaaaagaagaaaatctttctattctttaaaataaagccagtacactgatgccagaatctgacaaggatgatacacaaatataatttatrgacaattttatatattaatattaataaaacaattcctttgactttacagtctatacctgtttatataaataagagctacataatattttagagtaaaataacaaaagcatttgaattaaagtaaggaagcataaaaagctgcttgatacattgcctttatttaaaattgtccatgtctactgattagaacccctgggactagaagcaagcatgttaattttaataagtctcgaagtaatttgatgcacctgaagtttgaaatccattacactcaaaagtgctttaaatttacaatacattgcagtgataacggtatttcacagaatgatgaaaataggaatatatataaacactctgtgaaagaagg

SEQ ID NO: 463641 - DNA, 594 bp, Homo sapiens
gcccttggaagatcaagcaaaagagcctttcaggcagagaaaacaaagatcaagggctggaggatcttcgagtttttgagaaatggaaagaaatccagtgtgcattctcacaatgtattttaattttttgtttccattttctttgccatactagttagtaacgatttatgtcttcccatgtttaaatttttttaagcctggtactatatttgattatataacaggatctcataaagtgtttgctgaattagtttgtggggcaggtaactaacatttattggacacccattttgtgtcgcaggcattgtgctgagtgtttaagaaggattgtctcagttaatatatccaattatcacaatacgaacccaataactatgtatttttaaacattgtgtattctacttaggtgttaaaatatctatttcatgataaatatttagattataaaagccaagtaacttacctgggtttatgtagctacaaagaggcatggttaactgttgatacctagccatcytgactccaaagtctccgttctttcttttacctctagtaccctcccttatgatgtatttaaatgaggcctctttcact

SEQ ID NO: 463642 - DNA, 615 bp, Homo sapiens
gtgtccccacccaaatctcaacttgaattttaataatccccacatgtcatgggagagatgcagtgggaggtaaatgaatcatgggggtggacttttcccatgctgttctcgtgatagtaaataagtctcatgagatatgatggttttatamaggggagttcccctgcacatgcccttttgccttctgccatgttagatgtgcctttgcttctcctttgccttccaccataattttgaggcctccccagccatgtggaactgtgagtccattaaacttctttcctttataaattacccagtctcaggtatgtctttattagcactgtgagaacagactaatacagagaaagagagagagagagagagagaacaaaagtgggagagaatatcaagttttgttatctatacaggtattagaaaaataggataagcctatcatgaaatattcagctatatatttttatacttgttttgaaacttatttatttaccttttttctgattatatatgttcattacagaccagtttgaaactatggacaatgaatttgtaaattgcatcacagagaaatattattaatatatatgtgttcttttcccattatttttctatgtg

SEQ ID NO: 463643 - DNA, 615 bp, Homo sapiens
gtgtccccacccaaatctcaacttgaattttaataatccccacatgtcatgggagagatgcagtgggaggtaaatgaatcatgggggtggacttttcccatgctgttctcgtgatagtaaataagtctcatgagatatgatggttttataaaggggagttcccctgcacatgcccttttgccttctgccatgttagatgtgcctttgcttctcctttgccttccaccataattttgaggcctccccagccatgtggaactgtgagtccattaaacttctttcctttataaattacccagtctcaggtatgtctttattagcacygtgagaacagactaatacagagaaagagagagagagagagagagaacaaaagtgggagagaatatcaagttttgttatctatacaggtattagaaaaataggataagcctatcatgaaatattcagctatatatttttatacttgttttgaaacttatttatttaccttttttctgattatatatgttcattacagaccagtttgaaactatggacaatgaatttgtaaattgcatcacagagaaatattattaatatatatgtgttcttttcccattatttttctatgtg

SEQ ID NO: 463644 - DNA, 595 bp, Homo sapiens
tgcagttggtaaaactgctagtgaatgatgtgagaactagtaaacttggacaaacttactaaatcaagtcaaactataagtttgaatatgatttatcatgtgagatagaaagtactatacaggctttaaagaaaaacaaaagcaggttcagttgataatatcaaaaaggaatactaaaaagtcacctaatgtctttcaaagataggaaacctgaatctaaaaaaatatcagttaaatttcatcttcaaataaggtaaaatgaaattattttagattgtgaaatgagctaagttwcatagaaagaacacaattccaaagatgactcaacagtttaacaagctgccaagccatcgctgtttgctgccatcattaagtaccacctagactaaatggtgatcactttggtccaatggtgtgttaagagtcaggacaccgactgactcatgagatccaactgcacccacctctcccaactctgtgcccagtgatcactgaaatattggtagcatgcaatcaacaatgaagggagtattgatatcacagaaattagaaaaccctacaagtcaagtctttatatttatggaaagctattttg

SEQ ID NO: 463645 - DNA, 591 bp, Homo sapiens
gccatcttctggtgagcacaaattacgtcatttgatttagcatcactatctgaagggtaacctgagctgagtgtgaaggaaaaggatcttggtaattactactcttaggatttgatatacattatgaagttccattacagcctggatacaatgatggctcaagttaaattcagaagattactttgcctttaattatcgtgaagaagaaaaccaaacaaagaaggttcacattaactcataccactcctatgattcatagaaatagcaaagtcttcccattgttttgtgtgtttatttcaaggtaacaatggtaatattatttgtgtagtarattttgaaaggatccatggctagacaaaaatgacagcacattttgtaatacaattctaaaatgtacaggaaatgtactttctatcaaattaagattgaggaatactgagaattttgcagtttttaaggatatgatatggtttggatttgggtccatacccaaatctcatatcaaattgtaatccccgttgttgaggaggggcctggtgggaggtgattgtattatgggagcagatttcccctttgctgttctctcgatag

SEQ ID NO: 463646 - DNA, 584 bp, Homo sapiens
acatgggagaaagtatttgaaaactatccatctgaaaaggataaaaatcagaatatataaggaactcaaacaactcaataacaaaaacatgataatcccattttataatgcacaaatgaatagaatagaaatttatccaaagacggcatacaaataaacaacagttctgtaagtggttgcctgragattgcctagatataaataattttagaactgaacaagaccttagaggtcatctattgctttatatttgcagcatcattcctcatatctaatattgtatttgaaactagtatttgattttgtcttttttattttatctgaactgctatttgaggaaaattctgggaatgttctattttatcaaacatatgagaactatatgacaaacttcaggataatggttatagagaaatgcatttctgtaaattgaattttagctatattttaaaaatacaaattaaattaaattttgttaactgacataaaaatacataaacccttttatgaaatgcattgttttagaatatatacacaaagtaggacagtacttataggagacctagaaattatctattccaaga

SEQ ID NO: 463647 - DNA, 584 bp, Homo sapiens
acatgggagaaagtatttgaaaactatccatctgaaaaggataaaaatcagaatatataaggaactcaaacaactcaataacaaaaacatgataatcccattttataatgcacaaatgaatagaatagaaatttatccaaagacggcatacaaataaacaacagttctgtaagtggttgcctggagattgcctagatataaataattttagaactgaacaagaccttagaggtcatctattgctttatatttgcagcatcattcctcatatctaatattgtatttgaaactagtatttgattttgtcttttttattttatctgaactgctatttgaggaaaattctgggaatgttctattttatcaaacatatgagaactatatgacaaacttcaggataatggttatagagaaatgcatttctgtaaattgaattttagctatattttaaaaatayaaattaaattaaattttgttaactgacataaaaatacataaacccttttatgaaatgcattgttttagaatatatacacaaagtaggacagtacttataggagacctagaaattatctattccaaga

SEQ ID NO: 463648 - DNA, 479 bp, Homo sapiens
gttattaagctaatcagggaggcaccagrgaaaggtgaagcccaatgcaagaaaacccaaaaaacaatacaagaagtaaagacagaaatattcaaggaaatagatagcataaagaaaaaaataataaaaacttcaggaaacattggatacatttatagaaatgcaaaactctctgtaaagtctcagcaatagaattgaacaagtagaagaaagaaattcaggcggggtgtggtggctcacatctgtaatcccagcactttgggaggctgaggcaggcggataacttgaggtcaggagtttgagaccagcctggccaacatggtgaaaccctgtctctgtctctactaaaaatacaaaaattagccggtcatggtggtgcatgcctgtaatcccagccactcaggaggctgaggcaggagaattgcttgaacctgggaggtggaggttgcagtgagcagagatcacaccactgcactcca

SEQ ID NO: 463649 - DNA, 479 bp, Homo sapiens
gttattaagctaatcagggaggcaccagggaaaggtgaagcccaatgcaagaaaacccaaaaaacaatacaagaagtaaagacagaaatattcaaggaaatagatagcataaagaaaaaaataataaaaacttcaggaaacattggatacatttatagaaatgcaaaactctctgtaaagtctcagcaatagaattgaacaagtagaagaaagaaattcaggcggggtgtggtggctcacatctgtaatcccagcactttgggaggctgaggcaggcggataacttgaggtcagsagtttgagaccagcctggccaacatggtgaaaccctgtctctgtctctactaaaaatacaaaaattagccggtcatggtggtgcatgcctgtaatcccagccactcaggaggctgaggcaggagaattgcttgaacctgggaggtggaggttgcagtgagcagagatcacaccactgcactcca

SEQ ID NO: 463650 - DNA, 494 bp, Homo sapiens
cttaccaataatgatcatcctgaggcatctggtgttggattatctgatgagtaagaagaatggaattgcatatagacttgaacctggcagaagttatagccattttatgccatagatatttctttgyctctctgatatttctaacatgattacagaagtcagtcagtgacagatgactttttccatccagtgaaaaacacctttgtaatattttcatgtccacagaggccactataaccgaaagagatattacagggattatttctggaaatataaggtagcccagaggaattcttaagtggtatcaacctccctaacgtgacaatcttagacaagcggatattacagatatagagaaaaattataacagcagtagcaaattttagagcaaaatagaagaccgagttcagaagttgagattaatttctaattacaacgtgatataaagactgggtctgcactatctattcattcactgggacttaatgagcgtg

SEQ ID NO: 463651 - DNA, 532 bp, Homo sapiens
ttggattatctgatgagtaagaagaatggaattgcatatagacttgaacctggcagaagttatagccattttatgccatagatatttctttgcctctctgatatttctaacatgattacagaagtcagtcagtgacagatgactttttccatccagtgaaaaacacctttgtaatattttcatgtccacagaggccactataaccgaaagagatattacagggattatttctggaaatataaggtagcccagaggaattcttaagtggtatcaacctccctaacgtgacaatcttagacaagcggatattacagatatagagaaaaattrtaacagcagtagcaaattttagagcaaaatagaagaccgagttcagaagttgagattaatttctaattacaacgtgatataaagactgggtctgcactatctattcattcactgggacttaatgagcgtgttacagtgtgtattttccttttaaaatagttgatttgatttataacaatggggtcattcagatctaggatga

SEQ ID NO: 463652 - DNA, 532 bp, Homo sapiens
ttggattatctgatgagtaagaagaatggaattgcatatagacttgaacctggcagaagttatagccattttatgccatagatatttctttgcctctctgatatttctaacatgattacagaagtcagtcagtgacagatgactttttccatccagtgaaaaacacctttgtaatattttcatgtccacagaggccactataaccgaaagagatattacagggattatttctggaaatataaggtagcccagaggaattcttaagtggtatcaacctccctaacgtgacaatcttagacaagcggatattacagatatagagaaaaattataacagcagtagcaaattttagagcaaaatagaagaccgagttcagaagttgagattaatttctaattacaacgtgatataaagactgggtctgyactatctattcattcactgggacttaatgagcgtgttacagtgtgtattttccttttaaaatagttgatttgatttataacaatggggtcattcagatctaggatga

SEQ ID NO: 463653 - DNA, 427 bp, Homo sapiens
agtaataagtagcctaaaacaaagcccaggacctgatggattcaaagctgaattctaacagatgtacaaaraagaactggtgccattcctactgaagctattccaaaaaaaatgaaaaaagaaaggactccttcctaactcattctgtgaggccggcatcatactgatatcaaaagctcactgagacactacaacaaaaaataaaacttcagtgcaatatcccttatgaatatcaatgcaaaaattgtcaacaaaatactggaaaagcgaatccagaagcacatcagaaagcttatcatccacgaacaaaaacgtattatccttgggatgcaagggtggttcaccataggtaaatcaatgaatatgagtcatcatataaacagaactaaagacaaaaaccacaatatgatttcaatagatgcagaaa

SEQ ID NO: 463654 - DNA, 617 bp, Homo sapiens
aaaatcagcacacactttgtttgttacaattcttgaaatggagaacatgagtttataaattaaattatacattcaattcagaggctgtaatgctgctatcaaatttatggcctccaatttacagagatcaagacataataaacaatcagggagggaggctctctggtcatcagatctgctttaagtagatgggttggactgaacattctccatatggtaaccacagggatgaatgagggcttctatttttgttactggtgactgtgaagaaaggtatatcagaaagacctgtctgatgtagaaaaatgaatattatacttcactttttgtgccacagaaaatggaagagatcagtgcaggtgaagatttaagcatctcaattgtagattagcacgtattgagaaattaatctgcccactgaataatacaagaaaaaattgtgaccccagaagaattagcatcacaggaagatcacagaatgaaayacattttgattctgaaaaaaaaaaacttgcgcaaacttaaaattcacaacctatttcaagatatttctcatcggcaaccttataactatgtagcataaaatttattttatacatcaacaaggatcagtttca

SEQ ID NO: 463655 - DNA, 602 bp, Homo sapiens
ggattacaggcgtgtttattctttttatcctgccatcatgttattgacagatcgccctgatctttaaaaaagcaaataaataagcaatattttttagattttaaaatttgaaacacatagataaatcagtttattagccatcctcactgttccatgcatgaaactcatgaaaattattctgtgtgcagtggaagaagataaatcaatttattttattttattatttatttatttatttttgagatgcagcttagctctctcacccaggctggagtgcagtggctcaatctcggctcactgaaaactcctactgccatgttcaagcaattctcctacctcagcctcccaagtagctgggattacaggcacccgtcaccatgctcagctaatttttgtattttcagtagagaccaaaccatgttggccaggctggtctcaaactcctgacctcaagtgatcygcccgcctcggcctcccaaagtgctgggatgataggtgtgagccaccatgcctgacctgagaaattaattgttaagccttaaaaattagtgcaagttttatatagtttgccttagtttcacattcaaagaaattactccttg

SEQ ID NO: 463656 - DNA, 603 bp, Homo sapiens
aattattgcacctcttcaaaaaaaaaagtatattttttgtaaatgtttggtacttgttgctttttgtgtgatagaaggaagtgtttcaattagccaagtgtgggggtgcacacctcagtcccagctgcttgggaagctgaggtaggaggatcacttgagcctaggaggtggaggttgcagtgagccgagattgcaccactgcactcaagcctgggtgacagagtgagatcccacctgaaaaaagaaagaaagaagsgtttgaaagaatatattttctcaattacaaagaggtctagtaaagaaatacaaattttatctattaaaatgtacagtgttctctgaggactgaaagtgtttttatgaaaatgcaagttagttatgtccaatttgtttattcattagtaactctatggaagaatagtataaatatagaaagcactctaattacaagtgtgctacttgatggtgtcacctataaaatgatcacccccggtaagcaacacccacatcaaaaaccagaatattaccagcactcagaaaccctcttctttgcctgcctcctcattcccaagggtaaccacttctaacagattatactagttg

SEQ ID NO: 463657 - DNA, 603 bp, Homo sapiens
aattattgcacctcttcaaaaaaaaaagtatattttttgtaaatgtttggtacttgttgctttttgtgtgatagaaggaagtgtttcaattagccaagtgtgggggtgcacacctcagtcccagctgcttgggaagctgaggtaggaggatcacttgagcctaggaggtggaggttgcagtgagccgagattgcaccactgcactcaagcctgggtgacagagtgagatcccacctgaaaaaagaaagaaagaagcgtttgaaagaatatattttctcaattacaaagaggtctagtaaagaaatacaaattttatctattaaaatgtacagtgttctctgaggactgaaagtgtttttatgaaaatgcaagttagttatgtccaatttgtttattcattagtaactctatggaagaatagtataaatatagaaagcactctaattacaagtgtgctacttgatggtgtcacctataaaatgatcacccccrgtaagcaacacccacatcaaaaaccagaatattaccagcactcagaaaccctcttctttgcctgcctcctcattcccaagggtaaccacttctaacagattatactagttg

SEQ ID NO: 463658 - DNA, 636 bp, Homo sapiens
tttcttttgattatttgattgccaactagtaggtatatgaacaccaaaataaaaagatttgaaattagragtcactttagttatattaaatattcgactaaaattggactaatattagctatcagcatacttagctttttaaaatacaaaatttcacccaatttaataccacaagaagtacctcttccagtaatcccagttccctttatcctactttacttttctttctgtagcacttactactttctatcacaaaatataatttacttatttattatgttcattattgattgtctgattgtccaccactggaactctactccctcaaggactgagagctttgcctgccttgctcagtaatttatctcagattcctagaacagttcctggcatatattagctcaataagtattttttaaaaataaatttaacaaacatttaatggctcccttttatgtgcaaggcaatgtgagtggtgttgcatatagggataaacaatgagtgaaagaccatttcattgaatatgtataaatgcatatatattcactgatacaaagggctggtatatttttatatgtaaatatatgtatattaaataaagtattaaatatgtgctacatatagcttagtatacat

SEQ ID NO: 463659 - DNA, 465 bp, Homo sapiens
gggtgggttgttgcagttgaagtctccaggaaatgctcatggacaggtgcacacagcagccaaggggtcagggcatagagtttagtggcccasaaagaagggagccacaggcaagagctaggctgtgtgttgggtgtcagccaaggagcttgagagaaacagggttccaggccttgaatggagagcaaaagtacaaatcaggaaagtgaggcagctgcctagtcccatgggttgcacaaactcaaaacgggtgggaaggctgtagctccagatactcacaggagcccaaggctcatcctggccctcagagaaccacagtagcaagatcagttccagactctaccagctagtgggagctctgtctattgttatattatgggtcttgaccacagaggggtcaggataaggctgaggcaagaccaagaagccaggaccttacaggcatcaacactggcaaagacacct

SEQ ID NO: 463660 - DNA, 583 bp, Homo sapiens
ttatgaatgggttctttgctgcttttctaaaattttatttccatgtccgtgtctgcttgattattttttaccatgaaaataaaatgactataagaacttccataataagaaaaaaggttattaaattatgcaaaatatatgattcactctaattgaatttatacttggagcaggtttaaaggttgttaacrtggaaaaaaaaaagaatggtgaaagttcttttccccacacataggtcttattacaatctaatcatgattatacaattaccctccaaccctctttctgtccttgcaggtggagtaggaatagtaaaggtaaaagaagagagatcatacaaaatattttttgaggatttctctggagtggccttgtagggaataaactgaaagctgccaaaataagaattagcgtttgtatttgaattagtagcaagatcttatcagtcaatgttttagtctttgcttccaaggaaatatatactgctattctctttattcatatgttcttattatttaatttatagaattgaatctcttggtaacatcttagcaatatgatatctagctctcagcaaatacca

SEQ ID NO: 463661 - DNA, 394 bp, Homo sapiens
ttggtgtctcttataaggacactaatcctrttggaacagggctccacacttatgacctcatttaacctgaattacttctgtagaggcctcaattgcctgaatagctgtttgaaaacatgatatggtgttaaatagtcctagagactattcaaatgaaaagaaaaattgttctacctcatatttcaaaagaagagagcttgcacaattttcagtgttaactctccttttgtaaaacattatgaaaatcctatttttcaaatgttttcctgtattaccttggtatgcattctgtcaacttaaagggcttttttcccctttcccataaaacatagtatgtggcaattttatcaagtagagactgcatcttttctgtttacttaatttcttttttaaa

SEQ ID NO: 463662 - DNA, 511 bp, Homo sapiens
tagtggtaaaatatacataacatacgatttaaattttatccatttttaagtgtaaaattgagtggcattaagtacacttgctgttgtgcaacaaccattaagtcactgacactgttgtgcaacaaccaccgccatccatctccagcactcttttcatcttcccaaactgaaactccattaaacaataccctattaaacaataactccccatagttcttccttttagccccaggcaaccaccactctactctgtctctatgaatttcactactctaagtatcttgtattactggaatcgtcccactaattgtccctttgtgactggcttatttcacttagcttcatgtcttgaaggttcatccgtgtttagcatgtgtcagaatttcctttatttttaaggctgaacaatatttctttgtatgagtatgtcactttttgtttatgctrtcattcattgacggacacttggtttgcttccaccttttagctattgtgaataaggctggtacaa

SEQ ID NO: 463663 - DNA, 598 bp, Homo sapiens
ttcactcttgttgccgaaactggagtgcaagagcacaatctcggctcactgcaacccccacctcctgggttcaagtgattctactgcctcagccttcccgagtagctgggattacaggtgcgtgccaccacrcctggctaattttttgtatttttagtagaaacagggtttcaccatgttagccagactggtcttgaactcctgacctcaggtgatctgcccgccttggcctctcaaagtgctgggattacaggtatgagccaccgtgcccagccttcgttgttcttattattattataagatgtccatttatcttcatgtatagctgataatgctccagtttttattctcatggtgattcatatgggaaaagttagtttgtatgattatttaggagtcatcgttccttcattttagacagttttgcttactttttaggaaaaaaaaacaaaatttgatctaacctaaatgtgaattatgattcagaagagtggaaggcattatcatttctgtggcttcaaataccaatgttgcttgtttatctgtgttgctaaggttgacttttgttgctctccctcatgtattgggattaaccaca

SEQ ID NO: 463664 - DNA, 598 bp, Homo sapiens
ttcactcttgttgccgaaactggagtgcaagagcacaatctcggctcactgcaacccccacctcctgggttcaagtgattctactgcctcagccttcccgagtagctgggattacaggtgcgtgccaccacacctggctaattttttgtatttttagtagaaacagggtttcaccatgttagccagactggtcttgaactcctgacctcaggtgatctgcccgccttggcctctcaaagtgctgggattacaggtatgagccaccgtgcccagccttcgttgttcttattattrttataagatgtccatttatcttcatgtatagctgataatgctccagtttttattctcatggtgattcatatgggaaaagttagtttgtatgattatttaggagtcatcgttccttcattttagacagttttgcttactttttaggaaaaaaaaacaaaatttgatctaacctaaatgtgaattatgattcagaagagtggaaggcattatcatttctgtggcttcaaataccaatgttgcttgtttatctgtgttgctaaggttgacttttgttgctctccctcatgtattgggattaaccaca

SEQ ID NO: 463665 - DNA, 533 bp, Homo sapiens
ctactttctgtccttatgaatttgactactctaggtaccttacataagtggaataatacagtatttgttcttttgtgatagttcacatggcataatgtccttttggtttgttcatgctatagcatgtatcagaattttattcctttttaaggccaaataatattccattgtatgtacatatgacattttttaaacgtttattttaggttcaggtacatgtgaaggtttgttataggtaaactagtgtcacaggggtttgttgtacaaattatttcatcaaccaggtattaagcccagaaccacatagttatcttttctgctcctctccttcytcccaccctccaccctaaagtaaaccccagtgtttgctattcccttctttgtgttcataagttctcatcatttacataccacatttttatccattaatctgctgatggacatttgggttgtctgtagcttttggctgttatgaatagtgctgcataaaaccttaccttttcatgttactgagtgtaaagctattgagagct

SEQ ID NO: 463666 - DNA, 513 bp, Homo sapiens
gtctatttctaggttctgttttaatgatctgtatgtctagccctacacaaatacaataggattgactactgtggctgttaagtcttgaaatcaggtagactggttcctcccactttgtcttatttttcaaagttattttagctgtgttagtgccaatgcctttccacataaattctagaattcttttgtccatatctataaaaatattactggaattttgaaaggaatgatattaaccatctatcagttttggagagaattgccrtcttgactatgttcagttttctgatctatgagcatggtatatttctccatgtattgaaatcttctttaatttcttttattattgttgtttagttttcagcatatcaatactgtacatgtattgttagatttatacctatttcttttttttgagcaattgtaaatggtattgtgcttttaatttaggtgtctatatgtcctttgccagtatatggacatacaattgatttttatatgtttaccttgtat

SEQ ID NO: 463667 - DNA, 590 bp, Homo sapiens
tatcaataaggctacctttcctcttttgaagtgtttttgtaacttcattaaatagaagctagaaatatttgtataggtctatttctaggttctgttttaatgatctgtatgtctagccctacacaaatacaataggattgactactgtggctgttaagtcttgaaatcaggtagactggttcctcccactttgtcttatttttcaaagttattttagctgtgttagtgccaatgcctttccacataaattctagaattcttttgtccatatctataaaaatattactggaattttgaaaggaatgatattaaccatctatcagttttggagagaattgccatcttgactatgttcagttttctgatctatgagcatggtrtatttctccatgtattgaaatcttctttaatttcttttattattgttgtttagttttcagcatatcaatactgtacatgtattgttagatttatacctatttcttttttttgagcaattgtaaatggtattgtgcttttaatttaggtgtctatatgtcctttgccagtatatggacatacaattgatttttatatgtttaccttgtatc

SEQ ID NO: 463668 - DNA, 529 bp, Homo sapiens
ttgttttcaaggaataaaagggtttgtttaaaattttaaagtcagtcaacatagttcaccattaagaaaaggagaaaaatcatatattcatttcaataggtgcagacaaaacacttcacaatattcaacatccatttatgattaaaagctttcagcaagttaaagatagaaattttctcaatctcataaagaggactcactaaaaatcaacagcttatatttagttgtgaaattgaatgctttccttttaagattggaaacaagagtgtttgtttttaccattccatttgtacttgaggcactagtcagtgcaaaaagacaagaaaaagtcacaaagatcagatagggagaagttatttttcttctatttatattcacaggagaaatcattgtttacttagaaaatcctaaagaatctacagaagaaccactggaactgagaagtgaatttrggaaggactcagtatacaagatcaatattaaaagattatttctatatgttagtcacaaacaattaaaaaacaaaaca

SEQ ID NO: 463669 - DNA, 574 bp, Homo sapiens
gactgtttaattttatgaaaaaaagggtattaacactacctcatgcatactcaaaaattaatttgagataaattatagatctaaacaaaaaagttaaaattaaaaagtttctaaaacacataagagaatatctttgcaaatttggagtaaagatttcttaaatagtatagaaaaagcactaattataaaagaaattaaaaaatcaacttcataaatattaactttttaatatctaaagacgccattaagaaataaaaaggcaggctgsgcacagtggctcacgcctgtaatcccagcactttgggaggctgaggctggtggatcacttgaggccaggagtttgagacgagcctggccaacacagtgaaaccctggctctactaaaaatacaaaaattagctgggcatggtggcacatgcctgtaatcccaactacttgggaggctgaggtggagggattacctgagcccaggaggtggaggttgcagtgagccgagattgtgccactgcacaccagcctgggtgacagagactccatctcaaaaaatagaaataaataaaaataaaaagaaaat

SEQ ID NO: 463670 - DNA, 534 bp, Homo sapiens
gtaccaggggtcataagtattagatgactaccacaacttgcttgcaaaacagctggaatcagtataatgtctctgatctgcagccgaatcagacattgaggtgatctcaagcagaaccatgcaccaatattaatgttgtacataacttcttggtagttacatacagggctgctgatttagcattatttgtcctttgyagaaatcttcttaataatccatataattgatgaaagtcaaaaaataaactcatgacagagtagatattctgccatgacaactgagactgacagagcaaacagccaatgagactaatgcttaccttcaaataggggagatggaaagggtagcagagagatttagacgttggatctaccatcctgaacatttgcaatagaatcctgtgatattttcaaacactgaaatggcgtgagacagggatactgtggtagtgtttgctagtgaagagtacctaacgtgttctgtctctctacctccatcagaaagcagtctgaagtctcataagacggcaaattc

SEQ ID NO: 463671 - DNA, 603 bp, Homo sapiens
atataaaatgacataattgctgggtgatatggtttggctgtgtccccacccaaatctcatcccgtaattcccacatgttatgggtgggacccagtgtgagataattgaatcatgggggcagtttcccccatactgttatggtagtgaataagtctcatgagatgtgatggtttttataaggggtttcctttttcgattggctctctgattctctctcgcctgccgccatgtaagatatgccytttgccttccaccatgattgtgaggcctccccagccacgtggcactgtaagtccattaaactctttttctttataaatcacccagtcccaggttgtctttaccagcagtgtgagaacagactaatacactggggtagggcttcaagtttcactcttggtgaaaaaggtgaacataaccaaggagagagcaaaacaattcttgagcagaagcaagcttcattttagcactgacatgaagagattcactcaaggacccctatacagtgaatgatgattcatgtcattaatgatgtcctcaacaagttttacagtaaacaagaaaatattttttatggtttttcaaagcaatatttggtaaaag

SEQ ID NO: 463672 - DNA, 607 bp, Homo sapiens
tcatgggggcagtttcccccatactgttatggtagtgaataagtctcatgagatgtgatggtttttataaggggtttcctttttcgattggctctctgattctctctcgcctgccgccatgtaagatatgccttttgccttccaccatgattgtgaggcctccccagccacgtggcactgtaagtccattaaactctttttctttataaatcacccagtcccaggttgtctttaccagcagtgtgagaacagactaatacactggggtagggcttcaagtttcactcttggtgaaaaaggtgaacataaccaaggagagagcaaaacaattcttgagcagaagcaagcttcattttagcactgacatgaagagattcactcaaggacccctatacagtgaatgatgattcatgtcattaatgatgtcctcaacaagttttacagtaaacaagaaaatattttttatggtttttcaaagcaatatttggtaaaagctagcrcattaatgttagcacttggtgaagtcaattctgaaaggagctagacttcaccaagtgcttcattatacaatcttttagaggcattgctggactcaaagacagcattc

SEQ ID NO: 463673 - DNA, 562 bp, Homo sapiens
tttgggctaggagtagggtgaggttcacttaggttcacctgccagctgtgtcaaatttcagttttggctagccagaaccctaagtataaattcattctacaaatgtgttaaacgtatttttataaaattatctattttttccagacactgttttaaggcacaattgggtaagttagagtatataaaatatagctacagcactaaacaacttatactcacattagtaagtaacaataagtgataaatgtcaatatgaaaaatttaaaagatagcatctatttagggaaatattattttcagaggctgaatagagaagggattcataggagtmctcctaaagcagctggtccaggaaagacgggaagagcttggtttgtggaaatgagaaccagagagattcaatcaacaaatatgcctgaataagggctgcaaatgccaagagtgaggaatgtaaaggggactgtggaatggttcattttggctgaactggagtaaggatagggcaaagagattagtaggaaatgaacacggctctagattgtgttcttaaccatagaaaata

SEQ ID NO: 463674 - DNA, 526 bp, Homo sapiens
tgtctccttattcccacctatgcattcccatcctgtggtagctcatctccaaagctggccctcaatggatcattcccttctatgtccccttctgcatcgaatctgcacttggcctgtgactcattaaacaatagaatgcagtggaaaggatcctgagctggttctgtgcctaagtcattagaaggcctagaagcttcttcttttgtgattttggaaacattgagccaccatttaagaaatctggcatgtccacatatcatatagagagaccacatggagagggagaaaccctgagctttcaaggagagacagagagagaccccgttattccaaagtaccagctcagccccatcttccagctctctctaccaagggaccagctatgtatcttgggtatgagagcttagtcaagccagatgattgcagctgcagcgaatttcacatggagcagaagaattacccagctgattccagtcaaccttcataccygtgaaagaaaagccactactttttggggtagtttatt

SEQ ID NO: 463675 - DNA, 604 bp, Homo sapiens
aagtgtctgagtctggattcaagctgtggtggtcatttggccttaaagccaatacttcttccattgcaaaagcaatgtagtacatcctccactgaaagaagctttgtggggcctgatgtgaatttcttttatgtcatatgttgtctatttttcttattctcatgtaagctttatgaggacagaatcatgtctttatcctctactgtgcctaagaaagaagtagcctgcaatgattgggtgccttattaatattgtctgaatgaagaaaatccgtccaaataggtatgatgaaaacttggcattatacaacttacataatacatgactgtggaaaagaggtcatatmataaaattcaaatatgggaagcttttacttgaaatattaatagcgatctcaactagtttttactcagctgacaattttgcccaaatgtttatgaaaatttgatgtctaaagtttagaaaaagtgactaagagttgataatcagtgaggaggaataaatagaaaaattgtttgaatcaactcacaagagaactaatgttttaatatagggtatcttgaaaaatgaaaaatttattgcactttagaactaaacttcttca

SEQ ID NO: 463676 - DNA, 572 bp, Homo sapiens
ttcttttctttttttttttttttaacttttaagttcaggtgtacaagttcaggtttgttatgtaggtaaacttgtgtggtggggtttttttgtacagattattttatcacccaggtattaaacctacttttttttcctgatcctctccctcctcccatcctccaccctctgatatgtcccagtgtgtgttgttcccctttaactgtccgtttgttctcatcatttagctcccacttataagtaagaacatacagtatttggttttctcctcctgcattagtttgctaaggataatgacctccagctccatccatgtccctgcaaaggacatgagctaattctttgttatggctgcataatattccaaggtgtatatgtaycgcattttctttagcagtttctcttcagatcgtataaatctttcacctgcccctattttcttttcagagtcatctgcttcatccacattctttctaggtacattgttttatagctacattcagtgaaagagttggttggagtggagtgtccttcatccatcttagccagaaataaatctttctctctctcgt

SEQ ID NO: 463677 - DNA, 579 bp, Homo sapiens
accgtagaattttcactgaatgagaaactttgaacccagaaggcacctctttctctgacttcatctgatatagccccatcaaaactaatttttttaggagcaaaccagtactctacaggcagctgtcttcatactttgaaattatttaaagtatccctgtaatttggaaacaaaattgaacacagtcaatttaatataagtatattatattgaaggcatacgttttttcgcttttgcaagtaagtattgcaaaaagaacgggctgttcctaccaacctaacaaatcaaggaggtaagatagttcatccaaaaatgtaaaactttcctaaatagtttagaaaaagcaaaaaaaaattgtgaaaagcaaaaaaaacttcatatgtatgatatttcccctattctttarcatctagctcctgaaatatgtcccttagatgtagtagagcatttcaggcaaacaaaatactatattcacttcaaagaaaagaaacttcttatattttcaaacaatttatttttttctaattatggaatatatttattatggaaatagcaaaaagttatatatagaagaaaaat

SEQ ID NO: 463678 - DNA, 579 bp, Homo sapiens
accgtagaattttcactgaatgagaaactttgaacccagaaggcacctctttctctgacttcatctgatatagccccatcaaaactaatttttttaggagcaaaccagtactctacaggcagctgtcttcatactttgaaattatttaaagtatccctgtaatttggaaacaaaattgaacacagtcaatttaatataagtatattatattgaaggcatacgttttttcgcttttgcaagtaagtattgcaaaaagaacgggctgttcctaccaacctaacaaatcaaggaggtaagatagttcatccaaaaatgtaaaactttcctaaatagtttagaaaaagcaaaaaaaaattgtgaaaagcaaaaaaaacttcatatgtatgatatttcccctattctttagcatctagctcctgaaatatgtcccttagatgtagtagagcatttcaggcaaacaaaatactataytcacttcaaagaaaagaaacttcttatattttcaaacaatttatttttttctaattatggaatatatttattatggaaatagcaaaaagttatatatagaagaaaaat

SEQ ID NO: 463679 - DNA, 569 bp, Homo sapiens
tttttttttaatctgattttaaacattcttgtttttcccaaatcccattagggcatcctgccattaagggtgccataatttagtccagtgggtctcaagtggggcagttttgccttcttaggggaacctggcaaagtcttaagacatttttgatcatcacattcagtgcaaccagtgtgtggggggttggaatactggtgtctagtgcgtagaggccaaggatgctgctcaatatcttacartgcacagagaggcctcccaaaccaagaattatcacctaaaacgtcagtagttctgagattgagaaaccctgctctaacctctttctagattatattcaacctcctagttccttattttctcctctgaattttcccagcaactatccattcttccattatgcagataggttaggccccttgctctagtttagataagatttgtttgtctccaccaaatcttctgatgaaatttgattcctaatgttgaaaatgggttctaatgggtgatgtttggtgtgcaggagaagatccttcataaatagattaatgctttcccagggatggggg

SEQ ID NO: 463680 - DNA, 569 bp, Homo sapiens
tttttttttaatctgattttaaacattcttgtttttcccaaatcccattagggcatcctgccattaagggtgccataatttagtccagtgggtctcaagtggggcagttttgccttcttaggggaacctggcaaagtcttaagacatttttgatcatcacattcagtgcaaccagtgtgtggggggttggaatactggtgtctagtgcgtagaggccaaggatgctgctcaatatcttacaatgcacrgagaggcctcccaaaccaagaattatcacctaaaacgtcagtagttctgagattgagaaaccctgctctaacctctttctagattatattcaacctcctagttccttattttctcctctgaattttcccagcaactatccattcttccattatgcagataggttaggccccttgctctagtttagataagatttgtttgtctccaccaaatcttctgatgaaatttgattcctaatgttgaaaatgggttctaatgggtgatgtttggtgtgcaggagaagatccttcataaatagattaatgctttcccagggatggggg

SEQ ID NO: 463681 - DNA, 608 bp, Homo sapiens
ctgcaaccttattaataacccagaaccccagttccttaatgctgagatgtggcatacatttatttttgaataaattgttcactggcaacattgagtttaagaagaagggtgaaaaattacttggagaagaagacttccagtcctctaattatatctcaattacagtatttgtctgtcctcaagcttaccaatcagaccgtgcaattcttatgaaaagkggacaatattcaatggaacatttaacctttttatactataaataatcatgaaacacaatcactactacttacttagcacccagcaagttttcagcataaatactcctgagtctcataaagtaagtattatcaattccattgtaaagatgagacaaccaagaatcagacagcttctgtaactagcctaaggccacacagtaaagagctaaccatttgtgaaagactattcagggatttgcatgtcagttttcaccatacagattttgggtcgatgattataggctcctggagaggtccttcctctccaactatgactagaccaaaggctacctgtataaataatggaaatacttcatcatatgaaggaggtttttttcttcagcaaaagaa

SEQ ID NO: 463682 - DNA, 608 bp, Homo sapiens
ctgcaaccttattaataacccagaaccccagttccttaatgctgagatgtggcatacatttatttttgaataaattgttcactggcaacattgagtttaagaagaagggtgaaaaattacttggagaagaagacttccagtcctctaattatatctcaattacagtatttgtctgtcctcaagcttaccaatcagaccgtgcaattcttatgaaaagtggacaatattcaatggaacatttaacctttttatactataaataatcatgaaacacaatcactactacttayttagcacccagcaagttttcagcataaatactcctgagtctcataaagtaagtattatcaattccattgtaaagatgagacaaccaagaatcagacagcttctgtaactagcctaaggccacacagtaaagagctaaccatttgtgaaagactattcagggatttgcatgtcagttttcaccatacagattttgggtcgatgattataggctcctggagaggtccttcctctccaactatgactagaccaaaggctacctgtataaataatggaaatacttcatcatatgaaggaggtttttttcttcagcaaaagaa

SEQ ID NO: 463683 - DNA, 595 bp, Homo sapiens
tttattcaaatattggcttcctgaacctcttgggactgtcttttaatcgtttgtgactcaaaaacagagtcaattaccaaacaatttttattctatttttcacacagaagcatcgtacatatgcctcctaactttaactccctacgacctactactctaacatttgctgtggagtaattttgtgccagaaactgcaaagatgtttacacagattatctctggtcctcataacyagccggcaaagcaggatcagttatcctcattctacacattagacaaatgaggctcagaaaggcttagtaaaaggttgatgaaattccaagaaaacacaggtttgtgtggttcaatgcctactgcctttcagctgctacacaaagctacctttctcccatcgtacctgtgataaaccctctttgactggaattgcattaattcaacagcttcctaagtggatctccctgcctcaggtctcaccaccggtcaaccctctctaatacttttaataattggatatatcctttataacagctttcagtgatctcttaggcacaagaaacaagagcctcacaagacaacttattcagtaaagcagaag

SEQ ID NO: 463684 - DNA, 525 bp, Homo sapiens
agggcctgttaaagagttagaactatagtatcccactagcaattggtaaccattaaaatgytttaggctgaggagagatttgctcaggatcgccattaagtcagtgttactggctcaggcaatgctggagatgctagtaacattcactgatgtacagagcacaaataaaaatgacagtttgggagaaagtgataaattccattttgaacacaattttttaatccctgtatttccatcgagtagccgttaatggctgtgaagtccaggggaaggttatgaatgatagacagatcttggaatcatcaatcatccattcaatagatgttcattgagttcctcctatgtgctacaccaggtgctaaatctaggcatacaacagtgaataagaggaggcaaggttcccaccatggtgaatcatgcatgtggatgttcattgaaactctaggagcacaggagatcaccgagaaggggatgcaactaaaatgcataaggatttagatggtgcttggtacacaggataaacta

SEQ ID NO: 463685 - DNA, 604 bp, Homo sapiens
aacacacatatgaaggtaaggaagcggagtcaaaagtgctgtcagatacttttttctccactaaaattaaacccagaacattgaggtggttggcccaaggccttaaagtctgtggtccaataatatagctgtgtatcctttatcccaaatgcctatgttagtcatgagcctctttgcccataagaggatatgtagaggcaggagagaagtcaggttaaggtacttaataaatggttccccatgaaattttcttcctctatccaacaaactggaaaataagcyttttttttccttttaattgatgatgcagcacgatgttatggaaaaaagatttttaagaaaacctacaacaaatttactcttactccattatcttcctttcctgaatctgccacactggctgcccttattttttaatttatgacagttcaacccaacccatcctacacacacagatacatgcacatcattcacttttatgacatcacataaacaaggaaatagttcaggcaacttggattaattttgggaatggtattggcattgaaggaaccttctgggtgaggggttcttactctttattgtgccatgaagcccttttcag

SEQ ID NO: 463686 - DNA, 585 bp, Homo sapiens
aaaataactaaactgtattattgtacatttctgagtattctttttagagtctgatgatgttaaaatgaaaagtaagtcayaaaaatgtatttgtgattatatattctgtaatatcaattttagaaaaattactaattatgtcatgttgaagatgtgtatataattaatgttctagagataataacgatataaaagattgaaagtattcaaagtatacaaaactggaatatattttcattgaagatgtaaattaaatgtaaaaaagttattgttcatattttcaaaatcttttctttcaaaatattcaaaattgcctataaaattaaaaggcaaaagacaaatcattataaatcaaaatattaaataaaatatttcaaagtaaagtttaaatttttataatgtttaagaattaaatcttttgatataaataaagccattttatcattcaacataaaattatgtagttttatgtatatatatatttatgcatatattgcatgtgtatgtgtagggatatatatatatagagagagaaagaaatattttgagtaattataaatatttaacagtgtaaaatatttctta

SEQ ID NO: 463687 - DNA, 543 bp, Homo sapiens
attctattcaggtttacatccgtgcacacacagctcagggttagtagttaggagttcatgtgcaactaaaaggagttgttttctcaagctcttacctctttgaaatcttgggactttctggtttcttgagggtcctttttttagtcatctggccagaaatctaaagcatcctgtttccactctgcttcacactgtacttgattgtagccacgtcagaaacaagtgtgggcagtgggagctgggtaggggaaataacaccattgctctaagattatgtgatgtctgaggcaccagaaaacagagcaaagaaaacaaaacaaagcaaaaaacaaacatggacttccacactttctctgagcattaggaggtccttttagctttccttgagcgggaaccagagtgattttcctgaatttctgtctgtgccagtgattcyttctggtcctcaggctatcttgagttcaggcaatggaattccagagaggaaaaaatttggtgaattcactgtagttttgatggttcttgacttccggacttctgatt

SEQ ID NO: 463688 - DNA, 572 bp, Homo sapiens
ttcttttctttttttttttttttaacttttaagttcaggtgtacaagttcaggtttgttatgtaggtaaacttgtgtggtggggtttttttgtacagattattttatcacccaggtattaaacctacttttttttcctgatcctctccctcctcccatcctccaccctctgatatgtcccagtgtgtgttgttcccctttaactgtccgtttgttctcatcatttagctcccacttataagtaagaacatacagtatttggttttctsctcctgcattagtttgctaaggataatgacctccagctccatccatgtccctgcaaaggacatgagctaattctttgttatggctgcataatattccaaggtgtatatgtatcgcattttctttagcagtttctcttcagatcgtataaatctttcacctgcccctattttcttttcagagtcatctgcttcatccacattctttctaggtacattgttttatagctacattcagtgaaagagttggttggagtggagtgtccttcatccatcttagccagaaataaatctttctctctctcgt

SEQ ID NO: 463689 - DNA, 569 bp, Homo sapiens
ctttgtgttgggaacgttcaatatcctcgttctaggtatttgaaactatataatatgataatatgttattgttaacatgtcatcctccatggtatggaacactagaatttagccttcctgcctagctgtaaccayctcgttttggggaatgggactggcttcttgattagaagtggtcacactgccgcaggcttctatccttagcctagcacagctgtgcttacactgctgtgtgcccttcatagtcaaagggcacagtgggtgctttctaacctttcctgccattgtggggcatgtcgtcctgtgaagggctgttccgggggaaattagagaaattgtctgcctccgttagaacctgcaatattctcgtgttgtgttgtcttctctttcctgtcacagtgtgttatgcttcccagcagcagacacgtatgtgtgtacacacatactcattcatttattcattttaggagaaggcattcacacatgaaaaacaattgagattaatggtagtgttttaggaccagtggcttgggggctttttatgggtattcctagcacccataaagcaa

SEQ ID NO: 463690 - DNA, 534 bp, Homo sapiens
ctatcggtcacccagacagaactcatttccccccgcccyttgaacctcagatcagttccatgcactgtttccccattttagtagatggcccaagaccagccagtcagttcagctctcaactcaggaatctccctgcgcttcccttgtccccaagtcttgttattagcaagacctcccactgtatctgacttccagataatatctgaaacgtgctcacttcaccaccatgcctagcataaacctcctcatgaatctcttgacttaaactctactatttttctattgtggaggactcaacaatctatgttaagttttttaagtgttttaaaaatattataaaaatttacttctaaagtacttttctttttcctaaaaacattgtatgacacatcttaattccaaaaaggatgggaatttctagattgtaagaatggtctcccttgcagttgaaagaccctcctagtaccattgtctgattcaccctctcctgaagaaggcccagagccactggggactggcaagccaggttctgtg

SEQ ID NO: 463691 - DNA, 614 bp, Homo sapiens
cccttgtgtaccagactgtactatgattttctcatttgtgaaatggatttataaataatactttcctcatatgggatttgttgtaaggattcagtggttactatagccatttagaaaagtggctggcacatgatgagggctttttaaaattgactattattactctaggtcctttatatgtgacctaaaaaacattcaaaagtttatgcatgtgttctttttyctaggtattctgaaatttcataatggtctgctttagtaacttttttcacattaacaaggtagagacccatttggtggaaacgatgctcttcagttccagggctttttggttgttgttgctttaagaattactacccacctgcatcctggattttctctgttttctctaacctactagtcagatgtttaacctcttagaataacttcctgacttttaaagttttacatgtttgactttctgagagatttccttactttattttttaagcttttctaatcaaaattatttcagagccatgatggttttcatttctaacatcttgttctaatctactggctgctccagttcttattttatgggcactatattttctcatacttctgtgaggata

SEQ ID NO: 463692 - DNA, 579 bp, Homo sapiens
actgcatttagttgttaggtatctttagacccctgtaatctggaatagctcttcagtttttccttrtgttttatgacattgaccttttagaagaatgctcctctttctttttaatagaatgtttggtattttgtgtttttttcccttttttcttttgtttttgttattaaatttagattaatcatcccaagccagaatactacataaatgatgtgtccttttcagggtgtcacatgtggaggtgcacagtagctatctgcccctcattggtgatgttaattttgatcacctggccaaagtgctgtccattttctcaactgtgttgttattggtttttttccccctgtatttgataatctgttgagagatcacttcaaaaccatgcaaatatcctattccttatcagaatttcttccctagatttatgatccattgatgattcttccatgagccagtcttttctatgatggttgcaaaaacggtgattttccaattccactactccctccatgagtactggcagctgacagatgtaatcaagagcctcctgttgttccctatccacccacctacctatct

SEQ ID NO: 463693 - DNA, 650 bp, Homo sapiens
ggggcaggttcccctgatatctggcacaccaatgtgtttttttctttttcccaagtgcaagactttttcccaagtgtaagactcagtcttacatgcaagcacagggaatgcctgcccgctcaggagggcttatacctgcatgagaagagctgtcatcagagactcacaggaagggagttctgaaaacaaagtgaggcaacatttcccagagccagagagaatatttgtcaatcaagacctatctcaaaagcaaggttcaggaaatgtgatcattccccacctgcagagtaccctctttacctgtaactaccaatcccacctggtccctctctggtcctggctctaccccaaagtagtaatttaggtccctgggccaagtttaccttccaacctgctagcctctctattccccactgcaggtgcaacataacatggctgattcaatgtcacaaatatcaaaccagcctctagtatgcggaaatgtggaatgctaaattccgcaaaggatacagggtcactgcccagctttggaacggttcacacctcagcagcactcctttagcagagactggcccagaatgagctggcaggtgcagactgagacatgcamttcaataagctggctgcatgagagtgtccaaaataaggtt

SEQ ID NO: 463694 - DNA, 574 bp, Homo sapiens
gcaccaaacaggtgcattcagggaggacacaaagaggggagagacgcctgcccaaggagcacctggtggaacactcagaggagccacttcattctttgctttttaagcatgtgttcttgctgtcatacttctacaatgcaaaaatgtcctagaaaacaactgtatcaattagttctggttytgaggaaagaaaataaaatcacactaaagagaaataaactaagacgttcctggtggtgtgtgttgggagacgccgaggcaaggcttgtacgtctgacataatgtaaaagattcttggaacatgtccgggatccagggtctaaaactccttgtggcctttggaacgccaagctctgtgctaaagggtggaaggctaccctgacgcaccataatctcagcccagggcataaaaaccccttgtggcttggatagaatccagggctcgtggctctggaatgtgtctagacttgctggctccttgctccttgctccttgctctcccaggatcgattgtatcttgagttaaaagaacctgctctccattatctcaagtagcagagcatatgctaaaccg

SEQ ID NO: 463695 - DNA, 574 bp, Homo sapiens
gcaccaaacaggtgcattcagggaggacacaaagaggggagagacgcctgcccaaggagcacctggtggaacactcagaggagccacttcattctttgctttttaagcatgtgttcttgctgtcatacttctacaatgcaaaaatgtcctagaaaacaactgtatcaattagttctggttctgaggaaagaaaataaaatcacactaaagagaaataaactaagacgttcctggtggtgtgtrttgggagacgccgaggcaaggcttgtacgtctgacataatgtaaaagattcttggaacatgtccgggatccagggtctaaaactccttgtggcctttggaacgccaagctctgtgctaaagggtggaaggctaccctgacgcaccataatctcagcccagggcataaaaaccccttgtggcttggatagaatccagggctcgtggctctggaatgtgtctagacttgctggctccttgctccttgctccttgctctcccaggatcgattgtatcttgagttaaaagaacctgctctccattatctcaagtagcagagcatatgctaaaccg

SEQ ID NO: 463696 - DNA, 601 bp, Homo sapiens
ccctgtcaacataactcacaattgttgagcacttaccaggtagcaggcaccatgttaagtgacatactatttaatatttaccacaaccccatcaggaatgtattattaataataaaaataatgatgataataacgttcccactttagaggtgaagaagctaagtttcagagaggctaagtaaattctccaagctacacagtttgtagagcagggatcagaatagaactgatcagattgcagagcctgtgctgtatkttaggcacagctggtgagggtatgaggcttctaagctctcctgcctcctaatctgcttaccatatattagatgcttgattaatggtatctattatcattaccattatctttattaccatcaaaagaggacagctctataggaattacattatacatttggatatgcaattttagttgaggctgatgaactagtggcctaaaatcactaaatttaaagatgacttgtttcaacataataaataaagtacgaaatattttcatttaccattcactcattctattgggatagtgtacagagtcatgaaaatattgcctcaatggattttcagctactcagaatagctc

SEQ ID NO: 463697 - DNA, 438 bp, Homo sapiens
tcctcctttaaagtagaggtaataatatatcatggggttgttgtgaagattaaatagtaatagtaattacagctaacatttttgaatccttctatatatgccagatagtatattaaatgtttatatgtggtttttttttttacttggcagatatatgttatcttaattctcatgaacttgtgagatgtagataatttttactgatgaggagactaaaagagggattttgtaaattgccccaagcaacacagctaataagtggcaaaaccagaatttaaatccagcagtctgacccaccagaggctgtgatttgaaatgctgtcccctatgtatatgaagcccttagcacagtgcatagccatagcatgcattaattcatatttatgttkaggctgtcttttataaatagtgtgtcaagagaatgagaagacaagccac

SEQ ID NO: 463698 - DNA, 559 bp, Homo sapiens
  misc_feature (1)...(559): n = A,T,C or G
aacatggtacacattcctgaaataactattgaagaaataggtgctaaartatgtgatgctgactgtaagttgcacagttgtttggggaagggagcatcagccaatgttgactggggcggtcttggctgaggggaggcgggagtggagattgtgttaggcctgataaagtctgtgtagataaagagatgattaaacaggctttctaggtggtaggtgaggtaaccagcataaccaggctgtattcactctggctctataaaaaaactctctttccatttgaaagcactcaccacaccccgacgaccctccaccccaccctcgtgcttcacactttaatcatctgggcccagagcagctgtcacccatcaggctaatatacatcaagcactactgcaaattacatcatcagaaccgattagcccttgaacatgtcagcataatagcacttctatcttctctgggtgactcgttaattaatctctggaatatgctgtctttgacatcatggggagttaaatttttctagattgaaagtannnnnnnnnnnnnnnnnnnnnnn

SEQ ID NO: 463699 - DNA, 600 bp, Homo sapiens
ttcactggcttaaatctgcacaagagcacagtagccacactgcacgacaacctacaggcatagcttacattgtcttgcaccatcctcatgacagatctttgaagggaatttaattatttcattttagtggtgacttaacctcacacacagctgctaagtggcagagctgggatctgaatctgtgtttacctgactcattcaggtcctcaatggggtgtgagtctgataatgagagggaagagaaaagagctttggtttctggctgtactccagaaaaggccagaggaatagagacctaggtttcccaaggcctaaattttggttttgctgggacttcgttctggwtgataacaagatagggtatcatgagtaagagattttgctctccaacatacggtgttaaaaggtctcgtttctttgtccagattaaatgtaatctgctccaaaactccatcctaccagcccagagggaaattcaatttgccatattaaagcttccttgcccatgcaccatcagaggcaagcaaagactctggggtctcccacattgcagaacatttagaggagagtctgctggtcttcacacattctgtctacaca

SEQ ID NO: 463700 - DNA, 462 bp, Homo sapiens
atatattcattaattcaatttcaacttctgttctcatccactgatttttcaacatttattctttcacatgaactatgtaatgattgtatgtagttctgaaaaatggggaatctactggaatcaaattaaaataactgggaatgacaattttttaaaattaaatcttcccatataagaacatgagctatctctccatttattcatgctttatgttaataataatggacagttatagaaaaatatataaacaaaagacaagctaaataacatatttatttctaaatacgttataatttttttgtttttttgagacagagtctcactctgtcgcccaagctgaagtgcaatggcgtgatctcygctcactgcaagctccgcctgccgggttcacgccattctcctgcctcagcctcccgagtagcttggactacaggcacccgccaccacacctggctaattttt

SEQ ID NO: 463701 - DNA, 539 bp, Homo sapiens
aaactgctaatctatgtgtagtaggttgcttgatggctcccaaaaaaaagatgttcatatcctaacctctggaatctgtgaagatgactgtatttggtaaaaaaaaaaaaaaaaaaatgcccttttgaaataaatatttttaaattagaggcaattgggaagaagcagttatagaaagggcagtctgcgttgctgtttttaacgtaatggcaggctataaaaactcctttgaaaaacatgaacaggggcttctgcccctcctttctgcctaaaggcaggatgtaaattctttctttactaaagaagtcactgggcttgtgtcagctcaraaacagtgccagctgggccagaggaatctgggagcaaacttcactaccttcctacagttctcccacctttgcaagcctgaagctttgtcttgttactatgctaaaatgtattgtcctttgttaaaacactgtttaagcaaggcccctaacccactgctatgaaagagttactttccagagatccttttgaattgagatttctcccgcatg

SEQ ID NO: 463702 - DNA, 449 bp, Homo sapiens
gagtttagaaattattttgtccattgctctgatttataccaatagaaaactgaggtccagggaattgaggaacttttccaatccatccataaatttggagatagactaaaatctagagttcctgagccaccactactatgttttcttctayaccacatcgcctaacccagaaattgttgataattatgtcttctttttcaaaaactctaaatactttatcagctacccttgcgtataattgagctatgatattcagtcacttgcaagatcactttaaaatatcaccacaatgttataggattggttataatcatgagtggggtttgctgacattttccaaacatggggcaacttcttgtactaaacagtaaccatagaaccattttctccattgctaagatttattacacattaatctgagaattcaaaaggctactaaaataacggcg

SEQ ID NO: 463703 - DNA, 493 bp, Homo sapiens
gtactgaacaggagagaactgcacagagagaaaacaccagagatccmcagtaggttccactggaatattcagcagactactgatcagtacatgtatgtgaaaaaaactattcaaggagaggaaaaaaaaaaaaaaaaaaaaaaaaatatatatatatatatatatatatatatatatatatatatatatatatgtacacatgaaaagattagagggaacaatatccaacattttcacagggtcacagataataactgattgcaccagctagactgacattcctcatatttcataggtagactactcagaagggcattgccccagtagtggggaataattagccttagattaatcatggctttggtcctccccaacaaattttggaagtaagaccaagaaggattaaactatttccagttaactgtatcatagaatatagtttaaaatgttgatgggaatacgaaactatcctgcaccaacaagttaaaattca

SEQ ID NO: 463704 - DNA, 493 bp, Homo sapiens
gtactgaacaggagagaactgcacagagagaaaacaccagagatccacagtaggttccactggaatattcagcagactactgatcagtacatgtatgtgaaaaaaactattcaaggagaggaaaaaaaaaaaaaaaaaaaaaaaaawatatatatatatatatatatatatatatatatatatatatatatatgtacacatgaaaagattagagggaacaatatccaacattttcacagggtcacagataataactgattgcaccagctagactgacattcctcatatttcataggtagactactcagaagggcattgccccagtagtggggaataattagccttagattaatcatggctttggtcctccccaacaaattttggaagtaagaccaagaaggattaaactatttccagttaactgtatcatagaatatagtttaaaatgttgatgggaatacgaaactatcctgcaccaacaagttaaaattca

SEQ ID NO: 463705 - DNA, 528 bp, Homo sapiens
tcacaccctccctcaagggtgttggtgagtgggttctcctttattagtttccaggagagctggttcttaaaaagatcctggcacctcctcctctctctcttactgcctctcttgtcatgtgatctttgtacatgctggctccccttgccttctgccatgagtggtagtagcctgaggccctcaccagatgcccagtcttgaacctttcagccagcagaactctgagctaaataaatcacttttctttatgaattacccaaactctggtattcctttatagcaacactaaatagactaagacagcaagtaagactggttgactgatcagagtgaagacaagggagacagaagaaaattaggaaatggaagataaattatgtagtgggaaaagtattaaattcagagttgaaaatcatgagttrtcctaaaagttctgtgtgactcttgacaattcatttcaactataagtaactctttccccatgtaacttccatgtaacataaggagaatgggtgagatggtatacta

SEQ ID NO: 463706 - DNA, 563 bp, Homo sapiens
cagggtacagcctccctcacagctgctttcatgggctggtgctgagtgtctgcagcttttccaggtgctcagtgcaagccattgatggatctaccattctggggtctggaggacagtggccctcttctcacagctccactaggcagtgccccagtagggactctttgtgggggctcccaacacattttgcttctgcactgccctagcagaggttctccatgagggccctgcccctgtggcaaacttttgcctgggcacccggccatttctatacgtcttctgaaatctaggcgaaggttcccaaacctcaatacttgacttctgtgcacctgcaggctcaactccacgtggaatctgccaaggcttgggctttcaccctctgaaaccacagcccaagctgtatgttggcccctttaagccatggctggagcagctggaaaaaagggcagagggaccctgggtctggcccatgaaaccacttttttctcctggtcctctgggcctctgatcrgaggggctgccataaaggtctcttacatagccttcagacattttacccatga

SEQ ID NO: 463707 - DNA, 559 bp, Homo sapiens
taaaattggtgagatgttccttgggctggtcggtctgaggacctgaggttgtaggtggatctttctcacggagcaaagaacaggacaggggattgatctcccaagggaggtcccccgatccaagtcacgacaccaaatttcatgcgtgtccgtgtgaagagaccactaaacaggctttttgtgagcaacatggctatttatttcacctgggtgcaggtgggctgagtccgaaaagagagtcagtgaagggggataagggtggggccgttttataggatttgggtaggtaaaggaaaattacagtcaaagggggtttgttctctggcgcacaggagtgggggtcgcaaggtgctcagtgggggtgctttttgagccaggatgagccaggaraaggactttcacaaggtaatgtcatcacttaaggcaaggaccggccatttgcacttcttttgtggtggaatatcatcagttaaggtggggcagggcatattcacttcttttgtgattcttcagttacttcaggccatctgggcgtatacgtgcaagtcacaggggatgc

SEQ ID NO: 463708 - DNA, 590 bp, Homo sapiens
cttttttttccttttgggagctacttctctcatattcatactatttttgtgatcttcaacttttgttgccccttcttttcatttgatttcatggctacaaccaggaatctctgtttttttaatagaaagtttcccaggcatttctaagatttagccagttaagaatcattgtgccatacaattatcacagatgtgaaaaatatgaggccctctctattcttccaaaatcatatgtacatgatccagtctagccaactatggtattcaacaccctgggaaacaatattggtctakagtataagtgatcagagtattttatatggatagatatggattcacagagggataggccatgttttttcttctgaaaatatggtcatcctcctaaggctgtcaagggccatatatttcacaatatggcatgaatctgattagtaatgatataaaaaacaaaagaaaaaaatagagagagagagagagaggaaaggcctaataacattatttaaaatattagatccagttgatcctgtagtaattttgcccttttcctcccattcaagtcatttgaatcaatatactcccttgttttt

SEQ ID NO: 463709 - DNA, 367 bp, Homo sapiens
ctcttgcttaaaaatggatatggcactataggaagttaactgctattctctttggaataatctaccttgcactctttgctgatgggtatgggtaacagggttaggcaggtactagatcactggacatgggaaacctttttctccctacgagggaaacttgagagctgatgggactgctggaaaagatgaattgttgtgactgacaaggggctgcctcaactattgattcagtgttgttgcaatcggtggstctttctttggcctttctgaactccttgccttccgcaccctgttgcaggcaatgcgtttctcctttccctttcctctctctctgtgcaagccagttgtaagaactgcaaaaattact

SEQ ID NO: 463710 - DNA, 571 bp, Homo sapiens
tgttctgtcataaaaaatgtaccataagatagaatgtaggcctaggcccccataagcttgctgttcaagatgacccagcaagctgatcagtaacaaacaaacaaaatgggatgaggttttcatcttgtcttttgttatgtccttgggaacttgaccttgtaaccatgtagcagtactttctcttggtctctgccatcaagagaacaggaattttgaggttcatgtcatagttagctttaaaaattatcttcagcaggtaaaaggctttgcaagctcaaaattggctgctctagattccttctgggaagagcaatggaaagtgctcagtactgtagcttagctgccaaagcttggctactgccaaagcttggctttgtcattccacaatggcaacccaggttcaatcctggcctgggggatgagtactctctagttgacatctgtgtgacctttaccatttgttgattctcttctccatgtacaatttctggcttcccttcttgaattttcctttagcaaagaacctgggaggttacctttgktaaagttcaaaagccagaaatattggctg

SEQ ID NO: 463711 - DNA, 586 bp, Homo sapiens
tgtattttagatcctagaggaaatgctttcagttttcccctattcagtgtgatactagctgtgggtctgtcatgcatggctcttattatgttgaggtatgttccttttacacccagttttttcagggtttttaacatgaagcgacattgaattttatcaaatgctttttcagcaacaattgaaatgatcatatggttataatcttccattctgttaatacaatgtgtcacattgattgatttgtatatgttgaaccatcctggcatcaaagcgataaatcccagttggtcatgatgaatgttctttctaatgtattgttgaatttagtttgctagtattttgttgagaatttttgcatcaatattcactagagatattggcctgtagytttcttttgttaatgtatctttgtctggtttttggtatgagggtgatactggcctcactcatagaagtagttttgaagtatttctttctcctttattttttagaataacttgaggatgattggtattagttctgctgtaaatgtttggtagaattcagcaatgaagccatcatgtaccaggcttttatttactgagat

SEQ ID NO: 463712 - DNA, 648 bp, Homo sapiens
ccattggcccataaggagctccagttgtaaagtgagacagaaggaagagaaggtgggggccgcagatggctacctggaggagccagacagcccacttgagaagctaaagcctaatgtgtttactaagggtggccaggctagaaaggcctggtaataawtgaaggatgctttaaatggttgcaggaggaaccagaggagcagatcctgctaggaggctaagcatgaagaaggaattcaaagaaaccttgtggagaacgaagacacagcagggagtaagctaatttgtgagattaactgtccatgggggcatgcctcctttctgtggttgctagcacccactcaggggagagaagggggtaaaatgcaatgaaaggaaagtttaacagtgaaattattggaggataaccattttatactattatttatttatttatttatttttatttcaatggtttttggggaacaggtggtgtttggttgcatggaaaaaattgttagtgataattcctggtattttggtgcatccatcagccaagcagtgtacactgcacccaatgtgtactattttattcctcactcacctcccatccttccccgcaaaattcccaaagtccattatgtaattcttaaggctttgcatcctcatag

SEQ ID NO: 463713 - DNA, 656 bp, Homo sapiens
ctctgtccagttctgtgtccttgctggaaaggcactgtgatcatttggagaaggggcactctagtcttttgggttttcagcgttttttcgtttattctttctcatcttcgtgagtttgtctagtttcgatctttgaagctgctgacaattggatggagtttttgtgggggctttgttgttgttgatgctgttgttgttgcttcctggtttgttggttttttttccaatggtctgctccctcttctgtagggctcctgttgttttcygggggttcattcaggccctattaatctggttcactcacgcacctggagatgtcacttgaggaggctggagaacagcaaaaatgggtgcctactcctctgacctcaaggggcaccaatctgatgccagtaggatcactcctgtatatggtgtctgacatcccctattggagtgtctcacccagtttggtggcacagggaacaggacccatttagtgaagcactttgtcacttggtggaggtggtgtgcttcactgggggaaaacccactcatctggttgctcagattcctcagaactaccaggaggaaaggataagtctgctggtccacagagactgtgggcacccctccccctatgagctcaggttcagggaaatccgtgttctgtccct

SEQ ID NO: 463714 - DNA, 490 bp, Homo sapiens
aatagctcgataggttgaagagataaaaaagtaaatctacttataaaatatagagatttagkttatgcaaaaatcatgtgcagcttataaactgtgtctcaatgagatcatgcaatgtcatttgactgttaggaatctctaatcagaaataatcatataaatagccaagaaacaaacaaacaaacaaaaacaaggaaaagtaaacagtcttgctcatcaaaataatgggtaatgtatatggaaggaaaaaacagcagaaacaaaatatggtcagaatatataaaaagaaagaatacttcagaacaataaaattttattgaacaggttctcgaaatggggcactttgaaacttttaagaacatccttgtagatgtattatttcggatttggttttccaaatatttaacacatttcatatgcaattaattatctatgaagcttttttatcaaagttttcactctatttaaataatgttatcagaactttaaa

SEQ ID NO: 463715 - DNA, 533 bp, Homo sapiens
atgctgcccactttgaatacacaggagggtttcttcaagaatacttcagttgagtggaatcttgaccctcaaatagttgcctaggttagcaggacctgaggcaatccctagggtaaggtctggtcagataagttaaagccgccttcagggcactttcaatttaggcaccaatttcctcaagactaaggataagaaaacaaagctgcttgagttcaactttctcctttgcctttttacttgtttcctttgttcctgtgagtatagtatatttaagagtgacttcaaatgactaggaaagctcatcataaggatgtttcttctgatcatggtctgatcatggastaatttttagccatccaaatacattccctgggcttcaggcatgatgacatataattttttaaaagacatttttacttacaactccttaagttctaggtttcctttcacgataaatctgcaaacattttctcagtgccagtttaagtgtagggggaattgctgtctcttattacaatttcattttttagttc

SEQ ID NO: 463716 - DNA, 563 bp, Homo sapiens
accacatttgctttctcatcctctttgtcttgttctctctatatacatatatatgtatatagatatgcytctttctctttatatacatctatttatacattaaaaatatatttctctaaaacacttggataaccagtatctttttgtttccaaatagtttagtgtatttcctgaagacaaaaatatcctcttacgtagcacagtgcaaatcaggaaataaacagtaatataatattatctctattatttttattcaaatatcatcccaatttcttcatagcaaaagataaaatttcagagggctgatgcaacagaatgtcatctgctgcattttgtggccatgccctgtgttcttttattttaattttttgatgactataaaaagttcttctttgtctttcataacaaaaggcaagtctactttgtcttttataacattaatatttcagaatacaggcaattcctcagtattttagaagagaacagaccatctttcgatttgggtttgtttaatatttgccaacggttaaatttacattgtacataccaggcatgaatctcgg

SEQ ID NO: 463717 - DNA, 607 bp, Homo sapiens
gccacactgaatcatcactctccatcagcccatatcaaaatgctttaattgccactgttaaaacttcagactctctcctcatgcatttcttctagctttctaccctcccacatgacaaaacaaggaaaagtttggcactcsgttcaccatgttgccaatccatgtgcatcaatttgctaatgcatccaacatgtctgctagatggctcagtcatacagtggcaaaattaattagggcaaccacccttagagctgaaatacagccaacaacatgaaaattttcatggcatttgtatacagaacgtaattcgttgcattaaaaaaatttcagaaaaagagcctttcaggatggaattttcttacatctgcatttcattttcaatatttatgtttacatgattgaaagaaatttacccttttaatattaacaacacaatttttgagatatttaggaatgcctctatgatttctgctaattgtaacagccaagcacttagtggagctgagcattgacaagagtcacctgggagctgcacctttaacgtggtagtaattaggcactgaaaaggcagccaccaccatttacactcagtgtgaccccattaaac

SEQ ID NO: 463718 - DNA, 607 bp, Homo sapiens
gccacactgaatcatcactctccatcagcccatatcaaaatgctttaattgccactgttaaaacttcagactctctcctcatgcatttcttctagctttctaccctcccacatgacaaaacaaggaaaagtttggcactccgttcaccatgttgccaatccatgtgcatcaatttgctaatgcatccaacatgtctgctagatggctcagtcatacagtggcaaaattaattagggcaaccacccttagagctgaaatacagccaacaacatgaaaattttcatggcatttgtatacagaacgtaattcgttgcattaaaaaaatttcagaaaaagagcctttcaggatggaattttcttacatctgcatttcattttcaatatttatgtttacawgattgaaagaaatttacccttttaatattaacaacacaatttttgagatatttaggaatgcctctatgatttctgctaattgtaacagccaagcacttagtggagctgagcattgacaagagtcacctgggagctgcacctttaacgtggtagtaattaggcactgaaaaggcagccaccaccatttacactcagtgtgaccccattaaac

SEQ ID NO: 463719 - DNA, 508 bp, Homo sapiens
tctaagaactgaaggttttatcttgacattgtaaatataatgaaaatgtgtacaaaatggaatatcctatttatgaggtagtaaataacaaaatggactcagcccaagaatgtttgttcatttcttcattttcaattaaatgcctgaaatgaatttatttctgaataaatttatttaataaatatttagcaaatgctcagtgtgttttaactatcctgaaggatttttaaaaaaaamttcaaaagggaacccctggtagggaaatccccgaagtttgttgggatgagaacatttcttccttctccagatgtgaagtgagccgcacatttggcctaacttaacatttctcattcactcacggccagcttgaaaagacatattggtcatatagcccattccctttcttgttcctttatcttgggacccagccccactccttataagtttcagggcttgctagatgttcattggcatgttaccccatccctagcagtgttgaccaattgta

SEQ ID NO: 463720 - DNA, 469 bp, Homo sapiens
ggaattgaaactcacaaattctggctccaraacaaaaattagtaaactggacccataaataaactatttgtatatccacacttattacctatcttgccagtggccttcaagttacgaaaagaagccatagagggctctacaggagagtcacaagatctgtgtgccaaggtaatagacatgtctcaggattcttattgtcccacagcattttctcttgttcatgggcctagtttcaagggtagccctaggaagccacgcttttttaatggagcctcactacacctgatcacagctgatacgaacaagtatgcatacttaaattcccgactaccagtacacagatgaccagaaactaaactctcttactagaatttgaacaaagaaacacagagactctggcaactgaggttaaagaaatgtaatgctatgagactactggccatgtggaaacagagaaaacaaacaagaa

SEQ ID NO: 463721 - DNA, 429 bp, Homo sapiens
gttctgtagtgactacctgacttcttgcatgattgctgtatagaaagtgataccatcaaataagacagaagaatacaggaggaagtaaaagttataaaaggaaatgaatgtgctcacaatttgaaatgttgagattgaagcacctgtgtggcctccaggtagagatgtctagttggcagatgaatataagtcaaaaagatagaggtttagaatagagacattgacatgagtgtctttagtaaaggttagagacatgagaatggccaagatctctcacatagaacatgaggaggcaattaggggctcwaggaaaatccctagtgaattttttacctttaggaggtagtcagaagaatttcctgggacagaaattgagaagttaacatccatttttcaaaattgtacaaatgatttaaaaggagagtattg

SEQ ID NO: 463722 - DNA, 589 bp, Homo sapiens
tcgactatcaatccagcactttcttcacttcagtaaaatggtatgtgtcatgctgcctggtattcatgccactaagaaagtgtaccaaattactgcgtgcctgtagtattgctggcactgagctaaataaattagacacatattttctatgaatcttctcaatgacccactattttttttwaaaaaaaactgagtactgggatacagatagtataagagccagttacattactcactatgtaagtaatgaagtagcataatgcgtttcataagtaacgaggaataacttaaaactaggtttctaactccagcatctgagctgtttccaccttattgtacttttccaccttattgctctatctcacacagtaagagcttcaaatatagcttaaagtctatctctgcctatacccaatagacttttaataagtggactgacttgtaatagacatttaataaacatttattgataattgagttcaataaaaataatagaatgacttttatgggattctgattaaatttattcttgtaccttagaaagatggaaataatttagcagcaggagggtcaatagaagtgaaaaatg

SEQ ID NO: 463723 - DNA, 483 bp, Homo sapiens
aggacactggataaataccttttcaatgttgtgacattgttgacttgcaggggggaaaaaactcctccatgactctgattcctgcctatttctccatcatgatgaatacagcctargatcatgagatatattttacttttatgaacatgcaaatgtctttcctacctcagggcctttgccaagcttcaacataaaatggtacagagtatgcaatgaacatattaggtgtcaaggtcatatttgaattattcacgtatttgtgtatttattgcagtaactttccatcagtgtcttgagaaagaggcataattttctacatcttacaaagtaccatttgcactgtagtggccttccctgtgacaactacgtgttgttccctctgatggaagcacttcccctgaagtgtatttggctctttctttcttatccttcagttttcaactgaaatagcatttcctcagatatgcagtccatgggaattct

SEQ ID NO: 463724 - DNA, 597 bp, Homo sapiens
ctaaaaaacctagaacaactaaaaaaaattgagtatggactatattgtaccaatgttgaatatcctgaatttgataatttcctgtgacttcgtaaaagaatgtagttgtttccagaaaatacatattaaagtacttaagattaaaggagtatgtctcaacttatccacaaatgattgggaaaaaaaatacatatacatttagaaagaatgaataaatgataatgcaatggggcaaaatgaaaacaagtgaaaaatctgagtaagggaatacatayatttttattatttttgtaatgtgaaattatgtcaaaatacaaatttaaatgagaaaatatataagtggctatataaacatcagaagaaaataagattcaaagcaaaaaatgtcagacatagagaggggcattacataatgataaagggtcaattcaccaagaaaacaaagccattccaatatacatgctccaaaaaacagagctgcaataaatatgaagcaaaaacagataaaagtcaaatgagaaacagaaaaattcacaattttacttggagactttaacatcccattctgaacaattgataacagcagttaagatagaa

SEQ ID NO: 463725 - DNA, 451 bp, Homo sapiens
ttagaagagttctaatggttcttaatttaagaattataagaggtagattcaggtagagagagattcccatgatattcaatgctgggtggagaaggagatccatccccctccactcacaaacatcytctttgtgtttttactcgacagtccttcatttagctgatccatctgtatttatatttgttctcttccggatcttgtttcatagtcaatatcaagtgtttttgtgtaagctgcctggtcttgacaggccgggcacgaagtagcccaccattcccacagcactgcaataaaacatcacaagacccctgcaaggtgggtctcagcctcccctgatacaggtgaagcaggaggctcagggctgctacaacttgcccccagtcccagagctggtatacagcaacccagattgacagattccaatacccatccatgctgccttgcctaacca

SEQ ID NO: 463726 - DNA, 451 bp, Homo sapiens
ttagaagagttctaatggttcttaatttaagaattataagaggtagattcaggtagagagagattcccatgatattcaatgctgggtggagaaggagatccatccccctccactcacaaacatcttctttgtgtttytactcgacagtccttcatttagctgatccatctgtatttatatttgttctcttccggatcttgtttcatagtcaatatcaagtgtttttgtgtaagctgcctggtcttgacaggccgggcacgaagtagcccaccattcccacagcactgcaataaaacatcacaagacccctgcaaggtgggtctcagcctcccctgatacaggtgaagcaggaggctcagggctgctacaacttgcccccagtcccagagctggtatacagcaacccagattgacagattccaatacccatccatgctgccttgcctaacca

SEQ ID NO: 463727 - DNA, 451 bp, Homo sapiens
ttagaagagttctaatggttcttaatttaagaattataagaggtagattcaggtagagagagattcccatgatattcaatgctgggtggagaaggagatccatccccctccactcacaaacatcttctttgtgtttttactcgacagtccttcatttagctgatccatctgtatttatatttgttctcttccggatcttgtttcatagtcaatatcaagtgtttttgtgtaagctgcctggtcttgacaggccgggcacgaagtagcccaccattcccacagcactgcaataaaacatcacaagacccctgcaaggtgggtctcagcctcccctgatacaggtgaagcaggaggctsagggctgctacaacttgcccccagtcccagagctggtatacagcaacccagattgacagattccaatacccatccatgctgccttgcctaacca

SEQ ID NO: 463728 - DNA, 451 bp, Homo sapiens
ttagaagagttctaatggttcttaatttaagaattataagaggtagattcaggtagagagagattcccatgatattcaatgctgggtggagaaggagatccatccccctccactcacaaacatcttctttgtgtttttactcgacagtccttcatttagctgatccatctgtatttatatttgttctcttccggatcttgtttcatagtcaatatcaagtgtttttgtgtaagctgcctggtcttgacaggccgggcacgaagtagcccaccattcccacagcactgcaataaaacatcacaagacccctgcaaggtgggtctcagcctcccctgatacaggtgaagcaggaggctcagggctgctacaacttgcccccagtcccagagctggtatacagcaacccagattgacagattccwatacccatccatgctgccttgcctaacca

SEQ ID NO: 463729 - DNA, 503 bp, Homo sapiens
gggaggattaatggaagagtacctactcctgaggagttcatgcattggcattccccaaaatgattatattttcctctagccaccgtagaacgcacaacacagttcatctattattgttttattaaagttcatgtaaaatgactacccattactttgttaacaacagaaatcttgatatttatgtttaaaaatattttttacacacatttttaaacarattttttagatatagagtcttgctatgttgcctaggctggtctggaactcctgggctcctcccgcatcagccttccaaagtgctgggattccaggcatgagccactgtgcctgtggctatttatgggttttttgtctacatttgggacaacaaatcaagtaaaatgtaactttagaagttgattatgattatgcctcaagcgaatacttaaaaaaaaaaagagagagagagatggataaaagttcattttgtgtatgtctcaggtaaagtatgttaacttggggag

SEQ ID NO: 463730 - DNA, 503 bp, Homo sapiens
gggaggattaatggaagagtacctactcctgaggagttcatgcattggcattccccaaaatgattatattttcctctagccaccgtagaacgcacaacacagttcatctattattgttttattaaagttcatgtaaaatgactacccattactttgttaacaacagaaatcttgatatttatgtttaaaaatattttttacacacatttttaaacaaattttttagatatagagtcttgctatgttgcctaggctggtctggaactcctgggctcctcccgcatcagccttccaaagtgctgggattccaggcatgagccactgtgcctgtggctatttatgggttttttgtctacatttgggacaacaaatcaagtaaaatgtaactttagaagttgattatgattatgcctcaagcgaatacttwaaaaaaaaaagagagagagagatggataaaagttcattttgtgtatgtctcaggtaaagtatgttaacttggggag

SEQ ID NO: 463731 - DNA, 607 bp, Homo sapiens
ttgtttgagggactacaagaagaccaatgtgcttgaagcataatacatctaagatcagatgtgtgatgagtttgaagaggcagctagatcamcgtaaggactttggagggcttttggcaggagagtgacatgatctgatttgatgtatattttgaaaggtcactccagcttccaggtagcagtggaagaagacatgcaaaaatcacaatcataacttacacggcatggtagcttggagtacggaggaagaggaagcacatttggggtatattttggaagtggaataaacagacctgctggtggatggagaagggtggggtgagggttgataatgaggagccaaggatgactcattttcaggtttgagtaactgggaaggcttggaagactagtggagaaacaggtttggagagagaagtctcagtcccttagtcattcacctcagtttcttagtcactgaaataccttagatctcttatctaccatttctttaaaaacatgcgtgagcccagtaggcagtcctggctactcgggaggccaatggggaaggatcccttgaacccaggagtttgaggcatacctgggccacacagcaagaccctgtctc

SEQ ID NO: 463732 - DNA, 525 bp, Homo sapiens
aactccctgttcctgaaatttagagacaggggcttcatttttagacagaaagtataaagatcagcagtactcctgtatccagtggttctcaagtttgagtttacatatcattagcaaaatcacaaagcgggcttttcattcaagatrcaaatagagtgatcagtatatcataatcaaaagtgacaagatagtgatttaaaaaacacctggcatttattgacaaaagaaaaggtaggattaagtctgctcaaacagtaaaggattagcattagtatttttttaaaaagaagaaacaacagtgcaggtctctatgctaaagtaataaggactgaagaagttttaagtttggaaaaaatggggatatgtattggtgaaacactttgtaatcatatagaatgattattttatcagcagctgttaagttgactttgaggaaattttgaattgaaatactttaggtgacaagtaaaggcaactgtgaaaagcaacatttgattttaggggacagggtacctgtgaaagaag

SEQ ID NO: 463733 - DNA, 525 bp, Homo sapiens
aactccctgttcctgaaatttagagacaggggcttcatttttagacagaaagtataaagatcagcagtactcctgtatccagtggttctcaagtttgagtttacatatcattagcaaaatcacaaagcgggcttttcattcaagatacaaatagagtgatcagtatatcataatcaaaagtgrcaagatagtgatttaaaaaacacctggcatttattgacaaaagaaaaggtaggattaagtctgctcaaacagtaaaggattagcattagtatttttttaaaaagaagaaacaacagtgcaggtctctatgctaaagtaataaggactgaagaagttttaagtttggaaaaaatggggatatgtattggtgaaacactttgtaatcatatagaatgattattttatcagcagctgttaagttgactttgaggaaattttgaattgaaatactttaggtgacaagtaaaggcaactgtgaaaagcaacatttgattttaggggacagggtacctgtgaaagaag

SEQ ID NO: 463734 - DNA, 525 bp, Homo sapiens
aactccctgttcctgaaatttagagacaggggcttcatttttagacagaaagtataaagatcagcagtactcctgtatccagtggttctcaagtttgagtttacatatcattagcaaaatcacaaagcgggcttttcattcaagatacaaatagagtgatcagtatatcataatcaaaagtgacaagatagtgatttaaaaaacacctggcatttattgacaaaagaaaaggtaggattaagtctgctcaaacagtaaaggattagcattagtatttttttaaaaagaagaaacaacagtgcaggtctctatgctaaagtartaaggactgaagaagttttaagtttggaaaaaatggggatatgtattggtgaaacactttgtaatcatatagaatgattattttatcagcagctgttaagttgactttgaggaaattttgaattgaaatactttaggtgacaagtaaaggcaactgtgaaaagcaacatttgattttaggggacagggtacctgtgaaagaag

SEQ ID NO: 463735 - DNA, 525 bp, Homo sapiens
aactccctgttcctgaaatttagagacaggggcttcatttttagacagaaagtataaagatcagcagtactcctgtatccagtggttctcaagtttgagtttacatatcattagcaaaatcacaaagcgggcttttcattcaagatacaaatagagtgatcagtatatcataatcaaaagtgacaagatagtgatttaaaaaacacctggcatttattgacaaaagaaaaggtaggattaagtctgctcaaacagtaaaggattagcattagtatttttttaaaaagaagaaacaacagtgcaggtctctatgctaaagtaataaggactgaagaagttttaagtttggaaaaaatggggatatgtattggtgaaacactttgtaatcatatagaatgattattttatcagcagctgtkaagttgactttgaggaaattttgaattgaaatactttaggtgacaagtaaaggcaactgtgaaaagcaacatttgattttaggggacagggtacctgtgaaagaag

SEQ ID NO: 463736 - DNA, 491 bp, Homo sapiens
ggatttacccaaactggagctggaatccctcctcgactccctctcgaccccctccccctccccctcgttctccacctctctcaacttctctgtctccgaagaagacgtagagaggtgtcaagattttgtcattaacttttttcccaggggagctctagaaaaagtttttaggatctctaaattgcatgtttataaatgtatgaagaaggtgccaggtcagagatgacaccattgagcaatgtctaggtcgccagcaacggaaaaccgccctcaacaccaaagagagaaaccagatgagggctgtgttccctgactctgggctggatgtctgcaaagttcatcataatatttctgttagttatttggccctggacctcagtggtggtcgtattcactttatgaatgargaaatgaaagggcaggaagagctaagttttccgaattaggaggaataaccagtggcattacgccagaattaagactgactaggg

SEQ ID NO: 463737 - DNA, 595 bp, Homo sapiens
ccctgttggcaataagatagtgatacagtcagagcacattttaatccctttgaaaacagaactgggctaggtatggtggctcacacctgtaatctcagcactctgggattgctgaggcgggaggatcacttgagcccaggagtttgggaccagtctgggtgacatagcaagaatctgtctccacaaaaaataaaaataaattagctgagcatggtggcatgtgcctgtggtcccaggtacttgtgaagctgagtcaggaaagttgaggctgcagtgaactgtgattgaaccactgcacttcagcctgagtgacagagtaagaccctgtctcaaaaaaaaaaaaaaaaaaagaattgttactcatttaccataccaaaaagtcattccataatgataatgtaaataatgttcacaaatatttattggctactgtgattcrtaacttatgtcattaacaaccaaatacattaagaatgaatggcttaaaatttgatgagcaaaagctattcagccctactactgcatttttctcgtatgcatttacagtgctttgcatttcaaattatttctcttttccttctaccacctactcatt

SEQ ID NO: 463738 - DNA, 576 bp, Homo sapiens
ctggctctgcctgcaagaagcttaccttcaagatgggaaggcgggtaggcaaccagcacatacatatgatgtgactctgatgtcttcatttttatgccctgaatagttctcaaattcaagttttgaagacaaattactttatgatgtgagagcaaaaagaatgttttctttaaatgatacatatattggtagtttgttatattttgaaatttcttgaattatcatttttctgagaaatttatgatccatttctcacattttcttggtgtggggcatgatggaggagggtcattcattttggaaatgtttttgctaaagtgttaagaaacggaggttgagaaacttcaggctggcttcttagctcctgactgcatcttttaaagagagaartgagcctgaatacattaattttcaatgggaaaggacagtttggcacagaagggagaagaggacaacccaggtgtcctggaaaaagtaggaccaagaaaaagggaacaggataaggtggtatgaatagactttctatgaatacaaattgagatttcagtcactcgtgggacttggtaccaggcctct

SEQ ID NO: 463739 - DNA, 609 bp, Homo sapiens
tgtgtggttgtttggagatgagacctctaaggaagaaattaaggttaagcgaggtcataatggtgacaggctctcatcaaacaggattagtgtccttataaaaagggacatcagagaccactgtactggcacattctccatgtccagcccctaaaccaatcctgctcacaacttgatcttggacttccagactctgaaagtccrgcaaagacaagtgagcatttatagacaagaagcaagttggggcagtggatggaaaattactaagaggaaacatgaggagtaagaagggattctggttaaatcagcttaacaggattcttgctgaagtcagggcagagtaatcagatatcatctgggaggtggtgggagataaggaatttggtcaaatattgacaatgatcagatatgaagggtgagagattctggttaaacaaatttgacagaatttttgctaaaattgggcaatgcaaaaacagacatggaaacccacagttcagggcctcggattgtctctcacagggttgcaaaaataatctgctatgttttcttcaagaggttttagaattttatcttttacattcaggactatgatctttcttgaattaa

SEQ ID NO: 463740 - DNA, 609 bp, Homo sapiens
tgtgtggttgtttggagatgagacctctaaggaagaaattaaggttaagcgaggtcataatggtgacaggctctcatcaaacaggattagtgtccttataaaaagggacatcagagaccactgtactggcacattctccatgtccagcccctaaaccaatcctgctcacaacttgatcttggacttccagactctgaaagtccagcaaagacaagtgagcatttatagacaagaagcaagttggggcagtggatggaaaattactaagaggaaacatgaggagtaagaagggattctggttaaatcagcttaacaggattcttgctgaagtcagggcagagtaatcagatatcatctgggaggtggtgggagataaggaatttggtcaaatattgacaatgatcagatatgaagggtgagagattctggttaaacaaatttgacagaatttttgctaaaattgggcaatgcaaaaacagacatggaaacccacagttcagggcctyggattgtctctcacagggttgcaaaaataatctgctatgttttcttcaagaggttttagaattttatcttttacattcaggactatgatctttcttgaattaa

SEQ ID NO: 463741 - DNA, 554 bp, Homo sapiens
tccttcctcatggctggaagcaaaatttatctctgtactcttatttaaccctgacaaacaaatctacttacatatattatgttaacatgaaaccaaatggaataaagtttacatcaagcaaaatcacttaaaattttcttctcactgcccccctattcctcaccttatactgctgaggatttgataattatcttaaaagcaaaatcatttgaatgcttagacatttgcatgtaagtttttattttgttccttttgttcaggttagcggttgtcaaaatttactgtgcataatcattactatacaaaacaatgatcccytacttgatgggctatgtaaaggttattctaggatagttttggctatacactaattcacctaatgccttgaaattcaattttagcctcaatgtagaaaggtgaatctattatatttcttttgtggatattagggctattttattgcattctaatttgtttatctgttaaaactttcaaatgcaactcagtcttgtagaaaggagattgtgtgacctagaaggggaaaaaaccccaca

SEQ ID NO: 463742 - DNA, 582 bp, Homo sapiens
atgtaaggtgtttgggatggatttcacctgccacatattaagtgctcaattaactgtaaytattatgacagtggtagcaacataaaactgatttatataaatgcatttctaattttagaattttgtgcaatctggcagattcattagagacatatttggcggtcaggattgttttctggcagctatataaaccataccacataatctagaagagatggaaagataattgatcttactttaagtgaattcaaatctataggcagtagtagaaagtctcttactgttctagctataaactaatcaatcaacttacatggaagacaggacacagaaacattcagtcaaaatagatgatgcattcatgtgcttaaaattatcatgagttaaacattgattcaagttactagaccaggtgaaagctacaatcaaataatatttcagtggtagtaaggtacctgcagtattcaaccatttccctcaatttccttatttataaaatgaagataacaatagcaccaacctcatcttgttattgtggaaaattaaatgagttaattgttgaatagattatttgatgtgatg

SEQ ID NO: 463743 - DNA, 582 bp, Homo sapiens
atgtaaggtgtttgggatggatttcacctgccacatattaagtgctcaattaactgtaattattatgacagtggtagcaacataaaactgatttatataaatgcatttctaattttagaattttgtgcaatctggcagattcrttagagacatatttggcggtcaggattgttttctggcagctatataaaccataccacataatctagaagagatggaaagataattgatcttactttaagtgaattcaaatctataggcagtagtagaaagtctcttactgttctagctataaactaatcaatcaacttacatggaagacaggacacagaaacattcagtcaaaatagatgatgcattcatgtgcttaaaattatcatgagttaaacattgattcaagttactagaccaggtgaaagctacaatcaaataatatttcagtggtagtaaggtacctgcagtattcaaccatttccctcaatttccttatttataaaatgaagataacaatagcaccaacctcatcttgttattgtggaaaattaaatgagttaattgttgaatagattatttgatgtgatg

SEQ ID NO: 463744 - DNA, 504 bp, Homo sapiens
  misc_feature (1)...(504): n = A,T,C or G
gtttaagaagggcctctctcatgcacccacacatgggcacttggggcaacatattcaatgaaaaagagaacaatatttctcaattattttatttataagccattgaactatatttctaatacttagtgatttttaataattaaaagagatttatagggaaaagtttagaatgttagtctttgtcattccaaactgctatcacacaaattcctgttttatgtttattccttttgtattattttaacttaaagattattttttactccaaacacaataatgaagatctagaaaaacagaaaataaaaactactaaatatggaaaatgagcaatacctacacttttccgaatgaagctaaaaacccaattgaaattaggtttttatttaattggaaaagcatgaacactcatcttaagaacatgccaacacactatatttctgtcacatagaaaataacttttttmttagatttaatgaccttttctannnnnnnnnnnnnnnnnnn

SEQ ID NO: 463745 - DNA, 457 bp, Homo sapiens
tgaaagtgttaatatttttaaatgaaggatcagaggtttcctaaatgttctaaacttctaggcaaaacaaagtgctaggaagctctatcaattcacattctgagtcctacaaggaaataactccaggaccctagggtgctcccctgccatttgctayggaaaaagtccagacatgtgttgtgaaggaagagcttttctactttccttgcagggcctctaggggcaggggttgatgggttgaggttgcataacttctctttgctatcatagcccaagggcagccttatatgtgccactcaacaggcacattggtgtgaatatgggcacaggagctggggtcttgctctctttcttggccctaaacaaattcaggaggagtttttgaaactcctgtgaagcatgcattccttaacagtcatggcctgcctgggttcactggctagacaagctcatcacc

SEQ ID NO: 463746 - DNA, 595 bp, Homo sapiens
tgtggcataagtcacccacaggagctatcttttataataaaaaagtaaactcgcgttaaataaaattgaaattccaaatattttttaatttatttaaaatttatttatttaatttatttaatggactttcatcttacaggaggggatacgctgtcttttgcaaatactttcactctgcttcatagcatgcacatattctagtagtggtacagaaacaaaactggaattctggtttcagagatgacaccagatgtgaaagataaagaaaatgtcttaggcctagtatacttattttttttagattcataaataatgatatgggtagctgccattcccagccaygacaaaataatcagtaatgatgaattcatccagccataaactattacaaaactgaacaaaatgtttgaagcaactgtttcagatgttggaaaacattcagagcagaattatggttcctaggagaaaggaataccatgataagagccctccagttgccccagctctctgtctaggcacagggaggaggagccaaagcagaacccagggatcttgctgacctgaggaggaacacactttgagtttgaggctagaa

SEQ ID NO: 463747 - DNA, 611 bp, Homo sapiens
cttttaaattatttcaatatctttgttaaatttatcagataggattctgattcccttctctgtgttatcttgaatttatttgagcttcctcaaaacagccattttgaactctctttctgaaaggtcacatttatttctctctctgggattgatgcctgttacctaatttaattcatttggtgaggtcatgttttctggatagtcttgatgcttgtggatgtttgatgaacagtttctggacactgagtggttaggtatttattgtagttttgcagtctgggcttgtttgtacctgtccttcttgagaaggcttttcaggtatttgtamgtacttagttgttgtgaccaaagtttttggtcactgcttctatatctgcattagagggccctccagtccagcagtgctgtggttcttgcagactcatagaagtactgcctttgttgtcttggataaaattggcaagaattttctggtttaccaggcagagactcttattctttcctttacattctcccaaacaaatggagtctctccccctgtgctaagctgcctagagctaggggaggaggaggagtgacacaagtactgctgtggccatcacactaggact

SEQ ID NO: 463748 - DNA, 620 bp, Homo sapiens
actcaaagagcacccaggaaattcattgcaaaaagatcatcacctaggaacacagtcatcaggttatctaaagtcaagacaaagaaaagaatcttaagagctatgaagcaaaaggatcaggtaacatatgaagaaaaacctgtaagattaactgcagatttctcagcagaaaacctgcaagccagaagggatccaggtcttattgataaactccttaaacaaattatcagtaattttgtatccagtgaaattaagtttcataaatgaaggagagataaagtctttctcagacacacaaatgctaagagaatttgccacaaccaagccagcactaaaagaaatgctagaaagatggctgaataggaacagctctggtctacagctaccagcatgagcgacgcagaagccrggtgatttctgcatttccatctgaggtaccgggttcatctcactagggagtgccagacagtgggcgcaggtcagtgggtgaactcaccatgcatgagccgaagcagggcgaggcattgcctcacttgggaagggcaaggggtcagggagttccccttcctagtcaaagaaaggggtgacagacggcacctggaaaattgggtcactcccac

SEQ ID NO: 463749 - DNA, 473 bp, Homo sapiens
tactcttccttctctcctcaagtggaaggaaggggtctcttttggagccacaagctgtgcagcctggggtttgcggacagctggtgcaagcactttcttagcctccctggcttgtgtatcagtatgttgcatgcccaccgtgtcctctggctataagcctagctcagcactaggacttgcytaggagttgcagtccttgtggcacagactgcctttcaagtttatttagagccccagagcactttagcccatggtggtgaggtttgctgtaaatccagttctgatcactgggatgtgtgaatcccctcaaggcagggctggcctatatgcttcttctgtggacaggctagggctgagtttagccctgttttgctttctgctgtgatagggcaccactaggttcaatacaatctcatagtcactgcgctctccttctcccaagtgcagagattctctcttcgtgccacagagct

SEQ ID NO: 463750 - DNA, 607 bp, Homo sapiens
aagtccccattagtaaatataagagcaagcaatttcggtattaaattactgaaagttgaaactgtaaagaagcagaaaatattccaattctactttctcaacttcttttattacattatctcatcattccagctgttgtgtggaatgtgtgataatttctccattctgtccacaaacacaatagggttaggaatattagaagtactcagagattcgtaccaattttctaaagatcttgggttctaataagccagctcaatgaaattattgtgtctaaaatgtgtctttggtatattcactcttaatatgataaagaaattyctctttgtacattcgtccccaaatttcatgatttaaaaggaattggttctggagttttttcttaacttttaatattcagccattggttttaattgccctgattttggcaaatgctttgcaattctttgttactcttagtagcaagcagcttggaatctcacatcacttagctaaaacttatgaagcagtgtgcaattttcttgatgacaaaaatgttatgataaatgaacctatttgaatgggaacaatgaaacttcatagaagttgcttaaacaaacataaaaaa

SEQ ID NO: 463751 - DNA, 350 bp, Homo sapiens
tatatgaagtgcatctcaagtgttacatttgtaggtagcagaaaaaaaaaaagaaacaggtaggcagtgtgaacggaagactgagggagcaacttaatgtcaggcttaaaattttggaaggcatctcaaacagctattctctgttgagatgctacatctttgtgtagcatctcaaacagctattctctgttgtyatgagggactttatgtgaacagaacatgaggaaatggcattgaatagcagcagaggagatcaagggaaaaataatttattcttttaacatatgtaagacatgtcactgagtgcctactggttaaggccctattctaagtgctcagaatagaggaat

SEQ ID NO: 463752 - DNA, 350 bp, Homo sapiens
tatatgaagtgcatctcaagtgttacatttgtaggtagcagaaaaaaaaaaagaaacaggtaggcagtgtgaacggaagactgagggagcaacttaatgtcaggcttaaaattttggaaggcatctcaaacagctattctctgttgagatgctacatctttgtgtagcatctcaaacagctattctctgttgttatgagggactttatgtgarcagaacatgaggaaatggcattgaatagcagcagaggagatcaagggaaaaataatttattcttttaacatatgtaagacatgtcactgagtgcctactggttaaggccctattctaagtgctcagaatagaggaat

SEQ ID NO: 463753 - DNA, 660 bp, Homo sapiens
ttttgttgttgtttgtttgtgtttggttattctttctttcatttcttcccttactgttattttgcgatcttggatattgtagtcataatatcattaaacacttgtaccactgattttgctttctttgcctattttccctttagttgttatttgatagaaatgaacgagatgttttcagataccttcagcatttccaaacttctttataattaagaagtgattccttcatgggggaaggtatgtgtaggggaacacggtttaraagctttgaaaaagtgtgtgatcacatatagggggagaaacctagagacacaggacatcttttttatccatgatatttgatgctgtagggtgattaagaatgcaggagagacatataggatttatatggtgttttgcctgctacagtagtctggattttagaattattggtttctggacccattgttaacttgcttaaaccaggataatgtctgtaaggaataaaatgtagaaggatatacattcaaccaagcttgaaaatatatttgcctcgcatgtataacgtgggaaactatcacttgctaaagggtctaaaatctaatagatgcatatatgcattcctgttgatgataatcttgtttcacagagccacaggctccaatagtcatttattgatag

SEQ ID NO: 463754 - DNA, 510 bp, Homo sapiens
attctaagttactttcataagacttcccagcagataatggaaatggagcagaatccaagtttcttaactcctatgtcagcactttttctgtaacatttgcttaaatttccagyctacatctttattgctagctctctttgagtttgataggcagtggtaggtgaaatagtataatggatttccattgatcctccattgtttctacttatactgtctctgttcagtctactttttcttgctgttgtttttgtttaaaaaactgtttcttgagattattgtagatttacatagtgctctaaaataaatacagagagatccatgtggcctctctgtacagaatatatatatatctcacaaggatcccttatgttggccttttatagccatatccactaccattgctaccctgacaccctgattgcatcccgtggcaatgactaatcaatctcttctccatttgtataattttgtcatttaactggttatagtaataaaaacatatgttatgta

SEQ ID NO: 463755 - DNA, 652 bp, Homo sapiens
gtccctcatcttcacaagctctcagcagttcttacttagttactagaaaatggaaaagtgactactctcccaaagaaaggtttgttactcctatttaatgaatcagtattggtcaggagtgtctgtcaggaaaccgaatctgcatggggagaagtaaacagaatccccatgatttgtatgaaggactcccagtcccaacacttgacaatataccaagtactatcttccggtctttaaagagtacacagccttcatgaattcacttattgtagaagsctcaattatactagggatttaagatagaagaatagtttttggggaaatgcttattgcctgcccctatgaaatggttctttcaaaatattggttcagtgagcacatgcattgataccctgttgtccatcaggtaaaaatgactttgagttaaggctaacctattgtgtttcaggtgttttgttgtgtttattattattattattattattttccttatcctgagaccttcaaatttaccagctgtcagcttttaggcagaatacacttaaattttgacttgttatataaaagcgattatttttccttttgagaaatcttgttagctattgccatagttaaataaaaaatttactcttattggaattatctttgatta

SEQ ID NO: 463756 - DNA, 581 bp, Homo sapiens
ttgccttgcaaacatttatcaaagtatagaataggttttggactactgtggagtttagggaataacatcttagaatactcaaattaatgagtatgaaacaaagagaagcactccttgtgaaggacagagttacaatgaacttgtaaacatttctgatactcatttggcatttgttgtggtatggtttttagattwtgtaagcatagactcttgaatgaaaaacgggaatatttttagttgactaatgaaaatgtatgaatttcatataagaaattactgtatgtacttagaatctcaaaaagagatatacctaaaagaatataaaatgtaatggtctagaacagtgctgtcagatagaaatataatgtgagccttgaatataatttaaaaatgtctagtagacacatttaaaactggtaaaatgaaacaagtgaaatttattttaataatatatttttgatctagcatatccaaaatattatcttgcaacatagaattagaataaaattattgggagagatattttgtgttactttctatagtcagccactaaaatccagtttatattttacacttacagc

SEQ ID NO: 463757 - DNA, 581 bp, Homo sapiens
ttgccttgcaaacatttatcaaagtatagaataggttttggactactgtggagtttagggaataacatcttagaatactcaaattaatgagtatgaaacaaagagaagcactccttgtgaaggacagagttacaatgaacttgtaaacatttctgatactcatttggcatttgttgtggtatggtttttagattttgtaagcatagactcttgaatgaaaaacgggaatatttttagttgactaatgaaaatgtatgaatttcatataagaaattactgtatgtacttagaatctcaaaaagagatataccyaaaagaatataaaatgtaatggtctagaacagtgctgtcagatagaaatataatgtgagccttgaatataatttaaaaatgtctagtagacacatttaaaactggtaaaatgaaacaagtgaaatttattttaataatatatttttgatctagcatatccaaaatattatcttgcaacatagaattagaataaaattattgggagagatattttgtgttactttctatagtcagccactaaaatccagtttatattttacacttacagc

SEQ ID NO: 463758 - DNA, 597 bp, Homo sapiens
tgctagctgtgagatttaagcacccacataatttttctttgcttcagtttcttcatttataaaagacatgagttagatgaattgtttatgctgttatttccaatattacattttgctactctagaaatttatgtcatgctgcttaagaaaaggccatataacatcttcttgatagggtttgtgtaatgaaacgtgatagcttgttagaataaaatactgcagtactctgtacatcatcataaaatgccttttatttataaagagggttmaatcacctctgttctaaatcagagtaaaggataattttggctctagacaattaaatgattttatcaatacccatacttacttttctagactttttgttttttaaggacattgtttaatgacaaaatgttttatttgacattatgtcagcttactcagataactggatgttaagggatcaagtagtgcatgttcttcagaaactagagtatatagatggccttccaatgcagaaatttattctgatttcaaatatatatttaaagttaaaatatgcagatttttcttaagcaaggtaatttgaaaagtcaataaatcaagtttgtcaaa

SEQ ID NO: 463759 - DNA, 571 bp, Homo sapiens
tcaacaagaaggctggacaaatagaaaagatgaaaatcttatttcattttcatgattaccttaactgggctcagaagaatttgtgtttcatgtatattcttttaatctggagagaaatataaataactgtgcatgtaggaattataatcagctgatgtttcttgtggaagataatctcaagataataattactgaaaagtaagcatcagagggatagtaagttactcctagatacatataataccataatagaaaatgttgatattattcctacttagcaaatatataatctagtgacattgagtaatcaaatcaaggataaataaataataaattkactaaaattctgactttagattccattaaatgttatataattacccatttctccccatccctgaaatttctgggttgttattttgggtggattaaataaatcataacaagaattggttttcttcattataattactaaaatatgttttctttatgatactttttaagatctcccatcttatgagaacatatgttgctaaattaattaattcattcagttttcagtaatttagga

SEQ ID NO: 463760 - DNA, 571 bp, Homo sapiens
tcaacaagaaggctggacaaatagaaaagatgaaaatcttatttcattttcatgattaccttaactgggctcagaagaatttgtgtttcatgtatattcttttaatctggagagaaatataaataactgtgcatgtaggaattataatcagctgatgtttcttgtggaagataatctcaagataataattactgaaaagtaagcatcagagggatagtaagttactcctagatacatataataccataatagaaaatgttgatattattcctacttagcaaatatataatctagtgacattgagtaatcaaatcaaggataaataaataataaatttackaaaattctgactttagattccattaaatgttatataattacccatttctccccatccctgaaatttctgggttgttattttgggtggattaaataaatcataacaagaattggttttcttcattataattactaaaatatgttttctttatgatactttttaagatctcccatcttatgagaacatatgttgctaaattaattaattcattcagttttcagtaatttagga

SEQ ID NO: 463761 - DNA, 622 bp, Homo sapiens
catatttcaataccactgtaatatataattaagttataatttaatatatctttagagtgtaatataataggttttgttacttttctgttttgtttcagtatgaaaagagggtgagaattatatgttattaactatttattcaacaaatatcaagaaccaccatgtgctagaacctgatataggtatgtagatatagcagtcaacaaaacagaaaattcctttttctcacggggtttacataccattccatgcaccaccataggaatcatcagataatgattgacattcatggaactagtttccttatgaaacttcttgtaagaagaccaagcagataaaaaccaataagcaaacctgtctgtcattcactcactaactcatgaaacaaatatttactgagttgtatttaggaaccaaattatatytcctaccaccttttcagttagaaggtgttataaaattgcagtaagatcaaaatgatcattaagccaaagacctcaaaaactagggaaataaataagcagatgggagaatgagagtatataaactttggagtttatttggttgaagaaattgtttaaaatgtcctatcatattagagtagacctttgtgtgcatcgtt

SEQ ID NO: 463762 - DNA, 622 bp, Homo sapiens
catatttcaataccactgtaatatataattaagttataatttaatatatctttagagtgtaatataataggttttgttacttttctgttttgtttcagtatgaaaagagggtgagaattatatgttattaactatttattcaacaaatatcaagaaccaccatgtgctagaacctgatataggtatgtagatatagcagtcaacaaaacagaaaattcctttttctcacggggtttacataccattccatgcaccaccataggaatcatcagataatgattgacattcatggaactagtttccttatgaaacttcttgtaagaagaccaagcagataaaaaccaataagcaaacctgtctgtcattcactcactaactcatgaaacaaatatttactgagttgtatttaggaaccaaattatatttcctaccaccttttcagttagaaggtgttataaaattgcagtaagatcaaaatgatcattaagccwaagacctcaaaaactagggaaataaataagcagatgggagaatgagagtatataaactttggagtttatttggttgaagaaattgtttaaaatgtcctatcatattagagtagacctttgtgtgcatcgtt

SEQ ID NO: 463763 - DNA, 576 bp, Homo sapiens
gtatcaaggtaccaggtaaaggacttataatacctactatgagacttcctaaaatgagttaatattatggctgatccttttattgccatcctggaaggtgatggaaatgatgttcacaagtggcttttggccagtgtatcacttgtacctagatgcttaatgtcaaaactggtacaaccccttacaaactaatccaaagcacaatttctgtttaaaaggacttcaatgcattttttactttttagtgtgaacttcagagttcataaagctgcatttccatcccagctattttttttttcatttctgtagaatttatttatctttgggtgctccccaggtgcattcttcttttttttattattattatatttaagttctaggttacatgtgcacaatgtgcaggtttgttacatatgtatacatgtgscatgttggtgtgctgcacccattaactcatcatttaaattaggtatatctcctaatgctatccatcccccctccctcaccccacaacaggccccagtgtgtgatgttccctttcctgtgtccaagtgttctcattgttcagttcccacc

SEQ ID NO: 463764 - DNA, 576 bp, Homo sapiens
gtatcaaggtaccaggtaaaggacttataatacctactatgagacttcctaaaatgagttaatattatggctgatccttttattgccatcctggaaggtgatggaaatgatgttcacaagtggcttttggccagtgtatcacttgtacctagatgcttaatgtcaaaactggtacaaccccttacaaactaatccaaagcacaatttctgtttaaaaggacttcaatgcattttttactttttagtgtgaacttcagagttcataaagctgcatttccatcccagctattttttttttcatttctgtagaatttatttatctttgggtgctccccaggtgcattcttcttttttttattattattatatttaagttctaggttacatgtgcacaatgtgcaggtttgttacatatgtatacatgtgccatgttggtgtgctgcacccattaactcatcatttaaattaggtatatctcctaatgctatscatcccccctccctcaccccacaacaggccccagtgtgtgatgttccctttcctgtgtccaagtgttctcattgttcagttcccacc

SEQ ID NO: 463765 - DNA, 576 bp, Homo sapiens
gtatcaaggtaccaggtaaaggacttataatacctactatgagacttcctaaaatgagttaatattatggctgatccttttattgccatcctggaaggtgatggaaatgatgttcacaagtggcttttggccagtgtatcacttgtacctagatgcttaatgtcaaaactggtacaaccccttacaaactaatccaaagcacaatttctgtttaaaaggacttcaatgcattttttactttttagtgtgaacttcagagttcataaagctgcatttccatcccagctattttttttttcatttctgtagaatttatttatctttgggtgctccccaggtgcattcttcttttttttattattattatatttaagttctaggttacatgtgcacaatgtgcaggtttgttacatatgtatacatgtgccatgttggtgtgctgcacccattaactcatcatttaaattaggtatatctcctaatgctatccatcccccctccctcaccccacaacaggccccrgtgtgtgatgttccctttcctgtgtccaagtgttctcattgttcagttcccacc

SEQ ID NO: 463766 - DNA, 631 bp, Homo sapiens
tatgccagtttgagtattttgatgttcattgatttatagtcctggctatctattaaaaatagaataataaaaatcttataactgaaaataactttggagagaatctattacaaactccttctcaaagtatctcttatgtaaaatcctttgctgtgtttttgaaccaaactctattaacagattagtagtcctgagaagtattttccaaaagcttcagatattaaaagggatatattgagagactaaattattattaaccaaggagctgaaatcagatagcatagtgactactttttaaagaatgtttctacagcaccctagacttgaaaaaggaatttcataatatatggaactctgcatgcaatcttttgctcttaaaagagagaatgggatgtgtactataaatattctgaaattccctttaataaagtgtttcatacaactttttggacctagatacattatataatactaattgatatccctttaataaagtgttttatataacttttcagacctaggatacattatataatactaaytgatatccattttgagtattatatcttagcaaaagagaatcagtgatagaaggccattccgtcatgagagggttcttatgatgacagta

SEQ ID NO: 463767 - DNA, 550 bp, Homo sapiens
tcatttatttatcaaataaacatagggataaatatgaaagtataaattaaaacagtgaaaaaaagactaggagaacatagatttataagtcagtcccttgacttataataatcaagtatcacttctactatcctagagtatttgatataatcatttttatcartcatcttagttgctgaaaaataccctgaaattgttcactaaaaagcataatatcataactgtatgtattatttaataaagatgtttcaattattattatgtacttttctttctacttcagtgtggtctagctacctgactcatagaaacatatgtaaaagaggttagaggagtgttatcttaaatatttgagtagcagatttttataaaaattaatcaaaattgaagtttcacagttgaaattttaattagataaactattctgtagaccatgatgctgtcacatataattctaattacatatttattgcaaccattaatcatataagagtaattattttatgtaacattgaagtatggagataacaaatagtgttgatatttcagt

SEQ ID NO: 463768 - DNA, 490 bp, Homo sapiens
gagatattcagactttcatgttgattacagcattatttacaatagccaaaatgttggcataacctaaatgtccatagaccgacaaatgactacaaaaaatgtggtgatatgcacggagtggaatattattcagccttaataaggaagtaaatcctgccatatgcaataacatgatgaaacttgaggacaaactaagtcatttttctatttctcttttatattctacactaggtataagctacacaaaaacatttttctttttttgtgctagatattttccactgatacattgtacttttgttgttgttgttgagatggagtctcgctctgttgcccaggctggagtgcagtggcatgatctcggctcactgcaacgtcygcctcctgggttcaagcaattctcctgcctcagcctcctgagtagctgggactacaggtgcccgccaccacgcctgtctaatttttgtatttttagtagagatggggcttc

SEQ ID NO: 463769 - DNA, 564 bp, Homo sapiens
gtatagaagtgcttagtaacatttccagtaattattggtcttggttgctagatggatgagtgaaaggtcagtattgaaaagaataaatagtaggttttagtgttcactctgagacccagttcttttattcattggatgaagattaattttccrtagttgaggttttacaataagattctattgttatttatttatggagataccaaaatatcagttatatggttttgtattaagttgaaccataggaaattgccattttgtgggttgaggtttgtcaaacatcaacaatttcgtatggttcaaccaaatatttggaatgatgtagaattatatattcacacacatctgcttattatgtgccagatgctttgctaatcaccttctaaaggtgaacacttttaatcctgacagaaacccaattattaatcaatattattcccattttagagatgaaaaatttataacacaaagaggtccagtaaatcgagctcacaaaattagtaatgggtggagccagaatttgaatgcaagcttcctgagtccaaaatccccaaaatattttgc

SEQ ID NO: 463770 - DNA, 602 bp, Homo sapiens
aatatacatacacatatataacttacatgcacacacatataacataaatacatatctttgtgtgtgtttatatagagattcttctataatatgcaattatttaaaatgtattcttcattatggtttaacatgaagaaacttacttttcaaatgaaatggaaaacaaaatcaaacaaaacctaatgttcatggaatttacattacactttcatatgcttactctttatattaaatcaaacaactcatgatttatcacactgaagaaacaggttttgaaatatctaaattatttaaatttagttgggaaaattgtttctatgtcatgagaatatattttggttgattgcttggcttargctaaaatttaattgtacagagacagataactatcatgaatatggcatttacagttatttttttaaaatggagtacaaatcatggtagtatgaattttttctcttataattctgttattgacaaaataatgtgttagaaaatggccaccaaaggaaaaaaaaaaacactaattttttctgccttcatttggaagaacaatagagctatcatagcctcttggagctggttcaatatatttcttgttc

SEQ ID NO: 463771 - DNA, 595 bp, Homo sapiens
taaagatcttaataaatacccagaatccattaattgctggaggggaaaagtgaaactctgttgtaaaattaagctgattcccagtatgcatggtcccggtatacacaggctgtggctaaccattatgagaccaaaaatagttacctgttattttgttccatagaatggaaacttcatgggtggatacctgtgctgtcaggaatgcttgctataaaaacgaaataaaacactttcyttaattgttacaaaggaagtggttccatccatttagaataaagcaattaagttgtaaaactttaaaaatggctactattatccaggttacagtaaccatgaaacaaagacaccaaggaaagttggtaggcattaacttatctttgggctgtcttttgaacagctgcttaaggtcttccacaggttcacatgtgttgtgacggatgggtgcttcagattccaggtctcaggcttcaggtatcacaggcttgaccctggaaagatgtgtccaactatctaaccttagtattttgactttagaaggcatgaccagcaccactgaaaatggtcccttccatctcggttgtaattgttgagcagt

SEQ ID NO: 463772 - DNA, 580 bp, Homo sapiens
aggtatttttgccaataactcagaagactcagctaacaacattaaattagtctcatttgtcaaagaaggcacgcaaaccaagatgattttgttttcgctgggttaatagctttataaccttctatgccaaacaatgacatctcacagtatctagcaaaggcaaatattaaacctagacaaaaatatatgctgacaattctaaagacatttcttttttaattttaccaataattttatagccagcttgtttaataaaaagttatacttaattcacatgaacttgaaaattgcttagacttatttacttattgagtgctcttttagttataagccaatttggtaggcacaacgtataacaataagtgtacatgcaaataaacacatctagtcatatatacacacacaaacaaagatccaatagcctttaccttggaactctagccatgagatagcaagacaaactcactggttttacatggttacaatttgcttgtcccagtgggtaacccaatgaaggctgtgaaccaaaattttkggtaaagcagtttccatgacagtttgatttttaaactccaaagaa

SEQ ID NO: 463773 - DNA, 585 bp, Homo sapiens
actttacataattgcgaagttctgtattttttctttccccctttcccatattgtctaagctacagttagatgaccattaagccytacataaatcatgaaaacatgaagattctgagaatatagaaatacctgcaacagaaatagcacataagatactacttgaactcatttatgtggtatttaagatcaatgtatttgcatgtacatatttttaaatgaaggaaatattttataaatatttctgtattgagattaatttcataagtaccccaaaaagcttacttagcatcataaggttacatttattatttttgtgtgtcacacactgctatacaggctttatttataatatgccacatgaaccctattgtagtgatggggaaactcagatctaggaaggctaagtgacattttcagggtcacacatctggttagtggcagagccataatttaaatcaggggatctgacacttaaccacattgttctggctactcaattatatatttttttctgattattttcttttgaaactattttccccctaagtatttattagcaacataattggggttgattgattgata

SEQ ID NO: 463774 - DNA, 621 bp, Homo sapiens
ctctaattttgatatttcactgctttgaaccagtgtcaacgtgtggagtgttcttttgtctatacatgttcctatgtttattgccgatgctcatttggtgtttaagtgtatagcaagaaagtagcaggtaatacttatcttgctgggatgtctcggggaatatatatgagttcttaggttgattctagttgtctgtttcattgattgtaaattaaaaactggtgtagtctagtgagaaattatgaatttagtctacattgccttctcctgtcctgtgaaccctaactgttctgttctgtcctgtgtgggattgaatgactgtacactacaagggcttgctgattaaagtgtggcttatgsagaagcagcatgagtttcacttggaaatgaattataaatgcagattctcaggacctacccccagaactgctgaatgcaaatgtacattttaacaagatctgtaggtgatttgtatgtatctttaagtttgagacacactgggctattactgaataggtcatttatgtcccaagacatgacacaaaattactgccacttacatatttgttgattgacctaccacagtcagaacatttgtactgtgttgaacgtgagctgttt

SEQ ID NO: 463775 - DNA, 530 bp, Homo sapiens
tgaaagtaaatcagtttaagcaataatgacagccacttaacgatgtgctgcaaatgaaatagtgtactttgttctggaaaagatgattttggttttctgcaatattctagtgctttgtcaagactgtcattgaagtttttgcttttttttttttcttgaacattatcataaagttcaaatactgtaatttaccttgtggataagaagaagaaattcactgtacttctacagagattgtagtaaaatcaggcaccacccaaaataattaatgtgatcaccattttaaagtaaagatgagtcttttctcagcccttgcagtgaatgaaaagaaataaggatgttgtttgcagttgttatttacattccattttttaaaaacaagataaaagggagtataaatgaatasaaattatatggattttatgccatctttatggaagattttatctttaaaataacatatatattcactgccttacaaatttgttgaacaaagacatgcttgcccagttagaaaattagtgataata

SEQ ID NO: 463776 - DNA, 537 bp, Homo sapiens
tgaatcctcagtagtcttcaattagggcacaaacaagatgacttttttcctccaaaattgacatggatggtctgctcctgctggcttcatcttcaacactgtctgttcccttcttaaaatcagttatctatatgtaaacttctgatttcttagggccattgtccctatacactgtttgcaaagcatcgaggtttcaccattcttccactaaagcttcatcataaatttgatatttgttcttgcttcaattttattttgctctgatgagggcttttttcaaactgktgtcttatccttcttagtttgtaaaactagatcatattcagacatgttataataagttagtgcaagtattttaaggcaaaaaattgaaatccatgcatggtttattcatggtatgcgttttccatgaactttttgaagtttctttgtatttgcaagttatactttctcctttgacaattacgatactttgccactgacaatctgtttttaagagcttttactgctttccttcaaattctaatcctttactta

SEQ ID NO: 463777 - DNA, 554 bp, Homo sapiens
agacacatacactaagtatacacaattttatttatttcctggagaaatggatcctatcactgactttggagttagataatatagaacttttaaaatataaaatgaaccttgatggattcttgtgaagaaaatcagacttcaaagatccaacagaaaggacatctcccattacatgagaaactggctttttcctttgcacgatttttcatttcatcctttcttttgcccgatcagtttttttaaactttaatcatcagtaaatcacagttacttaatttagttctttgtaaatacttaatgcaataaaaagagtagatccattttacaaaggattttttttctcctgcaattcaagtttcttctcctattttatagtcctagtagttatgaatcttgaaaagttaagcctgagtgcttargactgtttagagaaaatcaattatagcttatcctaggctcaggagacaatataaaattctggtgatgttcaggtttaaggttatggctggatcattaaattatgttcagtatcaaatccatgggggaaatagcca

SEQ ID NO: 463778 - DNA, 554 bp, Homo sapiens
agacacatacactaagtatacacaattttatttatttcctggagaaatggatcctatcactgactttggagttagataatatagaacttttaaaatataaaatgaaccttgatggattcttgtgaagaaaatcagacttcaaagatccaacagaaaggacatctcccattacatgagaaactggctttttcctttgcacgatttttcatttcatcctttcttttgcccgatcagtttttttaaactttaatcatcagtaaatcacagttacttaatttagttctttgtaaatacttaatgcaataaaaagagtagatccattttacaaaggattttttttctcctgcaattcaagtttcttctcctattttatagtcctagtagttatgaatcttgaaaagttaagcctgagtgcttaggactgtttagagaaaatcaattatagcttatcctargctcaggagacaatataaaattctggtgatgttcaggtttaaggttatggctggatcattaaattatgttcagtatcaaatccatgggggaaatagcca

SEQ ID NO: 463779 - DNA, 554 bp, Homo sapiens
agacacatacactaagtatacacaattttatttatttcctggagaaatggatcctatcactgactttggagttagataatatagaacttttaaaatataaaatgaaccttgatggattcttgtgaagaaaatcagacttcaaagatccaacagaaaggacatctcccattacatgagaaactggctttttcctttgcacgatttttcatttcatcctttcttttgcccgatcagtttttttaaactttaatcatcagtaaatcacagttacttaatttagttctttgtaaatacttaatgcaataaaaagagtagatccattttacaaaggattttttttctcctgcaattcaagtttcttctcctattttatagtcctagtagttatgaatcttgaaaagttaagcctgagtgcttaggactgtttagagaaaatcaattatagcttatcctaggctcargagacaatataaaattctggtgatgttcaggtttaaggttatggctggatcattaaattatgttcagtatcaaatccatgggggaaatagcca

SEQ ID NO: 463780 - DNA, 554 bp, Homo sapiens
agacacatacactaagtatacacaattttatttatttcctggagaaatggatcctatcactgactttggagttagataatatagaacttttaaaatataaaatgaaccttgatggattcttgtgaagaaaatcagacttcaaagatccaacagaaaggacatctcccattacatgagaaactggctttttcctttgcacgatttttcatttcatcctttcttttgcccgatcagtttttttaaactttaatcatcagtaaatcacagttacttaatttagttctttgtaaatacttaatgcaataaaaagagtagatccattttacaaaggattttttttctcctgcaattcaagtttcttctcctattttatagtcctagtagttatgaatcttgaaaagttaagcctgagtgcttaggactgtttagagaaaatcaattatagcttatcctaggctcaggagacaatataaaattctggtgatgttcargtttaaggttatggctggatcattaaattatgttcagtatcaaatccatgggggaaatagcca

SEQ ID NO: 463781 - DNA, 572 bp, Homo sapiens
cacacagtccttgggagctccrtgattctgaaagccgtaacaatatcctcaaaaaagccttcttctggtatttaccagtcagcagagatcatatttaaaactggaaaaaataagttgaatctggggaacataatttgggatgcagaggaaatagggcctgatttaagaatgctcttcacataactccactaaagacaaataccctactccacccccaccatacttcaacctacagagttttcagaaagaagcatctgcacatagtagacattcaatgtacatttgaagaatgtatgaattcataagattgctgccatgcaaaaacgtgaccagcttgaacattagttgccatcaaagccctcgatttcagcagaagtcactctagtctccttctttcttatttgtttctcagggtcacagctgttcacaggatgcagtctcagctcttcaggtctgaactatcatcttcttgcagggattggtctcaccacccaagggagttggagatcagtatttctgactcgtctccaaatcttcggaaaggctgtcacgtgtcccctggcctccaaacc

SEQ ID NO: 463782 - DNA, 572 bp, Homo sapiens
cacacagtccttgggagctccgtgattctgaaagccrtaacaatatcctcaaaaaagccttcttctggtatttaccagtcagcagagatcatatttaaaactggaaaaaataagttgaatctggggaacataatttgggatgcagaggaaatagggcctgatttaagaatgctcttcacataactccactaaagacaaataccctactccacccccaccatacttcaacctacagagttttcagaaagaagcatctgcacatagtagacattcaatgtacatttgaagaatgtatgaattcataagattgctgccatgcaaaaacgtgaccagcttgaacattagttgccatcaaagccctcgatttcagcagaagtcactctagtctccttctttcttatttgtttctcagggtcacagctgttcacaggatgcagtctcagctcttcaggtctgaactatcatcttcttgcagggattggtctcaccacccaagggagttggagatcagtatttctgactcgtctccaaatcttcggaaaggctgtcacgtgtcccctggcctccaaacc

SEQ ID NO: 463783 - DNA, 532 bp, Homo sapiens
tttgcatattatttgcttacaacttctcttgctttctctctctctcctttatgtttcttattgcatttatactcacatgttgtgggagtctttttttcctgtctgtgtttgtatttcaaagccatcatcctgccctccctgagctgcactaggcaaaaatatgtgtccaggatagacgaaaagacataagaaagaccctctgaggggacctaacttggggtctccttcccctgaagaccccactccctgtccagtgctgaaggcataactgttacaatagagaaaaggaggcagtcaagagctggatccragtccagttgggtgaccttgcacaagttgctcacccctttgggatttgttgcctcatctgtgaaatgagtggaccgcactaggtaaccggttccctatctgggatctgcagataggctttagggaatctaagaatccctaaaactgtaggtaaaatttggtagacttgagtaggcattgttctgggggaggttccataactctcattcaattctcaaaggca

SEQ ID NO: 463784 - DNA, 559 bp, Homo sapiens
cgttgcccaagagagcagggagactctgggagtgttctaggcagggaaaggaaggcaggtgacaaacaggaagcattgctgtgtgcgcatttctggtaaactgcctacatagattgctgaaggaaggggccaatctgtagggtgtcagcaatttgctgtgattccccaccccctcctcctaggtaaatacccacttttgtacttaattttgttttcatacttttgtattctttttattaaggagtgtcccaaattgtaagtctttgggccccacacaacatagatacactcctgggtcctgaatataaccaaggctgagatggcctgataggcacaagcactgtccggacctgcggccgtcaggtgcccggcacaccccacataggtgcacaggtgctgctcygactgggtggctctccttgtcgccatcctggtttctgcttcctttcctttccttttccccttcccttcccttttcttttttcctttaatgtggatttcagaagtggggtgaaaatgacctcagtgaatagcccagctccctgggacagtggcctgg

SEQ ID NO: 463785 - DNA, 640 bp, Homo sapiens
gaaaaatataacgaaaaaagtatctgttgcattttcttaaggcatgaaattggcctaaatgttataccrttgcataattacaagaaaagtggaaggctctttaaaatattttctcagtaatttaataataactataattatctataatatttctttatcatactactactaccagtctttatccgcctaagaaatgctggaaagaaccatgaatcttttgtaacaagccagaataatgtttaaacacaaatgttgtctcacatacacatacttttgtaaatggcacattttttgcactttttcacatactaggacataattacatgaatattgagtggaatgagtatttttatttttgactgaaatggcaaatacacaacctacatacaatacactccaaagtatagatcagatattgatggcattttattgcctataaatatgttcaagaatgtatatatattcaaggccccagtacatactaatttacaaatacttcacacaactcaccatgaaaagatatttgatctgtatttcaatatataattgagaaattgaaagggaatttattttctcatcaagaaaacttatgtacaataggcaggtcaactaacattaacattaataccttgactcaata

SEQ ID NO: 463786 - DNA, 534 bp, Homo sapiens
ttaaaaccttttattccatagataaatttgtacaatagaaaatgtggttttttagtacctctaggagaattctgagttgtcataaccctacagttaaatctgttttctcacctataaaatcattcagattaacaattctgtaaacaataaggcaaaattatttaatatgttattgaaaataataaaacagatggatgttatgacaatactaaatgtgaattagaactatgttacagaaaaatgttttgtttctataggtaatttgcttctggaaacawttaattggaggacatatttaataaccatacgtgctcaagcagtttgcttttttcatgtaaaagtgggcaagtattaagactaaattctgtcatttttttctatggcagtgcctatcgtagaaaaacaaataagcttaagtttgataattaaagcagcaaaaatgtaattaactaaagagtactcaaatattcaaagttttctgataggcttatcatttgagaggttaatccagccaaacaaatttaatttaaagta

SEQ ID NO: 463787 - DNA, 534 bp, Homo sapiens
ttaaaaccttttattccatagataaatttgtacaatagaaaatgtggttttttagtacctctaggagaattctgagttgtcataaccctacagttaaatctgttttctcacctataaaatcattcagattaacaattctgtaaacaataaggcaaaattatttaatatgttattgaaaataataaaacagatggatgttatgacaatactaaatgtgaattagaactatgttacagaaaaatgttttgtttctataggtaatttgcttctggaaacaawtaattggaggacatatttaataaccatacgtgctcaagcagtttgcttttttcatgtaaaagtgggcaagtattaagactaaattctgtcatttttttctatggcagtgcctatcgtagaaaaacaaataagcttaagtttgataattaaagcagcaaaaatgtaattaactaaagagtactcaaatattcaaagttttctgataggcttatcatttgagaggttaatccagccaaacaaatttaatttaaagta

SEQ ID NO: 463788 - DNA, 590 bp, Homo sapiens
acatcacaaaaagtttccattcacaaccttttcaaataaaactgaaaggtttccatgatattttaaaaatataatctgtattttatcttaacaagaacttggaacaatattctatccaccattcctgatccaaacaagtgcccaatcttcatctatcttgcctcatattttcagtataaagagcccattcactttttagggaaaaaagacacaaataacacaatggcacaattgttaagtttctcattatatacaaccctatagctaataatgcacatgtcatttccatttctargttgactaattttgatgggcagaagtgctctaaagtatgcttttataaacctcatatcacgtggtactccatggctgaaacatggcttaatgcatgttttaggatggtgaaggaaggagagaagggaaaaagaaaagacgaagaaaagaagaaagaaaaaggaaggtgaaggaaagaaagagagatgaagaaagaaaatgaaaatatgaccatgttataaagaaaattgaaaacatataattattttttcttaattttagcctgtgtagaaactcttaaggctgatgatgagata

SEQ ID NO: 463789 - DNA, 515 bp, Homo sapiens
tcattcttaataggatcaagaaacaccaaatacccgtcaaatatccgaagattatattcaatgactctgaacaaggaaaaaagcaaaaaattaagtgaaacatgaatgaaagaaattacagaaatctaaacaaaggtataatctatattaatggattgtaaaactcagtagcttaaggatgctaaaatctcctcatgtaatgtcaataaaaatttcatcaattttgaataaattgaagaattaagtctaaaacatatacaattcaaattacaaagtatatgcccataatttatgactttactgcttaattctaccagcatataaagaagaamacatcttaaacaaactattacaaaaaataataggaaacacatactattttggtttttgatgctagcataaccctgataacaaacctgacaaaaatacatcaaagaataaaaagtacacatgaatatcctcattaacacagatacaaaaatacttaatgaatttatttagaaaataaatcaaat

SEQ ID NO: 463790 - DNA, 640 bp, Homo sapiens
cagaaatgttacagcataaaaatcagctctttattacctaaaggaagataccagttggcagcccacaaccacaaactgaagtgtttcaaaagaacagttttgagccttacacaggagttcttaaaatgtctgaaatgtccaactttgtgattcttgctatgggcgaagaagcagaagacgctgattccgtgttaaacacatttggaccaatttatagccattagtatgttagcctcctgtggagaaaytgcatctgttgtttctcctcaaaacccttgatgcaatgttacccacaggctagaatttaaactgtaagaaaaagttagtttaaaataaacgatttacgagtgagcaatgaaatccaggctgatgattatatgcaagtggcaagtttgagaaagagaaattggagacaatgaatagtctgtatattagaggaaaatactgggagtttcttgagtccttctgatattggttgagtagaacatgatcaggtcacagcagctggagagatagcaacatcttttcattttggattaaaacatcagaacttaatatgtgtggcatacaaaaccatgatttgatgtgtgacctaaattgctagtcttaattcttacttatgcccacaagagaatcaccg

SEQ ID NO: 463791 - DNA, 547 bp, Homo sapiens
ttgcgcaatgtgctcttataaccagagtaatttttttaaattttcccctcccagtttttaggttttagctgaaatactactcattagttaaatttcaacttaattagatatcagcttctcccataccacccctcaaatagcattacacacgccacatcagaagatgattccccttttcytgtgcttgcattttgcactttgttcctataatcattgcattgttagaggaactaaatgcacttcatcaataaacataagctctgtgcctctacagactggacgcttttaatgtttgctcagggatttgttctcttaatttttgactaggattccttgatggtaaaaatagcttaagaggcaacaaaaaagttgccttattcagttttactttcagaaactgaaagttcacattttacaaggatccctcaggtaatgtaaatgagtgaagcaagcatgatgagacggtggaaaatagatagaacatgccctctctgatgctactcagagagggtagctgctactagtagctgctactcaatcccagcaa

SEQ ID NO: 463792 - DNA, 547 bp, Homo sapiens
ttgcgcaatgtgctcttataaccagagtaatttttttaaattttcccctcccagtttttaggttttagctgaaatactactcattagttaaatttcaacttaattagatatcagcttctcccataccacccctcaaatagcattacacacgccacatcagaagatgattccccttttcctgtgcttgcattttgcactttgttcctataatcattgcattgttagaggaactaaatgcacttcatcaataaacataagctctgtgcctctacagactggacgcttttaatgtttgctcagggatttgttctcttaatttttgactaggattccttgatggtaaaaatagcttaagaggcaacaaaaaagttgccttattcagttttactttcagaaactgaaarttcacattttacaaggatccctcaggtaatgtaaatgagtgaagcaagcatgatgagacggtggaaaatagatagaacatgccctctctgatgctactcagagagggtagctgctactagtagctgctactcaatcccagcaa

SEQ ID NO: 463793 - DNA, 581 bp, Homo sapiens
aaatagcaaaaatactggttaaatggttaaatcctagaccacggaatttttaaaaacagaatatgtgtatacacacacacacacacacacacacacacacacacacaaatacaccttttaggggagaaattgatatttttgcctcagcaggatatccatttgccttaaaattcttattcttaggtatgtacatcaatcatctggggaggtccaagctgtgaaatccaaactgacagaaatttatagctccattagcatttatcaaaaatacaggattaagtgtagaaaatatgtattcatgcttcacctttctatatctttactttaagaggtaagtatttgtattcagtatytgttagctcctaccttcaaacggccaaacataatctccaataacatttcagaattctactgggccaaaaatgtatcctattgacctgtgtgtcctctgacttacgactgcatgtttaaatatgaatttaagaaaatgctgcactgattatttggagtttttcagaatggctagtgaattccttggtgatttattggtaaaaaaataaaataaaataaccatgttggac

SEQ ID NO: 463794 - DNA, 581 bp, Homo sapiens
aaatagcaaaaatactggttaaatggttaaatcctagaccacggaatttttaaaaacagaatatgtgtatacacacacacacacacacacacacacacacacacacaaatacaccttttaggggagaaattgatatttttgcctcagcaggatatccatttgccttaaaattcttattcttaggtatgtacatcaatcatctggggaggtccaagctgtgaaatccaaactgacagaaatttatagctccattagcatttatcaaaaatacaggattaagtgtagaaaatatgtattcatgcttcacctttctatatctttactttaagaggtaagtatttgtattcagtatttgttagctcctaccttcaaacrgccaaacataatctccaataacatttcagaattctactgggccaaaaatgtatcctattgacctgtgtgtcctctgacttacgactgcatgtttaaatatgaatttaagaaaatgctgcactgattatttggagtttttcagaatggctagtgaattccttggtgatttattggtaaaaaaataaaataaaataaccatgttggac

SEQ ID NO: 463795 - DNA, 581 bp, Homo sapiens
aaatagcaaaaatactggttaaatggttaaatcctagaccacggaatttttaaaaacagaatatgtgtatacacacacacacacacacacacacacacacacacacaaatacaccttttaggggagaaattgatatttttgcctcagcaggatatccatttgccttaaaattcttattcttaggtatgtacatcaatcatctggggaggtccaagctgtgaaatccaaactgacagaaatttatagctccattagcatttatcaaaaatacaggattaagtgtagaaaatatgtattcatgcttcacctttctatatctttactttaagaggtaagtatttgtattcagtatttgttagctcctaccttcaaacggccaaacataatctccaataacatttcagaattctactgggccaaaaatgtatcctattgacctgtgtgtcctctgacttacgactgcatgtttaaatatgaatttaagaaaatgctgcactgattatttggagtttttcagaatggctagtgaaytccttggtgatttattggtaaaaaaataaaataaaataaccatgttggac

SEQ ID NO: 463796 - DNA, 588 bp, Homo sapiens
tgttttgtcaaagtgataaaagccatcactaccaataatgaaacagatacattgtgtgtcttttgtgttacatgctatgataaaaacagtatcatttttgaaacattcatgcacaaagtctacgaatcatgagaaaatatcaggtgaattaaaatttagagacattttatacactcctctggtcctgaaaaatattaaggtcatgaaagtcaaggaagtattgtggaaatgctaaaattgagactaaaaaaattgaaaactaaacttggttttaggaaatacacaataaagtagtaagggctgaagaagtttcatattttcaacttaatttkcattagtataaaatagttatgtatttatatatgacatatagtgtacattatatataattacatggtatatatacacttaatgtatgacatacttatatatacatataatatatgctgtatatttatcatacacacaaaaatctacctctatgtgactatttatcaattagtaagaggaaagaaatattgtctgaccagtgagtctcaatactgtcaaggtcatcaaaaacaaaaaaaaagcaaaaactatcacagt

SEQ ID NO: 463797 - DNA, 588 bp, Homo sapiens
tgttttgtcaaagtgataaaagccatcactaccaataatgaaacagatacattgtgtgtcttttgtgttacatgctatgataaaaacagtatcatttttgaaacattcatgcacaaagtctacgaatcatgagaaaatatcaggtgaattaaaatttagagacattttatacactcctctggtcctgaaaaatattaaggtcatgaaagtcaaggaagtattgtggaaatgctaaaattgagactaaaaaaattgaaaactaaacttggttttaggaaatacacaataaagtagtaagggctgaagaagtttcatattttcaacttaatttgcattagtataaaatagttatgtatttatatatgacatatagtrtacattatatataattacatggtatatatacacttaatgtatgacatacttatatatacatataatatatgctgtatatttatcatacacacaaaaatctacctctatgtgactatttatcaattagtaagaggaaagaaatattgtctgaccagtgagtctcaatactgtcaaggtcatcaaaaacaaaaaaaaagcaaaaactatcacagt

SEQ ID NO: 463798 - DNA, 449 bp, Homo sapiens
cctctgaggtgttaatcttttataagctgcttgtcagttctacaaaccaggcccatctttttcatgccctggggggccatctctttgaaatgtaatagtcaaggaagaagcccgtatttcccagtttctgtgggaggktaggagcctgacttcctttggaggcttgctccaatttctaaaactactttctgtcatgaaaattcaaggaaatttattttcctttgggaatgccaattagtaaacacatctggtctgtgattcccccacacccaagtccactggagtgtttaacagctctccaggccattttttctattagagatcagttcagatctagtctgtattctggtctctcttctctattgcaatagctgtgaatacagtcttccttatcatttaactttgtctagtgcaattttgctgtaggaatacattgttactaactaaaa

SEQ ID NO: 463799 - DNA, 581 bp, Homo sapiens
ctggtctctcttctctattgcaatagctgtgaatacagtcttccttatcatttaactttgtctagtgcaattttgctgtaggaayacattgttactaactaaaatccaaagtttctttagatttccttagtttttacttaatgtcagttttctgtttcaggatcccaatcaggataccagtttgcatttagtcataatggttccttaggctcattttggctgtgacaagttctcagacttttgtttttgatgacattgacaattttgagcactggatattttgcagaatgtcccttaatgggtgtttatctggtgttttcctcaagattcaactgcggttatgtgatgtatgtaggaaaaccacaagtcaactgctattttgacatatttatcaaaagtatatgattaatatgacttatcactgttgttaacttcatcacctggctgaggctgtatctagtcagttttctcaactataaatttcctctttcttgtttccctttcatttctttggaaggaaatcatgatggacagcacacacttaaagaatgggtagtaattttattagaaatgtaaattgt

SEQ ID NO: 463800 - DNA, 644 bp, Homo sapiens
gataatcaaatattttccattgtgttatagttggctacaatttccagtacagtaacatgctgtgcagacttgtagcctaggagaaataagctataccatatagcagaggtgtgtagcaggctataacatctrggtttgtgtaagtaagtacagccaatcatgttcacacaatgacaaaatcacctaatgcatttcttagaaactatgcctatcatcaatcaaggcatgactgtatatcagaccactttacttatccaaaatgagccttgtgacaaattcactctctagaacaaaattggatgatgaattagtaaaaagaatcccttaacacaaaaattatgacattttcttacatcttttactttgttagaccaagaatagaagacttttcttctcactagtaactgcaatcaattggtatgacttggagtaccaggtatatcactcttggcaacacatctatttttagtaggacaaaactgatgtgaaaaactgaaaatctcttcaataagagcattgaaactaggaaaggggtttagtgagatttagtatatgtatttatttacttctctgtggtttttaaacttatcttacttcctctttttaaaactctgtcagatttatcactgatttcagaattacaa

SEQ ID NO: 463801 - DNA, 581 bp, Homo sapiens
ctggtctctcttctctattgcaatagctgtgaatacagtcttccttatcatttaactttgtctagtgcaattttgctgtaggaatacattgttactaactaaaatccaaagtttctttagatttccttagtttttacttaatgtcagttttctgtttcaggatcccaatcaggataccagtttgcatttagtcataatggttccttaggctcattttggctgtgacaagttctcagacttttgtttttgatgacattgacaattttgagcactggatattttgcagaatgtcccttaatgggtgtttatctggtgttttcctcaagattcaactgcggttatgtgatgtatgtaggaaaaccacaagtcaactgctattttgacatatttatcaaaagtatatgattaatatgacttatcactgttgttaacttcatcacctrgctgaggctgtatctagtcagttttctcaactataaatttcctctttcttgtttccctttcatttctttggaaggaaatcatgatggacagcacacacttaaagaatgggtagtaattttattagaaatgtaaattgt

SEQ ID NO: 463802 - DNA, 528 bp, Homo sapiens
gccaccatccctggcctagattttcattttgttagcacttgtattctataaaatataagaataggatatactttatcatcaatggtgcttctgaaatgttgcatattgaaagccactgtattaaatttaattyattaattaagcaattattgagtattcattctgtctctaaaatgtagaataataatcaagaaaattagaagcaaaatatagatatctttggtatctttatgatagtcttctttttcctctagtaaaaagaatactggattagatcaaccctaagtaaaagtcttgctttaatgatatttctaaagtgtttacctaaaaagtttaaaaaaaaaaaagctaaattaagcaagggaaaaaagtagattttttaataaataaatacatgataaagccatgaaaaaaaacaaaacaatacttagaacattcttaaagtttagaatgcacaagaatcataggcatgtatcattaagactgtagattcctagcatctattacccaaaattcccgaatttctgg

SEQ ID NO: 463803 - DNA, 528 bp, Homo sapiens
gccaccatccctggcctagattttcattttgttagcacttgtattctataaaatataagaataggatatactttatcatcaatggtgcttctgaaatgttgcatattgaaagccactgtattaaatttaatttattaattaagcaattattgagtattcattctgtctctaaaatgtagaataataatcaagaaaattagaagcaaaatatagatatctttggtatctttaygatagtcttctttttcctctagtaaaaagaatactggattagatcaaccctaagtaaaagtcttgctttaatgatatttctaaagtgtttacctaaaaagtttaaaaaaaaaaaagctaaattaagcaagggaaaaaagtagattttttaataaataaatacatgataaagccatgaaaaaaaacaaaacaatacttagaacattcttaaagtttagaatgcacaagaatcataggcatgtatcattaagactgtagattcctagcatctattacccaaaattcccgaatttctgg

SEQ ID NO: 463804 - DNA, 528 bp, Homo sapiens
gccaccatccctggcctagattttcattttgttagcacttgtattctataaaatataagaataggatatactttatcatcaatggtgcttctgaaatgttgcatattgaaagccactgtattaaatttaatttattaattaagcaattattgagtattcattctgtctctaaaatgtagaataataatcaagaaaattagaagcaaaatatagatatctttggtatctttatgatagtcttctttttcctctagtaaaaagaatactggattagatcaaccytaagtaaaagtcttgctttaatgatatttctaaagtgtttacctaaaaagtttaaaaaaaaaaaagctaaattaagcaagggaaaaaagtagattttttaataaataaatacatgataaagccatgaaaaaaaacaaaacaatacttagaacattcttaaagtttagaatgcacaagaatcataggcatgtatcattaagactgtagattcctagcatctattacccaaaattcccgaatttctgg

SEQ ID NO: 463805 - DNA, 558 bp, Homo sapiens
tgccccctttctgatagtcgtggatattctctttaaaatacaaactaacattggcttttttgggtgataagaatttaagtgctgactacctgcactgtattaatgagaaaaatccaattatggttaaatgatttaatacccacacgccccaaacacttggcctccattaagaaaggtccactcactactttctgacagttcagtgacaacaactgtcaaataagggacaattctccatttagtaaaatragggcatagggcagtttaagcaatttatcactatcacagatatgggaagcagggtaggagacagctgtaacatccacgccacacacattcacattcaataatggagagagaaggaatgttgaggctctagcaactctgtgtttcccaagatgattccatccccccagaatcccctttactaatatgggtttgcaccagtttagataaaacggcagctctctgaaaggaggtgttgaatcctacagttaaagatgctctagaaatggaatatggggttattagcactatttcttctcagctgatagattt

SEQ ID NO: 463806 - DNA, 558 bp, Homo sapiens
tgccccctttctgatagtcgtggatattctctttaaaatacaaactaacattggcttttttgggtgataagaatttaagtgctgactacctgcactgtattaatgagaaaaatccaattatggttaaatgatttaatacccacacgccccaaacacttggcctccattaagaaaggtccactcactactttctgacagttcagtgacaacaactgtcaaataagggacaattctccatttagtaaaataagggcatarggcagtttaagcaatttatcactatcacagatatgggaagcagggtaggagacagctgtaacatccacgccacacacattcacattcaataatggagagagaaggaatgttgaggctctagcaactctgtgtttcccaagatgattccatccccccagaatcccctttactaatatgggtttgcaccagtttagataaaacggcagctctctgaaaggaggtgttgaatcctacagttaaagatgctctagaaatggaatatggggttattagcactatttcttctcagctgatagattt

SEQ ID NO: 463807 - DNA, 627 bp, Homo sapiens
aatgatgaaatgagttaaaactttgagggactgttggtaaggcatgattggttttaaaatgtgaggacatgagatttgggaggtgccaggtgtagagtaatatgatttggctgaatccccacccaaatctcaccttgaactgtagctcccataatccccaagtgttgagggagggacccggtgagagataattaaatcatgggggtgrcctccccagccacgtggaactgtgggtccattaaacccctttttctttataaattacccagtctcaggtatgtctttatcaacagcgtgaaaacggactaacacaacaataaagcaaaaacagatcctgttcttggtgccaagataaactacagctggaactacttccttttgccccctatgccatccctacactggccctttagcactagccctttgaaagaaacatctgacagaaacttctggtttggggcttggaaatcaaccaatcagagctcacctgaatcaaccaatcagtgtatagaacagtcatgactcatctgttttgaccaatcagaattaagcaaggatctatccttcatttggatgaagacagcttattgggaacctgggtgggaactatagctataaaaccctaac

SEQ ID NO: 463808 - DNA, 627 bp, Homo sapiens
aatgatgaaatgagttaaaactttgagggactgttggtaaggcatgattggttttaaaatgtgaggacatgagatttgggaggtgccaggtgtagagtaatatgatttggctgaatccccacccaaatctcaccttgaactgtagctcccataatccccaagtgttgagggagggacccggtgagagataattaaatcatgggggtgacctccccagccacgtggaactgtgggtccattaaacccctttttctttataaattacccagtctcaggtatgtctttatcaacagcgtgaaaacggactaacacaacaataaagcaaaaacagatcctgttcttggtgccaagataaactacagctggaactacttccttttgccccctatgccatccctacactggccstttagcactagccctttgaaagaaacatctgacagaaacttctggtttggggcttggaaatcaaccaatcagagctcacctgaatcaaccaatcagtgtatagaacagtcatgactcatctgttttgaccaatcagaattaagcaaggatctatccttcatttggatgaagacagcttattgggaacctgggtgggaactatagctataaaaccctaac

SEQ ID NO: 463809 - DNA, 609 bp, Homo sapiens
cctttagcactagccctttgaaagaaacatctgacagaaacttctggtttggggcttggaaatcaaccaatcagagctcacctgaatcaaccaatcagtgtatagaacagtcatgactcatctgttttgaccaatcagaattaagcaaggatctatccttcatttggatgaagacagcttattgggaacctgggtgggaactatagctataaaaccctaaccctctctttgttctctgaaatgtgtcttagcttgaaaccacaggctgtatatccatggtttgaaaactgttcactgaaataaagtctctttcrtccaaattcctttccagagaacatttgcttacaatataaatttaccactctccctcacacaaatacaaacagattcattcacatttaatgatgcattatgattacaatgcagttcaacttatcttattccagccaacttccaaggaaactgtatttgtgtttggttgggttttgaaacttaaaagtcacagccttggtgtgaaaagactgaggttcgaagttttacacaaagaaggcctttacaccagtcttaattatacatgagtttccagtaaaatgagaatattatgaattt

SEQ ID NO: 463810 - DNA, 636 bp, Homo sapiens
tttgcttacaatataaatttaccactctccctcacacaaatacaaacagattcattcacatttaatgatgcattatgattacaatgcagttcaacttatcttattccakccaacttccaaggaaactgtatttgtgtttggttgggttttgaaacttaaaagtcacagccttggtgtgaaaagactgaggttcgaagttttacacaaagaaggcctttacaccagtcttaattatacatgagtttccagtaaaatgagaatattatgaatttatggaggcatggaaatctcatgatataatgtaccctgaaaagtattattaaactacagtaaattttttagtaacctacctaggaataagtaatcactgttttagcttaaccttaaatattttattgacatctgaaatttggactttgacatatatacacacacacagaactacttcaggatggtgatttttttaaaaatcgtttgtccttaaaatgtggttttaacttcctgactcaggaaattcaaatgcttacacattacaaatgaaaattatggcttacattttctgaattatctcaaagctacggggagtcaaacatattacaaaagaaggacaatttactcaggaggacttgataaaag

SEQ ID NO: 463811 - DNA, 634 bp, Homo sapiens
actaaattatttttttctaaatacatcagccatgaaaggatagggaatgctgcaggaacaaaccctyaaactttcatttttttctttacttttcatatctacatatctaatatgcatcagcaagtggtctctttttattgttgtcattggctaatgaatgtttctcctcaacatgtttttctctgatcacaacagcaggggcagagaatatgattacttgtatattggttctttgagtttacatttcattagtcaaagcaaatacttttctccaggcaagaaaagtacacctctagtatgaatcaaaagagaggaagaaccaaacatttttggtaaacagctcaagtgcttttgttaacagcagtgaatccatatgggtctgcagcaactcggtcctaacctcagaggaaagaatgtgatttaggggaagaagtaagtttaaggcagagggagagattgaggtgagttttagagtaagagtgagagcttattaaaaagttttagagcaggaatgaaagcaagcaaaatactcttggaagacggctaagtgggtgacttgaaagatccaagtgccttgttcatcccttcacttgggggttttctacattggcatggtttgggggtttgcgattct

SEQ ID NO: 463812 - DNA, 540 bp, Homo sapiens
cctttcccttttgctgtgattgtaagtttcctgaggccttcccagccatttggaactgtgagtcatttaaaattatttaattataaattacccagtcttagttattctttatagaagtgtgaaaatgcacactactgtaacactttcactttaaattggatcaatcagttcagcaactatttattcccaaacttgttgcttctttgttttagaacaccatttgaattgcaataaaaagagttgcttaagttctttgtagatttgcggggggaggkgggagaggagagggacagcattaggagatatacctaatgtaaatgacgagttaacaggtgcagcacaccaacatggcacatgtatacatatgtaacaaacccgcacgttgtgcacatgtaccctagaacttaaagtaaaataataaaaaataaaaaataaaaataaaaataagttgaaacataaaaaaaaagatttgcaacaaaacagaaaggctcaattttagttattccaattttattcatatattaaataaaatagttatgg

SEQ ID NO: 463813 - DNA, 540 bp, Homo sapiens
cctttcccttttgctgtgattgtaagtttcctgaggccttcccagccatttggaactgtgagtcatttaaaattatttaattataaattacccagtcttagttattctttatagaagtgtgaaaatgcacactactgtaacactttcactttaaattggatcaatcagttcagcaactatttattcccaaacttgttgcttctttgttttagaacaccatttgaattgcaataaaaagagttgcttaagttctttgtagatttgcggggggaggggggagrggagagggacagcattaggagatatacctaatgtaaatgacgagttaacaggtgcagcacaccaacatggcacatgtatacatatgtaacaaacccgcacgttgtgcacatgtaccctagaacttaaagtaaaataataaaaaataaaaaataaaaataaaaataagttgaaacataaaaaaaaagatttgcaacaaaacagaaaggctcaattttagttattccaattttattcatatattaaataaaatagttatgg

SEQ ID NO: 463814 - DNA, 648 bp, Homo sapiens
tctttgctatgcaacagagataatactacttttaactgatgtgtgaggataaaatgagaaaatgcatccacaatttacttaacataatgcaataaatttgtgatgtagatcttactgtgagttctcagactctactatcccaatagagttttttgtttgtttgtttttgcttgtctgtctaaagtttatctacaacatacaatggtaaaaataagggcaaaatgttaacttcrccattgtttatatttctaatatttattaaacataaaagagatgcattcaatttgaaagcttatttaagtagtgcatttataattgctttggggggcccatgggattttgaggagctgcctcaaagaaagtggggagatgtgaggcaaggcttccagctctagcttcagttaaaaaaaatcttactttgtctgtttttttgaataatatgtcattagaggaaatgattcatggccttaaaaaacaacatagaaatcttcttgtctatttgggaggccgaggcaggcggatcacgaggtcaggagattgagaccatcctggctaacacagtgaaaccccgtctctactaaatatacaaaaaaattgagcttccagtgagccaagatcacgccactgcactccagcctgggcaacaga

SEQ ID NO: 463815 - DNA, 648 bp, Homo sapiens
tctttgctatgcaacagagataatactacttttaactgatgtgtgaggataaaatgagaaaatgcatccacaatttacttaacataatgcaataaatttgtgatgtagatcttactgtgagttctcagactctactatcccaatagagttttttgtttgtttgtttttgcttgtctgtctaaagtttatctacaacatacaatggtaaaaataagggcaaaatgttaacttcgccattgtttatatttctaatatttattaaacataaaagagatgcattcaatttgaaagcttatttaagtagtgcatttataattgctttggggggcccrtgggattttgaggagctgcctcaaagaaagtggggagatgtgaggcaaggcttccagctctagcttcagttaaaaaaaatcttactttgtctgtttttttgaataatatgtcattagaggaaatgattcatggccttaaaaaacaacatagaaatcttcttgtctatttgggaggccgaggcaggcggatcacgaggtcaggagattgagaccatcctggctaacacagtgaaaccccgtctctactaaatatacaaaaaaattgagcttccagtgagccaagatcacgccactgcactccagcctgggcaacaga

SEQ ID NO: 463816 - DNA, 648 bp, Homo sapiens
tctttgctatgcaacagagataatactacttttaactgatgtgtgaggataaaatgagaaaatgcatccacaatttacttaacataatgcaataaatttgtgatgtagatcttactgtgagttctcagactctactatcccaatagagttttttgtttgtttgtttttgcttgtctgtctaaagtttatctacaacatacaatggtaaaaataagggcaaaatgttaacttcgccattgtttatatttctaatatttattaaacataaaagagatgcattcaatttgaaagcttatttaagtagtgcatttataattgctttggggggcccatgggattttgaggagctgcctcaaagaaagtggggagatgtgaggcaaggcttccagctctagcttcagttaaaaaaaatcttactttgtctgtttttttgaataatatgtcattagaggaaatgattcatggccttaaaaaacaacatagaaatcttcttgtctatttgggaggccgaggcaggcggatcacgaggtcaggagattgagaccatcctggctaacacagtgaaaccccrtctctactaaatatacaaaaaaattgagcttccagtgagccaagatcacgccactgcactccagcctgggcaacaga

SEQ ID NO: 463817 - DNA, 583 bp, Homo sapiens
atgacttccatgttaccaggaaaaaactcagtcctagacagggcagagaacttaactaatgagcagaagttgtggaacctaaaagaaaaaaatgatatataacctggattttttttttccacaataatgaactgattcaagttcacrcagtcatgctctgcataatgacattttggtcaatgatatatcacatagcaaatggtggtctcataaaattataatgttgtatttctactataccttttctatgtttagattacatttatagagaaaatactgaccattgtgttacaattgcctatagcattcagtacagtgacatgctgtacaggtttgtagcctaggagccataggctatatcacttgtcctagtatgtagtaggctgtaccattttaggtttgtgaatctacactctataatagtcacacaatgacaaaaatcacctaacaacacatttctcggaatgtacctcatcactaagtgactcgtaactgtattttttttttgtatttaatgccagataatacttaaaaatacttaaaatacagaatggatatcaatgttgacaattgatactatgta

SEQ ID NO: 463818 - DNA, 572 bp, Homo sapiens
tttggaagtatgataacaatattgactctgaagcttatagtcattctattttcagatgataagcatgtcatctctaacggggcaagaggattaatccaaaatattgagttattaattcatcttacattcaaataatctgaagtctgtatctttaatatttgcagacatccaatgacacctttgaaattcccctaatgttgactggaaatatagtgttaaggaagaggctcaactatgaagataagactcggtactttgtcataatccaagctaatgtgagtattcaatttcttttaaatttcttctgtgaatttatgaagtaaaaaactcatccaaaatgtatcagatactcttggagagctctgtgycactcacttcttcatcagggcactcctgcccttggtgtttatatataatactcttatagatggagaaagggatagaataggttgtttttattcactgtattctttgacctctaaattattcatatgtattacccattatccaacctttttagactatactgaaatatttttcaaagtaggatcctgcaaattaacagcagcaca

SEQ ID NO: 463819 - DNA, 572 bp, Homo sapiens
tttggaagtatgataacaatattgactctgaagcttatagtcattctattttcagatgataagcatgtcatctctaacggggcaagaggattaatccaaaatattgagttattaattcatcttacattcaaataatctgaagtctgtatctttaatatttgcagacatccaatgacacctttgaaattcccctaatgttgactggaaatatagtgttaaggaagaggctcaactatgaagataagactcggtactttgtcataatccaagctaatgtgagtattcaatttcttttaaatttcttctgtgaatttatgaagtaaaaaactcatccaaaatgtatcagatactcttggagagctctgtgtcactcacttcttcatcagggcactcctgcccttggtgtttatatataatactcttatagatggagaaagggatagaataggttgtttttattcactgtattctttgacctctaaattattcatatgtattayccattatccaacctttttagactatactgaaatatttttcaaagtaggatcctgcaaattaacagcagcaca

SEQ ID NO: 463820 - DNA, 657 bp, Homo sapiens
tgtgccacaaacttgtcattttcttgcctttcttagagatatatcacctgacacagaatgtgtatgtgtatagatagatacctagatagatatataattagggatatgtagatagaaatatgtagatagrcatatagatctaattttgaagctaagtttggaagcttttatttatatttcttcagattttaaaaaggattaattattttatatattataattatatattataagatgttatatgtattatgtgtgtgtctgtatgtgtgtatatattttaatgtcatgtaacatagagcagagtgaaaactgtagatatggggaaaagtaaaatgtattaaggagggccactcagagtttttcaaaaacacagaaaattcttttttctattgaactgaagatgtgaagaaaaggtagaatgtcttttttatgaagtcagattgctgtggaaggtatttgtaagctagtttttttatcatgcaattaaaaagatataattttttaatagaaatgcaaggtaaaagattctgaattggtgtctagttttaaaatatttataaagacatctggaacaacttctatccaacatgatggactactcatcactgaggtagtgacaagtttttagcatttcagggataaagttataaaacagaa

SEQ ID NO: 463821 - DNA, 657 bp, Homo sapiens
tgtgccacaaacttgtcattttcttgcctttcttagagatatatcacctgacacagaatgtgtatgtgtatagatagatacctagatagatatataattagggatatgtagatagaaatatgtagatagacatatagatctaattttgaagctaagtttgkaagcttttatttatatttcttcagattttaaaaaggattaattattttatatattataattatatattataagatgttatatgtattatgtgtgtgtctgtatgtgtgtatatattttaatgtcatgtaacatagagcagagtgaaaactgtagatatggggaaaagtaaaatgtattaaggagggccactcagagtttttcaaaaacacagaaaattcttttttctattgaactgaagatgtgaagaaaaggtagaatgtcttttttatgaagtcagattgctgtggaaggtatttgtaagctagtttttttatcatgcaattaaaaagatataattttttaatagaaatgcaaggtaaaagattctgaattggtgtctagttttaaaatatttataaagacatctggaacaacttctatccaacatgatggactactcatcactgaggtagtgacaagtttttagcatttcagggataaagttataaaacagaa

SEQ ID NO: 463822 - DNA, 657 bp, Homo sapiens
tgtgccacaaacttgtcattttcttgcctttcttagagatatatcacctgacacagaatgtgtatgtgtatagatagatacctagatagatatataattagggatatgtagatagaaatatgtagatagacatatagatctaattttgaagctaagtttggaagcttttatttatatttcttcagattttaaaaaggattaattattttatatattataattatatattataakatgttatatgtattatgtgtgtgtctgtatgtgtgtatatattttaatgtcatgtaacatagagcagagtgaaaactgtagatatggggaaaagtaaaatgtattaaggagggccactcagagtttttcaaaaacacagaaaattcttttttctattgaactgaagatgtgaagaaaaggtagaatgtcttttttatgaagtcagattgctgtggaaggtatttgtaagctagtttttttatcatgcaattaaaaagatataattttttaatagaaatgcaaggtaaaagattctgaattggtgtctagttttaaaatatttataaagacatctggaacaacttctatccaacatgatggactactcatcactgaggtagtgacaagtttttagcatttcagggataaagttataaaacagaa

SEQ ID NO: 463823 - DNA, 657 bp, Homo sapiens
tgtgccacaaacttgtcattttcttgcctttcttagagatatatcacctgacacagaatgtgtatgtgtatagatagatacctagatagatatataattagggatatgtagatagaaatatgtagatagacatatagatctaattttgaagctaagtttggaagcttttatttatatttcttcagattttaaaaaggattaattattttatatattataattatatattataagatgttatatgtattatgtgtgtgtctgtatgtgtgtatatattttaatgtcatgtaacatagagcagagtgaaaackgtagatatggggaaaagtaaaatgtattaaggagggccactcagagtttttcaaaaacacagaaaattcttttttctattgaactgaagatgtgaagaaaaggtagaatgtcttttttatgaagtcagattgctgtggaaggtatttgtaagctagtttttttatcatgcaattaaaaagatataattttttaatagaaatgcaaggtaaaagattctgaattggtgtctagttttaaaatatttataaagacatctggaacaacttctatccaacatgatggactactcatcactgaggtagtgacaagtttttagcatttcagggataaagttataaaacagaa

SEQ ID NO: 463824 - DNA, 562 bp, Homo sapiens
gtgccagtgctacaaatcagggctacttatctgatagctggttgttaatcattaactgttttgtatataccaatagtaacataagtctaacatatctttgtttgtatatgataatgatatccatatatctaaaatgtacctccattttttttacatttatcttgtttgtttgtttgcttatttatttatttattttgagacagtcttgctctgtcacccaggctgaagtacagtggtgcgatctcagctcactkcaacctccgcctacggggtttaagtgattctcatgcctcagcctcccaactagctgggaccacaaacgtaccaccacacctggattttctttttgggaggggaggagagtattgctatgttgcccaggctagagtgcagtggcatgatctcagcttactgcaacctcagcctcccatgttcaagctattctcgtgcctcagcctcctgagtagctgggattacagatgcgtgcaaccatacccagctaatttttggatgtgtagtagaaacgaggtttcagcatgttggtcaggctggtctcaaactc

SEQ ID NO: 463825 - DNA, 562 bp, Homo sapiens
gtgccagtgctacaaatcagggctacttatctgatagctggttgttaatcattaactgttttgtatataccaatagtaacataagtctaacatatctttgtttgtatatgataatgatatccatatatctaaaatgtacctccattttttttacatttatcttgtttgtttgtttgcttatttatttatttattttgagacagtcttgctctgtcacccaggctgaagtacagtggtgcgatctcagctcactgcaacctccgcctacggggtttaagtgattctcatgcctcagcctcccaactagctgggaccacaaacgtaccaccacacctggattttctttttgggaggggaggagagtattgctatgttgcccmggctagagtgcagtggcatgatctcagcttactgcaacctcagcctcccatgttcaagctattctcgtgcctcagcctcctgagtagctgggattacagatgcgtgcaaccatacccagctaatttttggatgtgtagtagaaacgaggtttcagcatgttggtcaggctggtctcaaactc

SEQ ID NO: 463826 - DNA, 562 bp, Homo sapiens
gtgccagtgctacaaatcagggctacttatctgatagctggttgttaatcattaactgttttgtatataccaatagtaacataagtctaacatatctttgtttgtatatgataatgatatccatatatctaaaatgtacctccattttttttacatttatcttgtttgtttgtttgcttatttatttatttattttgagacagtcttgctctgtcacccaggctgaagtacagtggtgcgatctcagctcactgcaacctccgcctacggggtttaagtgattctcatgcctcagcctcccaactagctgggaccacaaacgtaccaccacacctggattttctttttgggaggggaggagagtattgctatgttgcccaggctagagtgcagtggcatgatctcagcttactgcaacctcagcctcccatgttcaagctattctcgtgcctcagcctcctgagtagctgggattacagatgcgtgcaaccatacccagctaattttkggatgtgtagtagaaacgaggtttcagcatgttggtcaggctggtctcaaactc

SEQ ID NO: 463827 - DNA, 465 bp, Homo sapiens
caatagaatacccaacttcctctggttaatgttcatagaagcrttatttttttcctcaacttttattttaagcacagggagtacatatgcaggtttgttgcatgggtgtattgcactcaggtggtcagcatagtactcaatgggtagttttttgatccattctctctccttgccccagcagttcacagtctactgttcccaggtttatttccctgggcacttggtgtttagctcccattgaaaaactgatattatgtagtatttagttttctgttgctgcattaattcacttaggattatggcctccagcttcatccatgttgcttcaaaggacatgatttcattcttttctatggctttgtagtattccgtggtgtatatgcaccacattttctttatgcaatccactattgatgggcacctaggttgattccatgttttttgctattgtgaatagcatggcaa

SEQ ID NO: 463828 - DNA, 465 bp, Homo sapiens
caatagaatacccaacttcctctggttaatgttcatagaagcattatttttttcctcaacttttattttaagcacagggagtacatatgcaggtttgttgcatgggtgtattgcactcaggtrgtcagcatagtactcaatgggtagttttttgatccattctctctccttgccccagcagttcacagtctactgttcccaggtttatttccctgggcacttggtgtttagctcccattgaaaaactgatattatgtagtatttagttttctgttgctgcattaattcacttaggattatggcctccagcttcatccatgttgcttcaaaggacatgatttcattcttttctatggctttgtagtattccgtggtgtatatgcaccacattttctttatgcaatccactattgatgggcacctaggttgattccatgttttttgctattgtgaatagcatggcaa

SEQ ID NO: 463829 - DNA, 591 bp, Homo sapiens
tgctttttttggttggtagtttcttattactaatttaatatcacagcttaatattcatctgttcagggtttcaatagtttcctgattcgatcttggaacattatgtgtttccagaaacatatcastttactctagattttctagcttgaggttgaggagacacaattctgttcagagtactggttgaacttgtttaactttttaaaagatattcttgcttgccaactagaatcacagtttcctaacttaatgtaatatcctgttatttttaaataattgaagttaaatatatattcttattttttaaaaaagaagagaaatgcagatgaaaatgggaaagggaagaaaggagatcttctttgtggattttaatatatattagattatcacataacgtaaatgaaaacataattaaattatatggaatgtttatagaaatagttattttttattttttaccactcacaatttagaatgttatttcatttactcagaagagccttgagcagtagtatattactataaagatcaaaagtgtaggttgttttgttttttctgtttttgttgtttttgttttgatttttatctcaa

SEQ ID NO: 463830 - DNA, 591 bp, Homo sapiens
tgctttttttggttggtagtttcttattactaatttaatatcacagcttaatattcatctgttcagggtttcaatagtttcctgattcgatcttggaacattatgtgtttccagaaacatatcactttactctagattttctagcttgaggttgaggagacacaattctgttcagagtactggttgaacttgtttaactttttaaaagatattcttgcttgccaactagaatcacagtttcctaacttaatgtaatatcctgttatttttaaataattgaagttaaatatatattcttatttttwaaaaaagaagagaaatgcagatgaaaatgggaaagggaagaaaggagatcttctttgtggattttaatatatattagattatcacataacgtaaatgaaaacataattaaattatatggaatgtttatagaaatagttattttttattttttaccactcacaatttagaatgttatttcatttactcagaagagccttgagcagtagtatattactataaagatcaaaagtgtaggttgttttgttttttctgtttttgttgtttttgttttgatttttatctcaa

SEQ ID NO: 463831 - DNA, 627 bp, Homo sapiens
attataatgagttctatgagctagatgaacaagtctacacaccatttgtaaagtacagtggttttgctagctagttggtagaatcacgatcaagtgatgccatcttggccagccatcagcaaactgtaatagctgatactgataattatgaataacagcaaacttgaaaataattacataattaaatacttatttgtgtaatgagctgcttttagaatctatgccagtgggtcaagtaagaagaagtaattggatcactaggagacatttagtagttaagagacttgcttgtgcacacctaaaaactcartggaggttaagtagcatatcactgccaaagagattctctagcactggtgggcctcagcaaaaccgtaagtggccttgtgagactgtgggactttagcacattactgcaatagactcataatcttatctaaatcaaagactctgaaaaaaagtgttatttgctacttaaaatgcaaaccattctacttcaaaatatatagaggagaaagaggacttgtcccaagataaaatgtgtcacatttgacaactatcaaccttatcagagtctaaaacttatatgaatacatgctgaaagtggatgctcttagttgtatttat

SEQ ID NO: 463832 - DNA, 486 bp, Homo sapiens
gggcgccttcaaaatggctgatggaaagcatccggtactcacctccttcacaaaataaggagtagataatgacactttgaatagatcacctaagaaaaaatgctggaattcaacagagatgtgacagaaaacacctaatgcaagaaaggagrccaaagcgaggcagcccgcttggctacaattggcaaggagtatgaagaggctccttagtctggagaaagagtaagcaaatgctccccagtggtccacatttccacagcagattcctgaaatcttagccatggtagagtccttcaacccatatgggcactgaaactatcataggaagctgcatggggatggcaagagcattgctctgggaagggagttaagaatgggtgccatacccacactgaagcctaagcagccacagcagagtgctattttgagagcccagtccccaccagtttgcatcctgccctagagtccaacttctgcctctccaga

SEQ ID NO: 463833 - DNA, 562 bp, Homo sapiens
ccttatttctcactacatagaaaaatcagccaagatcaattaaagacatagtgttaggacccaaaattataaaactactggaagaaaactttggggaaacacttcaggacattgatctaggcaaagattttatggctgagacctaaaaaaacacaagcaacaaaaacagaaaaatttctgcacagctaaggaaacaatcaacagagtaaagaaacaatctgtagaactgggagaaaatatatgcagactactctttcatcaagggactaatatccagattatacaaggatctcaacacattgttaaaatgggcactagacattctcaaaataagacatacagagaacctacatatatatgaaaaaatgttcaatatcagtaatcatcatggaagtgtaaatcaaaatcatgagataccatcttgccccagttagaatggctattatcaaaatgacaaaaaatatatataaatgctggggaggatgtggagaaaaaagaactcttayacactgttggtggcaatgtcaatcagtgcagtcagtgtggaaaacagtactgagga

SEQ ID NO: 463834 - DNA, 532 bp, Homo sapiens
ttggaggggcaaacttcgtttaatcccatcaattctaagcattaattttgtggktgcgctcattagccatccactaactgtgagcataatgctacctgaattccacacgctgagatacaaaattaaacaataaattaattatgattgtcttctcttgtccttaaaatgatcattttctttgagattattataatttaaaaataaacaagaatagaaaaatgtactgaatgaacgagtgctttgacagtgatgagaagctttgtttttaattagtattttaaaagatgcaatttctacattgcagccaccgatgaacatacactccattgtggtgcaggtccagtgcatcaacaaaaaagtgggcactattatctaccatgaagtgcgaatagtggtgagagacaggaatgacaactcacccactttcaagcatgaaagctactatgccacagtgaatgaggtcagtttctatttactctctctctgtcctttctgttgatatatgtatctaactatatacaataaatgttta

SEQ ID NO: 463835 - DNA, 618 bp, Homo sapiens
aatatttaggatacaaaataagagcaaagtataattgcataatgcttgctacatttcaaatttgtctccttctggaaggaccttcatctctgctccctgaaagccaaaaacaacaggctactatttttgtttttcatgaagctagatattagccagttgctagacttcaactgtgatatattcatgagaagacacaagctggagaatttcagcctagtctaagcaggacagatggagttgctttttacctttatacagatcacgagtttttagccatttatttttcaaaagtctagccttcagcagggagcatccatatgcgtgtgtgcaattcacattgagttctgaaacaagacttctggtttatccataaatctggcaaaataaattctcgaggcatagcctggcaacaaagaacttgaataaattctttaaagctcttttgtagtgaaataatattagargttggggcaaagacaaagccatgagaggtgttgatctctaacagttttatgaaaagatgtttaagtaacttttcagtggcatcaatttaaaaatctagtcaatgatgtaacgttgaggatggagtttgctgacttttatcttccatgagcagtc

SEQ ID NO: 463836 - DNA, 617 bp, Homo sapiens
gctgtcagcctctctaaatccaagtgctcttatctgccaagtttacatacacatgtttaaaatcttcttattgaatctrcatacaaagtcttcatgtcttcctccttgaaataatagcattgtgagagaaaaaaaatcttcattctttttaaaactaattcagaatgtctaggtaacacaagaacactctgcaacaaacaagaggtaagggaatatttacctggtatttctgtgcctcattatcattctcactcattataaaattggtatctgaaaaaaatcttgctgtaaaaacaaaaagtaatgtatagagagtataaacaaagagtttgcttcacatcataaccattatgcatcccattgccaaagggaagatagtacactacatgattccggggaggagcatcattcacatagactatagtgtgcatggcacatgcaagagaccccacagtactacccgctttgttctctttgtagacacactcacggatgattcatactccctgacctggagtagccaaataaagagttgcatcagtttattatcattctttccagaccattttctaggtattcccattatacattccttcaaatagaaagattttattctg

SEQ ID NO: 463837 - DNA, 620 bp, Homo sapiens
tttaatgtatgcatatttaatatatgcattaccttgtaattgggccccttgagattttagtatctcagcatttttagtgcctgagatttaaaaaagtcggattaggctcttgcttgcttgcacaaaagccaacatcccttgttctcacaatacaattgcaaactgctgatgtactgtttctttgtcaagcaggagaagataacttcaaggtaacaaaaaacattcgcagaagsaaagaatgcctataagattgttgcaactaactgttgagacccagaagtctggttgctcagcatgttatcagagattaaagaaacacaaacttccccattggttccctaaaactccccctctcttactctctggctgcaaacaaacctctctgctttctcttattgttaagacatatctgacagatcttgccccgttctcgctttggccaagtggaataaacttttatctatctctaagcgttggtgtgtcagtgtttggtttcgactgagcatctggtacatgagcctgaatttgggtctctacaacatcttcacctagttactatttttgtgtgtgtgtggtgagaatacttgaaatctactccattggcaattttcaaatataaa

SEQ ID NO: 463838 - DNA, 355 bp, Homo sapiens
tagcctaagaaataggtttggaatattatttcttagcataaaagacraagataatattggtcagagtcttctaggcttgaattcttggctacttagattttatcaagtaaattgtaaaaggataaccaatcaatatttcacatgtatttctgtatgaattttgatttgacaagaaagactgtgaaaacaaaaccactattatctgtgaactacctaatgtggaaataaatatccttaaataaaaccttgagaaagtatattactcaatttttttctacagatatcccatatgttataatatttaactgaaaacaaaatctttcttcttaagaaaagattttattcagttttagaa

SEQ ID NO: 463839 - DNA, 622 bp, Homo sapiens
ttctgatgatgaccaattaactctctgtttctatgagttttacttatttaaactctacatataagtgagattatgtcatgtttgtttttaagtgcctggcttatttcacttgacataaagtctcccaggttcatacgtgttgttgcacatgacaggatttctttcctttttaaggcccattaaccttttgtagatctgttactgaggtaatcaaaacttactggacaattatgttatttgagtaaattgaaacataacagcttataaagggtcaaatggtagtaatagcctaagaaataggtttggaatattatttcttagcataaaagacgaagataatattggtcagagtcttctagrcttgaattcttggctacttagattttatcaagtaaattgtaaaaggataaccaatcaatatttcacatgtatttctgtatgaattttgatttgacaagaaagactgtgaaaacaaaaccactattatctgtgaactacctaatgtggaaataaatatccttaaataaaaccttgagaaagtatattactcaatttttttctacagatatcccatatgttataatatttaactgaaaacaaaatctttcttcttaagaaaaga

SEQ ID NO: 463840 - DNA, 332 bp, Homo sapiens
cccattgtatctatgatgtaactaactyacttttgatttcacacgtttgtaggcagaagaaacttgccttgtctcagatgagactttggacttgaactttcgagtacatgctggaatgagttaaaactttggggaactgttggaagagcatgattgtgttttgaaatgtgagtacgtgagatttgggagggactaggggtagaatgatatggtttggctgtgtccccacccaaatctcatcttgaattgcagttcccataatcttcacatgtcatgggagggacacagtgggaggttatttaatcgtggggttggttaccctcgtgttgttc

SEQ ID NO: 463841 - DNA, 581 bp, Homo sapiens
actaagtttacatttatagacctggaaagctatccataatgtaatattaaagtaaaagaaaattgcaggataacaaaataggatcccatttttgtaaaaggaaggaacaggctgggcgtggtgtctcacatgtgtaatcccagcactttgggaggccaaagtgggcggatcacaaggtcaggagtttgagaccagcctggccaatatggtgaaaacctatctctactaaaaatacaaaaattagctgggcgtggttgagagttcccgtagtcccaggactcaggaggctgaggcaggagaatcacttgaacccaggaggcggaggttgcagtgagccgagattgcacattgcacgccagcctgggtgacagagtaagactctgcttaagaaaaaaaaaagcaaggaacaataaaccatttatagatgataaattaatgtatatatttgtgtgataatggagaggggtggcaaaagatttacatcagctatcaacgtaccttgctgrtaatgggaatggagaagcataattttttccccctatcatttttctggttacaatggatgactattacttttataa

SEQ ID NO: 463842 - DNA, 552 bp, Homo sapiens
taaataaactgatctatactaaagtactgagaaaagtgactggtgcttaattaacattcagtaaattctatttattattactaaatgataatttattctttttttatatgacttagtaacaagttgcaacagattgtgtttcctaaaagtggtttaaataatatttcttcactcacatgttcttctgcaatctgatcttacttctactccatcaagaggtggagtttggatgtgtacagtaactgctttgactatcagaatatagtggaagcaagactgtgccagttctaactagaactcttaacttatcttrgctttcatttcctgagctgtggaatgcttgcttttgggacaatatctcttggaatgcagctgccatactctgagaatctgaagccatagggaagaccacatgtagatgctccagttgacaaacccagctgagctccaagttgacagccatcattagtcacaaaccacatgaaggcatcatggctgtttaactcagttgtaacttgtaatgactctaggcccaactaccatctgactgca

SEQ ID NO: 463843 - DNA, 562 bp, Homo sapiens
tttagctaacatttatctatacaaacaattctttggagttaaaaaatgacagaaataaaattcttgatacagcatgcaagttaggagggaattacatgaaattaaagtgttctaagaccattgtaatatacaggtagaagaaaaatatattgatcaatttttaacattgtgaaattaactatggatattgaaatttctgaggtaaccaccaaaagagaacacatagaatgttcaacgaccaaatccataataggattctacaatctamagtgacataagaaagaaagtgaaaaacagaaaagacagagtttaaaaaattcaggtagaaagaaatccaaatgcttcagtcaaaaaatccaagattattggctggataatcagcaaaataaaataaaattgagaatgtagacacaccaaaagcataatgctacacaaacttaagagtaaaagaacagaaacatgttttagacaaaacccagacaaaagcaatgtggcataagtttattatttttatcatacaaaatagttttaggcaagaagcataaaaataaagaggattaac

SEQ ID NO: 463844 - DNA, 402 bp, Homo sapiens
cattgcttcttctacttttatatttttctcagctctctaaatctgcttcagctctagataaggttaaatccttttcctgtgatctggattttcatgatctccagtagggatgtatgttcagaggtcaacttttcctcctctcatactttgggtattcagtttttcaattgtctcacagtgtttgcagtggcaagttgcttctttgaaatggcctgtgaatttcttcagttcttctggtatgctcctgcagtggttcttggagcaaaagttcacaatgtgagtctccagacactgttttcttcatctaagtggcagctgcacattagtcctgtytcctatctgccatttttagccatttcctccacttaggctctttctagaagaggaaatccaaacaatcaa

SEQ ID NO: 463845 - DNA, 594 bp, Homo sapiens
tttcatacttgcagcactacaatggacctatactagttttttacagagctaagagctttcctttctaagagacaggatatggtgttccaaggggctaccaacctttcctccttctcaggaayattattgcagtaaattcctgtgatttgccctgcagctgattgaacaaagggttcatctgaaggcaccatccttaggtaggtcagtgaccttgagcagcctcatgggagaactctgtctagcaggaatgctctttctggatagtgtctaattaatcaccttgagagtttgaatgcaggtcactagaataggcagaagtggttgggaacacgtgtactcagaaaagaagcagcagaagtcgtgaggcaatggaggcatgagaacgtaacagatcagaggaaaaagggctttagaggcagagacagagagaggctggcagtcactagagttgttagaggagggagcagaagtactcacttttgagagttcagctgcttttccatccaggaggcctggcactggagctgttagactgaagcaaccagaatgtaccttcctttccctggcggcctgaaataactaacatgtatatta

SEQ ID NO: 463846 - DNA, 568 bp, Homo sapiens
atcctcaggtctaatactttacttcatttagaaagtgttcctgaaccccctaatctgccagagttatgttctactccaggttcccatagtaactctaggcccctcccagggtacttgtcacagggcctccttactctctacccctttgggctccatgtgggcagtggtgataatggtcttgtttactgtcatctctccagtgccttgcacagggtggtacttctaaatatttgtaggagggttgttggaagtgattcttaatctgatttattaaaggaaaatattaaaattaaaaaaaaattatttgggtttgaatgataactgtatcgccccatttgcagaaagagttatactgtccggatctcttaagatcaattaaacagagcctttgttgtcacttctatatacaacttgactgtcaagtcagtaacaayatattattttgactcatagaattctttttggtgatatacctcactgtgaatttaaaattcatactgcatttttgttaatgtggtcacactttatagaatctcttgcttaaaaattaaataattgtaacattatg

SEQ ID NO: 463847 - DNA, 612 bp, Homo sapiens
ctgtgcctcccaaagtgctggtgtatatttttttgactatttattgtaatttaggtttgtgaaaactggaagaaatgtctggagatcattttataatattttgcataagactatgtaagtgaaatattgtcacttattaatcaatgtacctaatattaaatgcttattatatgttatatgctatgcataaattatctttttaaatctacaaaataatcttatgagtaaactatggattatataagaatggatctagacaatttagatacaaatacatgttagaacagtcagaatatcttactcctattgtaatcataaacagacctggtgcatagaaaaaaatgatttcttatgtcrgtgtggtatctttattttctggaggtattttgtacatctgaaatacataaattgtcaaaacatagtggtaaaaagaatttggaaaataattattgcttatggagtcccattccaaatttactaccataacagtttataatggcttctcctctggctgcaaatatagatatttttgtgggtgaaaaatataaaagaggaagttattagcattagacagaatttatgtagcataaattcacttctgtaggtcacata

SEQ ID NO: 463848 - DNA, 362 bp, Homo sapiens
actgggtggatgaacttaccccaagcggcaagtggatctgagtagcacaaagggtggcccataatactctagtgctccacccatatctcctctttaggaccaagggccaacaaacccatcctccaactgctgtgatttttggtcacacgttttatatccttaaccacaaatatgagctgaattaaatcctcaacccacaaccagaatgagtcttaataatttgctaaatcttaaaattgacaccwtaatttgagcacccccaccccaaatttgagaacacataggcaactggttcaaactggaatccaaccaaaccagaacatcaaattttctcagatgtgaatccaaaccagaagttcaga

SEQ ID NO: 463849 - DNA, 605 bp, Homo sapiens
tttttagaatttaaaaaagttatttcattaaagtattattaaaatatgtgtatatagaaagagagaatgaaaaatcaaacatgatgaagcttaacaattgtggaataaacaccatgtaaagggtacacaggagttctttgtactattcttgaaattttctgtaagttttaaattatttcaaaatgaaaagtggcaaaagtttttttttcactgtaataaacataaaacatactcagttcatcytgagttatggtagcacccttaaagaaatcttagattttcaacctttaaaatctttctgtttgataaaggaggatttttgtcaatggttagaataagcaacttcttctcaatggtttctctctaccctgggcaatgttttcatgaataggcacactcatttgagcaggggtgagtaagagttcttttactaaaatacagacttcagggactatatatgtctatgtagcttctttcctgttgcaaacgttctgtccacagtcttaaccacatttattcattgagttttataacatatccaagcagttgtgcattctgaaatattagaagaaacctaaataggttatctatatttcattgattaa

SEQ ID NO: 463850 - DNA, 541 bp, Homo sapiens
aagcaaagaaatctcagacatgattttagggttggaatggaaaggcagagagcatctttgccatgtcctaaagaacagaaactcgaccgggcgcagtggctcacgcttgtaatcccagcactttgggaggctgaatcacctgaggtcaggagtttgagaccagcctggccaacatggcgaaaccccatctctactaaaaatacaaaaattagccgggcatggtggtatgcacctgtagtcccagctacttgggaggctgaggcagraggatcgcttgaacccaggggccagaggttgcagtgagctgagattgcgccacttgcactccagcctgggtgaaagagcaaaactccatctcaaaaaaaaaaaaaaaaaagaacagaaactctatctttctgatctttaaattctaccttccccggccccatctacccctaaccacacacagagtaggcactcctcgaacatttctggaatttgagtatatcacatcctctccagtgatctgtacaaagacagcatcacaaacccaggtgaattg

SEQ ID NO: 463851 - DNA, 485 bp, Homo sapiens
cttgtccaactctctctttatagatggtaaaaaagggaatactttacaacagacactggagcttattggagggtggagagtacgaggagggagacgatcaggaaacataactaacgggtactgggcttaatacctgcrtgatgaaataatctgttcaacaaacctccatgacacagcttcacctatataaccaaactgcacatttacccctgaacttaaaatacaattaaaaaaaagggaacaccttaatccctgttaggatcatctcttagtttaaaataaggacagaaaagtcaatagcgtttaatatgtaagaagtagatataagcaaagtgaaatccaattaaatattttcatcagttctaatttgatcattttcttatttatttttggataatttaaaaaattcacatagatatgaaactgtgttctatagcaataccttattaaaacagtagccaattactagacaagtaagtataaca

SEQ ID NO: 463852 - DNA, 579 bp, Homo sapiens
aggttgcaagagtgaacactcttgcctttttcctgatcttggggaaagagtagttagtcttttagtctttcaccactgagtataatgttaactgtagattttttcatagaagccctttatcaggggagaagttacttttttttttaattcctaatttcctgaatggttttttttgttgttggttgtttttygtttgtttgtttttgtttttcatgttttttttgagacagagtctcacactgttgcccaggctagagtgcagtggcacaatttcggctcactgcaacatctgcctcccaagttcaagagattctcctactccagccttccgagtagctgggattacaggcgtgcaccaccacgcccaactaatttttgtatttttactagagacagggtttcaccatgttggccaagctggtattgagctcctgacctcaggtgatccacccgcctcggcctcccaaggtgctgggattacaggtatgagccaccacgcctggccaatttcctgagtttttatcaggcatgcatatagtattttgttaaatgctttttccacatctactgaatagatta

SEQ ID NO: 463853 - DNA, 608 bp, Homo sapiens
gaggtttgcctgtaagaagtattataagatttgattttatgaccatatctaaatatgtcaaagagattacctgactgtattattatagcgctttctttccttttctcctgtattttttggtatcttcttgaacacaagaatgctctgacacaagcttgaatcaaaataagcttgtcaatagcttcctttcgcattagatttaactgctccacgtgataatacttaaggaacacctgaaaaattaaaatataatacaaagaaccatggcacacagatgtgaagcagttatgtgctgtgctttgaagaacagaacacattctaaattgcttgagattttrgaaatcactgtcttttgcttctttgccctagatgtcactatgacagtacagatttttatgcttgaagaaaacatttctttgagaagaaatgcagaaggtgacaaccatgctgtttatttacaacaggtaactaggttttgttggatgagacaataagagtggaggatgttgagctcttttagcaaagtttctagcatcgtatattctgggctaagctaatttttatgctttttattttttaaaggcaactatatttcccaaattaaaaaa

SEQ ID NO: 463854 - DNA, 630 bp, Homo sapiens
gcttggtgctcttaaagacctagatcaattcttttaaatgactagtgaaggaatgggggaactaaggtgtaaacaggggaagggacttgccttagactctaagaccatgggccagtgagtagatgagctaaagctggaaatcatcaagcatcagaggccctaggaacttyactccaacaatctcttcttagagatgacattatcagcattatttaggaactgtacctcggcttgtactccttgtcccaataccctggaaatgtgacctagttaataataatgataaaaatagctagtgtttatgaaatgcttcctatgaggtagacactgttttaaacacttataagcagtatcccatttaattcttattaatgatcttaactttaacaagccctattgtcttcattttacagatgatgacactgaggctttgctaggttaaataatctaaaccaaagtctcacccttaaccttggctttatctccacttgagtctaggcttccagtttcaaatttatttaaccatagcaccatgaagaggggagtaagcaccatggatctttggaggccagtgtttgggaggagctggaaagggtcaagtagggcttctcaaatgtacatcaaaactca

SEQ ID NO: 463855 - DNA, 630 bp, Homo sapiens
gcttggtgctcttaaagacctagatcaattcttttaaatgactagtgaaggaatgggggaactaaggtgtaaacaggggaagggacttgccttagactctaagaccatgggccagtgagtagatgagctaaagctggaaatcatcaagcatcagaggccctaggaacttcactccaacaatctcttcttagagatgacattatcagcattatttaggaactgtacctcggcttgtactccttgtcccaataccctggaaatgtgacctagytaataataatgataaaaatagctagtgtttatgaaatgcttcctatgaggtagacactgttttaaacacttataagcagtatcccatttaattcttattaatgatcttaactttaacaagccctattgtcttcattttacagatgatgacactgaggctttgctaggttaaataatctaaaccaaagtctcacccttaaccttggctttatctccacttgagtctaggcttccagtttcaaatttatttaaccatagcaccatgaagaggggagtaagcaccatggatctttggaggccagtgtttgggaggagctggaaagggtcaagtagggcttctcaaatgtacatcaaaactca

SEQ ID NO: 463856 - DNA, 630 bp, Homo sapiens
gcttggtgctcttaaagacctagatcaattcttttaaatgactagtgaaggaatgggggaactaaggtgtaaacaggggaagggacttgccttagactctaagaccatgggccagtgagtagatgagctaaagctggaaatcatcaagcatcagaggccctaggaacttcactccaacaatctcttcttagagatgacattatcagcattatttaggaactgtacctcggcttgtactccttgtcccaataccctggaaatgtgacctagttaataataatgataaaaatagctagtgtttatgaaatgcttcctatgaggtagacactgttttaaacacttataagcagtatcccatttaattcttattaatgatcttaactttaacaagccctattgtcttcattttacagatgatgacactgaggctttgctaggttaaataatctaaaccaaagtctcacccttaaccttggctttatctccacttgagtctaggcttccagtttcaaatttatttaaccatagcaccatgaagaggggagtaagcaccatggatctttggaggccagtgtttgsgaggagctggaaagggtcaagtagggcttctcaaatgtacatcaaaactca

SEQ ID NO: 463857 - DNA, 573 bp, Homo sapiens
ttttggccctttctattttcatatacattttagaatcagcttgtcaacttccacaatcacctttaaaaccatttggcagtatccactaaagctgaacaattgtactcttaagtaaatacctaacagaaagaaatatacaaagaatattcatagcaactctattcataagagccccaaattagaaacaacccaaatgtccacccacagtagaatgaatacataaataactggtgtaggccgggcgcggtggctcacgcctgtcatcccagcactttgggaggccgaggcaggcggatcatcsgaggtcagatgagaccagcctggccaacatggtgaaatcccatctctactaaaaatacaaaaattagccgggcatggtggtgtgtacctgtaatcccagctactccagaggctgaggcaggaggattgcttgaacccgggagtcagaggttgtagtgagcagagattgcgccacggcactctagtctgggagaccaagcgagacttcatctcaaaacaaaacaaaacaaaaccatggctaaagctggccaacatagtgtttaatgcagtaaa

SEQ ID NO: 463858 - DNA, 397 bp, Homo sapiens
cctataatcccagctactcaggaggctgaagcacaagaatcatttgaaccagggaggcggaggttgcagtgagccaagattgtgccactgcactccagcctgggtgacagagtgagactctgtgtcmcaaaaaaaaaaaaaaaaaaaatggatggatggagaaatagatggattgaaaatgagtgtgtgacagttggcagatgaatggggaattaaatggatggatgacttcatgaacaaatggttgaatggatgggattacttgcttgcattgatcaaaacagacttgacctaatctcaaagtggtaagaaaggagaggaatctagctggtgagattggaactgtggagcttaaaaaaacgttgagaatcttactagcaaacataaggtctgcttg

SEQ ID NO: 463859 - DNA, 429 bp, Homo sapiens
gacccaggcatataatgtgggcagtttaatgaggtgtaaacgaagtgcaaatggcctaraagccccttgaatgtgaagcaggatggaggctttctttagaaggggggttttactcactctgggaattctggtaacagcaatagtctctgattgttaattggtcataattactttgttagaagtctgtacaccattccaagttctaaggcgacgagaaagaatatttctgacatttacaacgggagggaaacagcatattactttctccattaggatatacattagcatattgttgaattgaattttccgccttcactttttaatatatttccaatttccaactactccctggaaaattttaaaaaggggcagcagaaggattggtgatgtgcatgccacagatggagatggaaaaactgcccagaacat

SEQ ID NO: 463860 - DNA, 537 bp, Homo sapiens
tattggtgcaaacaagcaggacattggaaaagagactgccccaaatatttccagggaaaacattataaacaggctgtctaccctctgataawctccacattgaccaccaggattgacaggcctttgggggaagctccagttgttatcctgtaggtagacaccagaactgtgatttctactttatctatttattttttttaatttttttttcaataggttttggggaacaggtggtgtttggttacatgaataagttctttagtggtgatttctgagattctacattaaactccatttttgtttttgtttttggcttaagcaacaaaaatgtattgtctcagttctggagcctagcaacttgaaatcaaggtatctgcagggttggttccttgctaaggctatgaggaaagcatctgttctaggcctcgttccttggcttatagatagctgtcttcatattcacattgtattatcttggtatgcatgtctataggtccaaatttcctcttcttataaagccacagttatactgaatta

SEQ ID NO: 463861 - DNA, 537 bp, Homo sapiens
tattggtgcaaacaagcaggacattggaaaagagactgccccaaatatttccagggaaaacattataaacaggctgtctaccctctgataaactccacattgaccaccaggattgacaggcctttgggggaagctccagttgttatcctgtaggtagacaccagaactgtgatttctactttatctatttattttttttaatttttttttcaataggttttggggaacaggtggtgtttggttacatgaataagttctttagtggtgatttctgagattctacattaaactccatttttgtttttgtttttggcttaagcaacaaaaatgtattgtctcagttctggagcctagcaacttgaaatcaaggtatctgcagggttggttccttgctaaggctatgaggaaagcatctgttctaggcctcgttccttggcttatagatagctgtcttcatattcacattgtattatcttggtatgcatgtctatakgtccaaatttcctcttcttataaagccacagttatactgaatta

SEQ ID NO: 463862 - DNA, 596 bp, Homo sapiens
tgaggttttaagaagcccacttatttccaatttataattgccatttcaaatctaatacaaaactcttctcctcccacaggcttagaacaaattacagcttggggagtagcagtgggaagagggcatgttatactcattcatctccttgtacagtctccagcttttagtgctccaagagctttgtgaaaaggtcatgaagaatgagactggtaggtgatgtgaacatagagcaagagaggcgtaacactggtcctgtaataatctrgttggccttgttggtttgagtcttaatttcaaatattttcccctgttggggtatgtgaatgatagaccagtagaactgttgcaaatcctcaaatgactttcttccttttagctcagtggactcttcgatgtgttcagagttctcacagtgaagtgttctctctcagtaatctctaaatgctaggttaccatcttcctgcatccagtgttgcatgtgagctttcttctgtgtacttaacttggtcgttttgaatgagagctgtagttcaccttatacttagaattcaagcattttaccaagatatgctcaggtgttgctcttttctcatcag

SEQ ID NO: 463863 - DNA, 596 bp, Homo sapiens
tgaggttttaagaagcccacttatttccaatttataattgccatttcaaatctaatacaaaactcttctcctcccacaggcttagaacaaattacagcttggggagtagcagtgggaagagggcatgttatactcattcatctccttgtacagtctccagcttttagtgctccaagagctttgtgaaaaggtcatgaagaatgagactggtaggtgatgtgaacatagagcaagagaggcgtaacactggtcctgtaataatctagttggccttgttggtttgagtcttaatttcaaatattttcccctgttggggtatgtgaatgatagaccagtagaactgttgcaaatcctcaaatgactttcttccttttagctcagtggactcttcgatgtgttcagagttctcacagtgaagtgttctctctcagtaatctctaaatgctaggttaccatcttcctgcatccagtgttgcatgtgagctttcttctgtgtacttaacttggtcrttttgaatgagagctgtagttcaccttatacttagaattcaagcattttaccaagatatgctcaggtgttgctcttttctcatcag

SEQ ID NO: 463864 - DNA, 478 bp, Homo sapiens
tcttccaataactatcctattgacatagttaagagattgtgattctcttttctaccttggcccatcatggcccagaatcttcccaacacagcatgctgcacagcgttacaatattagcagagttgacagaacttgaaaaattttgccatgccaggcttaagtctttaatgattatcactagaggtctatataatttaaaggaaagatatatatataacttatatacttatgtaaacgtgtgtgtgtatgtgtgtawctgttactagactcatatataagattttaagtcaatttaagaaagagaaaaaatatagatcattccccagtttctttctttcctgcattagttggatgtgtgtcttagtgatagcctgtgattcttgaaatgggggaattagggtgtattatctcatttcaagtttgagatactggtaacacatctgggaaacctaccaagagcctgactatggaggaaaag

SEQ ID NO: 463865 - DNA, 623 bp, Homo sapiens
  misc_feature (1)...(623): n = A,T,C or G
tccataatccagatttcattccttcattgttgtggttgttgaaatgtgtcaagagttccctcatactgctatctcaaaaccaattaattcccttttctttcttgtaactaaccatattctaatagtgtggtagctaatggcagtaagcacaaagccacatgtatttatgtaattattasttgctcagaaatatttcctgtattgctatagtgctatagcactatgataatagtctgattttcttggaagacatctgtaatcatctatggagtatttcttcttatctgataagttgtaatagataatacagatctattagaacaaaactaaaattcttattagttcttagaatagaataatagtaagaatcatgattattattattgaaatccaggactactgtatcattgctaattgattgacataacttggaagacagataaaagaagcagttggcataataatcatatgtcaacactgacctgcaaatagcttttagatgaatgtgactcaaaaagactcatgattactggagattgagcagaaaaggtgaccagtaatcagaatctgttaagtaaggtttatattttttntgagagaagggtttcgagntcgccttggac

SEQ ID NO: 463866 - DNA, 537 bp, Homo sapiens
gaatcaaatgtcttccagacacctttgactgaatttttcaggagtgtaagaaatagcaacttattatagtatgagtaaaatgttgtcaatgaagtatgattacaagatggttgattgaaatagttgttcagtgaattaattcaatttcttctcactctttaaaattgccttaattaaactgcattaaagattttttattttactcatggcttttgagactactctgaagttttcagtaagtctccctcattcaggttcttmatttaactaaatgtatttaaaagtaaatgtattttatttccagtaccactgtgtgcacaataagtaaattatgtaatgttaatttatacctataattcaggtttaaaattaattacaattgctgtatctccaaactttagagaacattagtaaaccaggccggttaattccagttgattttaggctccaatttctttgttctaagcatttttcttagtcatattttggaatatctaactctttctgaatgtgcagtagttatttctctcttctgta

SEQ ID NO: 463867 - DNA, 616 bp, Homo sapiens
aagacagatgtagtaataaaagtatgaaatcgtttccatgaaaggagaagtctagcacataatatggagggagaagggtatccactggacagccttaagatttatccatcattttccttcatcttcaactcaaatcaagacaaaaagaaaccactttatcataaatrtgcaaaatattcctaggaattcttctgtgatatgtaataaagttgggttgttcacacacacacacacacacacacacacaccagtgtgtatttgctctctctttaaactaagaatttcattttggccctttttcttgtcagaagatgggttttaataatctttaatcattttgtttcctaatttttcttagtctggaagtcagattaactgggcagtaatccagccccagtcctacacttccattagctcccttttaagagatgagtcttaaattttggattcgtcacctcctaaagtagctgttttaatggtaaattatcaattcccattgggcatacaactattttcttcattctaaattctgagatcaataccctattgtgtttttgatgtatttcaatattgcaattaattcctttagttatttccatccaacactggcaacaat

SEQ ID NO: 463868 - DNA, 580 bp, Homo sapiens
taacactatagtcttcccaccctctgctggtgcctggcagccaccccatgtgacaggaattagtgttgtcagggccaggccagcccaggagccgtgggccagagtcaggcagcaggactgaaagagtgtaacagaaacgggccgaaacacacatttcctgccaccccactcatcattctgtggcagcaaggagagaagagcttcagccctctggggccgagacctcggggctccccatgtctggagtgtgacatgctgtaacaccctctttggggctctgcaatccctggtgtctctgaggttttgggtgccattgaattgcctggtgcctgcagtggaagccacttgcagtactcctggtccagccatagctggaactataagtcagttgaccctgtttcctttataaattacccagtcttgggtatttcttcatagcaatgtgagaagagactaatacaatatgtaatgcgttaacaactcaactatcatatgaaaccctctaattatatttaaaawctttgggtttattcttaaaggatcctgaattttcaagtcctattaaataattaccattaga

SEQ ID NO: 463869 - DNA, 587 bp, Homo sapiens
ctgttgaatatgccttaaagcaaacttaacccatagaagacatgaaggtaacacctgcttctcaggccactgataagaattgcctggcacatagcaagcactcagtgaaagttagcttagaaaaaccaaccaacccgactgataagaagaacactttttcttaggtacaattagaacacaatcaaatgactccacaactttaagagaatttattttctgagagataaaatacgaagcagaaatcagaaagatgaaatctgacaggtattaatctacaaaacgaatctacgaaagaaatagatatttatttatacttctcaacctacaaataggtttcataaattctttcatatatgtcttagttcattcaggccatgataacaaaattaactgggtagcttataaacaacataaacttatttctaacagttctgtaggctgggaaatccaagatcaaggcactggcagattcattgtctcgcaagggccttttcaacctagacagcatcttttggtcataacctyacatggccagaatggctacctaactctctggagtctcttttataaggcacaaattctactca

SEQ ID NO: 463870 - DNA, 592 bp, Homo sapiens
atcccaacgcgctgtattgtggatttatgggtgaagagaagtgctgggcagcagacaactgcccttcctgggagatcatcaagccaatgtttgattttactctcaacctgtttgctagttcattctttctttgataagagatgtagctagaaaggaaagtgctgcctgtcaattgaatggtgccaggatttagaactgtctagtctgctatacaccaataagcctcgtttttgtttgttttgtggaaatcacagaggccaagttccctctctgtttccatccctggtgcctagaaaagtaatccataagctgcactaattgagaaatagcaggtacagtactccctgcttatttgcagtttcactttctgcagttaacagtggtctgaaaatattacagtattttgagaatgagagagagaccacattcatataaatttgattacagtattttgttataactrttctattttattagttattattaatctcttactgtgcctaatttataaactaaactttatcaaaggtatgtatgtatggggggaaacagtataatatagagggtttggtactatccatggtttcaggca

SEQ ID NO: 463871 - DNA, 592 bp, Homo sapiens
atcccaacgcgctgtattgtggatttatgggtgaagagaagtgctgggcagcagacaactgcccttcctgggagatcatcaagccaatgtttgattttactctcaacctgtttgctagttcattctttctttgataagagatgtagctagaaaggaaagtgctgcctgtcaattgaatggtgccaggatttagaactgtctagtctgctatacaccaataagcctcgtttttgtttgttttgtggaaatcacagaggccaagttccctctctgtttccatccctggtgcctagaaaagtaatccataagctgcactaattgagaaatagcaggtacagtactccctgcttatttgcagtttcactttctgcagttaacagtggtctgaaaatattacagtattttgagaatgagagagagaccacattcatataaatttgattacagtattttgttataactattctattttattagttattattaatctcttactgtgcctaattwataaactaaactttatcaaaggtatgtatgtatggggggaaacagtataatatagagggtttggtactatccatggtttcaggca

SEQ ID NO: 463872 - DNA, 401 bp, Homo sapiens
  misc_feature (1)...(401): n = A,T,C or G
nnnnnnnnnnnnnnnnnnnnnnnnnnnnnntcatgaagacaccakcatgacctcttattcttatttatatcttttggactccaaatacttcattttagagatctagtgctctgaagggtcaaaggggcaccttgtgaaaagccatatttgtctctttacattcaccatgacttatactaaattataataagtgtgaaatgtctccacggacagatacaaaataattttgtatcttctggccagggtccggtggctcaatgcctgtaatcccagcactatgagagggcaaggcaggcagactgcttgagctcaggagttttaagacaagcctgggcaacatggtgaaatgctgtctgtatcaaaaatacaaaaaacaaaaaacaaaaaattagctgggtgtg

SEQ ID NO: 463873 - DNA, 401 bp, Homo sapiens
  misc_feature (1)...(401): n = A,T,C or G
nnnnnnnnnnnnnnnnnnnnnnnnnnnnnntcatgaagacaccatcatgacctcttattcttatttatatcttttggactccaaatacttcattttagagatctagtgctctgaagggtcaaaggggcaccttgtgaaaagccatatttgtctctttacattcaccatgacttatactaaattataataagtgtgaaatgtctccacggacagatacaaaataattttgtatcttctggccagggtscggtggctcaatgcctgtaatcccagcactatgagagggcaaggcaggcagactgcttgagctcaggagttttaagacaagcctgggcaacatggtgaaatgctgtctgtatcaaaaatacaaaaaacaaaaaacaaaaaattagctgggtgtg

SEQ ID NO: 463874 - DNA, 459 bp, Homo sapiens
tgggaacttttcaaagtccttattcccctcatgtatctccttttctaacctctttcttccctggcttttttgatatgtctattgcttgttctgactgttatcccttgccccaggctgctgcagccaatacttttaccttttaatgcctttggcaaatgccacctgagaagccatgccagccctggaaacactttgaatcagatgaaacaaaggcaactcgtcacactagtccttaagggagcccccagacaggctgaaacacacaatcacaattatttgagraaaaggtccatttagtccctctggcactagcagcatgcacctggaatatgggcgaccatcctgataactgccattgatctgggggatggcagatgagggatagcaagtaggcaatttaaaatgccacagcactctcttctgcaatgcatcaacttcttctttcttcattaacttttc

SEQ ID NO: 463875 - DNA, 555 bp, Homo sapiens
ccctccccaaacatacctgcaggcctggggttgtctgctcccattgcctggcctctcctctcccartgcctgctccaatctccaagcagggttggggctgagccccggggtcatgaatggcagcagaaggcagacagattcctggagggaagggagcaggttccagtaaggccacaccttcaggccagagagggcctgaaggctgggggctgggctgccagtcccgcagactggagtggggacttgtgcctcctccaggtcacctatggctgcccatggaccaatcaacacatacttcctcccctctgagccctgggatcagcaagaagagggcagaggatggagagacaatggcaagactagctgcagagaagagctaccctctctgctgagagcagagatgctcttaacaacccgcctgtggagaggagctaccctctccagggcctcgtctctgctgagagctgaacactccatgggacaacctgcctacagagaggagctacccactgtgggtctcctctgagctgtgctaacactaaataaagctcccct

SEQ ID NO: 463876 - DNA, 565 bp, Homo sapiens
cacacttctcaatttcaatcaagagttttatttaaaatatatccagtttactgaaaaaaaaaatgacactatttgggatgggctgtgatcactactatttttatcagcatcatctattcagaaaatggaagcaggaaatccaaattttttaaatgatttctgaaagtattttatgaattgcaaagaagtgtagaaggaagagaaagtgtttactttacatgctctttcaaagtttcaactttccttagctgcttatggaaactgcattactacagactttccattaattgtagattagaccagactaattcaataaatgtttaaaaaatggaccctgagtgcaggttcagacgtcyagaggaaatgacttgatggtacggaggtggaagggagtgagaagttatgatgatgtatggtgctgttgatcagttaattgaaggtaaaatttttagcttcaccaagcaattacctgatctcattaaggtctttaaaatcacctaagtaccatttgcctgaggcagctgccccttgtttagatgttatttcaggcattaagaaaaacaca

SEQ ID NO: 463877 - DNA, 526 bp, Homo sapiens
gaaattattcattacatacaataaatgtgttaggtcttaattatctaccagaactggttgagaggggattgtggagcatcttatgaactatgaaaacagattgcatatttttctgtttgaaatatgtcatggatacaaaaggcattccatccctcactcttctaaccataatgttaatgtgtatgttcttcaaattgctttcacatttactgtttcattatccagctaaacagctctggttatctggacacagtttgcagaaagcagattttttactgtttaaaaaaaggttttttactctagtttttaagataaaattaatttttactytgatgaataccaaaagatcctaactatgtgggacatttaaattattagtagtatatttggcataaaccaaattcttcaataggtctgccagaaagcatatctcttagttacggtagaaaacagtaaattctgcaaacttcaaacaattaagaaagggaaaaaaaacacatctgtaacaccaagctgattttttaat

SEQ ID NO: 463878 - DNA, 636 bp, Homo sapiens
ggagacatgcattgactaaattacaaatagggtatgttctacaaaggtggttgctttgtgtggtggctactttcatttttgtcctcctgtttttccatttattccccatagcttagcaaagtgaactttgtgaaatataaattggatcacttttcctatcaaaaactctcagtggcctcagtaggcacacaactctaagcagtttggccctggatcctctctccagcttgccatggagctacccttcggtaagctctcctgggttcagccatactgatcttattttagttcctttaaacgtttcagtgtctttatacatctatagtttctttgcctaggatcgttgtctcctcctcttcttatgataacttcttttttagaacgacatgtaatttttcctatctcagagaagctacctgcccaattaaaacacccttctcccctacaacattcatacctacaaaactctgttaactttgcttcttctttagcacttattacaaacatgaacctgtttatctattttacatcttttttggggggaaaggtccctgttatttgcactagaaygttggctctatctgggcaggaatactgtttttgttttactcagccactcacaggtaggatactgtc

SEQ ID NO: 463879 - DNA, 494 bp, Homo sapiens
tggcacaggtggtttttaaactatcaagtttattctgaagtttattaggtggaggggaaagatgttttctatgtgaataaaaaatcttgagtaaaagtcagtttcagaggtatattcagaaatattgagcaagtaagtttgacagaaacagtgctgaattaagtatttttgaagtttgatctgtttgggckccgtttccagttttgctttttaattctcctctctctctctctctctctctctctctctctctctctctctgtctttcagattttcaattaccattcccctttcattccagccccagttgcaactttcttgttgttaaaatacatacaatagggctgggcgcagtggctcaagcctgtaacaccagcagtttgggaggccaaggcgggaggataacttgaggtcaggagttctagacaagcctggacaacttagagtcctgtttctatgaaatactaaaaatcaaaaataaagaaataaaaatt

SEQ ID NO: 463880 - DNA, 504 bp, Homo sapiens
actggaaatagtaaaaattaagttaatatttagctgttattacctaagggatgtttagctcatgtaaacattttaaaaatcaactcgctattcttttggtgtttcctcacttttgtatctcaagatgattttgttctgtattcatttttttattctaaaggaaaagatagtaaaataaggttatctggtctacataattagtaacagtagtgattttagaacaygggcttatttctcagcccttctgcttgcttactttccttgagtaggttaagttttctgcttttaagataaaatggatatatttcttaaggttgttgggaaaattgcatggaagagtaagcacactgttatctacctagtttagctgtaatttttttgggagcctaactgtgtgcaaggcagttacaggtttttactaggacgagttatttttaaagtacagtgtaatctccctgtggatgagaaattttgtttctttttttcctcagtacacaacatatg

SEQ ID NO: 463881 - DNA, 491 bp, Homo sapiens
attttgcggacagttttaggcgckggatatttaatgcagctaataaatggaagcaggttactgtctgaaagactgcagctgactgtacattgcacgtagtgtataaaacgttgagggctgttgggatatacacagctgaagcatattcctggaagttactgctcagctttggaaggtttgatagtaatgatgcattaacggactttttacatgacagggtaataggatacttagatcaaaaaaaatgacagaggtttggtagacaatggtttgtggtttataggaacaagattaggatgaaattgtttgaatcttatttgaaggataaggaaaaagcagaggtgggagtaggttgtacgttagaagtggtttggatttttgaaagtcatagtcatttatagtttaagtagaaatctgttgtatcttgttttactaagaaatgaactattacgtagcaagcattaccaggagcttcaccatgcactacacct

SEQ ID NO: 463882 - DNA, 595 bp, Homo sapiens
tttctcagtcacattagtcacatttccagtgttcaataactacttgtggcttactgtattgtactgtgttgctatataaattcagaggattcctgtttagattagaaaaagcctcctaaaggttactagctttcaaaaagtatactaaagaacaaaaaggaactgaataggtcaaagaatgaatttattgacattgttttcaagaagcagttatatagcttcatttgtgcyatgggaggaaaacctcactttgaagtcaaaaaggtgaggtctgtgaacttcacaccatgccttttagattttgtttcacttagtgaaaaacaggtcatagaattgactagcttaaaggaaataatgaaaatatcaagtgtgaaaagacaatgactcacatgttgtagatattcaaaaactgaaagaaggggtaaaagaggaggagggggagaaagaagacaacgaagagaacttaaagcagtgctaagacaagacatagaacagagttgctgcctcttaacttcactcactacaatagactgatattagacagctgtaagactccagtgaaatgctatggttaagcctcaaaatgatctatgga

SEQ ID NO: 463883 - DNA, 606 bp, Homo sapiens
gtgacgatgggttttgcagggaaagaagagataaagttgggaaggggaatagccattctacatcaggagttcagggaagggacttccactawggtgacctttgagcagagacttgtgggacaggatggagtgagtctagcagttgtctggggatatggcctcctgggaaggacagaggccaccatgcagggccccaagaaattgaagccaagagccagaaagaagtggttaggagccaggcacgtgggaggcgggacagcctaaggggctgcggtgagttcagggattgttggaagtaagatgggcagccatgggaagtttttggaagattaccagagtataagcctgaagtcaggaaaatacagggcagtgtttccttcacttcccagagagaattagagtgtgcgctgctgttatcagaattgaactgtcaaaacatcaattagcccaatgcagagtgaaacagaaatcatggctttgtttgatcttggtataaaaaaagctcttatgcttttccagttgggataaaagtgagaggccatgagtcatttatttactcaactggcgataatacttttcatggagacaccttagctactgtattca

SEQ ID NO: 463884 - DNA, 606 bp, Homo sapiens
gtgacgatgggttttgcagggaaagaagagataaagttgggaaggggaatagccattctacatcaggagttcagggaagggacttccactaaggtgacctttgagcagagacttgtgggacaggatggagtgagtctagcagttgtctggggatatggcctcctgggaaggacagaggccaccatgcagggccccaagaaattgaagccaagagccagaaagaagtggttaggagccaggcacgtgggaggcgggacagcctaaggggctgcggtgagttcagggattgttggaagtaagatgggcagccatgggaagtttttggaagattaccagagtataagcctgaagtcaggaaaatacagggcagtgtttccttcacttcccagagagaattagagtgtgcgctgctgttatcagaattgaactgtcaaaacatcaattagcccaatgcagagtgaaacagaaatcatggctttgtttgatcttggtataaaaaaagctcttatgcttttccagttgggataaaagtgagaggccatgagtcatttatttactcaactggygataatacttttcatggagacaccttagctactgtattca

SEQ ID NO: 463885 - DNA, 510 bp, Homo sapiens
gcacaaaaccataatgccaggtataggcaaatagttctcaagaaaattgtttggaaaacaacagaaagaacaatgtgttggctatcaatgcttgtcagagtaaagaccaaatacacattatcttagggagtgaggactacatggttcattggcatctgaccttacygttcctgccaagggattcggttgagaagggagtattattttatatttgggtggacttgggtcaatgccactctaaaaaataaggtgctagctctctgtgttgacacaaaaatttcataaaaccgctattgggaaagaagttttggatgggagcaagaaagctgaaaatcttcaaactgtaaatttcatttttttctaaaagtttacaatatatgcatactagattatgattttagcagtttacttatatacttcaatgattaattgttttgcaggccatcaccaaaacatcattgaaatggttcactaggttcatcacatttggcttctaagaaaccaaaccta

SEQ ID NO: 463886 - DNA, 510 bp, Homo sapiens
gcacaaaaccataatgccaggtataggcaaatagttctcaagaaaattgtttggaaaacaacagaaagaacaatgtgttggctatcaatgcttgtcagagtaaagaccaaatacacattatcttagggagtgaggactacatggttcattggcatctgaccttactgttcctgccaagggattcggttgagaagggagtattattttatatttgggtggacttgggtcaatgccactctaaaaaataaggtgctagctctctgtrttgacacaaaaatttcataaaaccgctattgggaaagaagttttggatgggagcaagaaagctgaaaatcttcaaactgtaaatttcatttttttctaaaagtttacaatatatgcatactagattatgattttagcagtttacttatatacttcaatgattaattgttttgcaggccatcaccaaaacatcattgaaatggttcactaggttcatcacatttggcttctaagaaaccaaaccta

SEQ ID NO: 463887 - DNA, 579 bp, Homo sapiens
ggaaggctgactgtcagggacccagaacaccagcctgaccccatgagctttgagaatagccacatttcgcaaccacgttgtcaccctttttactgtattttcgtattcttatcccaaaaactgaaagtgaaagctttttaaaagttgctgtttggtttctgctgtaaagtggtgaaatcagggcagggcctgtcctgtgtgcttggaacagagggcaacagcagcctggggcagctggggggctggcggtgatttgcaacccagcaaggagggccgcgggcagaggggcatccatgagctggctgtgctggcaaatgattcagatttgtggaacacacaggcatcgacctggattctcagaaatggttggggaagtcaactgggaagatttcctgtcttcaaggaggaagcggggttcacagccaytgcagtgtgggccctcagcacacctgccctcctgtgctgggaagcctgaggcccaccagccacctctgaaaatggaaatgagtagaagtggcacctacagctcttggtgccagcaagaagtggctgttatggccacttccccatgacccccaa

SEQ ID NO: 463888 - DNA, 589 bp, Homo sapiens
aataccttgccaagtcccaagcccaggattgcttcagtttacayttgtattttttaaaagtacgaatgtctctttgtcacctacaagcatctttgatggtgaatggctccagctctaagagtcttaaattatcagacaaaacccccaactttctctctgctttatgtctagtttctgctaaatgctgctcacctccaggaatagagctgctggactctggaggtcaactataagggtgttggagttaataagctcagcaagtcactgtaccttgatctttactttcctagtgcactcatatttctctccctggaattagatgctcagctatctgccaggggacctctttccagataccctctgatttgaactagcagaaggttcctcatgtggcagttatggaagaataacaacccatatagctcatacggtactctgcttttggtgaaggttgctgcatttttgccaaccggtcaaaccaatacctcagtcatcaaagattattatcatttggcttatgtccttaaagtggaaaaatagctactgtgattctctccttcataaaggcttatgcagtaagtggctggga

SEQ ID NO: 463889 - DNA, 589 bp, Homo sapiens
aataccttgccaagtcccaagcccaggattgcttcagtttacacttgtattttttaaaagtacgaatgtctctttgtcacctacaagcatctttgatggtgaatggctccagctctaagagtcttaaattatcagacaaaacccccaactttctctctgctttatgtctagtttctgctaaatgctgctcacctccaggaatagagctgctrgactctggaggtcaactataagggtgttggagttaataagctcagcaagtcactgtaccttgatctttactttcctagtgcactcatatttctctccctggaattagatgctcagctatctgccaggggacctctttccagataccctctgatttgaactagcagaaggttcctcatgtggcagttatggaagaataacaacccatatagctcatacggtactctgcttttggtgaaggttgctgcatttttgccaaccggtcaaaccaatacctcagtcatcaaagattattatcatttggcttatgtccttaaagtggaaaaatagctactgtgattctctccttcataaaggcttatgcagtaagtggctggga

SEQ ID NO: 463890 - DNA, 589 bp, Homo sapiens
aataccttgccaagtcccaagcccaggattgcttcagtttacacttgtattttttaaaagtacgaatgtctctttgtcacctacaagcatctttgatggtgaatggctccagctctaagagtcttaaattatcagacaaaacccccaactttctctctgctttatgtctagtttctgctaaatgctgctcacctccaggaatagagctgctggactctggaggtcaactataagggtgttggagttaataagctcagcaagtcactgtaccttgatctttactttcctagtgcactcatatttctctccctggaattagatgctcagctatctgccaggggacctctttccagataccctctgatttgaactagcagaaggttcctcatgtggcagttatggaagaataacaacccatatagctcatacggtactctgcttttggtgaaggttgctgcatttttgccaaccggtcaaaccaatacctcagtcatcaaagattattatcayttggcttatgtccttaaagtggaaaaatagctactgtgattctctccttcataaaggcttatgcagtaagtggctggga

SEQ ID NO: 463891 - DNA, 579 bp, Homo sapiens
aactctgtcctccaaatatcagaaatctgacctcggatcactaattgctgcttctgatcacagaggcgcagacaaaaaatgtggcagccattgctgttgcaccttcacccattgctgaagcccctcccctaccagcaaaaggattttaggggattaaaacgatcctccccacatcttcatttttcttttttcctttttggaatacagtgtataaagatgtaattatgtgacattaataactgaaaggtgtagggctagagatgtaaagaagcaaagtttttgtatgccattaaagttaaactggtataaattcaaattagagtgttataactttaggatgttaatttaattcccatggcaaccacaaagaaaatagctatagaatatacacaagcagaagtgagaaaggaattcaaacatttcactacaaaaaaaaaatgaactaaacacaaaagaaggtagcaattcaggaaatgagagacaaaaaaagctatgaagtatatrtaaaacaaagagcaaaatgatgaaagcgtctccttatcattaattactttaaatgtaagtggataaaagtttcta

SEQ ID NO: 463892 - DNA, 589 bp, Homo sapiens
tggctttgcaacactacgggaatcataatgaggaagcaagttatttgctagtgcccctccctcttcagctmttagtgtatctttggcagattgaaaacacttagtcaacttcctttttaaatacagtagacatgacatttatggcctcctcacttactcctccttagagaatttcccctctcactttccaagaagcagttctatgggcccatgacaggaccctccccagttagcccagctacagctgactggatccaggtgacaaccagcttgtgctagacagacaggtccctctccaaggaatttggaattggggcagaaggacaggagtcagttaacttgcctgtgggagtttggtttgaaagctcacatacagtctgagccagtacttagcaccactggcagccagaaccacatgtgctaaagaataagtatggcctagtaagtcatgattaagctgaaaaatctgttttagggcaggaaaaatgttctggggaggcggaacggttcaaagaataagctggatacctcacgctagatgacttaattttaacgcctaaaaggagtttttatacttgacagctggggg

SEQ ID NO: 463893 - DNA, 611 bp, Homo sapiens
gattaagaaaaccatgccctaaaatgataaatttttgagaagaactaattgaacagattttcagcaaactacaactcttatctttcccttagaaatattatataaagaggatttcaaaccttcacaattacaagtttttctcttcaaataattaaatgaaaaattctaaggaatattagtgttgttggtagcccttagatattgctcattgtcttttaatataatttgaggcytagggagtcattaggtaccactgtttacatcaccaactgtatgatcagaaataatgatcatagttaaaaagtacaccaacttctagaaattataataaagtgccagatagagagaagggaaatgggaagaaatgaagctttagcagacaattttcaacagctgttttccataaataatgtaagcctgctagtttttaatgcagtataacttttcatgagctgattccttgcagcagtaatactaattaaccttttaaagtcagttttgtgtcccaaaccaataaaattcagtgggggcagagcagtttatcaccatctctggtagttcctgggatgaatgagggtggacccctgaaggcaaaggggtaagcaagcaga

SEQ ID NO: 463894 - DNA, 572 bp, Homo sapiens
gcttgctaagaaaaaaaattaagaaatcaagaagtgggagggggcactaacttaggtacaagctttctataacaattattgatatttctttaaggtctaaatgttaggaagatagtaaaatcttatcagttaattaaataccatcatttcagacaaatttcccaagtaatggataaaaattaactaaaattaacatagctaataaaaagttaaaaatracaaaagatttaaaaggcagcaaaaaaagaaatgaaataaatcagatactttgtttccccaaatttttatagcaacaccatttccagaaatttcaccattcctcgggcttacatcattttcaaaggaaacttcattcttcagtctagatcttccagaggagatatttaaaaatttgaattgtgaggtaaaaggaatctagccatgacctaaacctgggctaccctcaaatatctgacttctacaaaaagtccttgggaactgaaggaaaaaaaaaatcatagagtgaaaaagtcatacacaaaatatcaccagccttggactcaatgatttgcacctgaactgtgtgaccctga

SEQ ID NO: 463895 - DNA, 537 bp, Homo sapiens
gcaattctatcatttgccaattttataaccttatgcaagttatgtacctttccatgtttctatcccttcttctataaaacgtgaacaataaaaacatcttccttggctgggcttagtggctcacacctgtaaccacagcactttagaaggctgaggcagagaatggcttaacaccaggagttcaagaccagcctgggcaacgtagcaagactcagtctctacaaaaaaccaggtgagatagtgcgtgcctgtagtcccaactactgggaaggctgaagcaagaagcttgagcccaggagttcaaggctgcagtaagctatgaccatgcatgccactgcactccagcctgggtgacagagtgagaccccatcacaaacacamacacacacacacacacacacacacacacacacacacactttaaaaactcttcctcttagtactgaaagaatcagtacgaaaatcctccatatcacaagcattacatggtgcctgacacatagtacttacccaacaaatggttattttataaacatt

SEQ ID NO: 463896 - DNA, 495 bp, Homo sapiens
ttgctgctgtcagaggagatcttatacctatcttgctctacaaacatccttgaaaagattgtccacaatgaagacttctgttctgtgtgtgtatatatacatatayaacctcctcctcttagatgagtcatctgtacaaaatgccaagagaacaatgaggagttatctccaaactgcagagtttaatcaaaggattgacaaatgatgtggatgattgctagcagactaaaactaggaatattattaacaaatgatctatgataacaatgccttctgaatagcgatattaaattctactaaaagtcatatcttctacactgaaaaaacaattcagtgtaaaactacatgctcaaaaagatcaagcatgaaagataaaagaaattttgagacttgcaaagagatctttatctccttcacatgaacactttcttatataaagctctttttggaagtgctccagcaaaatccagaaaacacagtaagaaatcagtcaga

SEQ ID NO: 463897 - DNA, 519 bp, Homo sapiens
tattaatgcatatcaatttttagatgtgtatttttgcgaccttgttctaagagtgactatatagttcttattggtgtttatttttattttggggggtgtaaattaataagcagcaaaggttgtcatgaatgtttacagacactaawatccagaaattattaaaatcctcatgtttatgtttctctcagcacattaagatagccaccaaagtattaaatttggagttgactaaatttttgccctagtaacgttgctcagactgtgttgttattattgaatcctcatgatgtagaagtccatgttaaatttgttattactatgtttcatatgcttctgtttgctctgataagttctaatttgctttcacattggagactattggattgacagtggtttaaatacagctttcactgtatataaatagcctgtttggtatcctcaaggtttccatatctttaccattgaccagtgcaccagtgtttcaaaaatatccctcctagaacaaatgatgagtttact

SEQ ID NO: 463898 - DNA, 583 bp, Homo sapiens
cttctatgaaaaagggactttgcagacaggatggaggttaagaaccttaaaatggaaagattatccttcattatccaggtagagccccatctaattacataagtctggaaaaatggagagccacgcctggctgcggccagagagaaacgtgatgatggccagagaaatactacactgcccaccttgaagacaaacaaagggagtcatgagccaaggaaagtgagcagcatttagaaggcaaggayatagattctcccctagagcctcgagaaaggagcacggttaacacactgattttatggcattctgacccatgtcagccttctaccaagcagaattgccaggtaatgaatttgcattgttttcagccacttatgcctgctctgccagatgtaggacaaataaagagataaggtatacaacttccagaacacaataagtatgtttactatgagcttttattaaattatattgtgatggatgataaatacgttctacttttgtaaatatgagaatagtttcaagagtaaagaagacagatgcaaagctcaatcgctgtgtcttggatctacacaggaatagt

SEQ ID NO: 463899 - DNA, 690 bp, Homo sapiens
attgatatttttgtataataggatgtagggctcatgatttttccttgatatttggctaacccataaccatttattgcaaagattatccttttcctactacattgtggtgcaaactctgccataggtcagttgactatgcatgtatrtgtgtgtgtgtgtgtgtgtgtgtgtgtatgtatgtgtgtatatatatatatatatgtcatcttacgaattctgttttgttccatttgttatgtatctgaacttgcaccagttgtagactgccttattgactgaactttaaaagtaactactggtgttagtaagaaactttcggatttatcttttgagattatcttagctattcttagccctgtgtacatctacataaattttagagtaagcttatcaatttctgcataaagagagattagaataatgtaggactgattagaattgcatagaatctataaatcaatttgtaaagaatttgagatattgagacttccaatccacaaacatttactggagattatttagatcttaactgttcttagtaatgttttgtaattttagtggaaaattcttgccactattttgtgcttgtttgatttttctggagctattatacatagtatctttaaaaagttttgtgttgttggtatataaaactatagttagttcttatatattggccttatatctaat

SEQ ID NO: 463900 - DNA, 690 bp, Homo sapiens
attgatatttttgtataataggatgtagggctcatgatttttccttgatatttggctaacccataaccatttattgcaaagattatccttttcctactacattgtggtgcaaactctgccataggtcagttgactatgcatgtatgtgtgtgtgtgtgtgtgtgtgtgtgtgtatgtatgtgtgtatatatatatatatatgtcatcttacgaattctgttttgttccatttgttatgtatctgaacttgcaccagttgtagactgccttattgactgaactttaaaagtaactactggtgttagtaagaaactttcggatttatcttttgagattatcttagctattcttagccctgtgtacatctacataaattttagagtaagcttatcaatttctgcataaagagagattagaataatgtaggactgattagaattgcatagaatctataratcaatttgtaaagaatttgagatattgagacttccaatccacaaacatttactggagattatttagatcttaactgttcttagtaatgttttgtaattttagtggaaaattcttgccactattttgtgcttgtttgatttttctggagctattatacatagtatctttaaaaagttttgtgttgttggtatataaaactatagttagttcttatatattggccttatatctaat

SEQ ID NO: 463901 - DNA, 482 bp, Homo sapiens
cacaggcaaaaatagaaaaaaatgaccctcagtagagaactcaagcatatacagggatttcatgtgagagtgaatattgtatatgatcagggaaaagtcatttaatgtatttatgtgtatagttagagacacggtctccctgtgttgtccaggctagtctggaattcctgggctcaagagatcctcctacctcagcctcccaaagtgctggaattacaggtgtgtgagtcaccatgtctggctgcaaaatgtattatattccccccttttaccactcttctatttctcttatcttcttgcacttgctgggacctagaggataaamatgaataaaactaggataaacatcatctttttctcattcacaaacagggaaatttcttcaatattccattactaatactatgtttcctacagaacttcatagattctctccatcagattaaagactttaggtttttgctggtttgccaagaggtttt

SEQ ID NO: 463902 - DNA, 663 bp, Homo sapiens
atggcattatctttacttgctgccatagtaagcattggcaatattaatattaatgtaccaaatagctccagattcctcttaggctgaaaattatttgttttcaaacaaataaaacaaagacctcaatgaacttctttagatgtgaaagttcaaggtatgtggacatgttttggaaggagattgggggcaagtgctgactgctatttcttgtataatgaataaataggatttttttagtcaggaacaaacaagaagaaaaaagagggagtggtcagtgagtcaaagagaagctccatggagakaggtggtcagagagaactcccagggtcagggtggccacataacaatattcaattttgagttctggaaggtatttaatataaaacactgcatcctcccacctgtaaatgcctatgacatagcattgtgccagttatatgtcagagaataaagaatttagtgttcagaataagcactgagtggagccaccaagggacggttggcatggcatgatgaaagacttcaaaatcccaagtgatcgaagaaaaacaggacttcaaagatggaggtgaggaggagcctgcatccacctcccagttgtgtgctgcagggagcgcctgcttgcccatgaatattctcaggaattttgtaagtctgttgtta

SEQ ID NO: 463903 - DNA, 573 bp, Homo sapiens
atttgggcaggtattcaaaacattactgagagctaatttctttttccagactgctccagcttgaaatgaaaagcaaatttaaaagaatcatgcaaagatattgacacagctaaatttgctgcaagcttctggggttttaaatttttttcctaaaaccctgaaatgttggttaatttagttctctcaccaaccaaatgatgaagcaatttgggcatctcagttgcccttttaagaagayagtgactctggcctaaaataaatgagacgcttttgggcttgatggtttgtgtgttcagcagaccaagtcaggtttattgggtaagaaggtgaaaggatgattaaatgaagtttgcttttcaatctattacatcctgaaatataaatttctataatatataatcaaggcttaaagccttgaattctgtctaaagactatagcaaggaagaacaatgaaccaattaataattatattattatttctatgtgtaataaattaattgcatttaaatgaaggagcacttgcttttaaaattagtagattctactttgattaatgaaactatgattagatt

SEQ ID NO: 463904 - DNA, 538 bp, Homo sapiens
  misc_feature (1)...(538): n = A,T,C or G
ttggggtaccccttaatgcagaaatgcctgcagtgaccaaaaacttagatcataatactgaagtcccttcaaataccaggaaagccttcccaaggaggatggctacaaacaagcccagattacaaagactacaataaatacctaactcttcaatgcccagacactgacaaacaccacaacctcaagatmatccaggaaaacatgagacactcaacataacacagagaatgaattcagaattttatcacataaatgtaacaaataaattgaaataattaaaaagaatcaagcagaaaatctggaggtcaaaaatgcaactgacatactgaagaatcatcagagtcccttatagcagaagtcgatcaagcagaagaaagaactagtgagcatgaagacaggctatttaaaaatacatggtcagcacagacaacggataaaagaatataaagaaggaaatgcccaaaatatctattaaatagctccaagggggcgaatctaagttattggccctaaaaagtagggnnnnnnnnnnnnnnnn

SEQ ID NO: 463905 - DNA, 612 bp, Homo sapiens
gatgctataataccttcccttatttatgagaattttcaagacagttcatagaaaaacattttttttcctgaaccccatcctactttgtccatgtttcctctggtgttctcttattctgttagtttattttaatctcattttcatggtggaagtttccctcaaaggtgactcttggttgtattgagagtgaggctaggcatggtaaggattgttgattggtggccttcactgtggggtgatctgattgggctattttactgaaaaatctctatatctcagtatctctaggtttgttttttctcattagttggtttattttctaaaaattgtgttgattttttaaatcaatacatttaaatctgctttctccagtaaataaatttcaattctcctgctgaagagggtatagacaggcctgcctgtatcctcgttgctgasaagggaaggggagccaggacttttactcttttctctgtggactttttgctcaacgactctgttttcaacatggcacctcacctttggctgtgcatgggctctaccaactttatgctctttagaaactgaacaactaattatctgctataatctcttctgttttctttgtccctt

SEQ ID NO: 463906 - DNA, 623 bp, Homo sapiens
cactaggaactctgataaacacatctttaacttggagccaacccaaatgcctgtgaatgacaggctggataaagaaaatatggcacatrtacaccatggaatactatgcagccataaaaaagagttcatgtcctttgcagggacatggatgaagctggaagctatcattctcagcaaactaacaaggaacagaaaaccaaacaccccatgttctcactcataaatggaagttgaagaatgagaacacatggacacagggagggggacatcacacaccggggcctgctgggggctgggggacaaagggagggagagcattaagacaaatacctaatgcatgtggggctcaaagcctcgatgatggattggtgggtgcagcaaaccaccatggcacatgtatacctatgtaacaaacctgcacattctgtacgtgtatcccagaacttaaagtaaaatttaaaaaaaaaaaatctttaaaattccttagcaagtaccatgataacactagagagtaaacagatacccactgactggtaatatttaataggatagaaatatgtgtacattaatcctttaaatagagcagtttacaaaacaataaaaacatgacactccattattgc

SEQ ID NO: 463907 - DNA, 623 bp, Homo sapiens
cactaggaactctgataaacacatctttaacttggagccaacccaaatgcctgtgaatgacaggctggataaagaaaatatggcacatgtacaccatggaatactatgcagccataaaaaagagttcatgtcctttgcagggacatggatgaagctggaagcyatcattctcagcaaactaacaaggaacagaaaaccaaacaccccatgttctcactcataaatggaagttgaagaatgagaacacatggacacagggagggggacatcacacaccggggcctgctgggggctgggggacaaagggagggagagcattaagacaaatacctaatgcatgtggggctcaaagcctcgatgatggattggtgggtgcagcaaaccaccatggcacatgtatacctatgtaacaaacctgcacattctgtacgtgtatcccagaacttaaagtaaaatttaaaaaaaaaaaatctttaaaattccttagcaagtaccatgataacactagagagtaaacagatacccactgactggtaatatttaataggatagaaatatgtgtacattaatcctttaaatagagcagtttacaaaacaataaaaacatgacactccattattgc

SEQ ID NO: 463908 - DNA, 623 bp, Homo sapiens
cactaggaactctgataaacacatctttaacttggagccaacccaaatgcctgtgaatgacaggctggataaagaaaatatggcacatgtacaccatggaatactatgcagccataaaaaagagttcatgtcctttgcagggacatggatgaagctggaagctatcattctcagcaaactaacaaggaacagaaaaccaaacaccccatgttctcactcataaatggaagttgaagaatgagaacacatggacacagggagggggacatcacacaccggggcctgctggggrctgggggacaaagggagggagagcattaagacaaatacctaatgcatgtggggctcaaagcctcgatgatggattggtgggtgcagcaaaccaccatggcacatgtatacctatgtaacaaacctgcacattctgtacgtgtatcccagaacttaaagtaaaatttaaaaaaaaaaaatctttaaaattccttagcaagtaccatgataacactagagagtaaacagatacccactgactggtaatatttaataggatagaaatatgtgtacattaatcctttaaatagagcagtttacaaaacaataaaaacatgacactccattattgc

SEQ ID NO: 463909 - DNA, 531 bp, Homo sapiens
aagaacattttatagacttggattcgtttgcttctttcttgcctacagctcccatttcaccattttcttcaaatccrggcaaaataagattcactgataccatcaggcctcatgtttgtgattattttgcttatgttttaaagtcaattctttccacaaagttgtgtattctccaaagatttctctgatctcgcttgcttttcagcagatattggcaaagacattgatagatgtttcaaaatactcaattcattccttgactgcttttatttccccctttttgctagtgatgcctaatgtatgggctatatatcttttgccagtggtagagacatattatttttactgaaagcaactaaatatataagctttaatttgaaaatgaaactgtttaagaggatcttagttttcattttttagcactgaaatccctgttgtcatctttgaggaagcagtaggtggagctacaggctttttatcacgaaagaatgtttgcagtagctgcccattgccggaataacctgaacaagc

SEQ ID NO: 463910 - DNA, 531 bp, Homo sapiens
aagaacattttatagacttggattcgtttgcttctttcttgcctacagctcccatttcaccattttcttcaaatccaggcaaaataagattcactgataccatcaggcctcatgtttgtgattattttgcttatgttttaaagtcaattctttccacaaagttgtgtattctccaaagatttctctgatctcgcttgcttttcagcagatattggcaaagacattgatagatgtttcaaaatactcaattcattccttgactgcttttatttccccctttttgctagtgatgcctaatgtatgggctatatatcttttgccagyggtagagacatattatttttactgaaagcaactaaatatataagctttaatttgaaaatgaaactgtttaagaggatcttagttttcattttttagcactgaaatccctgttgtcatctttgaggaagcagtaggtggagctacaggctttttatcacgaaagaatgtttgcagtagctgcccattgccggaataacctgaacaagc

SEQ ID NO: 463911 - DNA, 531 bp, Homo sapiens
aagaacattttatagacttggattcgtttgcttctttcttgcctacagctcccatttcaccattttcttcaaatccaggcaaaataagattcactgataccatcaggcctcatgtttgtgattattttgcttatgttttaaagtcaattctttccacaaagttgtgtattctccaaagatttctctgatctcgcttgcttttcagcagatattggcaaagacattgatagatgtttcaaaatactcaattcattccttgactgcttttatttccccctttttgctagtgatgcctaatgtatgggctatatatcttttgccagtggtagagacatattatttttactgaaagcaactaaatatataagctttaatttgaaaatgaaactgtttaagaggatcttagttttcattttttagcactgaaatccctgttgtcatctttgaggaagcagtaggtggagctacaggctttttatcacgaaagaatgtttkcagtagctgcccattgccggaataacctgaacaagc

SEQ ID NO: 463912 - DNA, 583 bp, Homo sapiens
acaacattatgcctgattatttagttttccaggtttttcctacagcataaagttattacagacagtttaaaatactaaaaaggaaatacacattttatccaagtatttttcaagggaatgcttagttgaaacccttctttgtaagatcaattttcagaaaggaaataaaaagttatacaataagattagaaactaaaactttgaattgcataggaaagattgggaataacataatataggacagctgataagcagcaactttttaaaaagaattttgttctaatttcacactagtcattgatttttatatatgttattctaaaagatccattacatacaataaaaaaggtaatatatggtctttgtaggtttcatagatgtgttttttcaggaaatttggttcctgctttgaaaagtttataaataggaaatgatgggttacactgagcttcctcattgtaggggaaatatgtaaaattgataaagcatgataggaaaaggcatattttaattaaaaagagggaagattaaaattaacacatcaaatattaakctaatctaagacacttctaaatacaaataa

SEQ ID NO: 463913 - DNA, 627 bp, Homo sapiens
  misc_feature (1)...(627): n = A,T,C or G
nnnnntgttacttcccagcttcaaacctttcatggctcaggtctttcatcatctggcccttttctacccatcctgtgcctttcctgagcaccgcactgctgtgtgccttccaagactgtagcatgtggggtttagatgctgcttttgcccacccrtgaacttcagcacaattcttttttcttttcttttttcttttcttttcttctttccttctttctttctttctttctctttctttctttttctttctttctctctttcttgctttctctttctttctgtcttcttttcctttctttctttttctttctttctcaactgtacagtacattgttattaactatagttaccatgttgtatagtagatctcttgaatttattcgaactgaatttattctgtctaactgaaattttgtatcctttggcatctcctccattgcccctacttcctaggccccagtaagcatccttctactctctgattccaagagtttgacacttttagatttcacatattagggggatgatgcgatatttggctttctgtgcttaccttaattcacttaatgtcctccaggttcatctatattgttgtaaatgacaggatttccttcttttttaaggcag

SEQ ID NO: 463914 - DNA, 618 bp, Homo sapiens
cttgttctagttaaagctcggtaccctcccagcctgactacatggggaaccttggagtgtgtttaatatcacaaaatagtctctgccttttgcaaaggaccaacattctgtatcccattttcagtctgtcattgtctgaattgctggatgccccaattttggtttctgcccaaaaaaaaaagatgaagtaacttccttcaatgggggacaattctctggagaaagaagcaactatgtgtcactaggcatcaacttgtacatatgaggatgtgtgccccagtccagtagaagggatctgggtggagcactaacagtatctgccatagatkttctcactgaaaatagacctgaggactgaaaaacttaaccggcttctagaatggcactctcctcaagatgcttggcacactgagccattctggtctctcctgtagcaggacaattacagaaagtgtggtcaacccaggccactgagcaaaatatctgtgtttcctctgaaggagcccaaatctactactatgttctaaggtccagcagttagctcccatggtgcagcctgagtttcagatacagcttctagagcgtttaccggacatggaacccaagatgaaaagcatc

SEQ ID NO: 463915 - DNA, 563 bp, Homo sapiens
ttgtgctgttgcttgatgaagtactctataaatatcaaytagggtaagatggttgatagtgttactcatatgttttatgtctttactgaattcttgtctaactgctctaccattgtttgagagaaggatgttaaattctttgagtatgattgtggtattgtctatttcttcctttaattctttcaatatttgctccaggtattttgaaactctgttattatacatacacatttataactaaaaatcttcctggagaattgggtattttatcattatgaaatgtccctttttactttggcattattctttgtcctgaggtctacttcgcctgatgttaatatagtcatgacagctctcttaagatttactgtttgcatggtatgtatccttctattcatttactgttaatctacctgtctctttaaagtttatctcttatagataggggtaggtatgccttatctttattttgtttgaagtttattactcttccttaagttgtaaaactatatatttctccaaattttagacattgttgcatattatttcttcaaatacttttc

SEQ ID NO: 463916 - DNA, 527 bp, Homo sapiens
gtccaggtggggccagaggctaccactgctggccctgccacccttccctgggagcccctgtgtgatagatgctgaaatggagagtataagatgttgagaaaccttccccaaaccgctgaggctgacccttcaggtgccaaaagtcactttctgccagtccacctccaacttcagccacagctgctgtggacwctctggacagctcagagcctcctggtgcaacatggccccgcccaaggtcagtgcacctgtcagcatcctgtccctagggaactctgatgccagggaagccttccagatcttacaagcacagcccagagggcagagggataacagccagtggagcagcagaaaaacctccattcccacccctcaggagagcgagaccaccaggcatggggcattggaaagaatcttccaggggctgccatggtccctccttgataatatgcctccccccactgcgatgggggtcccaagagacagcgggggaagaggggcttgctctcagtccccgcctctcgggg

SEQ ID NO: 463917 - DNA, 540 bp, Homo sapiens
caccctgaataccccaccccagctgagtctgccttcccacctcacggcctggctactacaagagtctgtctccaaggccagcccctccctcttgctcctgagcttctggtaagaggagaaccagagcctgaggctagggctctctgtgcctcactcatgccctgcccataacaagggcctcgagatccctgcttatcaaaactcaggcaaacagccccaatagccagacacactcaagggcaagggcgggtggtgctgagggcttccacttggacagaaaagagctcattcttgctcagtttggtcaccagctggctgaaccttgattttctcttccatcacatgtggaggtggagctccctgccaggctgagaaaaccctggagcaggccttcaattcactcgtgaagacygaagacaagaagtctctgcagagaggctcagatcccaggacagacacccccatccgaggctgaagtagaagctgcaggctgcaagaccacaggccagaaaagcgtgagaccctatgttctggcaaaga

SEQ ID NO: 463918 - DNA, 507 bp, Homo sapiens
acatagcaaggcttgacaacatgagctctgaggcaggcytgggatgggagggtgatgaataatgggtagatggatgggtgggtggatagatgatggattgagggatggtggatagatggatgatgatgaattgatggatggtggatggatggatggatggatggatggatggatgaattgatggatagatggatgatggattgatggatggcagattgacagatggatagattgatggatgttggatggtggatggatggatggatgaattgatggatggtggatcgtgcatgatggatgaatggatgatggatggatggataaagtcggagaaggtgagggagttctaggtggtaagaggtgggcatttagggaaaggcagaagagctgccaggcaaggctccatcacagctgagggcagtgcagttgtcagatgcagggaatcatgagatgagctttgatggttcctttgtctcttgcatctcagaacttttggactagagggat

SEQ ID NO: 463919 - DNA, 507 bp, Homo sapiens
acatagcaaggcttgacaacatgagctctgaggcaggcctgggatgggagggtgatgaataatgggtagatggatgggtgggtggatagatgatggattgagggatggtggatagatggatgatgatgaattgatggatggtggatggatggatggatggatggatggatggatgaattgatggatagatggatgatggattgatggatggcagattgacagatggatagattgatggatgttggatggtggatggatggatggatgaattgatggatggtggatcgtgcatgatggatgaatggatgatggatggatggataaagtckgagaaggtgagggagttctaggtggtaagaggtgggcatttagggaaaggcagaagagctgccaggcaaggctccatcacagctgagggcagtgcagttgtcagatgcagggaatcatgagatgagctttgatggttcctttgtctcttgcatctcagaacttttggactagagggat

SEQ ID NO: 463920 - DNA, 521 bp, Homo sapiens
gttctaggtggtaagaggtgggcatttagggaaaggcagaagagctgccaggcaaggctccatcacagctgagggcagtgcagttgtcagatgcagggaatcatgagatgagctttgatggttcctttgtctcttgcatctcagaacttttggactagagggatcttaacaaatccttcgtttctaggtttggatttaatgggcttttcaagtatcagagagcatctggggactaacagaggactgccaagtgcttttattttgttgagacaggaaaagatatagatagatgatagatagatgatagatagatagatagatagatagatagatagatagatagatatagatatgtagtagatattwtatatatatatatatatatataaaatatctaccatcataacttcagaaaaggaccttagaacatcaaacaggaaggatatgtttccaaattctttttttttttttttgagatagagtctcgttctgtcgcccaggctggagtgcagtggcgcgat

SEQ ID NO: 463921 - DNA, 507 bp, Homo sapiens
atttaagggttaccaaattctgttttggaggaggaacagattccatgtccactagaatggaatgaacaagaaatggaggaggaaaacaggtagtttttcaaaagttttcaaaaatatgaaaagaagaaatgaaatggtacttggaagagattgttgaaatgggagagactatggtggcttgtttagaagcagttgagatagatccaattgagatagagatattgactatataaacaaaagaatgacaaattaatagtgtaatggataacttgactttggcaaatattgtgaatttttgtgaaagtacaactaaaaggyaatgtcactccaataatcggcagagtaatcaatttgcttattgctgtccctttaaatatagttctctggttttaactaacatatttttaactaatgatgcttcttaaagaaaagggaaaagacctttttctttctttcagtcttcaatgactcactgcttcatctcgctccaccaaagataaatgaaat

SEQ ID NO: 463922 - DNA, 507 bp, Homo sapiens
atttaagggttaccaaattctgttttggaggaggaacagattccatgtccactagaatggaatgaacaagaaatggaggaggaaaacaggtagtttttcaaaagttttcaaaaatatgaaaagaagaaatgaaatggtacttggaagagattgttgaaatgggagagactatggtggcttgtttagaagcagttgagatagatccaattgagatagagatattgactatataaacaaaagaatgacaaattaatagtgtaatggataacttgactttggcaaatattgtgaatttttgtgaaagtacaactaaaaggtaatgtcactccaataatcggcagagtaatcaatttgcttattgctgtccctttaaatatagttctctggttttaactaacatrtttttaactaatgatgcttcttaaagaaaagggaaaagacctttttctttctttcagtcttcaatgactcactgcttcatctcgctccaccaaagataaatgaaat

SEQ ID NO: 463923 - DNA, 588 bp, Homo sapiens
accacctgcactcactacttgtatcatgttctaaaaatcccaccatgtccctggagctcaggatcttcaaggccaaggggaggccctaaaggtgaagttgggggtgaaccagagtgaaggagagcatctccagtgatgagggagtccaagacccatgatcctgggtgatgggggtggacaggaggagcgtgactgtcaagctgcccaggcccaggcccatgtgtgaacagcagccctgtgaatcttgctcttggcctctgagccttggctctggcttatgctccaaagatggtgacactgcatctcctgtggtctcagggatcagctgggtcatgcaggtttcagcaggggttgtggtcaccactattcccatgagagaggtcatacccacaatgtaaaatcccacttgggctgcaggacagccaagggctagggaggaggcgccgctcatgycacccacaaccttgcccagaaggggcactgcctctaggggaagattggacccaggcaccccttcagtgccgccctcctctggcatctccacttggtggcagtattggcccagaagcggaactccagcaagcagcc

SEQ ID NO: 463924 - DNA, 424 bp, Homo sapiens
tcaatcacataccaaaattctactgctatatatatagctctactcttctttatgttattgatgtaacaaattatgtctttattcattgtataccagctaacagatttacaattacatttttatgccatttgccttttaaattatgtagaaaataaaaagcagagttacaaaccaaaattacaataggactgtttttatgtttgtttatgtatttacctttaccagagagctttgtatattcatacagcttgcttatttacttayatagttattgcctagagttcatttatttcaacctgaaggacttaacacttcttgaatggcaaattcagggataaatggatttttttcagttttaaaaaaaaatccggaaatgtcttaatttctccctcatttttgaaggataagttttccagctatagat

SEQ ID NO: 463925 - DNA, 424 bp, Homo sapiens
tcaatcacataccaaaattctactgctatatatatagctctactcttctttatgttattgatgtaacaaattatgtctttattcattgtataccagctaacagatttacaattacatttttatgccatttgccttttaaattatgtagaaaataaaaagcagagttacaaaccaaaattacaataggactgtttttatgtttgtttatgtatttacctttaccagagagctttgtatattcatacagcttgcttatttacttatatagttattgcctagagttcatttatttcaacctgaaggacttaacacttcytgaatggcaaattcagggataaatggatttttttcagttttaaaaaaaaatccggaaatgtcttaatttctccctcatttttgaaggataagttttccagctatagat

SEQ ID NO: 463926 - DNA, 424 bp, Homo sapiens
tcaatcacataccaaaattctactgctatatatatagctctactcttctttatgttattgatgtaacaaattatgtctttattcattgtataccagctaacagatttacaattacatttttatgccatttgccttttaaattatgtagaaaataaaaagcagagttacaaaccaaaattacaataggactgtttttatgtttgtttatgtatttacctttaccagagagctttgtatattcatacagcttgcttatttacttatatagttattgcctagagttcatttatttcaacctgaaggacttaacacttcttgaatgkcaaattcagggataaatggatttttttcagttttaaaaaaaaatccggaaatgtcttaatttctccctcatttttgaaggataagttttccagctatagat

SEQ ID NO: 463927 - DNA, 534 bp, Homo sapiens
tttatgtttgtttatgtatttacctttaccagagagctttgtatattcatacagcttgcttatttacttatatagttattgcctagagttcatttatttcaacctgaaggacttaacacttcttgaatggcaaattcagggataaatggatttttttcagttttaaaaaaaaatccggaaatgtcttaatttctccytcatttttgaaggataagttttccagctatagatttctcaattgacaggtttcttcattattttaaatatataatccactgcctactggccttcaaggtttctgccgagaaatcagctgctaatgttatctggatccctatctgtgagagttgctcttctctctgagttttcaacattctcccattatctttttttgtttgtttttgagacaaataattgtacatattcatgggatacagagtgatattttgatacatgtatacaatgtccaatgatcaaataaggataattagcatatccatcacctcgaatatttgtcatttatgtgtactgtga

SEQ ID NO: 463928 - DNA, 534 bp, Homo sapiens
tttatgtttgtttatgtatttacctttaccagagagctttgtatattcatacagcttgcttatttacttatatagttattgcctagagttcatttatttcaacctgaaggacttaacacttcttgaatggcaaattcagggataaatggatttttttcagttttaaaaaaaaatccggaaatgtcttaatttctccctcatttttgaaggataagttttccagctatakatttctcaattgacaggtttcttcattattttaaatatataatccactgcctactggccttcaaggtttctgccgagaaatcagctgctaatgttatctggatccctatctgtgagagttgctcttctctctgagttttcaacattctcccattatctttttttgtttgtttttgagacaaataattgtacatattcatgggatacagagtgatattttgatacatgtatacaatgtccaatgatcaaataaggataattagcatatccatcacctcgaatatttgtcatttatgtgtactgtga

SEQ ID NO: 463929 - DNA, 534 bp, Homo sapiens
tttatgtttgtttatgtatttacctttaccagagagctttgtatattcatacagcttgcttatttacttatatagttattgcctagagttcatttatttcaacctgaaggacttaacacttcttgaatggcaaattcagggataaatggatttttttcagttttaaaaaaaaatccggaaatgtcttaatttctccctcatttttgaaggataagttttccagctatagatttctcaattgacaggtttcttcattattttaaatatataatccactgcctactggccttcaaggtttctgccgagaaatcagctgctaatgttatctggatccctatctgtgagagttgctcttctctctgagttttcaacattctcccattatctttttttgtttgtttttgagacaaataattgtacatattcatgggatacagagtgatattttgatacatgtatacaatgyccaatgatcaaataaggataattagcatatccatcacctcgaatatttgtcatttatgtgtactgtga

SEQ ID NO: 463930 - DNA, 461 bp, Homo sapiens
ggggagcttcccaatggtggagctcccagcagggcatttgggcatccaccttgtgcgagagagaagtggtccaagataaggctgtagggaatacatctagtgaaagatgagctgcaaattgcttaactggttggtcaggagactggaaggagcaacttccagaaaaaatcagggacaagaagattggagaagagacacccagtggacttatggaagtgggtacaaagtgtgagaacatttcattgcatgctaaagcccaactgagaccatccaccacaggagaggcacccagccactagaaggacatgatgacaggcccagagacatcagcacatcagcaagcytatgtccccagccatcctgtgagcctccatgaggtcatggagcagcccagagggcagagagggagaccaggcatgagccctccagggtgggctcccttcctctccccagactgactt

SEQ ID NO: 463931 - DNA, 585 bp, Homo sapiens
taactaaaatctctaagaaagcagattggcatattgaattttaaaagtcaacgtgcatctatatgctgtctacaagcggctcactttacatagaaggatgcaaagaggtttaatataaaataatagaaaaagactttctatgtaaatagtaatgaaaaagagctgggatggctatattattgtcagaaaaatatactttacaagagacaaggaagaacaatatatagagaggaaagtcttcatacagcaagacattatggctataaacatataaacacctaacagacacaaaaaatttataaagtaaacattgacggaattgaagggacgaacggttctacaacagtagttgtaaacttcaatatcccacctcaataatggatagaaaaaccagacagaagaacattcagaaaataaaggatttagaaaatactataaaccaattaaacctaaaaaaacatatagagcataccaccaaacaactatagaatgcacattattttcaacggcacatagaacattctccrggataaatcacatgttaagccacaaaacaattcttaataaatgttaagagattgaaat

SEQ ID NO: 463932 - DNA, 501 bp, Homo sapiens
tatttatgggtgtggtatctgtgggtataggttcctgggcaccagcctcaaaagtgctggggtgcatgggtgtttctgccatggttggtgttgcaggcaaacagaaatcgcaggaaatcattagaagtgcacataggaatagaaaatctggagggtaagtggctaggcatgacacagaagacatactaggaggaattctaccctgagtggcattcaagaggaaatgctttgcatcccacagaggcttaatgcactctagggctgctttgcaatagtagggctttgaactcatagtttcacaggcaggtgtcagcagggcaggatccagggtcaaacaagtaacaatctcaaggaaatagtcttcccagggttcatattcatatggggcaatataaggttgcagtatatttggatcagccatgggtagcaggggaatcaagagtgagcaytgagtgtgggagttgtttaaagggcaagtgtctaaaacagtccaagtctgga

SEQ ID NO: 463933 - DNA, 518 bp, Homo sapiens
tttaaacttggatggtttgcccagaatgacagtaacgtgggctgctgtatctaataaagctagaaaatgttatctacttgtagaattccaatgaaccaccagagtcatacagaggmaattgtcaccgggtggtgggacaaggcacagggattgcctgaatccctatttgagaggccatggtgattaccagtttcaggggtctgagaattagccagaggcataattagttggatttggaggcgtggtctcaagagatcccagatctgtgggcaagtgatgaggactttttaacgtaatcttctttagttgttgcaatttgggtgtggcctggctagtaattcttcatgaggcacacaggggcctctaaattgccaataaacaggatgagctggatcacccagaggtaatggggtaatctgagagttggaaaagaaagggagggctgaatagtccactctaggggttcccatgcactaggaggcaagctttgttaggtcagaattgtgagtcgggatgga

SEQ ID NO: 463934 - DNA, 630 bp, Homo sapiens
ctgtgcaatagatctctaaaagttattcctactgtccaactgggactttgtatcctttcattaacatttcccctttcctccttctccccctttccactagcccccacccgtgccagcctctgtaaaccaccattcttgtaaaaagttgattsgctttaaacacgtgggtttatttctgagcttttatcctgtttcaatagttaacatctttttttttgccagtaccattctgtatttattacaacagctttataatatattttgatatcaaagagtgttatgtctgcagctttttttccctcaagattactttggctatttgggcttttatctttctgtgcacattttaagattatttcttctatttctgtgacaaatgccattggaattttgatagggatgatgttaaatctgtagattgctttgggtagtatgaacattgtaacaatattaattctctcaatccacgaacataaaatacctttccatctatttgtgtctttttcaatgacgtcgtcaatgttttacagttttcagtgcggaggtctttcacctcctttatcaaatttattcctaagcattttgtagctatcataatgagattgttttcttgatttctttttcaaatat

SEQ ID NO: 463935 - DNA, 630 bp, Homo sapiens
ctgtgcaatagatctctaaaagttattcctactgtccaactgggactttgtatcctttcattaacatttcccctttcctccttctccccctttccactagcccccacccgtgccagcctctgtaaaccaccattcttgtaaaaagttgattggctttaaacacrtgggtttatttctgagcttttatcctgtttcaatagttaacatctttttttttgccagtaccattctgtatttattacaacagctttataatatattttgatatcaaagagtgttatgtctgcagctttttttccctcaagattactttggctatttgggcttttatctttctgtgcacattttaagattatttcttctatttctgtgacaaatgccattggaattttgatagggatgatgttaaatctgtagattgctttgggtagtatgaacattgtaacaatattaattctctcaatccacgaacataaaatacctttccatctatttgtgtctttttcaatgacgtcgtcaatgttttacagttttcagtgcggaggtctttcacctcctttatcaaatttattcctaagcattttgtagctatcataatgagattgttttcttgatttctttttcaaatat

SEQ ID NO: 463936 - DNA, 630 bp, Homo sapiens
ctgtgcaatagatctctaaaagttattcctactgtccaactgggactttgtatcctttcattaacatttcccctttcctccttctccccctttccactagcccccacccgtgccagcctctgtaaaccaccattcttgtaaaaagttgattggctttaaacacgtgggtttatttctgagcttttatcctgtttcaatagttaacatctttttttttgccagtaccattctgtatttattacaacagctttataatatattttgatatcaaagagtgttatgtctgcagctttttttccctcaagattactttggctatttgggcttttatctttctgtgcacattttaagattatttcttctatttctgtgacaaatgccattggaattttgatagggatgatgttaaatctgtagattgctttgggtagtatgaacattgtaacaatattaattctctcaatccacgaacataaaatayctttccatctatttgtgtctttttcaatgacgtcgtcaatgttttacagttttcagtgcggaggtctttcacctcctttatcaaatttattcctaagcattttgtagctatcataatgagattgttttcttgatttctttttcaaatat

SEQ ID NO: 463937 - DNA, 641 bp, Homo sapiens
cttaactatgccatatgtatgtatccactgaccaaaaataaaaccaaccaaccaaaaaacaaaacaaaacaaaacaatcacagttaatccttagatttactcaaaaggatatggacaagcatcacagcttgcctgacgtttatctcctataaaagtagacccctacagcagtccctgcagtagtcccacagccacataggagttatttttttctgactctccaagtaacagatcagtttcgaagtaataagattcacattgaacaaaatgtgaaagctgcaatggcttaaaagcctcatgctccttagaagcttaatataactccataggcataccttccagggttctcacaagggacttgctgagttacaagaagtccacacaaacgatatctgaaagataygacttcttgtgaggtatttctagctctctaagtccagatggaatttaccaatcagagttcattttaaccgtagtaaatattgcttaattatatgattgacacatgtaatctttatttccagagctggtaagctaactgaaggtaaaagtctcattcagaaaataatttatccccagtctaccttcccatgacctttcattaacatcttcaatatagtaaaaaccaaattaatacattt

SEQ ID NO: 463938 - DNA, 499 bp, Homo sapiens
tgacattttagtggggagaaaggggacacctcatccagaaaagtgggaagcgtggggccgagtttcccaatggggcgagaaccagagcgagggaatgttgggctggagttgcccacagcaactgtgaggggttcgaccttaacggagggcgacagcgggctctcgagagggtgtatccccaggcttcgggacgaggtcgcgcaccgcgcagaaaccggaaggctcctggcggtggactgcgccctcacagccctacgctgagagagaatcggcgtgagtctccgccctcagagcctacgacaactctccaractccgccggagcaggcgcagggggcgtggccttggtggcaccacccccaacagagcctggtcagtgctgaagactgcgtcagtctggctctgccgccccgcccactgaagccgatagctggagcaaagctcggtcgggcgtcttccggggtcgtcacgtccggttgccaaggtgactggctcgctaa

SEQ ID NO: 463939 - DNA, 571 bp, Homo sapiens
gttgatttgagactttgttatgactactccatttcaatttattattatttatagagagtggtccatatttctagagtgtgatcattctgggatctcaattgaaaacccagtttttaccaaaaccccttgaccttggcaaattttgaactccaatctctgtctcatcagtacaacataattgctgaaacttctgtacagtttgttagcctcctagctgctgttttctgctggatttattggattcctgccccttaatgtgaagctcagaatttggccagtgatttgatgtgaatttgtagccggcttcttcctctatgatttatttccctttgggaatttgcttaagtcccagccacttggcatccctgaattctgatctctgcttccgcattccaatatgactatgctgtatactttgactatagtcctcatgttaaaaaawtttttcagaaaataggttaggataaatatgaatcttttctcttatgctttccttttctcaaggatcatggttcctcaactcctaacattatcgattactcctcaatgccttaaaccattgtattataca

SEQ ID NO: 463940 - DNA, 606 bp, Homo sapiens
atagtaacagctaagagcccaacctgaacctgaggcaataggaacattgatggagggagtggagtgggaagaaaaataaagagaaaactggagttgatgtgtctgatgggtattcttatattttggttatagacctgtaattagaaattttcctaatcagaacttccagttaaagtaattgccatggtcacaaagactatactgacaaaaaattttcaacagaaaaatctgttaaagaactcataggacctcagcttccaaaaccatagaatttagacatttagaacaggttgcaaggttggaatgcagcatttcagaatgggtttatgcttcagaggggaaactttgaactgtgagtctaaaagscatggtagcaagcaataaaagattctgcaaaccaacgtgaacgacaaatccaaagcagtttttcagatattactcaccctggatgcagcgatatgtttgcaacatgaaacttaggtaagttcagatgacctaggataggtttcctgttgtcccttcaagctgaggaagtcatctaaactcagcctccgtactcccatttataaactgatgagaagttttcttccatgctgctgtgagaca

SEQ ID NO: 463941 - DNA, 606 bp, Homo sapiens
atagtaacagctaagagcccaacctgaacctgaggcaataggaacattgatggagggagtggagtgggaagaaaaataaagagaaaactggagttgatgtgtctgatgggtattcttatattttggttatagacctgtaattagaaattttcctaatcagaacttccagttaaagtaattgccatggtcacaaagactatactgacaaaaaattttcaacagaaaaatctgttaaagaactcataggacctcagcttccaaaaccatagaatttagacatttagaacaggttgcaaggttggaatgcagcatttcagaatgggtttatgcttcagaggggaaactttgaactgtgagtctaaaagccatggtagcaagcaataaaagattctgcaaaccaacgtgaacgacaaatccaaagcagtttttcagatattactcaccctggatgcagcratatgtttgcaacatgaaacttaggtaagttcagatgacctaggataggtttcctgttgtcccttcaagctgaggaagtcatctaaactcagcctccgtactcccatttataaactgatgagaagttttcttccatgctgctgtgagaca

SEQ ID NO: 463942 - DNA, 606 bp, Homo sapiens
atagtaacagctaagagcccaacctgaacctgaggcaataggaacattgatggagggagtggagtgggaagaaaaataaagagaaaactggagttgatgtgtctgatgggtattcttatattttggttatagacctgtaattagaaattttcctaatcagaacttccagttaaagtaattgccatggtcacaaagactatactgacaaaaaattttcaacagaaaaatctgttaaagaactcataggacctcagcttccaaaaccatagaatttagacatttagaacaggttgcaaggttggaatgcagcatttcagaatgggtttatgcttcagaggggaaactttgaactgtgagtctaaaagccatggtagcaagcaataaaagattctgcaaaccaacgtgaacgacaaatccaaagcagtttttcagatattactcaccctggatgcagcgatatgtttgcaacatgaaacttaggtaagttcagatgacctaggmtaggtttcctgttgtcccttcaagctgaggaagtcatctaaactcagcctccgtactcccatttataaactgatgagaagttttcttccatgctgctgtgagaca

SEQ ID NO: 463943 - DNA, 606 bp, Homo sapiens
atagtaacagctaagagcccaacctgaacctgaggcaataggaacattgatggagggagtggagtgggaagaaaaataaagagaaaactggagttgatgtgtctgatgggtattcttatattttggttatagacctgtaattagaaattttcctaatcagaacttccagttaaagtaattgccatggtcacaaagactatactgacaaaaaattttcaacagaaaaatctgttaaagaactcataggacctcagcttccaaaaccatagaatttagacatttagaacaggttgcaaggttggaatgcagcatttcagaatgggtttatgcttcagaggggaaactttgaactgtgagtctaaaagccatggtagcaagcaataaaagattctgcaaaccaacgtgaacgacaaatccaaagcagtttttcagatattactcaccctggatgcagcgatatgtttgcaacatgaaacttaggtaagttcagatgacctaggataggtttcctgttgtcccttcaagctgaggaagtcatctaaactcagcctccgtactcccatttataaackgatgagaagttttcttccatgctgctgtgagaca

SEQ ID NO: 463944 - DNA, 539 bp, Homo sapiens
ctgatgtttcactggggcaacttctctcattctcctgagaacttgactcttattttcaagggttcacctgtgtcctctgttggctttattttctccagagtttgtttttactgctgggttcagtacctctttcgtgattttggcttttctcaaatttttggagatgtttagttacctgcccacctctatgtttgcgtattcctatttgcatgtctctggatgagggttgtgcataggggttcgtctccaggtttcataggagagactgagtatgctgctgagatgtgaggcattcatgtgctagtagtgcccttctgggagttctcactctctgaggaaattgccctattcatttgtatttgtgagttaaaacatgtctgttttgtgctgctcaacagagagggcagaaggacrgggtaggaggaaagggatgactggcccatcagctccatatacagtttcccagctcatcattgtgccagtcattccagagctctttccatttctgtctctctgttgcctctagacttagagctcta

SEQ ID NO: 463945 - DNA, 584 bp, Homo sapiens
atgaggacatcaggaagatggcagactaggaagttttaggtccttgttttcccaaggaaatgttaaataagagactgattaaacaattttatagaagctctgggaatcagtcaaaaatttataagaacraagcaaatacccaactaagaaaaatccacattaaacatggcaggaaattttattgcatttttactcacccttgccccaccctgccccaaggcagcatggcagtctgggggatgtgatggcctgctgcccaatttccttctgcaaattggagagatttagaccatatttgcaatgttctaccctgtatgacagaagcctgggagattgacctctgcgttgcttaactaggagctcagacagctaaaagtggcacagtttggatttcaggctagaggaagataggagaagaagcaggcatggcttgtgaaaatcacaagggttttatagacccacagatatctggggcaagagatctttgagcaatacaatagaacaggtgagaccccaagaagaagcaaaggcgagactattagagaaattgagacattaaccagctgtgtatatgagggaatcag

SEQ ID NO: 463946 - DNA, 617 bp, Homo sapiens
aaggtaaggtttggtcttgtttgctaggttgtttgtttactgccacaaaagatcccacagaaagggaaatattgataatgcaggagaaaaaggcgatgatcataaaagccacggcacagacacaggggttgccttggattagatcagagacattttcagagggacaacagaaactattgtcacagaggtagaaagcatttcagatttaacgttggaaacaaaaactctctgggttgtcgtcttctccttcttcaatgaagtattagacaaaaccattaacctagacgatagtgtgattgcagaaggggatgtgaggtttaagagaagaaggaatgaagaggccttttgcagggagtaggaaagtcaaygctttaggaaaatgtaggaggatggctgtgccgtgatgagcacctatgtgaaatgtgtggtcctgaatttacagtgaaatgggtcagcacagctctgacattttcccctagctactttcacctcagaagacgcttcagtcatttccattaggtaactacctaaggactcagtcaaggacgcaaacataagcacagaccatggaaggcaagtggggcaaagtaggaacagaagactgaagggagtggtgg

SEQ ID NO: 463947 - DNA, 617 bp, Homo sapiens
aaggtaaggtttggtcttgtttgctaggttgtttgtttactgccacaaaagatcccacagaaagggaaatattgataatgcaggagaaaaaggcgatgatcataaaagccacggcacagacacaggggttgccttggattagatcagagacattttcagagggacaacagaaactattgtcacagaggtagaaagcatttcagatttaacgttggaaacaaaaactctctgggttgtcgtcttctccttcttcaatgaagtattagacaaaaccattaacctagacgatagtgtgattgcagaaggggatgtgaggtttaagagaagaaggaatgaagaggccttttgcagggagtaggaaagtcaatgctttaggaaaatgtaggaggatggctgtgccgtgatgagcacctatgtgaaatgtgtggtcctgaatttacagtgaaatgggtcagcacagctctgacattttcccctagctactttcacctcagaagacgyttcagtcatttccattaggtaactacctaaggactcagtcaaggacgcaaacataagcacagaccatggaaggcaagtggggcaaagtaggaacagaagactgaagggagtggtgg

SEQ ID NO: 463948 - DNA, 570 bp, Homo sapiens
tgaatttttcttcttgggtaaatgaaaatggaaataactagctaaactgcttcttttaatggaatttaataatataaaattaaactaatagaagttaaaataaatttatgagagttatgaaagtacttccaagagcatacaaaatagctagagttcttacttatttattgttatttattacagcattcagaataaagagaaacaaatgattgatattgtctttgttaggattcattcattgartgcccactatgtacctggtatggtattttcaagctgctctattcagaattattattgaggtaactaattatattttcctggttagagtatcttctggactagattaatgtgaatattattacactactttaaaccttgctgaaagctttttgtttgtttgtttccatttataatgtctaaggaaactggataaaatgaaaaaagtttaatcacttttttccattgtaaaatgagtggcttcttgaaagtttttttggttaaaggagatgatgatatgaccacgtattagaatattatgcaaaaatttagaactatgctatgaaagaa

SEQ ID NO: 463949 - DNA, 570 bp, Homo sapiens
tgaatttttcttcttgggtaaatgaaaatggaaataactagctaaactgcttcttttaatggaatttaataatataaaattaaactaatagaagttaaaataaatttatgagagttatgaaagtacttccaagagcatacaaaatagctagagttcttacttatttattgttatttattacagcattcagaataaagagaaacaaatgattgatattgtctttgttaggattcattcattgaatgcccactatgtacctggtatggtattttcaagctgctctattcagaattattattgaggtaactaattatattttcctggttagagtatcttctggactagattaatgtgaatattattacactactttaaaccttgctgaaagctttttgtttgtttgtttccatttataatgtctaaggaaactggataaaatgaaaaaagtttaatcacttttttcyattgtaaaatgagtggcttcttgaaagtttttttggttaaaggagatgatgatatgaccacgtattagaatattatgcaaaaatttagaactatgctatgaaagaa

SEQ ID NO: 463950 - DNA, 622 bp, Homo sapiens
ttctctctgcctctctgttacacataacttagtttttgttgaatgtttatatatttaccttgtttctccaaaatatatgaggcatgtaaatacaggtgttaaaaatgcaacaatatactaacaatagcaaagactcatttactgctatctatcttctatgtattgctttaagtactttacatatagtatgtcatttaacttaattattaataataaccctatgaaasagttattaataaatccccattttacagacaaggaacctgaagcacatggctaaataacttgctaagagcatacatccaataaatggcagaatccaagcaaccttattttgcagcctgagcccacaaacagttcactgtggtgtttcttgaaagtaaaattagtggagtgacaacagcgaattggccccagtcttcactccctccaacagaaagattaactagcaactatccacagacaaaaatatgttattgaaactccacagtgtaggaataagcctgagtcaatgcttttcttcatttccatggaactaaataaaattccccattgaaagctgaaagaaacagtcttgctttgaccatgtcatccttccctcttcctcaagttgccacagcac

SEQ ID NO: 463951 - DNA, 554 bp, Homo sapiens
ctaaataacttgctaagagcatacatccaataaatggcagaatccaagcaaccttattttgcagcctgagcccrcaaacagttcactgtggtgtttcttgaaagtaaaattagtggagtgacaacagcgaattggccccagtcttcactccctccaacagaaagattaactagcaactatccacagacaaaaatatgttattgaaactccacagtgtaggaataagcctgagtcaatgcttttcttcatttccatggaactaaataaaattccccattgaaagctgaaagaaacagtcttgctttgaccatgtcatccttccctcttcctcaagttgccacagcaccacacaggattccccagggctcatggtttctacagtcaaaaaagagaggtgaggaggtagacatctaacttctctgacacttcccaggaagcctacttcactcccacctcacaggaaacaggaaacaggaggatatggcacagccagatcacctggggtcacaacgaaacaaagcaaggagggtaaaacccacggagaccagtgggta

SEQ ID NO: 463952 - DNA, 568 bp, Homo sapiens
aggtgaggaggtagacatctaacttctctgacacttcccaggaagcctacttcactcccacctcacaggaaacaggaaacaggaggatatggcacagccagatcacctggggtcacaacgaaacaaagcaaggagggtaaaacccacggagaccagtgggtagatcttgatgaaagctcagtgtacctgccagcagtaccgtgatcagagatatcaggtaatagcataggtcacctgcaaagtcaagctggtcactcccagaagaggtgggaaggactactaggcttgaatccctcgatagccagcctccatgtctagcttttgaccctacccctgggagctcctcagggamtgagaaaaccctttccctacccactggtggtgaatttccacaacaagtagacactagatctgccataaactgaagcttaatgtttcacacagccccaaagcctatcccctagaccctacatagtgagaaagacaatcactgcagcaaattttgacaataagcaggtattagttttgccacaatcaggaatataatatactgagtatagcgtttggt

SEQ ID NO: 463953 - DNA, 568 bp, Homo sapiens
aggtgaggaggtagacatctaacttctctgacacttcccaggaagcctacttcactcccacctcacaggaaacaggaaacaggaggatatggcacagccagatcacctggggtcacaacgaaacaaagcaaggagggtaaaacccacggagaccagtgggtagatcttgatgaaagctcagtgtacctgccagcagtaccgtgatcagagatatcaggtaatagcataggtcacctgcaaagtcaagctggtcactcccagaagaggtgggaaggactactaggcttgaatccctcgatagccagcctccatgtctagcttttgaccctacccctgggagctcctcagggaatgagaaaaccctttccctacccactggyggtgaatttccacaacaagtagacactagatctgccataaactgaagcttaatgtttcacacagccccaaagcctatcccctagaccctacatagtgagaaagacaatcactgcagcaaattttgacaataagcaggtattagttttgccacaatcaggaatataatatactgagtatagcgtttggt

SEQ ID NO: 463954 - DNA, 568 bp, Homo sapiens
aggtgaggaggtagacatctaacttctctgacacttcccaggaagcctacttcactcccacctcacaggaaacaggaaacaggaggatatggcacagccagatcacctggggtcacaacgaaacaaagcaaggagggtaaaacccacggagaccagtgggtagatcttgatgaaagctcagtgtacctgccagcagtaccgtgatcagagatatcaggtaatagcataggtcacctgcaaagtcaagctggtcactcccagaagaggtgggaaggactactaggcttgaatccctcgatagccagcctccatgtctagcttttgaccctacccctgggagctcctcagggaatgagaaaaccctttccctacccactggtggtgaatttccacaacaagtagacactagatctgccataaactgaagcttaatgtttcacacagccccaaagcctatcccctagaccctacatagygagaaagacaatcactgcagcaaattttgacaataagcaggtattagttttgccacaatcaggaatataatatactgagtatagcgtttggt

SEQ ID NO: 463955 - DNA, 627 bp, Homo sapiens
taagaaaattcatcattattaggtctctcttacaggaattactaaaagaaattctttaagctaaaaaaaaaaatgcttctaactagtaacataacatttagaaaagcacaaaacctaatggtatacataataaatagcaatattcagaataccctaggactgtaatcatggtatgtaacataattttatccctagtgtaatggttaaaggatggaattattaataacaactatagctaaaataaattgtcaggagatatatattataaaatgttaatttggacatcaaaagcataaaatttggaagaggggagtaaaagtgcagaattgttacatgtaatcaaakttaagctgttatcagtttgaagtagactgttataagtgtaagatattctaggaaagtctcatggtaaccaaaaagtgaaaaaacattcaaaacataccactaaggaaaccatacaccatagcaaactataaaggaaaacaacaagacaggaagaaagaaagaaagtaactacaaaacaaccagaaaacaacaaaatggcaatagtaaatctttatgcaacagtaaccttgaatgaaaagagattaaattctctaatcaaaagacatagagtgatgaatgaac

SEQ ID NO: 463956 - DNA, 627 bp, Homo sapiens
taagaaaattcatcattattaggtctctcttacaggaattactaaaagaaattctttaagctaaaaaaaaaaatgcttctaactagtaacataacatttagaaaagcacaaaacctaatggtatacataataaatagcaatattcagaataccctaggactgtaatcatggtatgtaacataattttatccctagtgtaatggttaaaggatggaattattaataacaactatagctaaaataaattgtcaggagatatatattataaaatgttaatttggacatcaaaagcataaaatttggaagaggggagtaaaagtgcagaattgttacatgtaatcaaagttaagctgttatcagtttgaagtagactgttataagtgtaagatattctaggaaagtctcatggtaaccaaaaagtgaaaaaacattcaaaacataccactaaggaaaccatacaccatagcaaactataaaggaaaacaacaagacaggaagaaagaaakaaagtaactacaaaacaaccagaaaacaacaaaatggcaatagtaaatctttatgcaacagtaaccttgaatgaaaagagattaaattctctaatcaaaagacatagagtgatgaatgaac

SEQ ID NO: 463957 - DNA, 594 bp, Homo sapiens
ttgagcaacatttcagactaactggacctggcagacatgtacaaaacataccaaaccaacaacaaccaaatacacattcttgtcaagagcacacagaacattttccagaataaaccatatattaggtcacaaggcaagtctaagcaaatttaagaagattgaaatcatatctggtatttttttctgatcacaatgggttaagactaaaaatctgtaacagtaagactttcagaaaactcaatgaaattaaacatgctcctgaatagccagttgatcartgaataaaagggaaattaaaaaatgtcttgagacaaatgaaaatggaaacacaacataccaaaatttaggaatgcagcaagagaagttctgaggggtgagtctgtagcaataagtgcctatatcaaaaagaaaaaatatttcaaataaataatgtcacaccttaagaaaacataaaaagaacaaactaagcccaatgttagcaaaagaaaataaataagaattatcacagaaataaatgaaatagaaaccagaaaaatgatttaaaaaatcaataaaactataaaactaagagtggttatttgaaaaattaaacaa

SEQ ID NO: 463958 - DNA, 577 bp, Homo sapiens
gacttatgagggcctggaccaatggctgaggctgccctgaggacaaggatgggtaaaaccaggagtcaaccagtttaagaattggctgccagatcgaggcaaaaaaaaaaattcaaaaaaaaaaaattcaagtgagacttcaagatgctgcaggaagcatggtggtatgctagtcatgatctggcaaatrgatgggaggaaaattaagacagaaggggttgatagaggaggaggttcagggaggtaagagactgaataaacaaatggacaatggccaaatcatatatgaaggctgtacaatctgtagcctcctgcccaggaaactaaccccttatctgcaataaccagcccaggaagacagtctgctgtaagttagacttgtaggaaatcagattgctatctctagtaacaatccaggaagctaaacaataatttctataacaatcggccccaaatggccgggacttgattaatgaccaacagcttccttaatttttgttgctatttccaattcaggatcaaccagaaaaagtcaaatatgaccctctaaccaattacataggatgtcacttctcgt

SEQ ID NO: 463959 - DNA, 577 bp, Homo sapiens
gacttatgagggcctggaccaatggctgaggctgccctgaggacaaggatgggtaaaaccaggagtcaaccagtttaagaattggctgccagatcgaggcaaaaaaaaaaattcaaaaaaaaaaaattcaagtgagacttcaagatgctgcaggaagcatggtggtatgctagtcatgatctggcaaatagatgggaggaaaattaagacagaaggggttgatagaggaggagrttcagggaggtaagagactgaataaacaaatggacaatggccaaatcatatatgaaggctgtacaatctgtagcctcctgcccaggaaactaaccccttatctgcaataaccagcccaggaagacagtctgctgtaagttagacttgtaggaaatcagattgctatctctagtaacaatccaggaagctaaacaataatttctataacaatcggccccaaatggccgggacttgattaatgaccaacagcttccttaatttttgttgctatttccaattcaggatcaaccagaaaaagtcaaatatgaccctctaaccaattacataggatgtcacttctcgt

SEQ ID NO: 463960 - DNA, 577 bp, Homo sapiens
gacttatgagggcctggaccaatggctgaggctgccctgaggacaaggatgggtaaaaccaggagtcaaccagtttaagaattggctgccagatcgaggcaaaaaaaaaaattcaaaaaaaaaaaattcaagtgagacttcaagatgctgcaggaagcatggtggtatgctagtcatgatctggcaaatagatgggaggaaaattaagacagaaggggttgatagaggaggaggttcagggaggtaagagactgaataaacaaatggacaatggccaaatcatatatgaaggctgtacaatctgtagcctcctgcccaggaaactaaccccttatctgcaataaccagcccaggaagacagtmtgctgtaagttagacttgtaggaaatcagattgctatctctagtaacaatccaggaagctaaacaataatttctataacaatcggccccaaatggccgggacttgattaatgaccaacagcttccttaatttttgttgctatttccaattcaggatcaaccagaaaaagtcaaatatgaccctctaaccaattacataggatgtcacttctcgt

SEQ ID NO: 463961 - DNA, 577 bp, Homo sapiens
gacttatgagggcctggaccaatggctgaggctgccctgaggacaaggatgggtaaaaccaggagtcaaccagtttaagaattggctgccagatcgaggcaaaaaaaaaaattcaaaaaaaaaaaattcaagtgagacttcaagatgctgcaggaagcatggtggtatgctagtcatgatctggcaaatagatgggaggaaaattaagacagaaggggttgatagaggaggaggttcagggaggtaagagactgaataaacaaatggacaatggccaaatcatatatgaaggctgtacaatctgtagcctcctgcccaggaaactaaccccttatctgcaataaccagcccaggaagacagtctgctgtaagttagacttgtaggaaatcagattgctatctctagtaacaatccaggaagctaaacaataatttctrtaacaatcggccccaaatggccgggacttgattaatgaccaacagcttccttaatttttgttgctatttccaattcaggatcaaccagaaaaagtcaaatatgaccctctaaccaattacataggatgtcacttctcgt

SEQ ID NO: 463962 - DNA, 574 bp, Homo sapiens
ttgtgaccatggtaaattgccacaatcgtctcatgactctactgtaactccttgtgcagtctcttggtgctctgccgataggggatgaatgaaataattcaattcatatcttccccaagcttacagttagtaagtagtagaatgtagrtttaaattcagatcttcctaatttcaaagtccgtggttgttaactgcgttaggctagcttggaaatggagttgcttgctggcaggtaggtgtgagggtgaagtggatattaaatgtattgatttgaagtgcttaaaaaatggcaaggctagagtattgggaagtaaattcttaagttgctaaaaacattggcaagggatgagatggatgggtggaggtctgttagccaggcacaaaaggctcactccccaggaaatgattgaggaactccagaaacgttgcatccacctggagtaccctctgttggcagaatatgactttcagaaggattctgtcaaccttgatatcaacactgacctaaagcccacaggtgtcctcagaccctatcaggagaagagcttgtggaagatcaaatcaaattcaaatg

SEQ ID NO: 463963 - DNA, 574 bp, Homo sapiens
ttgtgaccatggtaaattgccacaatcgtctcatgactctactgtaactccttgtgcagtctcttggtgctctgccgataggggatgaatgaaataattcaattcatatcttccccaagcttacagttagtaagtagtagaatgtagatttaaattcagatcttcctaatttcaaagtccrtggttgttaactgcgttaggctagcttggaaatggagttgcttgctggcaggtaggtgtgagggtgaagtggatattaaatgtattgatttgaagtgcttaaaaaatggcaaggctagagtattgggaagtaaattcttaagttgctaaaaacattggcaagggatgagatggatgggtggaggtctgttagccaggcacaaaaggctcactccccaggaaatgattgaggaactccagaaacgttgcatccacctggagtaccctctgttggcagaatatgactttcagaaggattctgtcaaccttgatatcaacactgacctaaagcccacaggtgtcctcagaccctatcaggagaagagcttgtggaagatcaaatcaaattcaaatg

SEQ ID NO: 463964 - DNA, 574 bp, Homo sapiens
ttgtgaccatggtaaattgccacaatcgtctcatgactctactgtaactccttgtgcagtctcttggtgctctgccgataggggatgaatgaaataattcaattcatatcttccccaagcttacagttagtaagtagtagaatgtagatttaaattcagatcttcctaatttcaaagtccgtggttgttaactgcgttaggctagcttggaaatggakttgcttgctggcaggtaggtgtgagggtgaagtggatattaaatgtattgatttgaagtgcttaaaaaatggcaaggctagagtattgggaagtaaattcttaagttgctaaaaacattggcaagggatgagatggatgggtggaggtctgttagccaggcacaaaaggctcactccccaggaaatgattgaggaactccagaaacgttgcatccacctggagtaccctctgttggcagaatatgactttcagaaggattctgtcaaccttgatatcaacactgacctaaagcccacaggtgtcctcagaccctatcaggagaagagcttgtggaagatcaaatcaaattcaaatg

SEQ ID NO: 463965 - DNA, 639 bp, Homo sapiens
caagttcaacttgtataccaagagacccagcagccagatttttctctttgcagaaagtgacttaagacctcacaaagtgaagtccctgggacacatgccatggccctggggagcacagcctctattrggccaggaaataaaaccaccaggaagggtctagcagagttgcactaccctggagcctgtcttgtggcaaacgatgccataggaagttttcacttaactaatataattttgagaggctcatactagatttccagactcattatattttcctaaccatctgatagagccaggtgctgtttttattatcatcatccccattgtacgtgaaaagaaacaggacaagagaggttgtctaaagctgccttctatgtcagttttcctttgtgactgttgcttgccaaccaacagtttgctggtggggtcactggtgggcaggagctgggttctttcactcctttatatcccctcttggcaccttgtaatattaggaacagcatcatgggctatgattctcaatgatatttgcaatttaacaagatgccctcctgtgcctgctggagatgctcccctatggcgaaaccagggacctcttgtgtgctggtactggtaggatcacatgttgtgctccagctg

SEQ ID NO: 463966 - DNA, 639 bp, Homo sapiens
caagttcaacttgtataccaagagacccagcagccagatttttctctttgcagaaagtgacttaagacctcacaaagtgaagtccctgggacacatgccatggccctggggagcacagcctctattaggccaggaaataaaaccaccaggaagggtctagcagagttgcactaccctggagcctgtcttgtggcaaacgatgccataggaagttttcacttractaatataattttgagaggctcatactagatttccagactcattatattttcctaaccatctgatagagccaggtgctgtttttattatcatcatccccattgtacgtgaaaagaaacaggacaagagaggttgtctaaagctgccttctatgtcagttttcctttgtgactgttgcttgccaaccaacagtttgctggtggggtcactggtgggcaggagctgggttctttcactcctttatatcccctcttggcaccttgtaatattaggaacagcatcatgggctatgattctcaatgatatttgcaatttaacaagatgccctcctgtgcctgctggagatgctcccctatggcgaaaccagggacctcttgtgtgctggtactggtaggatcacatgttgtgctccagctg

SEQ ID NO: 463967 - DNA, 598 bp, Homo sapiens
  misc_feature (1)...(598): n = A,T,C or G
nnnnnnnnnnnnnnnnnnnnnntaatggtgttcccttaaaatagcttcctccaaaggaaggaataatttgtggccataggatgggagcaggggtggggctatacaatccatatggagcctgaccccatctcggtctccttgtctccctagcacggtgttgtaatcctctaagccaaataatcctagcaagatgctgtaccctacacaccctcagacacttcattccagactatggttttgtgagatttcatgctgctttaattatcttattccttgttaactctgggtctccctgccagcctgccttagaacttttgtctctttccactgtcacactttgtctcaagctacatatcccagcctcagacctactgcctgcactttcaatctgttttctcccttctcctgatgtsttcttgagatctcggggttattggcttttttccccaggactacagctctcaaccagtttttacaggaccagctggtgacctcacttgctacttgactgctgcagctcatttaaatgcaaccaacggccttggagttttaataagaaacttggagctcctagttctgttgcgacttggtggcagct

SEQ ID NO: 463968 - DNA, 291 bp, Homo sapiens
gaaggcctcttgggctgccatagcctccacagtctcttcctcccctgaatgcttttcacccctgctgggctcaccaagcacaaccccatgctttccttgggagatgagacactacagctcctcagctctcatcccartcaatcagactcactccaggcttaccacgtgtgtgccctgcacatgttacctgacctctctgggcctccgtttctcatttataaaatggggataactgcactgctttgccagcttgttgtagacactagaaataaaacatgaaaggcaggtacc

SEQ ID NO: 463969 - DNA, 557 bp, Homo sapiens
tgtactcccagctggggtgctcatggatgacctgcatcatttctttagtaacataaaggaggcctgtgaatcaggaagctacagatgttccaaaatgtccctaacctcttgagggtgacrtcatcacagctcccagacatgtttctccttacttgggccctggccctgacagagggggacctagggctgacctggatggcaattgtggaaataaatggaatttattaaaactctctattatacgctgttcttaaagaaatcaaacactagctttaaagaaatgtagttttattttttttctacggacaaacagtataatctgaaacaagctattggcaagtaggggctttagagcttcctttggtgccacaaagaagaatgaagtggaattagcacatcaattggttacaggtgaaaaatgggtctaaagtatttaaaagctgtttgttctcctaaggcagttaagcattcccctcctccctgccttccttttttttttcccttctgagctcttcctgcagttagtaaagagggcaagctctggcctggcctctggc

SEQ ID NO: 463970 - DNA, 552 bp, Homo sapiens
ataatcagcaaacgggaataattttacttcttcttttccaatttggataacttttatttctttctcctgctttattgttctggttaggacttccagtactatgttgaataggagtggttaaartgggcatcattgtcttgttacagttctttgagggaacgctttcaactttttccacttcagtatgatgttggctgtgggtttgtagtatatggcctttactactgtgaggtatattccttttaggcctagtttgttaagggtttttataatgcagggatgctgaattgtatcaaatgctttttctgtacctatttagataatcacgatttttgtccttcattctgtttatgtaatgtatcccatttattgatttgtgtatgttgcatccttgtatccctggtataaaactcactcaaccatggtaattatctttatgatatgctagtagatttggtttgttagtattttgttgaggattttggagtctgtgttcatcagggatattggtctgtacttttctgtttttgttgtgtccttgcctggtttggt

SEQ ID NO: 463971 - DNA, 580 bp, Homo sapiens
ttcatccccatttagtgaaggtagttatgcaggcaattacctaaccataaatacagtgcatggtgtaaatgaaaattagtgaagaattagtttagcttggcccattcaggaaatccttcctaaaggaagtaagattgaaggatgagtgagtttccattgtagagaaaagggctatcaagacattttaggctaaaggaacagcatagacacaggcatggaggtgtgccgttccattgtattttcagattggagcagctagagtaaaaawtgagttgagcagaagaaagaaagccattattcttcccaggagccttcaaaggtttagggacttcaaagccttctttcaatgaagtaatgaagaatctcaattgccttttcaaggcaataagagaggaggaaatattttggtgtagggaacccttcggtggatttcagatcatatcaccttgcactttcttgtctgcatgtgcctacactccttgtcatgaaggcctttctgtccatccatcaccaattacagagccattagaactttcatctaagaattccaatagtacattaacatcaacacaatcatctt

SEQ ID NO: 463972 - DNA, 465 bp, Homo sapiens
ttaggttggtgcaaagtaattgtggtttttgccattgaaagtaatggtagaggagatggcatttcaaagacctgaacctgagagagtctggcatgtgtgggtttctggagtggggagtgtggctgaaatgtgagatgagaaggagaaatagggctagggtggccccttgaaaggtctcacaggccactagaaacaaacttaacaacacaaatttacatatttatggttcaaaattccttcacagaatatactgggagatcatgaatatcaaaatgatattttgcaaccttcaaatcccctcactcaaggcacaggcctayagagaacccccaaagcaaagtgaaaaacaaagggagataactattcattgcaaacaaatggggtttatgatgtcttttaggaaatcagccaaaaccaaaaaatgctatgggttgatattgcttcgatactaaaacttaagcaaca

SEQ ID NO: 463973 - DNA, 600 bp, Homo sapiens
attaggttggtgcaaagtaattgtggtttttgccattgaaagtaatggtagaggagatggcatttcaaagacctgaacctgagagagtctggcatgtgtgggtttctggagtggggagtgtggctgaaatgtgagatgagaaggagaaatagggctagggtggccccttgaaaggtctcacaggccactagaaacaaacttaacaacacaaatttacatatttatggttcaaaattccttcacagaatatactgggagatcatgaatatcaaaatgatattttgcaaccttcaaatcccctcactcaaggcacaggcctatagagaacccccaaagcaaagtgaaaaacaaagggagataactattcattgcaaacaaatggggtttatgatgtcttttargaaatcagccaaaaccaaaaaatgctatgggttgatattgcttcgatactaaaacttaagcaacatttaactgcattttgtggtgagggtaagggtttcagaggaaaaattgggccatatataccctcaggtgccaagttcaaaatatagctttcagcaaaaggctcaagtttaacttagttggcagcctggggatcac

SEQ ID NO: 463974 - DNA, 600 bp, Homo sapiens
attaggttggtgcaaagtaattgtggtttttgccattgaaagtaatggtagaggagatggcatttcaaagacctgaacctgagagagtctggcatgtgtgggtttctggagtggggagtgtggctgaaatgtgagatgagaaggagaaatagggctagggtggccccttgaaaggtctcacaggccactagaaacaaacttaacaacacaaatttacatatttatggttcaaaattccttcacagaatatactgggagatcatgaatatcaaaatgatattttgcaaccttcaaatcccctcactcaaggcacaggcctatagagaacccccaaagcaaagtgaaaaacaaagggagataactattcattgcaaacaaatggggtttatgatgtcttttaggaaatcagccaaaaccaaaaaatgctatgggttgatattgcttcgatactaaaacttaagcaacatttaactgcattttgtggtgagggtaarggtttcagaggaaaaattgggccatatataccctcaggtgccaagttcaaaatatagctttcagcaaaaggctcaagtttaacttagttggcagcctggggatcac

SEQ ID NO: 463975 - DNA, 471 bp, Homo sapiens
ggttggttcttttctgagggttgttggggaaggatctgtaccagacctctctccttggcttgtagatggctgtsttcatgttcacatggtgtcttccctgtatcttcacattgtctcaccactgtgcatctctccaggctcaaattcccccattttataaggacatcagtcatactggattaaccctactcatgaactcactttaacttgatgtattagtccgttcttacgctgctaataaagacatacctgagactgggtaatttataaagaaaaagaggcttaatggactcccagttccacatggctggggaagcctcacaatcatggtagaaggcaaaggaggaagggaaaaggcatgtcctacatggcagcaggtaagagagtgtgtgcagggaaactgccttttataaaaccatcagctctcatgagacttattcactatcacgagaacatcacaggaaaaaccca

SEQ ID NO: 463976 - DNA, 578 bp, Homo sapiens
tgaccatccttatacccttccctgctttgtgtatctacattgcagttactgccatttgacccatatatagatttttttgtcttctctcactagaatatgaggtttaggaaggcaggtatcttcaaccgtttggttcactgctgcatctgcagcaccaaagcaggacctgaccacacaaaccaygtcctcaataaatatatattgaataaatgaatattttgttaattttaaaaaatgaaaccaatccttctttcaagatgagaaaccactcttatttctctcttgatttttttctctctctgagcagtgaaagttatataatcatattagcttatcccataaaaatgtgattagctaacaaacatgctcttttgtacatttttgtctaatttgcctaacattcttcctgctgtcctattgtaatccttgctagcgatgcttggcttatagttggcactgacacatgtaagctcatgtcccagctctgctgccagtggtatgatactgagcaagtgataacattgtcagttacctcatctacaataaatggggcaatggcatagaccacactgtattgt

SEQ ID NO: 463977 - DNA, 520 bp, Homo sapiens
ccagcctacactggcagagtgggtggagcagggcagcaggactctcatctccgccttcctgggaggtctgcgcattttgctttggtttctggctagttacagtgctaggtcctaggcactaatcattggtagctgttaggggtgggtactgttttgccagtcggcttaagagctatgactcttggaatggcagaggatcccttgctgtatgtcttacgatcctctaggtgctaaactcagtttccccactagctgctggtcttgggaaagtcaactctgagatgtatgtttctcatctgtaaaagtaaacaagagtctggcagcgttggcttaaggacwaatggccatgggaaaatctcctgatagggttgcttagcaatgagtaaacaccagtaatgtcagttcctctctttctttcccctctcctcctcaatggttggtggctgtgtcattgtcaaagtgcccatgtagcacttggatatacaaatgaagtagcatcattttatttccctgtaataat

SEQ ID NO: 463978 - DNA, 550 bp, Homo sapiens
tcctgctttatgtttgttgccagctcatctactgaaacacaattgtggtttcagtaacacagagtgataatatgctcagagtttgagggctacgcgagagcttcccaagcctgggggtccttatttcatattcaagaaaataaaagcagtggcagtaaggaagttaattataactgtaataacaatgtgttataattagctatgaataataattagctatttttaatacttaggtagtaccaattaagtgcaggcactttcttaagagcttcctaaatatgaattcattattatgtattgctcatgaagactgcagtggccagytggcctcaatgaaccacactttctgatattcacacccttggatggtccctcccacattgatcctagggttggcttgcaatttgccttcaccagtgggacattgacaagtgtaatataagcacaataattatcttttgggagtcagctgctatgctgtaaagaagcttaagctagactcctgaatgatgagaggccacgtgcagagaaaccctatgcaatgaaaggc

SEQ ID NO: 463979 - DNA, 588 bp, Homo sapiens
ctcaaatatatcatttgttttcttaataacctattatgcatctgtcgctcatctaaatttggcattaatctgcttgttatgtcaaagacaggggcctagtcagactctgaggtcaggttaacttggcctcaaatcctctctccctcctgcctccttttggcctcagtttccttctttttggattgggtataagaattcccacttaaagccaccctaaggaaggcaggaaaagcacaagtgctcaataaatgttcattcttttctctcttctttcatggattgaataactacattcaatttcagggcagttttcatcagagggcagttcatgggcatcttgtctggacctctcctgttttctaggatgctgatgctgacaagaattttgcaccaagctctcctaatgctctctacccccctgactccctgatcctatgcagtgggcggctgagcctgtgatcctggatgcagggcccctcgtcgacagagcattacaaaagactctcatgtacwttatctcaattactctttccagcaggcccgcgaggcaggtgtgcttagcctcattttataggcgagatacccaag

SEQ ID NO: 463980 - DNA, 554 bp, Homo sapiens
atgtgtcttctcactggtgaatttagtgyattacatttatagtgtttactgatatttttaaatttttatctattatcttagtacatatttttatttgttccatgtttttcttatcttcatctgactaaagtttcttctctttctgccattctgttttcttttctatttgttttctttcatttgttatcttttaatagttacccacaagagtgaccactgtcctgacttctaataccagcggtacttatttttgaatgttttaataatggaataatttagtatgcactctatggtgtcacctactttccttcaatattatgtttgtgagattcatcaatattgttgcaaatagttttttttgctcattcagatgactttattctattgtgtgaataggttaccatttatttatccattctactttttatgggcatctggacagtttccaatttggggctattacaaaaagttttgctataagcattttgtatgtgtgttttggtgcattaaactgtgcacttatattgggatatatacataagtactgaattgct

SEQ ID NO: 463981 - DNA, 543 bp, Homo sapiens
ctgctcaaaatgcccagttgtgaatagatttcttcatttagtgtttaaatatcttcattttagatatttaaatatctttagattaaatatcctcatttggtgcttgatcctatcctgttagataggtattattttatccattttacagatgaagaaactaaggctaggagacaacaactggctagtggcactttctgatctaaagctgtgttttttccactccagcacattgcctccatttgcactacagaatttagatctyctatttggactgggccagcacgggggggaacgtggcgcagagcttctaaaagctttgcagagagcacagatctggatgtcaccccgtgggagcagtctgagccaacataggacatgttcctttctgaggtcataactcacaggctgacttagatagtgaaaagtgtttccctaagacaggcaatgtgttttcaaaatgaattgccatctccctgtctgttctgcgtggtattttataactatctatctttgataacaaaatgctacaattaaggtggaatc

SEQ ID NO: 463982 - DNA, 571 bp, Homo sapiens
catgttgcccaggataggataatgatttttaatctcatgagattattttgagaatcaaatgagaaaatatgtctaatcatattctgaaatagtaatctatttttaattgcttatttgcttattcactcaatcaacaacaatttcctattaaagattttattgttaagtgatatggatgattataaataagaatcagacacagaacttacactaaagacatgttcattctccagttacgccctgctcccctagaagaatatgaaacaaaaattataagtgctgctagcacatttatgaggttgarcttccaagcagacaccttttagatggagccaccagcaaaagatccatgatggatctgacatttgagaagatgcttggcaaaaagggaggagatgacggatgaagatagttcagatggaaggcccagtgtgagcaaagccacagcagcagcaaagcatgaggaaggtgaagggaacctagactatgctgtgggggatcattgcagagttgtggttgataaggctgcaaaaatgggctgggactcatttatggaggaatttggactttt

SEQ ID NO: 463983 - DNA, 571 bp, Homo sapiens
catgttgcccaggataggataatgatttttaatctcatgagattattttgagaatcaaatgagaaaatatgtctaatcatattctgaaatagtaatctatttttaattgcttatttgcttattcactcaatcaacaacaatttcctattaaagattttattgttaagtgatatggatgattataaataagaatcagacacagaacttacactaaagacatgttcattctccagttacgccctgctcccctagaagaatatgaaacaaaaattataagtgctgctagcacatttatgaggttgagcttccaagcagacaccttttagatggagccaccagcaaaagatccatgatggatctgacatttgagaagatgcttggcaaaaagggaggagatgayggatgaagatagttcagatggaaggcccagtgtgagcaaagccacagcagcagcaaagcatgaggaaggtgaagggaacctagactatgctgtgggggatcattgcagagttgtggttgataaggctgcaaaaatgggctgggactcatttatggaggaatttggactttt

SEQ ID NO: 463984 - DNA, 466 bp, Homo sapiens
gatcaggggaaggcagaccagtttttctgtggggcagtgtttcccagcctaggtactcttgatattttgggccagacaattttttgtcctgggcactgtaggatgtgtggcagcatccctggcctttacgcactaggtgccagtagcacaactccccaagttgtgataacataaatatctctgaacattgccaaatatcccctgagggcaaaatcacccccagtggaggacactrttgtagcggaggttgtctcctcatgagaaaagctgtgggaggagtgggggaacttgagctacacttcccagggggctctgtggatctgtttcaggaactttgactacggatgagaaaggatggaagttggtagaaagaggtggcctccagatgtgccatcctgaactggccccagggtgtccagatagaataccctccattgtcctccatatcttcagtgaaagcaaaatg

SEQ ID NO: 463985 - DNA, 580 bp, Homo sapiens
accctccattgtcctccatatcttcagtgaaagcaaaatgaaatgctagtcacgctggaatattgtggagcaaacagaaagtgtggttttcaaagtagggtagaactgaggccaagaggaccaaggagtcaaaatgaaaagaggtaggagaaagagagacacagaaatcacaggctccggggacttcccaggacccagaatccacatttacttctgtcaagtttaccaaaatctctgagaaaagggagwtgataacaatttggtgcctttaaaaaaatctccgcatttaaatcagaaacacattttcttaagcatacaagtcattcattaaaatttctcctaactttgagatcagtaatgatactactggacagtcctgctaatgagagaatctaaatattcccaaggatattgagacagctatacaaccttgggcaagttagttactttctctgggcctccatttcttcatcttcattaattccatctaaatggaattaataatttccatctcatatccctgctatgaaaattaaataagacatatgaaatgcctgccacatagtagccattaaattat

SEQ ID NO: 463986 - DNA, 580 bp, Homo sapiens
accctccattgtcctccatatcttcagtgaaagcaaaatgaaatgctagtcacgctggaatattgtggagcaaacagaaagtgtggttttcaaagtagggtagaactgaggccaagaggaccaaggagtcaaaatgaaaagaggtaggagaaagagagacacagaaatcacaggctccggggacttcccaggacccagaatccacatttacttctgtcaagtttaccaaaatctctgagaaaagggagttgataacaatttggtgcctttaaaaaaatctccgcatttaaatcagaaacacattttcytaagcatacaagtcattcattaaaatttctcctaactttgagatcagtaatgatactactggacagtcctgctaatgagagaatctaaatattcccaaggatattgagacagctatacaaccttgggcaagttagttactttctctgggcctccatttcttcatcttcattaattccatctaaatggaattaataatttccatctcatatccctgctatgaaaattaaataagacatatgaaatgcctgccacatagtagccattaaattat

SEQ ID NO: 463987 - DNA, 580 bp, Homo sapiens
accctccattgtcctccatatcttcagtgaaagcaaaatgaaatgctagtcacgctggaatattgtggagcaaacagaaagtgtggttttcaaagtagggtagaactgaggccaagaggaccaaggagtcaaaatgaaaagaggtaggagaaagagagacacagaaatcacaggctccggggacttcccaggacccagaatccacatttacttctgtcaagtttaccaaaatctctgagaaaagggagttgataacaatttggtgcctttaaaaaaatctccgcatttaaatcagaaacacattttcttaagcatacaagtcattcattaaaatttctcctaactttgagatcagtaatgatactactggacagtcctgctaatgagagaatctaaatattcccaaggatattgagacagctatacaaccttgggcaagttagttactttctctgggcctccatttcttcatcttcattaattccatctaaatggaattaataatttccatctcatatccctgctatgaaaattaaataagacrtatgaaatgcctgccacatagtagccattaaattat

SEQ ID NO: 463988 - DNA, 494 bp, Homo sapiens
tcaaattggtctatgtgtaaatcacagctctaatgcttagaagctgaataattcagggtaaatcatctcatcggtttgatccttagtttccctagctgtaaaatgagaataataatacctcttctataagagttaatgtagataaaataagatcctgaatataaaatgtactcagcttatagtagacacttaataaatgacagttctcctgagtggtgctgaacagttaacttaaccyctactttcttatctgtaaaagagcatcataagagtgctgtctcatagttttgggggaggataaaattagataatgtgttcaaaatcactgtggggaaggcaaaggactatagagatgctgggtcatttgattctaaaaatgactttatcttttgctatgggataatagagggaggtgatgtagtttcatatgtacattgtgttttacccattctattttcttgagatttccaagcttgcttcatgggttttttttt

SEQ ID NO: 463989 - DNA, 596 bp, Homo sapiens
aaagctgtcaccagtgctgctgtgtgattgttattgttattttttggtatttccattcccttgatggttgacaataatgagacaaaacaaatttataatatgccaattggcatggatctttctgatcagtcagagattttaaactttatttttaagtaatagcactctttttccctgcaaaataaaatttcacatgaaccctaacattgaaaacatattatatagttttacrttttaatggtacacatttattttataagttcatgtttaacatttgcttattataaaatcttaaaaatttgttgagaaaaacattttaaaacaatggtgatggaaggaagttataatcttcagcctaaaaatcagtggatctctattacatattttatacaaatttattttataagttcatgtttaacagttgcttattataaaatcttaaaaatgtgttatttgagaaaaacattttaaaacaatggtgatggaaggaagttataatcttcagcctcaaaatctgtgggtctctattacatattttatacaaataacacctttcattatgtgtgttgcttagaagtttttaatttcaagtttct

SEQ ID NO: 463990 - DNA, 593 bp, Homo sapiens
tttctaattccaaggtggtatggttctgtgggttatagttttcatcaaatttgaaaatttttgccatgattcattcatatatgttttctgccccatacactctcatctgtctttcttatagtccaattacagagakgctagcctgcttgataaagtcccacaggtcagtgatgctctttcttattttgttgttggcagtttattttctgtttcattttggtttctataactctatatttattaattttttgttctgcaatgtttaatctgctgttaagcctgtccagtgaattttaaatttcagttaatataattttcagctttaaatgtctcatttggtaccttttactatcttctactacccttctcattatcctcttaattctcctcaaatattggagcatatttacaataacacttttaatgttcttgtatgctgattccattatttctgtttcgttggtctttagaattaggaaggatttagtatctagcttaatccactcatgttgcagagcaagaaactgaaccttagagagagaaggggagtattcaataacaagataactcagataggcatttatgaatactgg

SEQ ID NO: 463991 - DNA, 635 bp, Homo sapiens
taacggtatattttaatgattgtatcctagctcttctaattctttcaaggctaaagcaaattaataccattactctcttcccaaacaattatcaaccttaggacactttaatcaccttctcaatataagcactatgaatgttcaatattttataatattttgctccttcctcaatttgacgttattttgttgaattaatgcttttgcttaactttttttcttgcatccacaactttctatctgtgattatcttccttctgcctgaagtacatgctttagaatttccttcagtgcattttatctggacaataaaatgtcccagtttttatttgtctgacaacatcttatttttctttcatttgtgaaargcatttttatgagacataaaatttcaggtagatatttaatctctttcagcaaaattatattcttgttacacaggagaaatcagcagtcagaactcagttgtgttttttttttttgtgggtgattggtttttcccctttgtctgtttttaaggtcttttaagatattctcttattctttaatgttcttcattttgcatggctaggcatagatttctgttttttatcctgcttgagaactttagggttcctggctttgcaaatttatct

SEQ ID NO: 463992 - DNA, 621 bp, Homo sapiens
attaaatgtataaatggggaaaattgacaagaaagtaatgaagtcagtattttgcagaaatatagtgaccaccatccttcaatgtagtcccataatgaaagcagcccctcattcacctaacatattctaaatcacatttaacaatttctggaacccaaactcactccataaaagaaggaagtgacccttcgttagtagtttgagcccatatctggcttacgccacatagccagcattgaaaaagagcagaccttgtgatttttcatggctaatatccttagtcatgtatctctcctgccctctcatatgctcctaatcaaaccattcctgatctctaacttgacagccattgatggcttggctttcacacccagtgctgctcccctggctctggaccttgtctttcttaattagcaacttactccatcctttgaattatgctgctttmtgatgctctctgaacacccaacatggtccagcccaacctctggacctacatgccagttcaggctcatacagccaacatgctgtttgacttaccctacttctgcagatgggactgggacaactgcatcttaaaagataggcacatctcaaacaggtatctaatgtgagtactgg

SEQ ID NO: 463993 - DNA, 586 bp, Homo sapiens
acaagtaatgctggaatttctccgttactcgctgatcatgtgccctgtgatcaccgctcaaatcttgcaggatctagatttggctccattaaaattatgtcccaatgatcacaatgtagcccctcatttattcagtgattatagatctggtgacattcattatttggaatctgtctaagaactctgagaagaatagaaaatatctaagcatctaaaatgccatcacaaaatccaggtatcatagctcattatactctcctttgagggcagccctggaaaccattattcagagactattggttcttattttacacataattctagcaaattagatgcagcactggtagaatgacaagtcagacagaccttgttttatatctttgttacatgatttacaggttastaaacctctctgaaccttaatgtcatctgtaatatgggagcagtgatatcagctcacagggtaactataagggttaagcactactgtctatgcacaagtgctatcacaccagagggacttggtacatgtttgaccacatgaaaaactcattgctagacacaaagatcgtgacagtagaaaaaa

SEQ ID NO: 463994 - DNA, 552 bp, Homo sapiens
ttctatttctgaattctcaattctgttccattgttctacgtgtctctctttgccaataccagatagtcttgattattatactgataattcttaaaactgatatactaatgcctcccttttatttttcaaaattgtttttaggtattctaactcctttgcctttctatatgcattttaggataatcttgtctgtatctgmagaagatcctactgggatttttataggaattttattaaacctgtgtatcattttgagataattgacatttttactgttaattttactgtgttgtgtcttccgatccataaacatggtatgtctctccacttatttagattttctttgatttaatcagaattttatagctttaagcttttaggccttatcatgctttgtaggatttaaatataaacacatatctatttttaagcaattataaatgatatatttttcaatttcagtatttgtatgttcattcctgatatacagaaatataattgatttttttgtacatttattttgtatcctacaatctttctgaaatcatttat

SEQ ID NO: 463995 - DNA, 563 bp, Homo sapiens
aacatatgatacaaatattgtttcatttgggatttgaacattatgaaaatgagacactgtatatagagttatgtaacttttttattcaaatatatttcatttttcctttcattttaatgttctatagtattccattgtatgtgtataccataattcatttatccattcgattgttgataagtattgaggtagatcctaatttggggcccttacaaataatactgccacagatattcttacagctcctgtgaatgtgtgcaggaatttttctagaagatatacttagaaggggaaaaaatgcaaattatagggaatgcaaattcataagaaaatgccaacttgttttccaaagtggtcataccactatgattatccatttcattctctctgctcatccatttcctcccttgtactgtaaaactttgagtgatcagtttaaaggattgttgcratacttactttgaaaaccaaatgagttaacatatgtaagatgcttagcataagacctgacacatacatgctaaaaagtactagttctttctataataaataccttctccctt

SEQ ID NO: 463996 - DNA, 627 bp, Homo sapiens
ttctgtagggttatttatttttaagtgctgaaattctcacacgttttgtggcatctttctttattttcttaatggtattcatcctccaaaacattcagcaaactggagagctcttcgattgaaccatgtagacttgtgatccccaattaggtttaacaacttagaaaaccacacaaagtaagctgcttacttattcttactggtttccattaaatagtctgaaggtgaatgggaacatttataaatttcctaaacctaaaaaaaaaaaaaagttatatctctaagtctcattcagacaagtttcttgtttaccttcatttgtttaaccaatgtgattttatcccgttattatcttgccatcaaaaatatttttttaattgtagcgaaaagcaattgacattaccctgatcagttgtttgacaatttgctctaatggaaatatatgtgtgtatttgtattatgaacctacatacgtgtgtgtacatatacacaaatacagatgcrtgactttgtgtattattttatataaaattatgatcacaaaaaattatacctgaatttatcctgaaatgaagtgacttcgtaggctcagaaacttaaaaagttttattatagtacgttttaccc

SEQ ID NO: 463997 - DNA, 577 bp, Homo sapiens
gttcaggatacaatatacagtgagatatgaggaatatgttctagtgttctataccactgatatggtcaggctttgtgtctccactaaacctcaccttgaattgtaatccccatgtgtcgagggagggaggtgactggaggtgtaggcagtttcctacatagtgttctcattatagtgaatgagttctcatgagttctgatggctttataaggggttctttccccttcactttctcttctctctcttgcctgccaccatgtaatatgtgcctcttccccttctgccatgattgtaagtttcctgaggcctcaccagccacgcggaactgcgagtcaattaagcttctttcctttattaattacctagtctcaggtatttctttatagcagtgtaaaaatgggctaatacaactaccataggatgactatagttaacaataatatatcatatagttttaaatagctagaagggagatattgaatattcccaacacaaagaaatgataaatgtttgatgatgaatatgctaattaccttkatcttatcactatatattttgtgtatcaaaacatcactat

SEQ ID NO: 463998 - DNA, 597 bp, Homo sapiens
gactatgttgagcagaaatctttcatgcagtaatcctgtccaacagagaatcatataccatacatcactcttgccacttcaccaagccattaagccttttaaatcttggagtgacagtgggactaaatttgaattcagataggtttgtcccctgcactttctgcctcattacatggccccttgttctaatttgactcagctctttgcatctcaatttccttattattaaaacagggctaggctgggcrcagtggctcacgcctgtaatcccagtactttgggaggctgaggtgggtggatcacttgaggtcaggagttcgataccaccctggccgatatgatgaaaccctgtctctactaaaaatacaaaaattatctgggtgtgctggtgcacgcctgtaattccagctactcaggaggctgagacaggagaatcgcttgaacctgggagacggaggttgcagtgagttgaaatcacgccactgcactccagactgggtgacagagcgagattccgtctaaaaaaaagataaataataattaaaaaaaaaaaaacagagctaataactctcatctcgtctacttcacagggtagtt

SEQ ID NO: 463999 - DNA, 579 bp, Homo sapiens
ttgtgtgacttgaggcagaaaaaccagctaagcctgctgggtttctaacatatagaacaataarataatttgtattttaagtcgttaagtttgtagtaatttgttacagcaacagtagaaaaccaatgcaataactcaagttaaaaactataatgtacaactaagatgacaaaaatgaaaaaagatggtgtgaaatcaccaatgagtataggcaatcttttccactaacaactttcctgtaactattagttggtgtgcagaataccagcataatgatggagcagaaacaaaaatagctttcaaatgaatcagagacttttaatttgattttgtgaaaaaagcttataagcaatcagacaggctgcttttctcctttgtgtttgttacctatgagtttcatatggtgcaaacattaattaggaagaatctgtaaccatgaaatgctatgtaattcaggaagacatcttttccatatggttaatgaaagacaaatccttcccatatcatttaacactcacaaaaagtatataacaaacaaaactgaaatttgaatcggagtttatttgaacagaaaagcac

SEQ ID NO: 464000 - DNA, 579 bp, Homo sapiens
ttgtgtgacttgaggcagaaaaaccagctaagcctgctgggtttctaacatatagaacaataagataatttgtattttaagtcgttaagtttgtagtaatttgttacagcaacagtagaaaaccaatgcaataactcaagttaaaaactataatgtacaactaagatgacaaaaatgaaaaaagatggtgtgaaatcaccaatgagtataggcaatcttttccactaacaactttcctgtaactattagttggtgtgcagaataccagcataatgatggagcagaaacaaaaatagctttcaaatgaatcagagacttttaatttgattttgtgaaaaaagcttataagcaatcagacaggctgcttttctcctttgtgtttgttacctatgagtttcatatggtgcaaacattaattaggaagaatctgtaacyatgaaatgctatgtaattcaggaagacatcttttccatatggttaatgaaagacaaatccttcccatatcatttaacactcacaaaaagtatataacaaacaaaactgaaatttgaatcggagtttatttgaacagaaaagcac

SEQ ID NO: 464001 - DNA, 584 bp, Homo sapiens
aaaaatattcaagtatatacctctgacatgcctcaccaaatcaaaacagaaacattcacactcatataaaaactctaaatatataaaaagtgaacactaacacaaatcatatggaaaagcagaaaagaactttaaagctcaaaggtaccttagaagtgttaaaatctacctttctcattttaggagttataaaaatgaggccaaacataggatgtgwcttaccaacagattgcacatatccctcgtccagagtttttaatagagtctttgagaactactattaaaataaattacattccctatttaaaaagccacagggtgacacaggagaaccaagtaaataaatgcaagattgaaaaggtttgggtcttaaaaacaaataaacaaaaacagacaaaattgtgaacatgtctagcatttagacactcagcttttacaaccattaataggatgtaaattagtacccggtgaatagacaaagtggtgtctgtggcaggcatgttccaggtttttacattttataaatccaaagtgaggtgcctacattaactcagtacactgcacattattcaatgctacagata

SEQ ID NO: 464002 - DNA, 574 bp, Homo sapiens
gagaaaggtaatcagatttgcatatttaaaacattagcattctcatcttgatcaaatattatgggactgccggttatcatgccaataattttctctcagaaaacatctaatctgctaaggccagggtctgcctttgtgcatagggtctcgctgaccacactccctcttcttccatatcaggactacaatttataaacctcatgttttgtagggtctcttggtagatctagatccaattgacagttgaacttaaagccacaaaactctgaggctttataatcaaaaagaacttcagggtagaacaacataattccatctcactataggtaattaccttgggcaaattattttagcatcttctgccctcacaaaatacatctctatgtctgtatatctacasagatgttcccagccttacaatggtttgactcccaatttttctgctttacagtggtgtgaaagcaatatgcattcagtagaaacctacttcaagtatccttaagaccattctttttccactttcagtacagtattcaataaattacatgagatagtcaacactttttatagacag

SEQ ID NO: 464003 - DNA, 499 bp, Homo sapiens
tactgttctagaatataaaaataaatagcagtcaatgtccttaaactcagggttctcatggtctagaaaaacataaaaaataaatcaatcaaatgaatattatcaatcaaagcattcataaaaaataacaggaaaataaagcagaatcatatatgaaatagcgtcttgggtgagggaacacgtgctatagccaggaaagctgacatttcagcatatatcattgcctcataccatatttgttatttatttttcttcccaactaaaatatatacttaatgagggcagacactttgtgttcatttcctgccgcatttccagcatctagaaaaatggcgggcacatagttggagttcaataattattgaatgaataaataaaaaatgaattctgcatgaygagaaggagccatcaggtgacgatctgggagaagatgacacacacaagaaaatataagtacttctgattggtcagggaagtttgttgtgtttgatgattagcc

SEQ ID NO: 464004 - DNA, 605 bp, Homo sapiens
tagatctagatccaattgacagttgaacttaaagccacaaaactctgaggctttataatcaaaaagaacttcagggtagaacaacataattccatctcactataggtaattaccttgggcaaattattttagcatcttctgccctcacaaaatacatctctatgtctgtatatctacacagatgttcccagccttacaatggtttgactcccaatttttctgctttacagtggtgtgaaagcaataygcattcagtagaaacctacttcaagtatccttaagaccattctttttccactttcagtacagtattcaataaattacatgagatagtcaacactttttatagacaggctttgtgttagatgcttttgcccaactgtaggctgatgtaaatattccaagcatgtttaagatgagctaggctaagcgatgatgtttggtagatgtattaaatggacttttaacttaacatattttagagttgcaatgagtttattgggacacaaccccatcataaattgaggtgcacctgaatatctacatctatatctatctattgcctgcaaagcatctccagggtcccccttccattatatgcagga

SEQ ID NO: 464005 - DNA, 539 bp, Homo sapiens
cctaattagttagctttaatattcgagggatataatattggacatgcaaaccaaggcaaaatgtatacagaacagaatcttgaaatgttttatttacataaaagctagtggaagatgatatcattctttccatccatccttctccccatcattttgtttatctgttattccactggcccatcactcagtcattcgataattattgcttgcatgcccactgtttgctaggtcttgtaaaaataaaggtgaaaaatatatatgatccttctttcatggaatttgcagtctaataggtatctccaaaagcacttcatggtggaaaaattctggctgagtcagaataacgtagctgaaaatctttaatttggttctgagttcatatcccaaataaactctgaaacagggcaagccatggtttctcacctataaaatgacaatactaatattgtgtatattcactaatgttcaatattcaatatactaatactaatamtaatattgccattttataggtggcaattagtattgcctcctaagat

SEQ ID NO: 464006 - DNA, 605 bp, Homo sapiens
tagatctagatccaattgacagttgaacttaaagccacaaaactctgaggctttataatcaaaaagaacttcagggtagaacaacataattccatctcactataggtaattaccttgggcaaattattttagcatcttctgccctcacaaaatacatctctatgtctgtatatctacacagatgttcccagccttacaatggtttgactcccaatttttctgctttacagtggtgtgaaagcaatatgcattcagtagaaacctacttcaagtatccttaagaccattctttttccactttcagtacagtattcaataaattacatgagatagtcaacactttttatagacaggctttgtgttagatgcttttgcccaactgtaggctgatgtaaatattccaagcatgtttaagatgagctaggctaagcgatgatgtttggtagatgtattaaatggacttttaacttaacatattttagagttgcaatgagtttattgrgacacaaccccatcataaattgaggtgcacctgaatatctacatctatatctatctattgcctgcaaagcatctccagggtcccccttccattatatgcagga

SEQ ID NO: 464007 - DNA, 517 bp, Homo sapiens
aaaatccattggtctgtctatctgtttgtccatctgtccattcattcatccacccatcaactacatctcagatcaactacatgtcagaacggtgtttatatcagggaacaataccctgccttaccacttgatagtctcacaaaagagaacacataagtaaacctatctaattcgtacctattatgcaggatacaggcccagttctttcatctcccatgaaggtgccctaagttttctggcccctctttatctcttttgcctgtcactctttcagcgctatggcccacatcataatcactgtttagtgaaacctcatttcagacggaggttagcttccaaaatcagcatgaaaggacagaacagtcaaaatggcccctgtaaatcccttaggaagatggtgccatgtggagactgactaatgggccatcacagcaagtttatcctccatgttgaaacagattgcygtttctttgatttaaatgccagagaagaggtcagcttagattagaaccaatct

SEQ ID NO: 464008 - DNA, 569 bp, Homo sapiens
gtgggaattgaacaatgagaacacatggacacaggaaggggaacatcacacttcggggactgttgtgggatggggggaggggggagggatagcattaggagatatgcctaatgctaaatgacgagttaatgggtacagcacaccaacatggcacatgtacacatatgtaacaaacctgcacattgtgcacatgtaccctaaaacttaaagtataataataataaaatttaaaaatatatattttcctattttttttaaatttggggtgtgtgtgtgtgtctgtgtgtgtgttctataagccatctgatatggtttggctgtgtcctcacccaaatctcatcttgcattatagttcgcatagtcccaatgtgtcctgggatggatccagcrggaggtaatttaatcatgggggtggttacactcatgctgttctcatgtgagtcaattctcatgagagctgatagttttataaggggtttccccctttttacttggcatttcttgccatgtgaaaaaggacatgtttgcttccccttccaccatgattgtaagtttccctaggcctcccc

SEQ ID NO: 464009 - DNA, 623 bp, Homo sapiens
catcctgtgaggctggttttgccctgataccaaagctagcaaagatacaataaggacactacagatcaatatcccttttgaacattcatataaaaatcctcaataaaatactagccaaaagaattaagcagcatcttaaggattatataccgtgatcaagggggatttattcccggatgtaataatggattaacatatgaaaaccaatgtaatacaccacactaacataacgaaggggaagaaaaccacataattatctcaattgatgcagaaaaagcatttgacaaaattcaacatactttcattataaaaacattccacaacctgggaatagaagaaaattaccacaacataataaaatcatatataaagaattcacagtgaacgtcatactgaatagtaaaagactaaaarcttttcctgtaagatcaggtacaaggcaaggatgcccgcttttgccacttctactcaacatagtactggaaattctagccagagcaattaggcacaaagaaagacagaaaaaaaatccaaatttgagaagaagagcaaaattttctctgtttgaagatgatatgatcttatatgtacaaagtcctaaagattctaccaaaaaaacctgt

SEQ ID NO: 464010 - DNA, 571 bp, Homo sapiens
cacctggtagtgggattggtggatcaaatagtagctctacttttagttctttaaggaatctctatacccttttccatagaggttatactartttataatttacattcccacaaggagtgtataagcattccccttttaccatatccatgccaacatctgttgttttttgactttttaataatggcctttcttgcagaagtaaggtggtatttcattgtgcttttaatttgtatttccctgatgattagtgatgttgcctgtagctctctgattcaaaaacatcaaccatcaaagtgtacacattcccttttttcttacaggttttttttattttaccctcctgcaggtttcgtgctgtttctctttttgggaatcttgaccatgctcagaccaaatatgtacttcatggcccctctacaggagaaggtggtttttgggatgttctttttgggtgcagtgctctgcctcagcttctcctggctctttcacaccgtctattgtcattcagagaaagtctctcggactttttccaagtgagttaaaagaacaccataggaaaatactgtgcact

SEQ ID NO: 464011 - DNA, 571 bp, Homo sapiens
cacctggtagtgggattggtggatcaaatagtagctctacttttagttctttaaggaatctctatacccttttccatagaggttatactagtttataatttacattcccacaaggagtgtataagcattccccttttaccatatccatgccaacatctgttgttttttgactttttaataatggcctttcttgcagaagtaaggtggtatttcattgtgcttttaatttgtatttccctgatgattagtgatgttgcctgtagctctctgattcaaaaacatcaaccrtcaaagtgtacacattcccttttttcttacaggttttttttattttaccctcctgcaggtttcgtgctgtttctctttttgggaatcttgaccatgctcagaccaaatatgtacttcatggcccctctacaggagaaggtggtttttgggatgttctttttgggtgcagtgctctgcctcagcttctcctggctctttcacaccgtctattgtcattcagagaaagtctctcggactttttccaagtgagttaaaagaacaccataggaaaatactgtgcact

SEQ ID NO: 464012 - DNA, 339 bp, Homo sapiens
atgaattttgtcaaatgctttttctgcatctactgacataatcatacaattttttatcctttattctattaatgtaatgtatcacatttatgagcttgcatatattgaaccatctttacatcccagggataaatcccacttgatgatggtatatgatcctttttatacttttcaattcagtttccyattattgtgttgaagatttttgcttctatgttcaccagggattttggcctgtaattttctttcttacagtatccttgcctggctttggtatcaggataatgctgggtttgtaaaaggagtttggaagtaattctctcttaaattttttggaag

SEQ ID NO: 464013 - DNA, 596 bp, Homo sapiens
ctgttgctacagttatgcaagtgaaggtgctcagaataggccacccccaaatatgccactttggcataaggattattttgagctgaaggcaactaaaaaacagcagacacaaaaaaagttctctatcctcctcccatttgcctaaaggcagggcataaattccctttgtgaggacattacccttttcctctctcatagcaggaagggcagagagattagactcttaatcactggagtctgagaggaaccaacataccaaatattrctaaaatatctcttttattccatttatttcctccctgtatttaccttcccacaatttactactcgtaacaacttcaaactctttttatcttctcacttctttacaaatttatttttgtttgaatttatataccattttgttaaaatggtatataagcctctaggtatgagcaccccttggattttttttcatttctgtgagcctcctccatatgtgtatgaaagaaacccttttctcttgctaacctgtgttttctctgtttcatctgcagaaccccaggcactaagcctaaacacagagaataaaggtctttttactccccgatacaggc

SEQ ID NO: 464014 - DNA, 596 bp, Homo sapiens
ctgttgctacagttatgcaagtgaaggtgctcagaataggccacccccaaatatgccactttggcataaggattattttgagctgaaggcaactaaaaaacagcagacacaaaaaaagttctctatcctcctcccatttgcctaaaggcagggcataaattccctttgtgaggacattacccttttcctctctcatagcaggaagggcagagagattagactcttaatcactggagtctgagaggaaccaacataccaaatattactaaaatatctcttttattccatttatttcctccctgtatttaccttcccacaatttactactcgtaacaacttcaaactctttttatctyctcacttctttacaaatttatttttgtttgaatttatataccattttgttaaaatggtatataagcctctaggtatgagcaccccttggattttttttcatttctgtgagcctcctccatatgtgtatgaaagaaacccttttctcttgctaacctgtgttttctctgtttcatctgcagaaccccaggcactaagcctaaacacagagaataaaggtctttttactccccgatacaggc

SEQ ID NO: 464015 - DNA, 633 bp, Homo sapiens
cctgccatactaggttctatgggaaactgggagcacatrccccatgtagcagggaagccaatacttacctccaatagccaggagcctttgggattgaggacccagtgttgccagtcatagctatttttaagagatgttagaattttgtttgtttatatgtgaaatcacttgcattttaaatattggctcagatttttaaatgtcttttaaaacactggcaggctaaacaaaatccagcccatgggctgccaattcatcctctgcagcatagtaacagtgagggatgaatgctaaagccaggcagaccagtgtgaatcctggctcagacccttggtatggccatgggtaagggaacctcccagcccttctacctcctagcactaatggtccaatctcatagcattcttgggaagactgcagtaatataggtgaagcacttaatgtgctgccagttacatcagtacgcaagaaaagttagcaccgccattataataaccctgaatcataaagacctgaatgcccttagtcagagcaccacccagaaagctctctaaggcaaagccagcactcgtctgctaaaagccctctgtccctctcagctaatttctgaaccagtatcttccatggctttgt

SEQ ID NO: 464016 - DNA, 575 bp, Homo sapiens
tttgctccaacagcattcttcccactgtcttgtaatcgtcagtgttcatctactcctccacactagactgcaagctcactgagcataaggattctgacttatttctccaaatctccagcacctagtacaggatttgtcaaatagtagtcctccaacaaatgagtcttttatragcaaatgagcctcacgtactttggctcagagaagcagccaagattttttggctttgccgactttcacggatcttacttgagggcttcacagcactgaacttcagtttatccctgacctctgaggaaaatgcctcatagaggaaagcaagattggaaggagcaaggctgaagcctgttatttccctacacattcagtggtcacgtcgagtaatttctcctccaatatcttccttgtacattttgggcaccagttggaacaggttacataagtaaatcaaaagcctctttttgcataccagcttttatttttttcctgtagcacttcagtttcacttaaaacagagctaggggtgtatgtgtgtgtgtgtgtgtgtgtgtgtgtgcatgcgtgtgtgtataaca

SEQ ID NO: 464017 - DNA, 586 bp, Homo sapiens
gtaggcagttagatatgcagagcttctagaaataatgcagactgggagactggaatgtagttacaagtgtgccaatgaacatgagacttttctgcttgatttttaagctaaggctgacttactctcctgacatttaagggcctcctctccaattcccagtcatcagtaaaggatgtgtacagggaatgacaatattagaacaaaaacaacctgcaagtaaatcggatgcaagagtctatgtatcttgcaaggaaatcttttgcacttaatcacaacatggctctcctcaatactacggagaacagaattgattcagattgtttttaagcctgaacgtaaacaatattgycgcctttttgggtttcagcacctccttattcatccattttctcttttatgggaagggggttgatgaggtgtgtgaagatgatagaacgtgccccagaaactgaacaatgaagagacgcctgtcatatcgggggtacctagattcctctgaaaggaagcccagctgaaggagcagggtcaccactttattttaaaaacgtaacatggcacatgttggtgctctattaatcgagcctcg

SEQ ID NO: 464018 - DNA, 480 bp, Homo sapiens
aacaatactgattcttctgattcaggagcataggatgtctctctatttatttgtatcttcttcaatttctttcatccatgatttgtgktttttcttgcaaaggtctttctcctccttatttaaatttattcttaggtattcatttttttgtagctactgtaaataggatttcctttgtgctttcatttatagctagtttgttgtgcatgtatagaaatgctactggttattatatgttgattttatattataaaaatttactaaatttgtttttctgttcaaaagtttttggtagaatatttaggtttttctatatataagataacgtcttctgcaatcagggacaatttgactttctcctttttaatttgaaagccctttatttttttatcttgcttaaattctctggctagaacttccaatactatgttttgaataagtggtgagagtgggtatatctgtctagtttcagttcttaga

SEQ ID NO: 464019 - DNA, 480 bp, Homo sapiens
aacaatactgattcttctgattcaggagcataggatgtctctctatttatttgtatcttcttcaatttctttcatccatgatttgtggtttttcttgcaaaggtctttctcctccttatttaaatttattcttaggtattcatttttttgtagctactgtaaataggatttcctttgtgctttcatttatagctagtttgttgtgcatgtatagaaatgctactggttattatatgttgattttatattataaaaatttactaaatttgtttttctgttcaaaagtttttggtagaatatttaggtttttctatatataagataacgtcttctgcaatcagggacaatttgactttctcctttttaatttgaawgccctttatttttttatcttgcttaaattctctggctagaacttccaatactatgttttgaataagtggtgagagtgggtatatctgtctagtttcagttcttaga

SEQ ID NO: 464020 - DNA, 459 bp, Homo sapiens
aaagtgaagggcaagtcatgtgaagatctagcatttcagaagctgagaaaaagtacaaatgcctggaggcaaaacatgaatgaatcttattcatctttggttgtccaaatacatggtatgagactggtacccaggagacatttaatcaatatcttgattgactttcttattctttttgagtaccttagtgtagttatcaacaggaatgctaaggaaagggaacaggagaggggattatttattttgttctactaaggaatgtcataaaaccatagacytaaaagtttgtaagattcaagaaatcatctagtacatcagatgaatatgatataatttcagcaattgtagagataaccccaaaaagatttgtctagggttgaaagccagtaattataagagatgagactcctagcatagaatatgtttataatttaggcaagtatttaaatttaatccaga

SEQ ID NO: 464021 - DNA, 594 bp, Homo sapiens
ctagttttgttaaatgttccattatatagttagaaaccacatgattmattgcatactgtatactgtatattcctgtttaatagaaccatatatcattctgtggtatgactgtagtatagaaaactggtagaattccttttaaacccataccacccttgttccactgtagtggaacttttaacatggcatatggctgctgggaataaataatacatttctcagcttctcttcagtttaaagtgtggtcatttgactaagttctgcccaatgggtgtgagtgtaagtgaagtgtattacttcttcttttttctttaaaaatagaagatgttccatttaacttctaacactttctaacatactctgtactgctgcttgaaaggctgattgatggcaagaagtttgggactatattatagagcaagaagattggaggagcttggattcttacacaccctggcggaacaaaacggccttcttcgtgtttttaagaaagaaaaaaatatattttcatgttgcccatgtgactatgattttgttttcctattttccagccaatcctagatcctgacaattacaaaatttcatatctgtaca

SEQ ID NO: 464022 - DNA, 594 bp, Homo sapiens
ctagttttgttaaatgttccattatatagttagaaaccacatgattcattgcatastgtatactgtatattcctgtttaatagaaccatatatcattctgtggtatgactgtagtatagaaaactggtagaattccttttaaacccataccacccttgttccactgtagtggaacttttaacatggcatatggctgctgggaataaataatacatttctcagcttctcttcagtttaaagtgtggtcatttgactaagttctgcccaatgggtgtgagtgtaagtgaagtgtattacttcttcttttttctttaaaaatagaagatgttccatttaacttctaacactttctaacatactctgtactgctgcttgaaaggctgattgatggcaagaagtttgggactatattatagagcaagaagattggaggagcttggattcttacacaccctggcggaacaaaacggccttcttcgtgtttttaagaaagaaaaaaatatattttcatgttgcccatgtgactatgattttgttttcctattttccagccaatcctagatcctgacaattacaaaatttcatatctgtaca

SEQ ID NO: 464023 - DNA, 594 bp, Homo sapiens
ctagttttgttaaatgttccattatatagttagaaaccacatgattcattgcatactgtatactrtatattcctgtttaatagaaccatatatcattctgtggtatgactgtagtatagaaaactggtagaattccttttaaacccataccacccttgttccactgtagtggaacttttaacatggcatatggctgctgggaataaataatacatttctcagcttctcttcagtttaaagtgtggtcatttgactaagttctgcccaatgggtgtgagtgtaagtgaagtgtattacttcttcttttttctttaaaaatagaagatgttccatttaacttctaacactttctaacatactctgtactgctgcttgaaaggctgattgatggcaagaagtttgggactatattatagagcaagaagattggaggagcttggattcttacacaccctggcggaacaaaacggccttcttcgtgtttttaagaaagaaaaaaatatattttcatgttgcccatgtgactatgattttgttttcctattttccagccaatcctagatcctgacaattacaaaatttcatatctgtaca

SEQ ID NO: 464024 - DNA, 594 bp, Homo sapiens
ctagttttgttaaatgttccattatatagttagaaaccacatgattcattgcatactgtatactgtatattcctgtttaatagaaccatatatcattctgtggtatgactgtagtatagaaaactggtagaattccttttaaacccataccacccttgttccactgtagtggaacttttaacatggcatatggctgctgggaataaataatacatttctcagcttctcttcagtttaaagtgtggtcatttgactaagttctgcccaatgggtgtgagtgtaagtgaagtgtattacttcttcttttttctttaaaaatagaagatgttccatttaacttctaacactttctaacatactctgtactgctgcttgaaaggctgattgatggcaagaagtttgggactatattatagagcaagaagattggaggagcttggattcttacacaycctggcggaacaaaacggccttcttcgtgtttttaagaaagaaaaaaatatattttcatgttgcccatgtgactatgattttgttttcctattttccagccaatcctagatcctgacaattacaaaatttcatatctgtaca

SEQ ID NO: 464025 - DNA, 608 bp, Homo sapiens
ggacacttctgatgtgtaacatacacttcagaggtccccttgcctgagaggctgaaggaaccctccatagtccttgcttggctacttccccactctctgttcttttccagctccctactttgcttgtttctccaggagcactttctcaataaatcatttgcacgagaatttgagcttcagakattgcttctctggcacctgataagacaaaagggcttataaatggacttattttggacaacaacaaaaaaagtaaagtctgggagtagggttagggcagttacataatatttgctctaacgatacagtaatattgccaagtttaaattattaattaaagtgtaagaactaatagattagtagaactcattaaaacacttttaggaaaaaatgattacaggactgaataaaaagagttggcagaaaacaatatagcacaacctgtaagtgtatagccatttccattggaaagtaattagatgtgttggactatatgttagcaacttattcctaagcaaattaatattttagcatagtgatggctattagtgctgtaccctgcaaagcagtacatgataatcaggcacctctaaagcagggtttgtcaa

SEQ ID NO: 464026 - DNA, 576 bp, Homo sapiens
ggacagaattcctaacaaataatcttttcagataaagattattataactctgttctgcatacttgtctatacagtatagtatactgcatgaataatttattttgtgaataggatgatcagattaatgagatttttcaggagtagtgaagagaagggagagttactgatggcacggttgggctagaaagtattacagttgagttgacattattgtatcaatatcaacccacagcgggtatggcagtattaaccagatcagtgtatatacagccttctctcattcaatgatttattagtgacttgaatggggatctaaaaagaatggcttgtcaagtttccagatgacaaagtttgaagaaatttacatatattatataataaaataaaaaattaaaagtgtgagaaatatatgttttaacaaaaatgcrcttaacaaaatgaaaagaaagaaataagtggagaagtcaacatattagcttcaaaatcaaaggccctgctcctctttctattttcctccagcaatggcaggatccatctgcacaactcctgtactgcatccacttaatcactaggttt

SEQ ID NO: 464027 - DNA, 603 bp, Homo sapiens
acagactaatacagagaatatgaaagcaactacagtcatggaaaacaaaatgctatagtgtgatacagtatgactctggggtccatcttggaatccaggtaaaatgctcttgatgtagagcaagaagaaaacactggcaagggcagaatccctaaggaagaccaacagtaatgaataggctgaaaaattagaatgatcctcttagattataaattccatccatttagtccatatgtattctgtaatacagagttcaccaacacctaacatatcaagttaacactgcagcctaggtttaaggaccatcagtttggtgaagtcttcttgttcaccccagcatcctgtcatattcatctttcctgtttctccacttcttagaagtcagtttgccgatcccctcacctatgattttgagtttctgttgcctgtatttctgtttgagagtccaacattttttgctcttgtaagtctaaagcagtcttcaaaatcttcctgttccatggggcatttcctrattaaccctcacctttcagtgatcatgcattaaatctttgcaaattgatggacagatctgtcaccactttctttcatgttccctattag

SEQ ID NO: 464028 - DNA, 594 bp, Homo sapiens
gcaattcatctgtattttagatctcttttccatctaatgtatgatatctgtcaatactttatttcacagtcttttattctacattctttgtatactcaagaccttttccataattctttttgatgtttctgtagtggcttcagagaaaggcaaggtaataagaaaggcactatagcagaacagttgtggaagtcgttagatttatttacaaatatgccagttttcctatttctttcacacatgttatgaggttgygtttctccacctccacttctcaaaagtaagtatggtttgctttggccaatgaaatggaagcctatgctctaaatgttacttctggacagaatcttttcattgccagtgcaggacactgaatgttccctaaacctgctgtgggtgataatggaaacacaaatcaagatgaagttttcctcagtcttcatccctgattgactccgacaacttgggtctccctactgacttgcttttggacaactagagtgagagagagagattttgtttttgcatccactgagtttttaaggctgttcatcagcataacataactttgcaaaccttactgatatattagtt

SEQ ID NO: 464029 - DNA, 424 bp, Homo sapiens
gatataaaggtcatttcatcaggaaaacctaacaagcctacatgtataagcacctaataayagaattttaaaatgtgtgaagcaatggtctaacacataaggagcttagaagttgccaattcatcctgaagacaagtgaaaaacggaacaaactgaaaaatcaacagtttttcttaggcccatcagagaagtgaggccacagggtaaactaatgtctccctctaactggagacacagagaggcagatacagagaatcacaactatcagagcagaaactcacaagcagaaacctctgtgggaaccagcgctggagtaggagaatctgaactataagagaagaaccgctggagtctcagtgtggacaaggatgacccataaaatctccaggggaaccgagccatgaatgtagggttgggatccaca

SEQ ID NO: 464030 - DNA, 398 bp, Homo sapiens
tggcggaagtggactgtacatgctgtggaagatagaaataagattagaaaggttaaattctgcataaattgtgaatgccatcttatgctggacaaaggaatatgggctatattatatagaaagaaacaaccttcaaatgttaagtagaaaagtgtactaatcactagcactgatggaaatatggagaaagtaaccgaggttggagaagctgaaagcagggagaccagttgaaaagctattacaatggtccagatgagagccctgggaasctaaacaaagccagtggcagcaggaatgaaagaggctgggtgagtactcctggatccccaggatataagagagtttctctgtacaaggtaactgcaagtcagagatttcctgtagtgttacgcaggggc

SEQ ID NO: 464031 - DNA, 484 bp, Homo sapiens
acaggaagcatagcaccatctgcttttggggtacctcagagaccttttactcacagtggaagacaaagtgggagcaggtatcttacatggcargagcaggtccaagagacagacggggaggtgctacatacttttaaacaaccagattgtgtgagaactcactcattatcacaagaacagcaccaaagggatggtgcaaaaccattcatgataagcccactgccatgatccaatcacctcccaccaggaccctctccaacactgggaattacatttcaacatgagattgaggtggggacacagaaccaaagcatatcaccttttttttttttcttttttccactatgtttgacttaaagactgctatttttttttcatatgagtattgctactccacttgcttttggtttgcctttgtctggaatatcttttttccctccttcactttcagtctatactggtaaggtgtgtttcttgttagcaa

SEQ ID NO: 464032 - DNA, 509 bp, Homo sapiens
ttgttattttattaaatagatttcctaatcctttctttgttttttcaccctcagggatactaacaattcacaaatttkgttgctttgtttggtcccaaatgtcatgaagctttgttcattttttaattattattattttctttatttttttttctggctggattaattcaaaagtcctgtcttcaaattccaagattttttattctgcttaatctagtctattgttgaagctttcaaatgtattttgtatttccttccataaatccttcaacttcagaacttccatttggttgttttaaaaaacatttatctcattgataaatttttcattgatgtgttgaattgtttttctggtttcattgtaatattttcagaattctatctcactgagctttaaaatcaatattttgaattctttattttaaatctggaaaatttctttttaattaagacactttgctgggcaactactgtgttcctttggaagtgtcgaatttctttgctttttc

SEQ ID NO: 464033 - DNA, 611 bp, Homo sapiens
gccaagattagaccatagttattagaattagatgagttaccttatttgcagagtgggataacctttgctattttcctttcacgtgatcagtgccatttacaaagaaaagaaaatgaggtaatgagggcatatacaaaggcttcacagagcgctagatttttaaaagcaggatcagataaaccatacgctcaacattaaaaaagatattcagatgggttgcttaaattgttattgtcacttgctgtcatttctaagttattcacattaagatgcaaaaagacaagaaggaagtggacttctgaacttctgagaaaaaattagaatattaaaacatcctgataccctcacatttaattcaaaaacttgtcctcatgatgtcattcaatataatatacttgaacattaaaatgtatataataaaatatatttattcaaagatttattcaaaataaaatgaatatataaaataagagacagggaaagagaggtgtctggggagtgactagtgattagtatcacagaaatccttgcttcatctttacygaccccctggtgaaggacaatttaatctcccgacaaactctttctcattattgtataaacaaaaaaca

SEQ ID NO: 464034 - DNA, 468 bp, Homo sapiens
cagttgtcctaggaacaaatcctcagagtcacaaatatttttaggatttgtggagggaagtaagtccaaaaaaggatactaagaagaaggaaaattaagaactaagaagtaagagagagaactgacaaagccaggaatatttattggagttgctttgctgttattcaatcaaaatcttacaccaaaacaaatttagttttatgctcaggagtcgtcaggttggttgcacatcagttgatccaggtagactgcacctgctgtaccaagctgaactcagccttcctgctggtttcaggtctgctcctcatgtcttcactctgggcttcrggctgtagggtcagcagctacttctaaaatgctttttacattgtggatcacaggaactcaagggtgtaagtagcagcacatattgccttgtaagaccttagcttgaaactggcacatatccactgccaacatttcactgga

SEQ ID NO: 464035 - DNA, 511 bp, Homo sapiens
  misc_feature (1)...(511): n = A,T,C or G
cgtttctttcatctggaaataaagatgattataaaagacacttaacagctgtaattggaagttgcaatgtgcggcaatatgaccacatgacttcatccaagagcatatggtcaattgcatgacccggnttgacagacaggaagttgttaatccatgttataatttgaatcacatctaaagcaaacaaccctattaccctgctcaacagaaacataaaggaaggaaatgaaaggacgatgggaagtaatatgtgacactgacgggtatcatttaccagggccgttacccttgaaattcattataatctaragagatgctgttgcgtagacactccacagaatccggatggactccaacgcaaaatttggtttggtattgagactggtaacaccactcacacattaaaagagggtgaataggtttataacttgcattatgaagctttctgtggaatgcaggctactcataatcaggaaaacggcttgacagagcagggaaaagagactggctt

SEQ ID NO: 464036 - DNA, 580 bp, Homo sapiens
cagtctctatctcactattatatacaataactatattaaggggcactatgacttgtgtccccccaaaattcatattttgaagccctaacccctaatgtgactgtatttggagatagggttttaggaggtaattaatgttaagtgagtgcatagggtggggttctaatttgatatgattggtggttttgtaggaagacaaagagaaagatatcgctctctgtttactccacacacacacacacacacacacacacacacacacacacactgaggaaaggccatgtgagcacaaagcaagargtcagctttgtgcaagccagaaagagagtcctcaccagaacccaacaatgctggtatcctgatcttagacatccagctttcataactgtgagaaaataaatttctgttgttgaagccacccagtcttggtatttatttttatgacagcccaagcaaactaagacaaggagtttttgcttccatctcataatcttatactatatgcacttagaggttttagtgttcgtggtagaacacagtacttgtttgattaaattggaagctgagacttctccataat

SEQ ID NO: 464037 - DNA, 507 bp, Homo sapiens
ttcacagggagatcaccactttaaagatgacaaatttatatcttattaaatataagagtattgttttgttacacagtatgagttgctgtaatacctaggatttagacctaaatccattaattaattctataaaaatgagatcttaagaaatttacacttaaagtgcctaagaatttcaaggagaatcttagattcttttcttgatttcaaagtgtcaacagttgatggtctcctgtattcctttcctctcatgagaccaaatgcttcagaggagtgaccttctaatgtggtaaattgagatctaactactaattactaattgttattgcaattcttgacctgatctctagagctggaaagcaaatccctgtctctggagtgtaactagatctaataggcagcctctgagttgaygcagagagagcatattagcaattgagtgactttcaaagtgttaccttaatgaacaccattggatgtaatgttttgaagctcaaactaagcgaa

SEQ ID NO: 464038 - DNA, 577 bp, Homo sapiens
ggattcggtgttttggcagagcctatgaatttcttcctgacatctgtttctcccattcttagtaatagaattcctgatttttagctagccacatggacatctggaataaatgttacattycatggcctaagtaccctgtttactagcagagaaacgaatgttgaacctctaatataacaccataacttggagaaaacacctacctcccggtaaaatgtcgcttacgtgtatttttctttttttgataatagaataagtaacaatttgcccatagtgaaatacacacttattctgaatgcagatttgtcttctttgcccacagtgattctacaaacaacattcctaagtttactgcattcattcttcactctaaaatatccgcatatgattccttctgaccaagaattttgctttacagcaaaaaaagcagagcaaggggataattgccacagcactaaagagtcatatcatgtactccatcatccagagtcagagagccttttaagagagtggaagactatatgtactgctcagtaatgttaccaactagaaaataatttcatatgatttgttgatg

SEQ ID NO: 464039 - DNA, 573 bp, Homo sapiens
ggatgcttctgcataactgttgctatacaatgagtggagccaggacgaggcaataaaatgccgcaggatgcaggtaatggaagaatgggagttggctgtgtgtatcttgaaacttattcatgtcaaagaatattatatttattggtccacctccctttatgccaagaacagtaccaggttttctgacttcttagtaaattttaattaaatcacagtaagaggaaacaaatttaactgagtgaaagaatctttgtagtttcttctactgtattgtttataaggtacatcattatctcagttaagaaacatgtctctgtgaaccataatgtagtaactaacaatattttagtgttttctaggtgtcatgcacaatattcagcattttatgtagattattttttaatcatctctctgtcaacaatcctatgaagtaagctgttaygatatagatgagaaaattgtggttaacttgcacatagcagaagagggttgcaaaaatatgcaataaaagctagcaaaagttattttaaattatcctatgaaaatatgtgtttaggatacaagtccactttc

SEQ ID NO: 464040 - DNA, 403 bp, Homo sapiens
cttgaaacttattcatgtcaaagaatattatatttattggtccacctccctttatgccaagaacagtaccaggttttctgacttcttagtaaattttaattaaatcacagtaagaggaaacaaatttaactgagtgaaagaatctttgtagtttcttctactgtattgtttataaggtacatcattatctcagttaagaaacatgtctctgtgaaccataatgtagtaactaacaatattttagtgttttctaggtgtcatgcacaatattcagcattttatgtagattattttttaatcatctctctgtcaacaatcctatgaagtaagctgttatgatatagatgagaaaattgtggttaacttgcacatagcagaagwgggttgcaaaaatatgcaataa

SEQ ID NO: 464041 - DNA, 558 bp, Homo sapiens
acagtatggaggttcctcaaaaaactaaagacagaacaaccatatgatccagaaatttcatgaatgttcctgtgtctaaaggaaatgaagtcagtattttgaagaggtatctgtactcccatgtttgatgcagcactgttcacaataggcaagatttggaagcaacctaagtgttcataaacagatgattggataaagaaaacgtggtacatatacacaatgaagtactatttggccataaaaaagaatgagatgctgtcatctgcaatatcatggatgtaactggaagaaattatgttaaaggaaataagccaggcacagaaagacaaactttgcatgttctcacctgttggtgagatctaaaaattaaaacaattgaattcatggagatagagagtggaatgatttttcatctccatgaactcatggagagagagtggawtgagcctgggaaaggtaatggggggtctgatgggggagtggaaatggttaatggatacaaaaatatattagatggaatgaataagatctagtatttgatagcacaacagagcaact

SEQ ID NO: 464042 - DNA, 601 bp, Homo sapiens
atctttaccttaagtcaaaaccacaaaaacttccatctgttggatatcatccatgattacgctctttcctataatttctgatatagggttccagaaatttgggaatatcaactggaaatgagcactatgtaaaatgctactactctggacagcttttgtcattctrtgaaagactccttttgaaaaaaaaactaaaatacatttttctccaaggtgatttaacttaaataagaaaaggtgactattagagggaagaccataaaaaattgttccggagaattgtgttttcattagttgtagtctttaaaaacttgtaaagattctcaataacttaggtgatttccagttgtattttttaaatttatctatacagtttagatagaatatttgtctgctccagctgccataataagatattatagactgggtcacctaaacaatagaaatttattttctcaatgctctggaggctgaaactccaagatcagggtatcgacatggttgatttctggtgaggactctctttctgtcttgtaggcagccaccttatccctctgtgttcacatgatttcttttatgtgcacacattgagagagagaaa

SEQ ID NO: 464043 - DNA, 601 bp, Homo sapiens
atctttaccttaagtcaaaaccacaaaaacttccatctgttggatatcatccatgattacgctctttcctataatttctgatatagggttccagaaatttgggaatatcaactggaaatgagcactatgtaaaatgctactactctggacagcttttgtcattctgtgaaagactccttttgaaaaaaaaactaaaatacatttttctccaaggtgatttaacttaaataagaaaaggtgactattagagggaagaccataaaaaattgttccggagaattgtgttttcattagttgtagtctttaaaaacttgtaaagattctcaataacttaggtgatttccagttgtattttttaaatttatctatacagtttagatagaatatttgtctgctccagctgccataataaratattatagactgggtcacctaaacaatagaaatttattttctcaatgctctggaggctgaaactccaagatcagggtatcgacatggttgatttctggtgaggactctctttctgtcttgtaggcagccaccttatccctctgtgttcacatgatttcttttatgtgcacacattgagagagagaaa

SEQ ID NO: 464044 - DNA, 566 bp, Homo sapiens
catcttcaatgataatgacttgtacacaaagctgaaagctatgaaaattctctcccttgaattgaaaattgaaaacataattcatcacataggtatattctatgatgagacagaattaaatcatccacagtggggtttataaaattaatgcagacttatacttctatccaggatagagtaatacagtctcctgcctgaaacaaacaaaaatcaaggaaaatatatcaaacaatggtttgacaggcaatacaagacagtgatcccagagaaatgggaaaaaagtcaggtgagcctaagatttcccactgtaytgcttcaagagaatgtccacatcatgcacagggaggaaaaactcaggcagaacctggtagactgtctggattctatcgatgcagctgagaatctggaaaggacaaggtagctagagatcacagaacaaactactgagggagagactgctgcagagagcaagaaggccagagaattacagaagatttcccttgtgtattcagcagaatactgattagctcatgtgcgtgaggaaattatccaatgttggagaaaaa

SEQ ID NO: 464045 - DNA, 525 bp, Homo sapiens
atcatacaggatagtcaggagtgtgcacatagaatactcagtagtggacataattagctctacgtattaggtgggacatagctctgaagtaatctaacaaattttgaaagtgaaaccctagagtaytgaacagtttccaaataatttaactgtatcctaaaacaatactcaagaatatttataggaattcagaaatattcagcactcaaaattgtacaattgtacaatgactgcaatccagtgaaatgttgccaggtatgcaaagcaagaaaacatgaccttctatgatgaggagaaaatcaatcaatcaaatgactcagaacagacacagttgctcaaattagtagacaatgaaattaagtcattatactatattccacatgttaaaaaatttaggtagagaataaatgatattttaaaagatctaaatcaaacttctacagaaaattattaaaatgaatgagagaaaaaataaaccagatgagattaatgactgctatggtttgaatgtatcccttaaattca

SEQ ID NO: 464046 - DNA, 521 bp, Homo sapiens
caacttttacaagagagtaagaaatatagtgaatgttgattataccatcatttatcattttcattactttcttgtggatctcacccataattcagactctctttccaractaaaatatactttaaatatatcaaaactcatttatttaattataataaaaatatgatttatattttgtaaataaaatagagaatgtaaaatatttaccttcaattttatggcctttctatgaaaaattaaaatttaataaagctacttattagatccttttagatctaatgataggatctaataaacattaatgaaatgcattttcctctgagttgtatccctattagtatggattgattaaaatattcctatggctgagctttaatttagtcacagaagctcactacaactactaaaacagctacaacagctactacaacagctacaactactacaactgctacaactactacaactgctacaacagcaaatccttaactgtttttttcttagggagattctactaattt

SEQ ID NO: 464047 - DNA, 501 bp, Homo sapiens
tttaccttcaattttatggcctttctatgaaaaattaaaatttaataaagctacttattagatccttttagatctaatgataggatctaataaacattaatgaaatgcattttcctctgagttgtatccctattagtatggattgattaaaatattcctatggctgagctttaatttagtcacagaagctcactacaactactaaaacagctacaacagctactacaacagctacaactactacaactgctacaactactacaactgctacaacagcaaatccttaaytgtttttttcttagggagattctactaatttgactgaaaaatagaccccacaggcaaatacgtttggcaaatgctgcctgttctgcagctccctctaggagatttataacgtgtatttgaacagccaaggctctcagacattctggagtatagaaacttgtctcatgctaaaaactctcaataaattaggtattgatgggacgtatctcaaaa

SEQ ID NO: 464048 - DNA, 501 bp, Homo sapiens
tttaccttcaattttatggcctttctatgaaaaattaaaatttaataaagctacttattagatccttttagatctaatgataggatctaataaacattaatgaaatgcattttcctctgagttgtatccctattagtatggattgattaaaatattcctatggctgagctttaatttagtcacagaagctcactacaactactaaaacagctacaacagctactacaacagctacaactactacaactgctacaactactacaactgctacaacagcaaatccttaactgtttttttcttagggagattctactaatttgactgaaaaatagaycccacaggcaaatacgtttggcaaatgctgcctgttctgcagctccctctaggagatttataacgtgtatttgaacagccaaggctctcagacattctggagtatagaaacttgtctcatgctaaaaactctcaataaattaggtattgatgggacgtatctcaaaa

SEQ ID NO: 464049 - DNA, 619 bp, Homo sapiens
  misc_feature (1)...(619): n = A,T,C or G
tgtgggaattgaagatgcaatttgggtggggacataancaaaatatataatggaacaaagagatgttttgctccctaaacaaaggcatttcccaaagagtttcttttctttccttctactcttttccttaacaaatttccccttgttcctatattaataattagttcttaactaatgtttattktgtttgtaagctagcccaaacattctattttctgattgtccttatctttagaggctattgaaacacttacatttgatattttaccaccacaataaaggctgtggatactaaaaccagacgtaatcatttacttatgaaaatagttttgactttctgattctttttttatagagccactgtattctcagcaactcagtcttaaaaaccagaagtcattagaaattattctctccttttgccttcatctaaaaatttccacattccagagcatctgtcatcccttaatttccattttcactaccatcactactctgcccttccagctggacaagtctgactgactgccaaagggtcttcttgcttcctgttttattctagataaactcatgcaacagtaaactgccaaattaagtttctcaaatccaactcttttta

SEQ ID NO: 464050 - DNA, 554 bp, Homo sapiens
taagtaaacaatatgatgtctgaagtaackaaacaaaaaacgccaacacatatcacaagaccagtttttagattgtataactattatatatccattcagatctcaggctgctttggataaatgggtattttactgatgttgcttcagtcagaccatatttggtagatgccctttaacaggtgccatattttaagttgctgtaattgtttgttactccatatcctaaaagagttttgtgaatcatgcagtgactataaggccatatatattaaattattcacttacttaacaaatacatactgattacacagtaggactatgtagatattaaggccatgtgacaagtaaaccatagatactgccatcaaggagctttgggcattgttgtcaaaccggaaattgctagccctgcaatggtgagatttataaaaggcaaatagctgaattcaatatttgaaatgttttacagcaaaataaggtggtggttgggtatactggtaagtcaaaaatagctattgaagatgaagtaaaattactacataaaagaaacctgg

SEQ ID NO: 464051 - DNA, 554 bp, Homo sapiens
taagtaaacaatatgatgtctgaagtaacgaaacaaaaaacgccaacacatatcacaagaccagtttttagattgtataactattatatatccattcagatctcaggctgctttggataaatgggtattttactgatgttgcttcagtcagaccatatttggtagatgccctttaacaggtgccatattttaagttgctgtaattgtttrttactccatatcctaaaagagttttgtgaatcatgcagtgactataaggccatatatattaaattattcacttacttaacaaatacatactgattacacagtaggactatgtagatattaaggccatgtgacaagtaaaccatagatactgccatcaaggagctttgggcattgttgtcaaaccggaaattgctagccctgcaatggtgagatttataaaaggcaaatagctgaattcaatatttgaaatgttttacagcaaaataaggtggtggttgggtatactggtaagtcaaaaatagctattgaagatgaagtaaaattactacataaaagaaacctgg

SEQ ID NO: 464052 - DNA, 511 bp, Homo sapiens
atggcttgtcttttcattctctttactagtgacttttgaaatagtgatttttttctatgaacactaatttatctttttttctggaatgtacttttgataacatatctaagaaatatgtgcataattcaaagtaaatttttttctctttttttctgaaagtgttagggttttaggttttacatttagatctatgatccattttgaattgagttttgtatatgatattacaaagcagtgatcaaagttcaattttcttctttttacatatagaygtccaatatttgcagaaatatgttttgaaatgattatcctttctctactgaatttcttttgcacttgtgtccaaaaaggatttccatatacatgtgggtctatttctggacactgttttacaccattgttctatttatctgtctaaagccagtactacacttattttagctttataatgagccttaaaatcagagtgtattagttcccctattttgttcattcctctttcaaagttgtt

SEQ ID NO: 464053 - DNA, 571 bp, Homo sapiens
tttctctgcttctattgagatgatcatctgatgtaaaattttagtttgttggtatggtgatttctgaatgctgaatgaatctttcattcctgggataaatcccactttgttatgatgaattatccctttaatatattgcgtttgctttgctaatatgttgtttataattcttggattctctgttcatgcaatgcatcgttacaatgtgtttgtcaggttttgctattaggataatgctggcctmatagaaaaaactggaaagtattatatacattcagttttctggaagagtttttagataactgataaaatttgtttattctgtattttgtagcattttccaattaaaccactggggcctagagttttctttatggaaagattataactgcatattcagtttctttcataggtggagggttatttagactacctatttttctaagagtaagtttgtaaactgtgtctttcaagaaatctagccattttatctaagttatcaaatctattagcataaaatttttaaataatatttagttagtgaccttttaatatctgtagaatctgtagt

SEQ ID NO: 464054 - DNA, 623 bp, Homo sapiens
  misc_feature (1)...(623): n = A,T,C or G
ggtggtggattcttctaatatcccattccttatcccatttnctgattttttttttttttttttttaagtgggtggtcagtgtagttctcttacccgttggccaccattttcactgtgatggctggtgcccaaatgctgactcttctgtgggacacatttatgggttcgttgggtaccttcccttgggaactcctgtgstttgcatacgtgaggctagtcattcaccctctgcttgatcttctggaaccccctccttagctccactgggaggcacgtggatggctaaaattccccgtctcctttgagttagtcgtggcaatgtgactttctgaaatatgaataataaacatacatttcacttctggatggaagtatttaattgccagcacttcactccccagcccatctttttccttaatggcaaactgcaaagacttgctttcgaaatattggagttgtaagaaaacagtccctgagtgacatggcgcagagccttccacaaacctaccttagacgtgctgtctaagcaaaaccccaaatctttattttaagccactgagattttgaggctgtttgttactatagatttaccttgcccatcttgactgatacggttctttgct

SEQ ID NO: 464055 - DNA, 571 bp, Homo sapiens
tcgtggcaatgtgactttctgaaatatgaataataaacatacatttcacttctggatggaagtatttaattgccagcacttcactccccarcccatctttttccttaatggcaaactgcaaagacttgctttcgaaatattggagttgtaagaaaacagtccctgagtgacatggcgcagagccttccacaaacctaccttagacgtgctgtctaagcaaaaccccaaatctttattttaagccactgagattttgaggctgtttgttactatagatttaccttgcccatcttgactgatacggttctttgctttgggatttacactgaaattttgagacatgagaaaaagtctcattgagcatgctgtcactcctataactgaaggattttttttttttttggaatatttttatatacttcctgagagtacctatgtcttaatctcataatgctaaaataactttaataagctaattacttttagctgttctacaaagaaatcccatgagaaaacctctgagcatttatttcatgggggaagaccatcatttagaaatctggtctcatgt

SEQ ID NO: 464056 - DNA, 597 bp, Homo sapiens
tctagattttaaaagtcaataattagtctgcttttagcattactaagatcagattgggccagraggtgagcaatctcctgaaatataaggaaaaatatcaggatataatttctgtagatgaaattcaaccaagagactggacttagtgcttctgatcctaaacaaatcctgaaaaacagtctcaaaaggcaggattgatgggataaaattgagcacatatgaaatgttctgagtgctaggacctgaacacctttctgaagtttatcttttaagatttctttcttcttgtgccttactttgaaatgactctacctaaaatgagaacaatggcattctaagattactcctcagtgtttacaagccttttgacacattagggtttcagatttaggctctgtgggcctttttctcctttggtaaggaaatgtgaagtgtaggtgaacccatgaagcaagttcgtcctttgtgcttcatggaaaagtgttttccagcagagggcatccttatgcaacgaatttctctaccctcagaattatttgcggatattgaagtgcattagggaacagattttgcttttaaaggctttgcagttcagtt

SEQ ID NO: 464057 - DNA, 571 bp, Homo sapiens
tcgtggcaatgtgactttctgaaatatgaataataaacatacatttcacttctggatggaagtatttaattgccagcacttcactccccagcccatctttttccttaatggcaaactgcaaagacttgctttcgaaatattggagttgtaaraaaacagtccctgagtgacatggcgcagagccttccacaaacctaccttagacgtgctgtctaagcaaaaccccaaatctttattttaagccactgagattttgaggctgtttgttactatagatttaccttgcccatcttgactgatacggttctttgctttgggatttacactgaaattttgagacatgagaaaaagtctcattgagcatgctgtcactcctataactgaaggattttttttttttttggaatatttttatatacttcctgagagtacctatgtcttaatctcataatgctaaaataactttaataagctaattacttttagctgttctacaaagaaatcccatgagaaaacctctgagcatttatttcatgggggaagaccatcatttagaaatctggtctcatgt

SEQ ID NO: 464058 - DNA, 478 bp, Homo sapiens
ttaacgtgagcagtctgaccaaaagcggttcagagtaggtgcttgccacttgaaagggtcttccagaaagttcttgcctgaaatacatttktaagccctcctttttcctggtccttcaggtatattttgtctttctgttcccgttgagttctcatatgatcatatattgtgttcattttctctctcactcccttgcctagtaggaggatttttcggtgtccattgagaacatgggcttaagaatcaaactctcagatctagatttcatttgggggacttgagtgagttgttcaaagtcttaatttcttcatccctaaaatgggaatagtggtagagctattcctaggctctattaaattatgtgaggattaaattaaaacaatgccactgaggtattcaggaatttactatgtgttggggagtatactagaccccaaagacacagtaatgattagtgatcaagacccctgttagagcc

SEQ ID NO: 464059 - DNA, 586 bp, Homo sapiens
aagtaacagagggtcttacagacgtcattttataccaccaaccggatgacaagaaaaaaaacaggcttttgctttcttgaatatgaagatcacaaaacagctgcccaggcaaggcgtaggttaatgagtggtaaagtcaaggtctgggggaatgttggaactgttgaatgggctgatcctatggaagatcctgatcctgaggttatggcaaaggtaaaagtgctgtttgtacgcaaccttgccaatactgtaacggaagagattttagaaaaggcatttagtcagtttgggaaactggaatgagtgaagaagttaaaagattatccattcattcattttggtgagtgagatggtgctgtcaaggctatggaagaaatgaatggtaaagacttggagggagaaaatattgaaattgtttttgccaagccaccaaatcagaaaaggaaagaaaaaagctcagaggcaagcagcaaaaaatcaaatgtatgacgattactactattatggtccaccttatatgccccctscaacaagagatggagggcgaggaggtagaggtggttatggatatcctccagattattat

SEQ ID NO: 464060 - DNA, 548 bp, Homo sapiens
tctgggtgctttcagagggccaaggctctgtacaggacttttatttgtggctggattcttgtcctaggtttcacagctgatgtatactggcagaatatttttcgtgttgtaatttgggctgtgatccagtagatggtgcttaagagtaatggctggcagataggttgttactcagtggtagggctactttgtatttatgtgtgttcacaacagtgctctgtggtgagtggtgggaagagatgactcccttgccaggttcactcctgggccttagcggagccctctctgatcactggtatagtgcatgcatttcctctgttacatgttcctggctgtgagcctcccttgggcagaggtcatggctggtagataggytacacccctccccaactggccttgtggagagaggcgtgctccactcccatgctggaccataaacctgcatctcacttgtctcacagatctcaactcagcactcctgagctgtgtgttgcaaccctggggtgctgggactgggcccgcagctctatcctccagccccttggggt

SEQ ID NO: 464061 - DNA, 602 bp, Homo sapiens
gtacgatacgtattgttctataacttgctttaatttacctaacaataattcttgttaatctttcttcctttctgtaatctcagcccttgtagatctatattttataaaatgatttaaaagttttgaaagtcattaattatatgcagatagcaagactgtgctggacggcacagagcacagaatacctctctatcattttgatgccaatttcagaatctattcctaaatttcagaggctgtatattaggcagagactaagcctgcactatcctatatagtaggcactagccccatgtggctatttaaatttaatttgatttaaatgaaagttaaaattcaggttctcagcggcactagccacatttcaagtgctcaatggtcayatgtagccagtgggtactgttttggacacctcagatacagaaaatggccatcatgatggagagttctattggacatcagcagtttaacctttatgtgtttaccccagagacgaattgtgtgtatgatattgattacaaatgagttaagaagccaaacagggccagaggaacacccaggcactgagaacagcagaaagctacttctacccctaggacagc

SEQ ID NO: 464062 - DNA, 602 bp, Homo sapiens
gtacgatacgtattgttctataacttgctttaatttacctaacaataattcttgttaatctttcttcctttctgtaatctcagcccttgtagatctatattttataaaatgatttaaaagttttgaaagtcattaattatatgcagatagcaagactgtgctggacggcacagagcacagaatacctctctatcattttgatgccaatttcagaatctattcctaaatttcagaggctgtatattaggcagagactaagcctgcactatcctatatagtaggcactagccccatgtggctatttaaatttaatttgatttaaatgaaagttaaaattcaggttctcagcggcactagccacatttcaagtgctcaatggtcacatgtagccagtgggtactgttttggacacctcagatacagaaaatgkccatcatgatggagagttctattggacatcagcagtttaacctttatgtgtttaccccagagacgaattgtgtgtatgatattgattacaaatgagttaagaagccaaacagggccagaggaacacccaggcactgagaacagcagaaagctacttctacccctaggacagc

SEQ ID NO: 464063 - DNA, 602 bp, Homo sapiens
gtacgatacgtattgttctataacttgctttaatttacctaacaataattcttgttaatctttcttcctttctgtaatctcagcccttgtagatctatattttataaaatgatttaaaagttttgaaagtcattaattatatgcagatagcaagactgtgctggacggcacagagcacagaatacctctctatcattttgatgccaatttcagaatctattcctaaatttcagaggctgtatattaggcagagactaagcctgcactatcctatatagtaggcactagccccatgtggctatttaaatttaatttgatttaaatgaaagttaaaattcaggttctcagcggcactagccacatttcaagtgctcaatggtcacatgtagccagtgggtactgttttggacacctcagatacagaaaatggccatcatgatggagagttctattggacatcagcagtttaacctttatgtrtttaccccagagacgaattgtgtgtatgatattgattacaaatgagttaagaagccaaacagggccagaggaacacccaggcactgagaacagcagaaagctacttctacccctaggacagc

SEQ ID NO: 464064 - DNA, 602 bp, Homo sapiens
gtacgatacgtattgttctataacttgctttaatttacctaacaataattcttgttaatctttcttcctttctgtaatctcagcccttgtagatctatattttataaaatgatttaaaagttttgaaagtcattaattatatgcagatagcaagactgtgctggacggcacagagcacagaatacctctctatcattttgatgccaatttcagaatctattcctaaatttcagaggctgtatattaggcagagactaagcctgcactatcctatatagtaggcactagccccatgtggctatttaaatttaatttgatttaaatgaaagttaaaattcaggttctcagcggcactagccacatttcaagtgctcaatggtcacatgtagccagtgggtactgttttggacacctcagatacagaaaatggccatcatgatggagagttctattggacatcagcagtttaacctttatgtgtttaccccagagacgaattgtgtgtatgatattgattacaaatgagttaagaagccaaacagggccagaggaacacccaggcactgrgaacagcagaaagctacttctacccctaggacagc

SEQ ID NO: 464065 - DNA, 591 bp, Homo sapiens
ttgtccttcttgtctagttttgcttttgttgcctgtgctttaggtgtcacrtttaaaaaattattatcaggactaatgtcaaaaaggttcttcctccttttttttttttttttgagacagagttttgctcttgttgcccaggctggagtgcaatggtgcgatctcggctcactgcaacctctgcctcctgagttcaagtgattctcctgcctcagcctcccaagtagctgggattacaggtgcccacaaccacacccggataattttttttttttgtatttttagtagagacggggtttcaccatgttggccaggctgatctcaaactcctgacctcaggtgatcctcctgccttgacctctcaaagtgctgggattacaggcataagccaccatacctggccttttccccatttttttaaaaagggttttatggtatcaagctttacacttaagtctttaatccattgatttgatctttgtgtatagtgtaagataagggtgcattgtcattcttttgcatgttgatatccagttttcccaacattttggaagagactattattttccccattgtgtgttcttggaaccc

SEQ ID NO: 464066 - DNA, 591 bp, Homo sapiens
ttgtccttcttgtctagttttgcttttgttgcctgtgctttaggtgtcacgtttaaaaaattattatcaggactaatgtcaaaaaggttcttcctccttttttttttttttttgagacagagttttgctcttgttgcccaggctggagtgcaatggtgcgatctcggctcactgcaacctctgcctcctgagttcaagtgattctcctgcctcagcctcccaagtagctgggattacaggtgcccacaaccacacccggataattttttttttttgtatttttagtagagacggggtttcaccatgttggccaggctgatctcaaactcctgacctcaggtgatcctcctgccttgacctctcaaagtgctgggattacaggcataagccaccatacctggccttttccccattttttwaaaaagggttttatggtatcaagctttacacttaagtctttaatccattgatttgatctttgtgtatagtgtaagataagggtgcattgtcattcttttgcatgttgatatccagttttcccaacattttggaagagactattattttccccattgtgtgttcttggaaccc

SEQ ID NO: 464067 - DNA, 598 bp, Homo sapiens
gcccgttacccagtaggcacaaaacaaatttttgctaaatgataaagagggcagaatcactctgtcattttctgagttttgactcattgaaatgtttaaggaaaatcatttttaaaaagaagttaaggaccaggcgcagtggttcatgcctgtaatcccagcactttgggaggccaaggcaggaggatcacttgaagtcaggagtttgagaccagcctggccaacatggtgaaacccagactctactaaaaaaatacaaaaattagcgggcatagtggagagtgcctgtagtcccagctactcgggaggttgaggcaggagaatcgcttgaattctcccaggagacttctcactcctgggaaaattcaagccagaggtggaggctgcagtgagctgagtttgcaccactgcacttcagcctgggcgacagagtgagacttggtctcaaaaaaaaaaaaaagaaattgagaccttaagtactatttttgcagattcttgsagctgttctagcagaggcagaaaatcatcccaggaaacagagaggttttgtagactgaaggatccagaattgataatttagagttgattgaattttaag

SEQ ID NO: 464068 - DNA, 617 bp, Homo sapiens
  misc_feature (1)...(617): n = A,T,C or G
atgcccagttccaggaatcccatgctccctctcccctgcaagtgaaagtctttccttaccaatgccagtctataagtctagaagaggtgattatttatttaaatgcacaaataccaatgaaarcataaaagaaacaagaaaaatcaggaaaacaacaccaacaaaaatattaacttccagtgcctgaccccaaagaaaggaaaatccatgaattgtgcaacaaaaaattcaaaataattgttctaaagaagctccgtgagcccgaaagaacatagataaacaaatttaacaaanaacaattaggaaaacaaggcaataacaaaatgacaaattcaacaaacaaatagcctctcattttttaaaactagaaatgatggaggctaaagaatacaatggctgaactaaaaatgcaatggagagctacaatagcagactggatcaagcagatgaaggaatccatgaactggaagagagatcatctgaaattattcaattaggggagaaaatattgaaacaatgaaaagagtgaaaaagactatgagatttatggaaacaatatacatcttgtgaagtgaaccaatatacatattataggagttaccaaaaaagaaagtgca

SEQ ID NO: 464069 - DNA, 554 bp, Homo sapiens
tatctctgtttaaagatgacatgatcatatacatagaaaactctaaacactctacaccaaaaaaaaaaaaaactgttggaacaaccaataagcaaattcagtaaagttgcagggtacaaaatcaacatacaaaaattagtggcatttccatacaccaacagtgaaatatctaaaaagaaaattaggaaaayaatctcatttacattagcaacaaaatggaatatctaagaattaacttaagcaggtaaaagacttgtatactgaaaattacaaaaccttgacaaagttttaaaagacacaaataaacagatatctcatgttcattgattaaaagacttaatattgttaaaaatgtccatattaccctaagctatctacagatttagtgcaatccctatcgaaatcccaagggcagaaatagaaacaaacaatccttaaatttatatggatcccaaatagccaaagtgccatggtttggacatttgttccctccaaatctcatgttgaaatgtaatccccagtgctggaggtgaggcctgatgggagatgtgtgt

SEQ ID NO: 464070 - DNA, 588 bp, Homo sapiens
gaagaaaacccactaccatgcacaaaggaaaaccaacatcattagaaatattcagggatggaacaaatagaaaaactcatccaggaagaactagagattatacagctaaatcaaaaaggggctttcaaataatcatgttttaaaatgtttaaattagtaatgttaaattagtaaatttaaattaatacaaccattatggaaaatagtatggaggttgctcaaaaaaactaaaaatagaattactatataatccaaccatccaatttctgggtatatttccaaaggaattgaaaccmatatgtcaaagagatatctgcattcccatgttcactgcagcattattcacaatagacaagaaatggaattaatgtaagtgtccatcaacagatgaatgaatttaacatgtactatatatacaatgaaatactattcagcctttaaaaacaaaattctgtcatttgcaacaatgaggttgaacctgaaggatagtatgctacgtgaaataagccaggcacagaaagacaaatagtacatgatctcacttatctgtggaattttaaaaacttaaatttatagagtagaaagtag

SEQ ID NO: 464071 - DNA, 568 bp, Homo sapiens
aaaaactacatctaggcatactatattcaagtagagaaaattgaagattttttaaaaatatgctgaaagaagccagagggaaaagaaaccttacctacagaggagcacaaataacaatttccagcttctcttcagaaaccatgcaagcaagatgagtaaagtgaaatatttaaagtgttgagagaaaaatatttccaacctaraattctgtaccctgtaaaggtatacttcaaaagcaaaggagaaataaaagattttctcagacaaacaaaaattaaaggaatttgttgccagtcgacctgcctttcaggaaatactaaaagaaattctcttgagagaaggaaaacaatataggccaaaaacacagaactacataaagaggagcattggagaaggaataagtaaaggtaaaagaaaaatttttcttaattttaattgatctaacagataatacttggtaaagataatagcaatatatagtattttatgaatgtatatgtgtatgggtatatgtgtatatacacacatacagttgacccttaaacaatttggggattaggagtgctca

SEQ ID NO: 464072 - DNA, 585 bp, Homo sapiens
caggtgctgagttaggtggtcacagagggccttctctataaaggacatttaagtagaaatataaaaccatggttctcaaagtgcagtccctacggtggttctcaaactgtggccctaggaccagcagcctcaaagtcacctggaaacttggtcaaaatgcaaattctgaggccctaactcagcatttctgaatcagaaacttgggggttgtgtctcggatacctgtattctaaaataagatctccgaggtgattctaatgcataatcgagtttgaggctataaatatttttccaaatattgatttacagtattctacaggaatttctatgtgttttcacttatttaaaataatatgtagtttcaattttaatctgycttaagattaatacagatacatgttctaaaattccaagttggatttttttttattgttgatttccagttttttttttaattgcatttagataacatgacacgggtgatctttagtttttgggtttaactgaacatttccttggggccatccagaccaattttgcaatgttagataggttttttatttatttattttattattattattt

SEQ ID NO: 464073 - DNA, 534 bp, Homo sapiens
gttttcctttttgtgtccatgagttgagaagtacttcttgtcctatctgcccaatatcttctctctctcaacttgattctcccacttggcatccttctttaggtttaaggtgccaatctacctctcaggtgagagtactttccaaatgtcatctgtttatattattattaataaaaagaagcttgttgtctagaatggctaacacaaataaccactaaaycaccatgcagactgactgtcaactgtagagcagcagaatgggacccaaagatgcatctttagtggagaagaagggaaaatctcactgaattcagagtattctcagagaaggttcaatgggaagggtattgctatgagcctccaacagaccaccagtgggtagagtgagaggaagtgatgaaaagaaattcaagaaggaccaaatgaacatagcttgctggttacactcagccatcctcctaaatgactctccaaatagttcaagtaaagaatatcctttctgttttgagatggaaacattgccttcaccacccc

SEQ ID NO: 464074 - DNA, 614 bp, Homo sapiens
cctggtgcccccccgccacaccccccgtcagcgccccggattttgcctgaatcttcatttgcaaaaagaagtaaatattttcaagaagacaacaagaaacaatgcttgcaccactgaaaattctacagggcctagtcggtgctggaattccaaaaaggtctgctgcatggactggtgggcaagatgggggatacagaaatgaaaacatcagtactcataattttgtatatgtccacaccyatttatagcaggcttttgcctacagagtgtaaatctgttcgatgctgtaatatccttttttttccccttggaataggctggggcaagcaattaatcctgaaatcatggcaattagacaaggccatttttagactagcagcttgcaggacgaatggcattgttctgaggattattaaatacccatttggactgcgcttgggttcagggccagaaacacagccatgagctgctgtgttaagcacttttaaacacagtcagcgctgttctttctttcccctttgtgaccttgggtgagtcacatgtcctctctgggactcagtttgctcatctgtaaaatgaaggggataaggttagaagatctcttcaaccctttc

SEQ ID NO: 464075 - DNA, 614 bp, Homo sapiens
cctggtgcccccccgccacaccccccgtcagcgccccggattttgcctgaatcttcatttgcaaaaagaagtaaatattttcaagaagacaacaagaaacaatgcttgcaccactgaaaattctacagggcctagtcggtgctggaattccaaaaaggtctgctgcatggactggtgggcaagatgggggatacagaaatgaaaacatcagtactcataattttgtatatgtccacacctatttatagcaggcttttgcctacagagtgtaaatctgttcgatgctgtaatatccttttttttccccttggaataggctggggcaagcaattaatcctgaaatcatggcaattagacaaggccatttttagactagcagcttgcaggacgaatggcattgttctgaggattattaaatacccatttggactgcgcttgggttcagggccagaaacacagccatgagctgctgtgttaagcacttttaaacacagtcagygctgttctttctttcccctttgtgaccttgggtgagtcacatgtcctctctgggactcagtttgctcatctgtaaaatgaaggggataaggttagaagatctcttcaaccctttc

SEQ ID NO: 464076 - DNA, 539 bp, Homo sapiens
ctatttctgccacgcgcggtggctcatgcctataatcccagcactttgggagtctgaggcgggcggatcacttggggtcaggagttcaagaccaatctggccaacatggtgaaacctgtctctactaaaaatacaaaaattagctgcgtgtggcggcggaaagataataatcccagctactcgggaggctgaggcacgagaatcacttgaacccaggagacagaggttgcagtgagcctagatcacaccactgcactccagcctgggcaacagagggagactctctaaaaaaaaagaactatttccaatttagttccccaaataggtcaggccttttattgcctmcagcttttgcacatactgctcctagaagaactaccccactcccacttctcagctctcatcttctagccactcaccagcactttcccgggaataggttaggtgtccgttcatccagaaaaccaaccttgaccccttccattaccccacacttcatcaggtcctcctccctcacgtagctctgtattctagcattt

SEQ ID NO: 464077 - DNA, 539 bp, Homo sapiens
ctatttctgccacgcgcggtggctcatgcctataatcccagcactttgggagtctgaggcgggcggatcacttggggtcaggagttcaagaccaatctggccaacatggtgaaacctgtctctactaaaaatacaaaaattagctgcgtgtggcggcggaaagataataatcccagctactcgggaggctgaggcacgagaatcacttgaacccaggagacagaggttgcagtgagcctagatcacaccactgcactccagcctgggcaacagagggagactctctaaaaaaaaagaactatttccaatttagttccccaaataggtcaggccttttattgcctacagcttttgcacatactrctcctagaagaactaccccactcccacttctcagctctcatcttctagccactcaccagcactttcccgggaataggttaggtgtccgttcatccagaaaaccaaccttgaccccttccattaccccacacttcatcaggtcctcctccctcacgtagctctgtattctagcattt

SEQ ID NO: 464078 - DNA, 539 bp, Homo sapiens
ctatttctgccacgcgcggtggctcatgcctataatcccagcactttgggagtctgaggcgggcggatcacttggggtcaggagttcaagaccaatctggccaacatggtgaaacctgtctctactaaaaatacaaaaattagctgcgtgtggcggcggaaagataataatcccagctactcgggaggctgaggcacgagaatcacttgaacccaggagacagaggttgcagtgagcctagatcacaccactgcactccagcctgggcaacagagggagactctctaaaaaaaaagaactatttccaatttagttccccaaataggtcaggccttttattgcctacagcttttgcacatactgctcctagaagaactaccccactcccacttctcagctctcatcttctagccactcaccagcactttccygggaataggttaggtgtccgttcatccagaaaaccaaccttgaccccttccattaccccacacttcatcaggtcctcctccctcacgtagctctgtattctagcattt

SEQ ID NO: 464079 - DNA, 539 bp, Homo sapiens
ctatttctgccacgcgcggtggctcatgcctataatcccagcactttgggagtctgaggcgggcggatcacttggggtcaggagttcaagaccaatctggccaacatggtgaaacctgtctctactaaaaatacaaaaattagctgcgtgtggcggcggaaagataataatcccagctactcgggaggctgaggcacgagaatcacttgaacccaggagacagaggttgcagtgagcctagatcacaccactgcactccagcctgggcaacagagggagactctctaaaaaaaaagaactatttccaatttagttccccaaataggtcaggccttttattgcctacagcttttgcacatactgctcctagaagaactaccccactcccacttctcagctctcatcttctagccactcaccagcactttcccgggaataggttaggtgtccgttcatccagaaaaccaaccttgaccccttccattaccccacacttcatcaggtcctcctccctcacrtagctctgtattctagcattt

SEQ ID NO: 464080 - DNA, 604 bp, Homo sapiens
ccatagctggcaaaatttggagaagcctaggagggagactgtaaatgggaataatcaagccatttttatcaataatcatggtgaactaggaggaaaaacaggttttggaatagaattctggtaataccatatatgaattgcgtgatcttgatcaaattacttagcctgacctgaaaatggggctgataattgctagtttgtgaggatgaagtaggatcatatttgtagacctccacacagctccyaggacacagtatatatggaaggtttattccagtttgtcctctgatttcctctgcctcctgcagcaaaccccagtgctggtaggaaaatgcctttttggttaatggcagcctttcaaggtgctttgggagcaaaatcagatgttggaggagctcttcattggtgtaaagcaagctcccctctttctctctccaaactcccacccccaccccttgtgtggccagcaggttggatggttctgcaaacagcctctggatcaattcattgaccacaaaatggtgagacaatgggaccaccaaggggccttgctttgcccactggagcaaaggtcagcatcagatgcattaagaaatggaagcaa

SEQ ID NO: 464081 - DNA, 604 bp, Homo sapiens
ccatagctggcaaaatttggagaagcctaggagggagactgtaaatgggaataatcaagccatttttatcaataatcatggtgaactaggaggaaaaacaggttttggaatagaattctggtaataccatatatgaattgcgtgatcttgatcaaattacttagcctgacctgaaaatggggctgataattgctagtttgtgaggatgaagtaggatcatatttgtagacctccacacagctcctaggacacagtatatatggaaggtttattccagtttgtcctctgatttcctctgcctcctgcagcaaaccccagtgctggtaggaaaatgcctttktggttaatggcagcctttcaaggtgctttgggagcaaaatcagatgttggaggagctcttcattggtgtaaagcaagctcccctctttctctctccaaactcccacccccaccccttgtgtggccagcaggttggatggttctgcaaacagcctctggatcaattcattgaccacaaaatggtgagacaatgggaccaccaaggggccttgctttgcccactggagcaaaggtcagcatcagatgcattaagaaatggaagcaa

SEQ ID NO: 464082 - DNA, 576 bp, Homo sapiens
aggaatatgtctctggctccttggagaggatagacatgagcagagaagacataagtgagagcatacagcctagaagttctgctatcarcacaaggacccctatgtgagggttagttctgcagcaagtggggtcagctcatcaactcaagattttaatctagggttgctgaactctcccttgccttgtacgaaatttggacctagaaacttggacccacctgaggctatagagtgaaggtgagggagaatatggagccagagactgggatgcttgcagggcctgacctatgatggacaccctgtaaggagatttcttgtgattcatatgagaagttgcttgacagattacaaattcacatagggcatcacttccaaggagtcagaactggccaaaagtcagatgagacatctaagagtaatgagttccccatcctcgaggtattcaagtctaagctaggcaattatttggtgtgaaattgaacatcaatgacaactggcctcagtgactgctaatgtagcttctgacactgaaagcatttaagtatgggtcaaatgtcagctcatgagtaattgtct

SEQ ID NO: 464083 - DNA, 556 bp, Homo sapiens
gcctgcaacaggaaggattcattatctgcctttgacaggtgatgagacagagcctcggagaacctgagtgatttgcccaagaccacacagcttgaaagcagcagagcttagtccaagagctgcagcctctgtcctcatgtctcccacaacagcagaggcagatccagcttcatccgtagagcaaatacccacctgcctgcttacatagaaggggcagagaaaggcccttggtctgacatccctgcagyggagaaactgagcaggtttggaaggctttgcaatagacagacaggtgtaacacccaacgccattacttcctagctgtgtgccttgaatcaagtcacttttcctttcttggcctcagtgtcctcatcagaaaatgaggctgttaatcttcagggcacaactctgaggattaacattcttgggtgctgaacaaaacagtcttgcctaacttctgcctctttttaccctgcctagcatctgtctctttgagtaggtggatatattttacaaaaagaaaaatgaaaagaaatggtgattgcatttgcagtag

SEQ ID NO: 464084 - DNA, 533 bp, Homo sapiens
ggagcagctcagggttcagactcccatttctgtgctggtttccttgctttcttctcccagccccagctctttggcatgaagtataagggcaaatggtttcctatgtcacattataacaagacrctcttggaagctacctaaattgtgctgattactttctgcccatttaatatttcttgtatttgtttttggaaagattgactacctttgacaaaagtatgtcaaaagcaatacatcttactagtggagcgaagacactgcatgctgacaaaggtgatctcagatgtgaggtcgatggtgcgccatgcaatcagcttgctgagtgagcctacttatgccccatcccgggggcctagggtaagaaaagtgccaagcgaagctgaggatcagactaaagctggaaggtgagtcaaagcttgagtccctcagcattaccctgcccaggcagcaacttcagcctcatggtcttttagccctaaaacttaggactagctcagtgggagttttacattccttggcttgacaaatgaaaa

SEQ ID NO: 464085 - DNA, 564 bp, Homo sapiens
tcttttttgcccttgttgacccagtctttcaaagacacgtgattctcccagatgggagggtagggggaaaaaagtgaagtaattgaagatactttcctttattgctaaaacagcactgctgtttgagattggccctgaagcttccacctgyggggattgagtccgtctgtttcctcttactatggtgtgatatggctttagcttatcaacagatgtcatccctacttactcagaactgtgcaggtatttctaataaaaaacagctggtgataatggttgcaagggtgataagagagacaggactcttgctttccaaccatatgaaagcagaggggaaaaaataaagccatggacataactttccctgcatggtctctcttctccaaatgtttggaaaggcactaagaaattgcagtcagtaaattttcagttgggtggatgggggaatgggatggagatggaaagattaaatgtgtcttgtgctgctgtcgatggagggacccagaatggctctcccagacgtcccccatgtgtgtcatagtggctatgtctgcaaagctggca

SEQ ID NO: 464086 - DNA, 610 bp, Homo sapiens
tggggaacaagttttaaacattagaatataaaataaggatcaagagaaaacttagggcagagatacgcagccataaggtcttaaatagcttttatagttgaagcctcattttgggttaaagcttctggtagttaaagggaacaaaaagatagtgctgcagaaagttctggactgggaacctggagatcagatttattactgaccagttttgtgccttttggcaaagcactttatttctatgagccttggtttcctcatctgtgtaagcratgggttattaaaaggattcaatggtatatgtgctcaaacattatagaactcccagaatttgaagtatcttttatcctcattattagcacatgttaagtgtttttttgcagtcctggaccagagttctggtgttgactcctccaccacaagctgtgtctttgggcaagcgtatgacttctctgagactcagttttatcattggtaaaataagtgaattggcttggatgagcagtgtgcatccttctagttccagctttcagtgagtctcctccagctcatatttcttctgcaaacatctggaaaacagtgactgtgcagccaaatcagaatccagatacac

SEQ ID NO: 464087 - DNA, 456 bp, Homo sapiens
gtactaatggatggaagcaaaagcctagacagagagcagttggtgtattgctgtagttttaaaagccttgtgacatgaagtctagacagaggcatacatgctaatgctatcacgcaggccagagtacagaaagtacaccaggaccattcattaaagtcattacagggctccaaccttttagccaataccaatgtgaccaacattttattattccaataaatttttcaatgtrgttcattttttgatgattataaaagtaatacagtctcattacagagaacataagaaagatcataaatgaaaagaattgccccaaattttactgtcattaatatttagttatattttcttctgtttattttcataacatattgaggtcatactgagtattacattttatatcctgattcttccacttaataatagagcagaaacataaactatttatggtaatac

SEQ ID NO: 464088 - DNA, 286 bp, Homo sapiens
agaatttgaacctaataaaatcatttcaccatgtagtttttcactttcaaagtcagtgtcagacacactggcattagatacaaagacctcatgatttcctccttcagcactttgtaaagtatttaattggttccattttgccttgacttgaaatttgccccttcactggtctgtcttgtttgataagttcatcaaacatcaagactytttgttcattttcaaaaaggattacagtgataagcttttataattaagaatatctcggcggacatttcctttacacagt

SEQ ID NO: 464089 - DNA, 286 bp, Homo sapiens
agaatttgaacctaataaaatcatttcaccatgtagtttttcactttcaaagtcagtgtcagacacactggcattagatacaaagacctcatgatttcctccttcagcactttgtaaagtatttaattggttccattttgccttgacttgaaatttgccccttcactggtctgtcttgtttgataagttcatcaaacatcaagactttttgttcattttcaaaaaggattacartgataagcttttataattaagaatatctcggcggacatttcctttacacagt

SEQ ID NO: 464090 - DNA, 565 bp, Homo sapiens
ccagcctgggtgacagagcgagaccctgtcaaaaaaaaraagtatacaatcatgtatacattacatttctaatttggttgggtaaatgtacatactcacatataagcatagaaaaaaaactgtaaaaatccaggtagtaggattacatatgatttccattttattctgtgcactgaaattttttattttgttttcctgtttctctctttttaatttaatttagtttaattttaagttccgggatacatgtgcaatgttgtcctgtttctctatactgaatagctatcctttttttagtcagaaaaaaataaatgttgttttaagaaccaacaacacttttgttattaagaaaacataaaaagaactggtagtaaggagaaggtgggaaagaacaggcttggtggaaaggggaaaatgtgaatgatagatagagataactgtgagctgcctaaggggtggactcctggactagtaatgcagaggtgaagagatacaaggggcttgtcacaggccaaatagctatggctacggggaggggacaactaggtctggccttgcccagcaa

SEQ ID NO: 464091 - DNA, 565 bp, Homo sapiens
ccagcctgggtgacagagcgagaccctgtcaaaaaaaagaagtatacaatcatgtatacattacatttctaatttggttgggtaaatgtacatactcacatataagcatagaaaaaaaactgtaaaaatccaggtagtaggattacatatgatttccattttattctgtgcactgaaattttttattttgttttcctgtttctctctttttaatttaatttagtttaattttaagttccgggatacatgtgcaatgttgtcctgtttctctatactgaatagctatcctttttttagtcagaaaaaaataaatgttgttttaagaaccaacaacacttttgttattaagaaaacataaaaagaactggtagtaaggagaaggtgggaaagaacagscttggtggaaaggggaaaatgtgaatgatagatagagataactgtgagctgcctaaggggtggactcctggactagtaatgcagaggtgaagagatacaaggggcttgtcacaggccaaatagctatggctacggggaggggacaactaggtctggccttgcccagcaa

SEQ ID NO: 464092 - DNA, 442 bp, Homo sapiens
tttgtgttaaattaggttgttctgctcatactcatgcattccatattctcttcatccagcttgcatgaatggcagatttcctgccctgctctgctctagtaggtacctattcaaatgtccccaggaagactattggtgggccctgccatgaggtcagatagtgagagtgtatgtacacrtgtgtgtgtgtgtgtgtgtgtgtaaacaaaagtgtatgttggagaggagatagcaccccttcttttcatccagcaatatttttcaaacctctaacatgtcccaggcatcctaacagatgctagagatggaggaaaggggctttcctaaagaagctcacagtgtaacatagtgcaacattgcctgggataagatatgacagtagagcctcgcctagcttagtgtagtatatgtagtataacatgatatagtaggaattcagata

SEQ ID NO: 464093 - DNA, 442 bp, Homo sapiens
tttgtgttaaattaggttgttctgctcatactcatgcattccatattctcttcatccagcttgcatgaatggcagatttcctgccctgctctgctctagtaggtacctattcaaatgtccccaggaagactattggtgggccctgccatgaggtcagatagtgagagtgtatgtacacatgtgtgtgtgtgtgtgtrtgtgtaaacaaaagtgtatgttggagaggagatagcaccccttcttttcatccagcaatatttttcaaacctctaacatgtcccaggcatcctaacagatgctagagatggaggaaaggggctttcctaaagaagctcacagtgtaacatagtgcaacattgcctgggataagatatgacagtagagcctcgcctagcttagtgtagtatatgtagtataacatgatatagtaggaattcagata

SEQ ID NO: 464094 - DNA, 606 bp, Homo sapiens
gaggctgtctttgggggcaaccaacatagcaaagcaatgtagcacataaatcacagcaacatgaatggtatttgttttttgcaaagagataatgaactacacctgctgttttccacctaatgcttttaatctgaggaatgacakacttgcagtgttctggcaccttggaaatcaagctgcctggttctgcctgagagccacagacatgcagaagctccatggaggtgtgagggtggctctcccacctgcgccacaaccaagaccatgtgggaaacaagtagaagacatggtggccagactcatatcctttgggctcctagcctgtcaagtagccacagaaacagctcaccttgagaccagactagactgggaagcaatccagcatcccactacctctgtacttccttagggacctcaactgatttgcatctctctcttttccactctggagtttaagtcacattggcttttctgagtagaatcttgctgctgaggaaagaagtcctctgcagggtctccctcatctcccattatactcctagctttgtctggctaatccctacttgttctacttgtctctggctccttcttctgacccccacagat

SEQ ID NO: 464095 - DNA, 557 bp, Homo sapiens
atgtggctttgaacatcttcaccctcatgcttgttcttctctgatcattccctatttttaaattttattatggtaaaaatactttaacatgaaatctaccctcttagccaactttaacagtacaatacagtgtcattaactatagggacatsttgctctcagactttatcttgtataattgagactttatggtcattgattagtaattctacctttcctcttgcccccagcccctggcaacaaccatgataccctttgattctatatatctgactattcatatatctaatataagtggaatcaggcagtctttatccttttgtgactggcttatttcatatagcagtatatcctcaaggttcaatcgcattgtcacatatggcaggattttcttctttttaaaggctggataatgttcattgaagaaaatcatattttcttatttcattttttaaagcatttttgcacacagctctgagtttccctaatctatggagaggagagtgagattacttcctccttcattttactaattataatttgtaccctggtttcat

SEQ ID NO: 464096 - DNA, 582 bp, Homo sapiens
cacaagcctgacctccggggctacagtgctaaacaaaagaagcctgacttctgccctcaagattattatctcttaggaagagataggtctyacatagtcacaggagatgtgggattaaatatatatgctatgatctgaacatttgtgtcccttcaaaattcatatgttgaaattctaaccccaaagtgatggcatgaggaggtgggaaatttgggaagtgactaggtcatgagaatggagccctaatgaatgggattagtgcccttaaagaagggacctaagagactgcctagccccttctgccatgtaaggacacagcagtaagacagtcctgtaaaaactaagaagtgggccctcaccagacactgaatctgccttgatattggacttcccagcctccagaactgtgagaaataaatttctgttgttgataagccacctagtttatggctttttgttatagcagcccaaatagactaagataatataattactagttgtgaaaattgcaatgtaggaaaagaagtgttccatgagaaaataatcaggagaaatgtcacatttgtggtaagaacttaaggg

SEQ ID NO: 464097 - DNA, 568 bp, Homo sapiens
agcaaaacctagtcttaggcctggaagctggcagaacaaagaaaaaagtgtgctgatttgcatcttctcttagttgaaagaagtctttatccaatagtcagtgcaggggtcgacatccacagcatctggtccagcctgtgtccagaggccctcagcaagcctgmgtctgtactttccgccctggacacgaggcccctccattctgaggtgctggattgtcacactgtcttctcctttcctggatgcctgctctgcatacagaccaggagctccagcaactccagctcccatctgctttggctcctgcagaggaaatttcccagggaggagaaggttagcatatggctaagaaggaagggcctgtctggtgatgaacagggaggggtgtgtggcacccttgggagaggaactggcctcccctcctctggtcgactgcagcttgttggaggtacgtacagataaggtacatagggtctttgctcctttgttagtccagatgtagcaagggcagtttcactgcagagaccatggcagtcaggctattaattgcccccctgggggctctgtc

SEQ ID NO: 464098 - DNA, 568 bp, Homo sapiens
agcaaaacctagtcttaggcctggaagctggcagaacaaagaaaaaagtgtgctgatttgcatcttctcttagttgaaagaagtctttatccaatagtcagtgcaggggtcgacatccacagcatctggtccagcctgtgtccagaggccctcagcaagcctgagtctgtactttccgccctggacacgaggcccctccattctgaggtgctggattgtcacactstcttctcctttcctggatgcctgctctgcatacagaccaggagctccagcaactccagctcccatctgctttggctcctgcagaggaaatttcccagggaggagaaggttagcatatggctaagaaggaagggcctgtctggtgatgaacagggaggggtgtgtggcacccttgggagaggaactggcctcccctcctctggtcgactgcagcttgttggaggtacgtacagataaggtacatagggtctttgctcctttgttagtccagatgtagcaagggcagtttcactgcagagaccatggcagtcaggctattaattgcccccctgggggctctgtc

SEQ ID NO: 464099 - DNA, 569 bp, Homo sapiens
ttctgacaaaagagaaatagggtaataaaaataattttctaaaggcttaccatgtaccaggttctgttataagtactttatataaacttactaaagtcctgacaagaactctaagaaatatgtattatctccatttcatagatgaaacaaaaaatgaagcttaggaagtttaagcaactggcgcaacttccatagccactacgtggtgatgccaggacttaatcccagatcgattatacttcatagcccagacccaatgccacctgaagtattgctaaagattagttaccctgaataacagtttccatattacatgattcacttttgagtcacacccactactccaattgttttcattaattaaaaattcatgtttcctgaatacatatcaattttcagtcttctggactactattaaaaatattcacatggcyttggcccaagatgctttggtaaacatactctgatgtccataaaagcaatcaaaatcaaaagggacatcatgattgcaccttctttaggatcaactgcctataggcctacttagcacaaagaaaaactttagaagc

SEQ ID NO: 464100 - DNA, 562 bp, Homo sapiens
actctgacagccataacaggagtgccacttcatggtgcgaagtgaacactgtagtcttgtygttttcccaaagagaactccgtatgttctcttaggttgagtaacccactctgaattctggttacatgtgtttttctctccctccttaaataaagagaggggttaaacatgccctctaaaagtaggtggttttgaagagaataaattcatcagataacctcaagtcacatgagaatcttagtccatttacattgccttggctagtaaaagccatctatgtatatgtcttacctcatctcctaaaaggcagagtacaaagtaagccatgtatctcaggaaggtaacttcattttgtctatttgctgttgattgtaccaagggatggaagaagtaaatatagctcaggtagcactttatactcaggcagatctcagccctctactgagtcccttagccaagcagtttctttcaaagaagccagcaggcgaaaagcagggactgccactgcatttcatatcacactgttaaaagttgtgttttgaaattttatgtttagttgcac

SEQ ID NO: 464101 - DNA, 561 bp, Homo sapiens
tgcatctgccttttttttttttttttttttgagacggagtcttgctctgtcgcccaggttggagtgcagtggcgtgatctcagctcactgcaagctccgcctcccgggttcacgccattctcctgcctcagcctccggggtagcttgggactacaggcgcctgccacgacgccccgctaattttttgtatttttcagtagagacgggatttcaccgtgttagccaggatggtcttgatctcctgaccttgtgatcctcccgcctcagcctcccaaagtgctgggattacaggcacgagccaccacgcccggccgcatctgcctatttttctagcagtaccatgctgttttggtgactacagacttgtactataatttgaatcataatgtgatgcctccagatttttttttctttgtcttgctttggctagttttggttccmtatgaattttaagactgagttttctagttctgtgaagaatgatggtcgtattttgatgggagttgaattgaaattgtagactgcttttggaagtatggttattttcacaatattgattcc

SEQ ID NO: 464102 - DNA, 451 bp, Homo sapiens
ttctgaccctcattggctgcctggtcacaggcgccgagtccaaaatctacactcgttgcaaactggcaaaaatattctcgagggctggcctgaacaattactggggcttcagccttggaaactgtgagattatttctttcctgctctctttctgtccttgacctttcccctgagatgttgaaggtcctggcyacactccctgctgtgtcttcccaactacccctgctctgccctcaccgcacccaggggtggctgctagcctaactgtggctctctgggtctcctctccttcctcccctgcccctcatttccttattcctggagtcctgtccttatgacactagccagggaaggggaaaataatgccacctctgctggcattgtggggagtggggggacctgactgttggtctagattaggctcagcccctgactgggtgtgcagcttcag

SEQ ID NO: 464103 - DNA, 517 bp, Homo sapiens
ggctgcctggtcacaggcgccgagtccaaaatctacactcgttgcaaactggcaaaaatattctcgagggctggcctgaacaattactggggcttcagccttggaaactgtgagattatttctttcctgctctctttctgtccttgacctttcccctgagatgttgaaggtcctggccacactccctgctgtgtctycccaactacccctgctctgccctcaccgcacccaggggtggctgctagcctaactgtggctctctgggtctcctctccttcctcccctgcccctcatttccttattcctggagtcctgtccttatgacactagccagggaaggggaaaataatgccacctctgctggcattgtggggagtggggggacctgactgttggtctagattaggctcagcccctgactgggtgtgcagcttcaggtgtgccatcccagcccccgatgtgcccctcgtgtgccccctgggtgcatgcccgccctgccctgcccaaggtgtattgg

SEQ ID NO: 464104 - DNA, 583 bp, Homo sapiens
gcattctgaccctcattggctgcctggtcacaggcgccgagtccaaaatctacactcgttgcaaactggcaaaaatattctcgagggctggcctgaacaattactggggcttcagccttggaaactgtgagattatttctttcctgctctctttctgtccttgacctttcccctgagatgttgaaggtcctggccacactccctgctgtgtcttcccaactacccctgctctgccctcaccgcacccaggggtggctgctagcctaactgtggctctctgggtctcctctccttcctcccctgcccctcatttccttattcctggagtcctgtccttatgacactagccagggaaggggaaaataatgccacctctgctggcattgtggggagtggggggacctgactgttggtctagattaggctcagcccctgactgggtgtgcagcttcaggtgtgccatcccagccccygatgtgcccctcgtgtgccccctgggtgcatgcccgccctgccctgcccaaggtgtattgggaggaagcagtcaggtaacaaggataaggaaactcgccctcagaccaag

SEQ ID NO: 464105 - DNA, 583 bp, Homo sapiens
gcattctgaccctcattggctgcctggtcacaggcgccgagtccaaaatctacactcgttgcaaactggcaaaaatattctcgagggctggcctgaacaattactggggcttcagccttggaaactgtgagattatttctttcctgctctctttctgtccttgacctttcccctgagatgttgaaggtcctggccacactccctgctgtgtcttcccaactacccctgctctgccctcaccgcacccaggggtggctgctagcctaactgtggctctctgggtctcctctccttcctcccctgcccctcatttccttattcctggagtcctgtccttatgacactagccagggaaggggaaaataatgccacctctgctggcattgtggggagtggggggacctgactgttggtctagattaggctcagcccctgactgggtgtgcagcttcaggtgtgccatcccagcccccgatgtgcccctcgtgtgccccctgggtgcatgcccgccctgccctgcccaaggtgtattgggaggaagcagtcaggtaacarggataaggaaactcgccctcagaccaag

SEQ ID NO: 464106 - DNA, 583 bp, Homo sapiens
gcattctgaccctcattggctgcctggtcacaggcgccgagtccaaaatctacactcgttgcaaactggcaaaaatattctcgagggctggcctgaacaattactggggcttcagccttggaaactgtgagattatttctttcctgctctctttctgtccttgacctttcccctgagatgttgaaggtcctggccacactccctgctgtgtcttcccaactacccctgctctgccctcaccgcacccaggggtggctgctagcctaactgtggctctctgggtctcctctccttcctcccctgcccctcatttccttattcctggagtcctgtccttatgacactagccagggaaggggaaaataatgccacctctgctggcattgtggggagtggggggacctgactgttggtctagattaggctcagcccctgactgggtgtgcagcttcaggtgtgccatcccagcccccgatgtgcccctcgtgtgccccctgggtgcatgcccgccctgccctgcccaaggtgtattgggaggaagcagtcaggtaacaaggatraggaaactcgccctcagaccaag

SEQ ID NO: 464107 - DNA, 561 bp, Homo sapiens
ctaactcagccttgcaaaaggactttcaaaaaagaaatattctagatgaggccaggagaagccatctaragtggcactgaagctccaaagtagttccacaaagagtgaatcaattgcatttatgtgctttggaaaaaacaaaaagcccaaacttgggatttcctgttaacccagagcagcgcggctctatccctaggactcagtggctcccagtgcaaaagccggttccctatgtgagttatgttctgcgttagaccatctgatcctcattttcccgtggattaataatttgaccactctggaagtcttgctgtgtgtactgaaaccgtctgttaactctcctgtggactgctgggtttggtatttaatgttgaacaggaatttcagaaggtcaaagtccccatctgagaggagtgccatgcaagtaatgaaaccaggcagacaagttcaccctcaaggagatggaagtctttgagtgtggttgacaaaagacctttagaccatgggcatttggggcctggggtagagcgaacggagaagaaaattagcttagggagagat

SEQ ID NO: 464108 - DNA, 566 bp, Homo sapiens
tctatttgaaatagatattaagggcgctctgctttctaaattctccccaagtgaaacagagctctctatgaggcccctgagaacaacagagcattaacacaattcctgccctgaagacgttgtgtctcctcttaggtcaagagccaataagcacataattggcccttaattgtatgaactgtattcccggtgcttttcacagcacatggcattgcgtaagggtcaacatggcttgctgatttatgtgttgatctctctctctctctgtgtgtgtgtgtgtgtgcgtgcgttgtgtgtgtgtgtgtgtgtgaagagagagaaggggatttggcagtgatgggaggccacagcaaggggggcaccaagaattagataactcctataatcagtgttgtttactattcattagcaagagaaaatacaattgcaagaaaatccatttatgattatagaggagaatggaactatgcattccagatttttttccacacaaaacattcagacacaayttacattcacacttttcccctacaagtaataattagcaaacagctgtcacaaggttt

SEQ ID NO: 464109 - DNA, 569 bp, Homo sapiens
acctaactaacttcatcttgcttttaacttccaaactgcccccagtcattagtgggcatgagccaaactaactttgggagatatgtagtttacagtttaaatgagaatagcccctcccacaacaaaaccacctttgtaaaacttataaaaggccacaagattgggaggatgagaggggcctgaattctgctaagactataggtgtagctaaatggtcatcagcctttattccggaggttgcaagatttggaacttctccaattactcctataaataacaccactactgtagaacctaagattrgccttttgagatatcttttcaggcttttgtgtttctgacaaccagatggctccgcccaaaacagtgactcctctgtggcccccactcagaggaagactcagtgcacaaaaaccgttttccacacccctatgactacatccccaaccaatcagcagcacccattcccaagacccctgcccaccaaactatccttgaaaactccttgcctctggattttcagggaggctgaactgagtaataataaaactctgctctcccatttagcc

SEQ ID NO: 464110 - DNA, 625 bp, Homo sapiens
agtcagcccttcgtttttcaaagttcttgctatgcccttcgccttcttgcctccggtcccctcaaccccatcccaactctccaatcctttaatcatctttgccattcactaccccccacctcccgcagtgcagcagctgctctgtgggtgtctacataccagtgtgtatgtgttgcacactttcctgcatgtgtaccactaaatgctgtggactgcattgggcatgcctgtctacatgagacccttatctagctcccactactgggggaaaggggcctaatggctatttctcccacagctccaggacaaacgcctcagaatactttcagccataarcagggagaggaaaaagaagataaatattccgagatccaaatagcaccgaccccaccaagccaaaggtcaaggcctttcctttcgggagagccactggaaaagaaagtgctttgagttcccctcctttcctatgcaaaattagagccatctctctcccccccagcttccccactgggaagttcttcctgaagtctaagctccatcctacctgctgtgatcatggatagacagagtgacatcgaccacaatacagtcagacgtccagcttctagaacacagcttctagtac

SEQ ID NO: 464111 - DNA, 591 bp, Homo sapiens
  misc_feature (1)...(591): n = A,T,C or G
ggccacctgctgcaggggactgatggaggaggcacacgggaactgtgggaatggttcacactttggtccaggtagtatgcaggtgtgtgcatttgtaaaacgtgagctgtacaagatatgcatacattacttaagtaaattatactataccacaatttttagaaacgtacaatctctgccctcatgaggtccagtctggcatcctgtgtcatcatcgtaacagtcatgacaataacagcaggtgacaccgactgagtcctctgtatgtgccagccctcagctgggctactctgaaacaggatctgattgagcgtttctaactactgggcaaaatactgccccaggagctccatattagagacaggagaataaagcttagagaggtgacaygctgtccaaggtgacaatgcanaaagtgaggatgccaggtttgaaccctggcccatcagtctncaaggcccactcctgctgcacgggcagatcccgcctccctgccctctcctccccacactgcctgctcagatgtggcacctggaggcagccagtcctcgcccctcgccccctcctctccagtgctggaaggaacagctc

SEQ ID NO: 464112 - DNA, 580 bp, Homo sapiens
cactgtctctgtccctctccagaatccacagctttactggggctgggaccttgtctggcctgtccaacagagactctccatcacccggcacagagtaggtgctcaacaaacggttgttaaaatcaaaggggggacaagtagaggggaagtgccttcaagttctcaagaactctcctgcatctaacttcataatgcctacagaaacagggaacacatctaaaggtcacaggccctggggaggcagggtgcatgggaaagctctgaattctggagacttctgcctcactcccactgggtggaggagtttccattacccatcccagagagagaggggactctgaggctgcttcacttactgctgggttgcagctgggctttttctagaacaggacacttggttacactacgttaccaggtgtcgattgccagaggaaaagacttttgaaaaagaagttcagttcacagaacatctccccggggcaygtgggtggtgtaagggattcacccggctggtgtacgggatttgtcagttcttttataccatctcttttaagcttctcacccttccctcagaagcagg

SEQ ID NO: 464113 - DNA, 614 bp, Homo sapiens
aaggtggggtaaaaaggtaggtgtcccctttcagttcccctttctagctcagaggcctttaagccagagttcgtgaatgagtttcagaaaatttcagagaactccctgacacgggatgaaaggagctgtgtgtgtgcatttggatggctgcagggtggtccggtggtcacccccgtgctcaaaggtgtcgccctccctgcaacacaagagaaccattgctccagggggagtcagaagccaggaaggggacccttctttcccatcttccccctcaagactcggagcctcagccaggtgcccccctccccagcccctgagccctctcctataaccctaggcagggaaagggggctctctcggatatgaggtgttcagttagggactcaggcccagcactgtcccaaccaagaaccccmgagaggtctaacccagcagatttccaaaggactctccgcttctagcaaggcgggaatccctgcatttatgcgtacttttcagctttgcaaagtgcatttctgctcattccaaatttgattctcacagtcacacatatgtgtgaataaacaggtttagaggggtgaggggcctgacgtcacagggacagtgagggcaat

SEQ ID NO: 464114 - DNA, 569 bp, Homo sapiens
taaatatcacaaaatttatttttggacttgtgctctgacccaaagtgggtatggaagacaattttccatgcartttgtaccaaagagatgatttgattcttctgggtagttggcaccctcccagtaaatgtagaggccaaaggtatccaggatgattactcagtctgagtcaacattacccacttcaggcctggagtagttttaagagacagcaaatttagttatattctctagtgatctatataagtcaacaacttgatttgaggtaattttatgacattttattaatcaaattccatttttgtaatgactggatgtgatttgcctcctcagtagctcctaaaccaatttaaacaatgatctatgaatgagataatgaatttgaagatctaaatatcctgtaaatagaaggtattctaatcagcattgttattactatttttcgctgctactagatttgttctttagccatgtgtgacatcatgatattttacttttcccaagaaatcataaagaagcacctcaaccattatttctttttaggagcacatttacaaactgatgaaaag

SEQ ID NO: 464115 - DNA, 572 bp, Homo sapiens
ctttgcattttataagggccatttaagttgtttctgtttgtttattgcttattgtattactttctgtttgtttgtttctgcagatgttcatgctttgcaaaatttattagaagctgttttcatgtttcatgttagtcttctgtatgcctagtttcatggaatcaaaattacaataaagaaaagaaagtaacaaagtcattaggtcaaaaacttgaagagaggtttctttgtttagtaagctagaatgtatgttttgaaccacaggcctcataactgaaagtagactcacctttttcaataatagatgacaaaatgtcggaatgtttgcttccraatatttttatttggcatttatcctgaatcacttaatatccctgtgatgaattttatacacctagcatggtagccaagcacattatgggggtattgtagtagacctcattattcaacaatgttaataatcaatgtctctctgttcataactccttatgtaatcaatataacagggaagagaaaatctggacataaacatcaacgtcattcattctttttaatgttaaaatagttcatag

SEQ ID NO: 464116 - DNA, 566 bp, Homo sapiens
taggtaaactacgcttaaaaattcctactatggctgggcacggtggctcacgcctgtaatcccagcactttgggaggctgaggcggactgatcacaaggtcaggagatcgagaccatcctggctaacacggtgaaaccccgtctctactaacaatacaaaaaaaaattaactggccatggtggcggacacctgtagtcccagctactcgggaggctgaggcaggagaatggcgtgaaccgggaaggtggagcttgcagtgagccaagatcatgccactgcmctccagcctgggcgacagtgcaagactctgtctcaaaaaaaaaaaaaaaatatatatatatatatatatatatattcctactacaccttcagtgaaaataatttataaactgaccattgagtttccccaccatagatattaccagcaagcatatgaaatgtgtctgctcaaagatgaactattttctcgtctttcttctgctgtggacctgaaaccatctcatttgtcattttgtagttggcagatatggctatccatcttattttattgaaactggcggtgatg

SEQ ID NO: 464117 - DNA, 566 bp, Homo sapiens
taggtaaactacgcttaaaaattcctactatggctgggcacggtggctcacgcctgtaatcccagcactttgggaggctgaggcggactgatcacaaggtcaggagatcgagaccatcctggctaacacggtgaaaccccgtctctactaacaatacaaaaaaaaattaactggccatggtggcggacacctgtagtcccagctactcgggaggctgaggcaggagaatggcgtgaaccgggaaggtggagcttgcagtgagccaagatcatgccactgccctccagcctgggcgacagtgcaagactctgtctcaaaaaaaaaaaaaaaatatatatatatatatatatatatattcctactacaccttcagtgaaaataatttataaactgrccattgagtttccccaccatagatattaccagcaagcatatgaaatgtgtctgctcaaagatgaactattttctcgtctttcttctgctgtggacctgaaaccatctcatttgtcattttgtagttggcagatatggctatccatcttattttattgaaactggcggtgatg

SEQ ID NO: 464118 - DNA, 558 bp, Homo sapiens
tgtatcatgggtttttgtcagagtgtccgatacagccctgggggttcctaaggaatgctgtggggctgctgagtagacactccccacagtgggaaatgtcacccctgctgctacatatgccaggggcagaagtttctacagcatttcccaaagtattgtgttccaatgaatatgaagtcttgggtttatgccagtagctatgaggcttcagccagagaccatcctgggggctctgtatgataagtttacaaaccaagagcacccatgtattcaagcactactagattcttatatccaacaacaacaacaaaacagttattgggaacctactgtgggccaggcaatttgttctgagaatggatagataagacaaagcctctgctcataggaagcttatactttgcaaaaggacagatatgaacacaaattactactttggrgatactactaacagttgcacctgagttggttcattctgctcatgcaagttaactgttcagtgaacagatttggctttccacgaacttccttaatataaatcatgatagcttctcttaa

SEQ ID NO: 464119 - DNA, 580 bp, Homo sapiens
ctttctcttttctgattataaaatgtaaatcttcaaggtactttcaggagatctggggaatgataaaatttttgsagtttcagaattgaaaggaacttagaggtccctatttccctgggtccaatccccagcccattgcaagaatcttttctgtaggctcagtgacaaatgggtattcagcatttggcagctcctgagtatctgagatgtggtacccgtagacagcagaccattccatctcttagaaatcccttccctaatccacttttctgtaacttccagctattaatcctagttctatttcctgaagccactgcagagtaatacaagcacttcctctagatgacaactagtgaattgcttgaaggtgtgatttacatcacctccctcaagttttctttttctttcccttagttaaaatctctacattggctgggcacagtggcttgtgcctgtaatcccagcactttgggaggctgaggcaaggggttgtggggatcacttaaggccaggagttcaagatcagcctgggcaacaaaatagatctggtctctataaaaaacaaatttataaattaaaa

SEQ ID NO: 464120 - DNA, 537 bp, Homo sapiens
tatattttaaagatgaatatcatcttcctccagtattggttgaaaggatgaagataatgtaaatcatcaagcacagtgcttgatacataatggataaagcaatgtttatcttacctgcttcctttcttttttccaaaaggtcatcgttgcagaaagataaaagaaatatccacacatccttcctacctggggtggggtcaaggatgaagtttaggaggccaaagttgagtggtgcggatcaggatcccagagatcacaggaaacacctagagcacagtcagatatggtggtgggttggaaaccgatcaattagagtccataaagcaccaggatgaaaaaggtgaccaaaaggtgataatgagctaagtcaaggacacagcatccttgaacaagtagagtctggaaactccacttctagaagacaaaggcagaggttgttttgaagacatctacagcctcatgctatggtgtgaatgtctgcgtcctccaagactcatgttgaagatggggtatttcakaggtggctgggttatattt

SEQ ID NO: 464121 - DNA, 577 bp, Homo sapiens
aaaaacatttccagtttctttagttttctgactggggttgcagccagtccaaagcagggaaaacaatataaaaatgtgggaccaaggaatccttgttcacttaaagcatgaaatccaatggcaatcttcacgcttcagtaactttcatgcaacaacttattgtgcttcttggcagacaactgtggctaaagattccatctctacccatgcctaagccatgtaaatcagtatcccttggttaacatgaagcactatggaagaggtcagtgtgtgaagggcaccgctaagagtcagttccaatctttggttaatcagtccacccacagcagaacagattttatmcaactgagagaagggcttaaaagggaaattttgtcaaaagtatttacaggaattaagtaaaatgggagccactgacaagttttttaaatgtatataaaaattttaaaaagggagaagggaaagaagttggggaggtaggatttggcaatgcccaaaagtgaagaatatgaatggcattaagaacagatttaaatgaagcaaaggaaaatatctgaaatttgagtttcattcatat

SEQ ID NO: 464122 - DNA, 571 bp, Homo sapiens
tagtatgtgggaggatttacgtagkttatatgcaaacactacaccattttatattagtgacttgagcatctgtggattttggtatctgaggaggtccaggaaccaattatttcccagggatgccaagaggtgactgtattctcaaaataatctgtaacctccaaaaagttaagagacactgagctatgatatttttagaattgtgttttaaagaacaaatcagtacctgatttaataagtcacactcaagcttaattcaaacagaaatattaatttgcaaaatatacagatgcatattcatcatgaggcagaaaggccttttaaatagctttgaaaatgtggaacatcaatttgtgttgttcttccatgggagaaaaaggattactaagtctcaggtaagcctccaaaaaatatttccatctgcccctggcttccgtactatccaagcttgtcttgaaaccttgaaataaatttcaaggtgacaacctaaatttaactctgcggtagtgggttgtggatttctcagcattttcctttttagttagcatggaagtcaaaagttacaaaagca

SEQ ID NO: 464123 - DNA, 392 bp, Homo sapiens
gtcgtgtagggtaagtatttatttttcccatttcaaatgagaagtttgagacttggaggcatttagtaaaatctcactcaagaaggaagttggtgtttgagccaaatctttttagctgcagttgcatcccttgaacactacatcacataaaactgtcatagctgtgygagttatcttgaagtctttgtatctgaggcagggaaaatataaatggagagagcctaagcacagtggcaggagtgggaagagaagtgagaatttttatgtaatccatcattcgggcatttagctcttgacacaatgttgccctccccaacttctgtctcactggatatctttagattaaagaaataacataaattttgcatgagacttttcgaaatcatggaaga

SEQ ID NO: 464124 - DNA, 392 bp, Homo sapiens
gtcgtgtagggtaagtatttatttttcccatttcaaatgagaagtttgagacttggaggcatttagtaaaatctcactcaagaaggaagttggtgtttgagccaaatctttttagctgcagttgcatcccttgaacactacatcacataaaactgtcatagctgtgtgagttmtcttgaagtctttgtatctgaggcagggaaaatataaatggagagagcctaagcacagtggcaggagtgggaagagaagtgagaatttttatgtaatccatcattcgggcatttagctcttgacacaatgttgccctccccaacttctgtctcactggatatctttagattaaagaaataacataaattttgcatgagacttttcgaaatcatggaaga

SEQ ID NO: 464125 - DNA, 392 bp, Homo sapiens
gtcgtgtagggtaagtatttatttttcccatttcaaatgagaagtttgagacttggaggcatttagtaaaatctcactcaagaaggaagttggtgtttgagccaaatctttttagctgcagttgcatcccttgaacactacatcacataaaactgtcatagctgtgtgagttatcttgaagtctttgtatctgaggcagggaaaatataaatggagagagcctaagcacagtggcaggagtgggaagagaagtgagaatttttatgtaatccatcattcgggcatttagctcwtgacacaatgttgccctccccaacttctgtctcactggatatctttagattaaagaaataacataaattttgcatgagacttttcgaaatcatggaaga

SEQ ID NO: 464126 - DNA, 460 bp, Homo sapiens
tcaaattttcagaatttgaaaatgatagctgtgtaagatacaaatgtaaggtccagtttcttaattctatacatagttcctttataaaagatacagcagaaaaggaaatctcatttataacgagaggtttttttttttaagaaagaaacctaacaagaaatgcatgagacatgcacaagaaaaatctaagatgctcctgaataacacagaagttggtaagaacaaatgcttaggatgactcagcttcagaaaaaaactcaattctcccaagttttctataaatktataacatttgaatgccaaaaagggttcttttctggtgctagacaattgattccaaagatcacatagcaaaataactaggaaaaacctaaaatgaagagcaacaagtaaaaggtgtattgggattgagagggtctagacttatgagacataaaacactaaaatccaaacagtgatg

SEQ ID NO: 464127 - DNA, 460 bp, Homo sapiens
tcaaattttcagaatttgaaaatgatagctgtgtaagatacaaatgtaaggtccagtttcttaattctatacatagttcctttataaaagatacagcagaaaaggaaatctcatttataacgagaggtttttttttttaagaaagaaacctaacaagaaatgcatgagacatgcacaagaaaaatctaagatgctcctgaataacacagaagttggtaagaacaaatgcttaggatgactcagcttcagaaaaaaactcaattctcccaagttttctataaatgtataacatttgaatgccaaaaagggttcttttctggtgctagacaattgattccaaagatcacatagcaaaataactaggaaaaacctaaaatgaagagcaacaastaaaaggtgtattgggattgagagggtctagacttatgagacataaaacactaaaatccaaacagtgatg

SEQ ID NO: 464128 - DNA, 591 bp, Homo sapiens
gtgaaaccctatctctactaaaaacacaaaagttagctgggcstggctatgcatgcctgtaattccagctactcgggaggctgaggctggagaatagcttgaaccagggaggtggagataacagtgagctgagatgccactatgacactccagcctgggtgacagagcaagactctctctcaaaaaaaaaaaaagatttttatagtccagtattcaacgttcatagtacacctttcttatcctagtaaatcttcttttatcaaggtatatgatcccatatagtagttaactcttactcttactttatgacaacacagtctttattactatgtatcagaaaattaaataattaaaaacaaattttataatattattgctagttgtttttattaagattcaatttcccttgcacttaataaatgtttcagttgctgttgagtcataaattttaaaaataaaattctccaaattattctttaacttttcattcttataagtgcattgctaatgtctaaatctttaaattaatgctagattttaaagtactctactaacagtaaatttaaaatacctttatttgaagaattattt

SEQ ID NO: 464129 - DNA, 574 bp, Homo sapiens
caaatcaagttatttcagctttttaggtagaacaatttgtacacatcattttgaatgatgatctagtatcttgttgaacagatattcatgattttcttgcaatttcctttgtgtttccatatttaatatagtgtattcttagccctctagctttcctgttattcccttgggtaatagtcctagaaaagcaagtcctagaattatggccatgaattttttgggggttttttggaaacaaagtctcattcaactgttgcccaggctggagtgcagtggcctgatctcggctcactgcaacctctgcctcctgggtttaagcaattctcctgcttcagcctcccaaggagctgggattacaggtgtgcaccaccaagcccagctaattttttgtattttagtagagattgggtttcaccatgttatccaggctggtcttaaactcytgagctcaagcaatctgcctgcctcagctcccaaaatgctaggattacaggtgtgagccactacacccagcctatggccatgaatgttttaaggctttattactcactctcacgtcctttccaaggagact

SEQ ID NO: 464130 - DNA, 583 bp, Homo sapiens
ttccagacatctagcttggcactcttttcattgttctacatactcaaggtttgtttgtttaagatgatggtcaatattgtaccttaggaagaaaagttaaagagaaattctcttgctaaatggcaattattttgaggcctcaaagtcatcatagagttaagtttccaaagaatcacacatacacacagacacacacacacacagagataaacacacatacaggtaacttaagaacctaggatgaagagatataaaactgtattttattttttagccaaatactagactgacctgaagttaacattgaaaaaaattatttaatatatgtttgaatgccctgagttactacataaacttagaaatgagtagcaatctctcaattaactsctttaggtattatttttctcagtgaagttgatattccagtactgtgtaaaatctagtttaaaatttccatgatccttcatcatgtttccaagaagaatttacagtttgtatgagtttgccagggatgctgtaacaaagtaccacagactgggtggcttaaacaatagaaatttattgtttcacagctctgcaggct

SEQ ID NO: 464131 - DNA, 590 bp, Homo sapiens
gaaagctctaaatataagaatggatcctaaacttatgaggaagtagcaaaataatgctactgtggaaaaatgaagcttggtaacacaagatgaataaagaactgcagmaaagagaaaccaggaggttacccagacacttgactcagcacttcccaaattctacctcgtttattcttaggtattaagtgaaatacagtgtacttgggaatggcaggcatgaacctgtcaaaaaggtcacaaaataggcaaagctaaggcaactaagatcacttggcccagggaatgctgaagtggagggaaactacaaaaacaattcttcaaattggcaaataaatattctccagatgaagataagcagctgttttagtcagctgggtagtatctgggcttatattacagaagagagaattatagttaggcttaggaaaaacttcctggtacctggcagttggaaatgttccttctctggggatctttaagcacagggccgaatactgccttgagatgattttagtgtagccttcttgaagttgtgaggataaccaaatgttgcatatctagtgatttacattcaaatctcatagatgtgg

SEQ ID NO: 464132 - DNA, 545 bp, Homo sapiens
caaaatctcacaaatcaccactaaagaacttactcatgtaaccaaatacctcctgaatcccaataacttatggaaaaaaatagtcaacatcaaaaacttctcaaactcygtgtgcatgtggaatacgccagcccactaccaatgaaaagaacataatatctatccttttgagtatctagtccctatcctcatgaaaaaaatgcaacatttattgtttttgttgctagtttggttaggtttgtgattcatttttctatggctatgctctcttagattcctttatgatgagagggtgagaaaaagtggttatatatggattgatgtgagaggagaaatttaataaattaaattaataaaaaaattaacaatagtacaaagaaagagaagggagtgagaattaaggtaactaattatcatgagaaaaaaaggcagagaaaatagcagaaatgaagaaaggacaactctaactccttcggtaggtcaagaaatacttactagtaccagaagtaaaagggtaaataaaacagtcacagttctaccccttg

SEQ ID NO: 464133 - DNA, 545 bp, Homo sapiens
caaaatctcacaaatcaccactaaagaacttactcatgtaaccaaatacctcctgaatcccaataacttatggaaaaaaatagtcaacatcaaaaacttctcaaactccgtgtgcatgtggaatacgccagcccactaccaatgaaaagaacataatatctatccttttgagtatctagtccctmtcctcatgaaaaaaatgcaacatttattgtttttgttgctagtttggttaggtttgtgattcatttttctatggctatgctctcttagattcctttatgatgagagggtgagaaaaagtggttatatatggattgatgtgagaggagaaatttaataaattaaattaataaaaaaattaacaatagtacaaagaaagagaagggagtgagaattaaggtaactaattatcatgagaaaaaaaggcagagaaaatagcagaaatgaagaaaggacaactctaactccttcggtaggtcaagaaatacttactagtaccagaagtaaaagggtaaataaaacagtcacagttctaccccttg

SEQ ID NO: 464134 - DNA, 613 bp, Homo sapiens
gggttttcaaagctcacattagctcctccctagccgccatctctccctttcatggaaaacatttttcagactgacagagactatgctttgacctgtgtcaagccttaccccagarcagtggttccaagcattttttttttcatggaccagtaaaatctctctagatgtttggaaactaaggtaatattgttatcttttaattcttcaattaaaaatttaaaaggcaaaaacacagctacaagaatttaaacaaaagaataaacccaaaaataaagttacaacctcataacagatttatacatattatatatataaaatgcacttagctccatgaaaaagctcagaattcttacttttttttcatcttgccacagattgccttttgggaaaaactacctttgtgctttgcatagataggggctataaaagaacaagttaaccaaatattcaatttctgctgtttatgtaccatggcatgggcttatgtttacaatggcagcagagtagagaaatgcaaggaagtgagaaaatgtatgaatcagctccataccatcttagccttcagagctatttattattgccagtatggtcaatacctcacatacgcaatgag

SEQ ID NO: 464135 - DNA, 586 bp, Homo sapiens
tctatttctcaagggaaaaaatatacagtcaaaccttgcttatccataacccaaacttccggaagccttaagtatttggaactgctccaaacccagaagaggggaggagtgagaggaatagagtgggggtgggagaagtggggagcagagagagacagagaatgaactagcggaaagcaagcaagtcagcttttagaagtagacctgaagccctagcaacactgaaaagagacctggagcttacatctgattggctttccagccagaaggaatagagagctctgattggctggtgatgatgtctccaaataaccagcctttttcaggaaagcaaatttatgtggcagaaaggacaagagacagaagaagcacgcaagaagaaaagcgaggagaacagagcaaaaaaaaaaaaaaaaaaaaaaggaagattatttgttacagtggtggagactgagacaaaaatgagaataacaagcctatttacrtaactgcttacagtttacaaagtgcttttacatgtaatcattgatattgtctttacaaagacctgcagggctcccagaagttaaatggcatgccccaggtc

SEQ ID NO: 464136 - DNA, 531 bp, Homo sapiens
gtccacaggatgatttgaaaagcacagacataatgctgggaaactagaagtacaagttcatgtgtagggatgtgagcrtactcagtgctatctgcatgctcagctaagacctgagaaagatctaaattctcaactctgcctaaccttgtggctctatggaggcaggaagtgaaagtgaaggcagagtttcatactgcctgctggagtgttcaaggtgtgctccaaatgcacacagagcccttaggcaaagattggaggacttgtgagctccaggaatttaagaaaatctttgtccaatcattagctgaacactaagtcagctatcagagactccaatggccacctatgacaaagaaatcacatattaaataattagctcaaacaaaacaagcaccaactacaaacagcaactttcacaaaccctggggaggtaggagattctgatttcaagagttgcaacattttttaaaatgtagtttcaacaaaaaattaggagacattcaaagaaactaaaagtatggcacacatgca

SEQ ID NO: 464137 - DNA, 531 bp, Homo sapiens
gtccacaggatgatttgaaaagcacagacataatgctgggaaactagaagtacaagttcatgtgtagggatgtgagcatactcagtgctatctgcatgctcagctaagacctgagaaagatctaaattctcawctctgcctaaccttgtggctctatggaggcaggaagtgaaagtgaaggcagagtttcatactgcctgctggagtgttcaaggtgtgctccaaatgcacacagagcccttaggcaaagattggaggacttgtgagctccaggaatttaagaaaatctttgtccaatcattagctgaacactaagtcagctatcagagactccaatggccacctatgacaaagaaatcacatattaaataattagctcaaacaaaacaagcaccaactacaaacagcaactttcacaaaccctggggaggtaggagattctgatttcaagagttgcaacattttttaaaatgtagtttcaacaaaaaattaggagacattcaaagaaactaaaagtatggcacacatgca

SEQ ID NO: 464138 - DNA, 531 bp, Homo sapiens
gtccacaggatgatttgaaaagcacagacataatgctgggaaactagaagtacaagttcatgtgtagggatgtgagcatactcagtgctatctgcatgctcagctaagacctgagaaagatctaaattctcaactctgcctaaccttgtggctctatggaggcaggaagtgaaagtgaaggcagagtttcatactgcctgctggagtgttcaaggtgtgctccaaatgcacacagagcccttaggcaaagattggaggacttgtgagctccaggaatttaagaaaatctttgtccaatcattagctgaacactaagtcagctatcagagactccaatggccacctatgacaaagaaatcacrtattaaataattagctcaaacaaaacaagcaccaactacaaacagcaactttcacaaaccctggggaggtaggagattctgatttcaagagttgcaacattttttaaaatgtagtttcaacaaaaaattaggagacattcaaagaaactaaaagtatggcacacatgca

SEQ ID NO: 464139 - DNA, 527 bp, Homo sapiens
taaatcaattgggtcaagttgattgatagtgttatatcattgatgattttatatcttcttgttctataaattattgacaaaggggctttgataactctagcaattattgtggattttgtctacttcttcttatggctttatcattttttttcctcattatcatgtattttgcaatttggtaattaggtatacatgtatttaggactgttttgttcttttgaattagcccacttatcattatgaaattatctcctttaacccttttaatattctttgttctaaaayctactttgtctaatgtttatatagccacttcagctttcttttgattagtgttagcatggcatatattattcatcctttttacttttaatctagccgtatctttatatttaaagtgtgtttgtttttggcagcatatagttatgtcctgattttaaaaatctaatctaacaatccttgtttttttattggagcatttagaccacttacatttattgtcattgttggtataattaggtttaggt

SEQ ID NO: 464140 - DNA, 600 bp, Homo sapiens
taagacccaaatatctgtaaggtggaaggtccctttctgaaagatgaaaaattccagtagtccagagttgttcttctgagcattgctagggaagcaaggcagtgtggtataaccatgagggttcagagagagatggctagagtatragttttggtttcatcatttgatcacttgcaagcagtgctacccagagaacgtcacttaacctttcagaatatattcccttatcttcctatcgaattatcataatttagatatcatctaaataccataatatttattttacaatattttgattggagttaaaagaggcaattttactaaaaattatctataattaggcagtttcaaatgtaaatgattgttcctattaatttacttcctttgcttttcattagtacaacaacagaagttaggtagtaggaatgtaatgaatgcaatgtaatattagcaatcataactaatgaagggagtaagtgagtacttagatcaaacctgttttttcagcagaggcaatggcatttacttcagccacacccgtcatcactgatatttaatgctttctgcctttatactcttccactgagagtaaaaggacct

SEQ ID NO: 464141 - DNA, 600 bp, Homo sapiens
taagacccaaatatctgtaaggtggaaggtccctttctgaaagatgaaaaattccagtagtccagagttgttcttctgagcattgctagggaagcaaggcagtgtggtataaccatgagggttcagagagagatggctagagtatgagttttggtttcatcatttgatcacttgcaagcagtgctacccagagaacgtcacttaacctttcagaatatattcccttatcttcctatcgaattatcataatttagatatcatctaaataccataatatttattttacaatattttgattggagttaaaagaggcaattttactaaaaattatctataattaggcagtttcaaatgtaaatgattgttcctattaatttacttcctttgcttttcattagtacaacaacagaagttaggtagtaggaatgtaatgaatgcaatgtartattagcaatcataactaatgaagggagtaagtgagtacttagatcaaacctgttttttcagcagaggcaatggcatttacttcagccacacccgtcatcactgatatttaatgctttctgcctttatactcttccactgagagtaaaaggacct

SEQ ID NO: 464142 - DNA, 597 bp, Homo sapiens
atttgtggaattaaaaacaaacaagaacatattgatctagaatatgaatagtgatctggttggcaatatcaatttcacagagttattggaatacagactagaaactatgggagtggatgagattcctgatggattatgggtagaattagaagagaagatagcttatcacagaaccctgagaaataccaacacttatgggctgaaaagagaagaaagagtccatgaaagaatggttggtgagagaagagataatcctggaagcctagggtagaaagaaattcaagaaagatgtattcaacagagtcaaataacaaattgagtatcaaataaaacaaatgactatcagatttgataattaggaggccttggtgmcattttccagccatattttgatggcattgtgggaggaaatatacaggatcaattttgtatgtagatccaccttttcccttaggtagttgctgtatccatgtctggagaagtcagaggaagcatggacttcagcttcctgtttaagccatgttctcacatcccattttagcaggggctttgttctttaggagtccacagggttccattaataatgctgtgatatcc

SEQ ID NO: 464143 - DNA, 597 bp, Homo sapiens
atttgtggaattaaaaacaaacaagaacatattgatctagaatatgaatagtgatctggttggcaatatcaatttcacagagttattggaatacagactagaaactatgggagtggatgagattcctgatggattatgggtagaattagaagagaagatagcttatcacagaaccctgagaaataccaacacttatgggctgaaaagagaagaaagagtccatgaaagaatggttggtgagagaagagataatcctggaagcctagggtagaaagaaattcaagaaagatgtattcaacagagtcaaataacaaattgagtatcaaataaaacaaatgactatcagatttgataattaggaggccttggtgccattttccagccatattttgrtggcattgtgggaggaaatatacaggatcaattttgtatgtagatccaccttttcccttaggtagttgctgtatccatgtctggagaagtcagaggaagcatggacttcagcttcctgtttaagccatgttctcacatcccattttagcaggggctttgttctttaggagtccacagggttccattaataatgctgtgatatcc

SEQ ID NO: 464144 - DNA, 621 bp, Homo sapiens
attttcacaaggatgctaaaatttaatgaaagaaaccatcaacattgtattaaacaaggaaagctgcatattctggaacatgctgtcttctgcactgacaaccaggagcagaaaagactcatttaygaaaggaaaagaaggaggaaagagagaagcttggtgaagaagagaggagagaaaaatatatatatatggctttttatttaattagtcttatacactgagccctgacctgtcaattgcaatgtttccttcctctgaaacttcatttttaaaaaatctcctttataaacattctaaggtctaaagggttgcccaaatttaaataagattttctactttctatatttaaagacgtcttcttaatgtgcttctttctaaaataaatgcatggtatatattttttgtagcagtcatgggttgtactaggcaaagaccttgtcatgcttggtaaagaagggctgtgcttttcataatcatagattgcatacctggactgtacacttgaacatgactcaagtctccaaagtttaaccatcattttataacatcaaggcctgtgtgccatatttgtgtgtgtgtgtgtgtgtgttttactacccagaaaaataaaatggtagt

SEQ ID NO: 464145 - DNA, 621 bp, Homo sapiens
attttcacaaggatgctaaaatttaatgaaagaaaccatcaacattgtattaaacaaggaaagctgcatattctggaacatgctgtcttctgcactgacaaccaggagcagaaaagactcatttatgaaaggaaaagaaggaggaaagagagaagcttggtgaagaagagaggagagaaaaawatatatatatggctttttatttaattagtcttatacactgagccctgacctgtcaattgcaatgtttccttcctctgaaacttcatttttaaaaaatctcctttataaacattctaaggtctaaagggttgcccaaatttaaataagattttctactttctatatttaaagacgtcttcttaatgtgcttctttctaaaataaatgcatggtatatattttttgtagcagtcatgggttgtactaggcaaagaccttgtcatgcttggtaaagaagggctgtgcttttcataatcatagattgcatacctggactgtacacttgaacatgactcaagtctccaaagtttaaccatcattttataacatcaaggcctgtgtgccatatttgtgtgtgtgtgtgtgtgtgttttactacccagaaaaataaaatggtagt

SEQ ID NO: 464146 - DNA, 621 bp, Homo sapiens
attttcacaaggatgctaaaatttaatgaaagaaaccatcaacattgtattaaacaaggaaagctgcatattctggaacatgctgtcttctgcactgacaaccaggagcagaaaagactcatttatgaaaggaaaagaaggaggaaagagagaagcttggtgaagaagagaggagagaaaaatawatatatatggctttttatttaattagtcttatacactgagccctgacctgtcaattgcaatgtttccttcctctgaaacttcatttttaaaaaatctcctttataaacattctaaggtctaaagggttgcccaaatttaaataagattttctactttctatatttaaagacgtcttcttaatgtgcttctttctaaaataaatgcatggtatatattttttgtagcagtcatgggttgtactaggcaaagaccttgtcatgcttggtaaagaagggctgtgcttttcataatcatagattgcatacctggactgtacacttgaacatgactcaagtctccaaagtttaaccatcattttataacatcaaggcctgtgtgccatatttgtgtgtgtgtgtgtgtgtgttttactacccagaaaaataaaatggtagt

SEQ ID NO: 464147 - DNA, 606 bp, Homo sapiens
ctgttatgctctccagatgaagaggcttccaaaattgattttctccatttgcagagagtgtttacatacaaggcacacaatgtctctaagaataaactcccaagtttatcacatccattatctaggccatgacatcacacragatggaaagcctctctgttgaaaaactttagggactagaaaaacatccagttattaaaagacaacatcaaggatttctcagcctcatagaaaaccgtagacattgcattcctaattttcagaatttgcgtccctttaaatgttctgataacagcagaaatacctgagcccttgccctggacgggttcacttgagactattttctataacttaaaggactcccttcaaaacattcctatccttgaatttcccaattactataaacctttctatgtatacatgaaagatcagtacgaatcttgcaggcttctaaatcaaaagctcaatggacatcatagtccagtagcttattttggcctctcacttgaccctgtagcaaaagcctaccctttttgtttgtgtgtagtcacagcagctgcaaagttaactgaagcctttgatgctttagtcttaggatttccactt

SEQ ID NO: 464148 - DNA, 606 bp, Homo sapiens
ctgttatgctctccagatgaagaggcttccaaaattgattttctccatttgcagagagtgtttacatacaaggcacacaatgtctctaagaataaactcccaagtttatcacatccattatctaggccatgacatcacacgagatggaaagcctctctgttgaaaaactttagggactagaaaaacatccagttattaaaagacaacatcaaggatttctcagcctcatagaaaaccgtagacattgcattcctaattttcagaatttgcgtccctttaaatgttctgataacagcagaaatacctgagcccttgccctggacgggttcacttgagactattttctataacttaaaggactcccttcaaaacattcctatccttgaatttcccaattactataaacctttctatgtatacatgaaagatcagtacgaatcttgcrggcttctaaatcaaaagctcaatggacatcatagtccagtagcttattttggcctctcacttgaccctgtagcaaaagcctaccctttttgtttgtgtgtagtcacagcagctgcaaagttaactgaagcctttgatgctttagtcttaggatttccactt

SEQ ID NO: 464149 - DNA, 527 bp, Homo sapiens
ttttcaaatattctggatataactcctcttactgatgtatgacttgaaaatacttcctcacattccaggagttatttttttctctttcttttctctaataattcattgttatttctttcttgagacaggtctcactctgtcacccaggctgaagtgcagtggtgttatcacagctcatagcagcttcaacttcctggtctcaagcaatcctcccacctcagcctcctaagtagctgggaacacagatgcatgccactatgtctggctaattttttttttttttttggtggagatgagggtttccctaygttacccaggctgggcttgaactcctcggatcaagtagtattcccaccgcagcctcccaaagtgctgggattacaggctttagcccctggctttttcacttgcttgatggtattcttcaaaacacaaaagtttcttttttttttttttttttttttgagatggaggctcactctgttgcccaggctggagtgcagtggcatgatctcagctcactacaa

SEQ ID NO: 464150 - DNA, 581 bp, Homo sapiens
ggtcaagtaggagtgggagcatggctggagggcagcctgtgtacttgggtaggggaaggggcagggagggcagggtatggctggccctggggctggagagggcagcaactgaccaatctaagagaagagatcttagaggctcctacttgaacagtttggtcctgtttgatcatcttacagaaactcaccagtccataagcctgcacacatggagctcccattgagcatttcagtgcctccttctcaaatatgaaaggtaatcagtgtcgccagatgtttgaggaaccacagtatcatggaaagaaaasagaaaaaaaaatcagaggaaatagaagcaatgtacaaaggaaaaaaacaaccaaataattaatattcccagagatacagggggaatattatatccttaaacaagaatacataactatttaaaaataaatattaacagaaagctcttaaaaattaaaaatattgtaacagaaataaacaactcaataagatgactgtaaaaataagttaagaagatcttcagagagaagcacccaactcaaagagatggaaaacggaagaaagtgtaagattac

SEQ ID NO: 464151 - DNA, 622 bp, Homo sapiens
accacttccctttatagttctaaaatggcaaagctttatcactgactgattctgggtcagaactccaaacccatcttgtgatccaaacttgtgacaggaaggagcctgtcagaggttatctcacgcatccctctgcctctgggccagtctgcattcaacccatctaagcagtcagctgcaggtgcagcaaaggacaggcatgccctgagcacacaggttggctctgctgtccacaaggaagcagcaccagtgtggaggtgaaggccctgaggccccagagactcggggccttgagctattaagaggaacggacccctgcttcctttttkcttttcgaaattagccagcagagtcagcctccttgctggaaggggaggagggtctggcagctagccaccccaaccacatcacagctagagctccacagccccagccacgacagatgtgatttatctacagcccaggaaaagcgggaaaggaatgcttttcttcccttccttgctgtttggggccattcatcaccttcgttatttttatagtcgtgtgggagtatttagctctcttcaccaccccccaggaaatgtgaacaaataaggaatcagtacacatgctatcaggaagg

SEQ ID NO: 464152 - DNA, 454 bp, Homo sapiens
tgtgtcaaattaaaagattgtgatagggcatgctaaacatagagaacagcatattcaagggcttggtggcctggggaacctggcatagataggtaatttcaaatattttagtctgtctagggtgaaagttctgtgtacgtgtgcatgtgtgtgtgtgtgtgtgtgtgtgtgtgtgtaccagaggtggtggccagagatgagtatgaaaaaataaaatgaagctcagaatgaagrgttttgaattcatggtaaaaatttaggactttaagacttcattttgtagatgatagtgaaccatagaagagtttaaaataggaaaataacttggttgtatttttcaggtagctcagcatatatgaaggatggacagaagagagagctcctatattaatgcttaaagaaattaatacaataaaaaacaggatcttaactttatccacatattttgtttttc

SEQ ID NO: 464153 - DNA, 591 bp, Homo sapiens
ttgacaactgtgatatattgatattctgtgagtctccttctattggttgtttttctcttgattgttgatcacattttcatgtcttgtaattttttactgtttaagtatacattttgtgggttttttgatggattgattgattaaattaatgaaataattttgcagagggcacaagtcattttctctgtcaggtgaaattcatatttcattaagaattaaattcagctgaagccaggacacagctttaattatattgagttcacttctggtttcaaataggacccagaacgtctctttgccttttatctgaatttgttaccttccaagggagtgatctctttgatacttgatgatttgaccaggrattatcctccagcacggccccaaaattcaagaatcacaagtcttcacaaacttctctactttccagctgtatttcctctgctaactattcagcaaaatttcagaatgtggccaagtgatttatctttggtttggaactcctctagattccaatatttcctgccttatcacattgacatttgaatcttggctggtttctcctactcttaaaaattctctctgtctatg

SEQ ID NO: 464154 - DNA, 591 bp, Homo sapiens
ttgacaactgtgatatattgatattctgtgagtctccttctattggttgtttttctcttgattgttgatcacattttcatgtcttgtaattttttactgtttaagtatacattttgtgggttttttgatggattgattgattaaattaatgaaataattttgcagagggcacaagtcattttctctgtcaggtgaaattcatatttcattaagaattaaattcagctgaagccaggacacagctttaattatattgagttcacttctggtttcaaataggacccagaacgtctctttgccttttatctgaatttgttaccttccaagggagtgatctctttgatacttgatgatttgaccagggattatcctccagcacggccccaaarttcaagaatcacaagtcttcacaaacttctctactttccagctgtatttcctctgctaactattcagcaaaatttcagaatgtggccaagtgatttatctttggtttggaactcctctagattccaatatttcctgccttatcacattgacatttgaatcttggctggtttctcctactcttaaaaattctctctgtctatg

SEQ ID NO: 464155 - DNA, 574 bp, Homo sapiens
ctcccttcttgtgtcttttgccatctgctttctgtctttctatggtgtgtgtctctctctacttctgttcttcatcctcctcattccttttctctcttgtccccagtttcactctcgctctctttctgtctctcaaaatcacacacacacacacacacataatttcttaaaacaaactcaaagrtattttaagttttatcagaagaggagtggagtatcttcaatctgcctctttgaaaaacaaaacaggaacacaaatctagcttgcctggtttcctccttctgtggccctgggtgaggccctttgcggacccatagagaaagatttgctgttgcttgtctggcctggactggcgacttcagtctgtgatttttttctttcagtgtgttcactccgttctgggctctggactgaattgttggggatccctgagtcaggcaaccccaagaagtctgcccagtggctagggttggccgtgcctgtcctgggcattgtcttacgtggttgaggttcctcaaagtttcaaggcttcttccctttattctgagcaagtcacagcacaaatcagaagtg

SEQ ID NO: 464156 - DNA, 418 bp, Homo sapiens
tctcagtaagctcttcttccccaaacacgggcttttggaatctcacggccctgccaagacatgtagttatatcatttcctgagatggggcctttcttggattattaaattgtcagagctaacaagaatgaaacatcaggtcttgcccatcagactggcaaaaatgaacatgattagcaatggatagaaagggtataaggaaacagacgctctcagacagcattcatgaaagggtacattagcacacatttttccttttttggagggcagcttgaaaatatgtatcaaaatttttacctcgmcaatttttcttctaggaatttatcaaggagttaatcaaataaattttcaaaaatatatatgcaaaagaatgctccttcagtaatgtttctgatagcagaaaaatgtataggatttgt

SEQ ID NO: 464157 - DNA, 561 bp, Homo sapiens
gtgcagtggctcagagttgaaaggcagaggtaggattggaggtcagcacaagcccaggatgagagaataagctgattcaaaacttgagtccatccacagggttttgctgtcacacatacctaactttccatctcagctctgttgcacaccagctgacgagcagaaaggatctgctcatcccagtctgcccacctcatatagggataatgggggcagaaaatacctagcaggctgtccagacctctctgctctctagcaattggccttgggaagatgctttctgctgttttcatatagaagtgaggttttaaggaagccacagggcccacagggcggtggcacatcaggtgaatctcctccagcgttctgcaaggggctgggtagaaggggctggcatgggcatctggaatccttcagcctagtcctctggcycggtgatgaaagcccaaccactgttctcagaccagcagggatagtctatccctcctgggtcacccagccttttcccaggccatcctcccttgattcacacagacttgcctaccaaggcggggctctgct

SEQ ID NO: 464158 - DNA, 612 bp, Homo sapiens
aaaacatatctgcattctgttgcagtaataaataataacattacagttttattttcctgattaactcttcagttaaaaaacaattagcacttcaaaaagaatgatgaatttcagttttaaagatattattcaaattcaatacagataaactaaaaatcacacttactgracaaaaaataattgtaccatgcagttctcactgtttcactgttttaaattaaaaataaaaataaaaatttcaagggctcacatagaatgtcagaattgaagtaactcattttccgtttttgttttttttttttttgtcttcaccattatgatacttatttcaaatttgccatttaaaatcagggatatgtaagtaccacaggaggcggagacatgaactgtgcttgaaacaaactggaagagattcaaatcttaagaatttactcttgaaacgagcatttatagctgagtttgcatgtgttggggccagttgtataactgggacttctccaaattagtgcccatgtagaatacaatgtcattaaaggataagtaataaaaatgtgccaaatggaagcttattacatctattattattattaaaatgcgacagtaaccataaca

SEQ ID NO: 464159 - DNA, 630 bp, Homo sapiens
agtaggatggagagatcacataagggagccatggatattgtccatttgcacctccacttccacccaccatccttcgctgccctgctctgtgctctgggaggctgaactctatctgtggtttcatcatttggccttcctgacctcctggattcaagtcagatttggccaacacaagacaccagcaggacatggatgagtggaaggagagacaagaagaggaatttatttctactgctccctcccttccaggccatggtgtgacagtggctgagttcctctacctgaagccatgacttctccatccatacagccattgctaggttcaataatgccactccctcccctcactcttccaggtctccagraggagatggattttccacgttgccagccccaggaagctatagcatctcttgtagatttccctgaaccttgcagtggttaaatcatcccttctctaagctctctttgaccacacttttgagcaggccatttgtgtcctgctggacccctaacaatacagggagccaagctggaaaggctcatagatttcacagcttgaggtcacaatttgggggcagttatgatggcccttgtagaagaaggaccatgtgaccccagaaagagtca

SEQ ID NO: 464160 - DNA, 591 bp, Homo sapiens
tggaacagaagcaggaaaggataatatgagcttgctgcattgcaaaatagtaatgcatttggctgtaaaggtgggctttctactgcccaatgcatttttatacataattgatgatcaatatatattctctaaattgaaatcagaataatgaagccacagaggactcaggagtgaaasgagggagaaagtggccaaggtcttttgagtttttcttccctgttgggtggttccagcagatgcagagaacaagctgaagtcaaaagtgtagtagaatgaatctgtagacagggatttcctgaagggagaaaagagggagaagccaccagcacccgtgcagtcctatagatgtggctcccgtggtgttctgaaaggtcttagggtaaatgggaccttgccaagtgacagataagtgtgaagctcccagttacccagcaagagcagaagccaaacgcaggtcccctgaagtctggcttgggacccctttcaccaagacaaagtgaccagcaaatacagcatttgactaaaacttggacatttagcagaggaaggggtggcacaaatcagccttatggagacctctgtgtgcactgg

SEQ ID NO: 464161 - DNA, 591 bp, Homo sapiens
tggaacagaagcaggaaaggataatatgagcttgctgcattgcaaaatagtaatgcatttggctgtaaaggtgggctttctactgcccaatgcatttttatacataattgatgatcaatatatattctctaaattgaaatcagaataatgaagccacagaggactcaggagtgaaaggagggagaaagtggccaaggtcttttgagtttttcttccctgttgggtggttccagcagatgcagagaacaagctgaagtcaaaagtgtagtagaatgaatctgtagacagggatttcctgaagggagaaaagagggagaagccaccagcacccgtgcagtcctatagatgtggctcccgtggtgttctgaaaggtcttagggtaaatggsaccttgccaagtgacagataagtgtgaagctcccagttacccagcaagagcagaagccaaacgcaggtcccctgaagtctggcttgggacccctttcaccaagacaaagtgaccagcaaatacagcatttgactaaaacttggacatttagcagaggaaggggtggcacaaatcagccttatggagacctctgtgtgcactgg

SEQ ID NO: 464162 - DNA, 595 bp, Homo sapiens
tatgtggtttctcccatcttctaaaagcctcaccctttatctacagcaaattatggtcatgctggtttctacaccattggttttctccataaactgcctgtgcaggtctctccattgaaactgcaatggcccggttgactctgaaccccagagccctcctctcccatcttgattcctgggaatgcaggtttggtctaactgactcctggaagtaatattggggtgtagctgagatatgwtcatgtcatgattgtaggctaggaacccaagacaacctgggggtgttctatacacagaactcaatgtggtgcatgaatcagcagccttggttacgaggggccatatttgcgttacctgtgtggtcatccatggcctaaaatgttttgatctgtttcatcttcttccaccctaaaagcttggaaccaagtctcaatttgtaccatttcagtgggagaacagattagcccaaagcttcaatgtttgttaatagaaccagaagaagggccaagaggttttacctcgatgcttagagctgggctggcttagatcaaccaccaagattttttactcccagaaagttcctttgagctctctt

SEQ ID NO: 464163 - DNA, 595 bp, Homo sapiens
tatgtggtttctcccatcttctaaaagcctcaccctttatctacagcaaattatggtcatgctggtttctacaccattggttttctccataaactgcctgtgcaggtctctccattgaaactgcaatggcccggttgactctgaaccccagagccctcctctcccatcttgattcctgggaatgcaggtttggtctaactgactcctggaagtaatattggggtgtagctgagatatgttcatgtcatgattgtaggctaggaacccaagacaacctgggggtgttctatacacagaactcaatgtggtgcatgaatcagcagccttggttacgaggggccatatttgcsttacctgtgtggtcatccatggcctaaaatgttttgatctgtttcatcttcttccaccctaaaagcttggaaccaagtctcaatttgtaccatttcagtgggagaacagattagcccaaagcttcaatgtttgttaatagaaccagaagaagggccaagaggttttacctcgatgcttagagctgggctggcttagatcaaccaccaagattttttactcccagaaagttcctttgagctctctt

SEQ ID NO: 464164 - DNA, 445 bp, Homo sapiens
attcagcaatgaagccatctgggtctggaattctctttgtagtgaggttttaaagtgcaaatctaaatttaaaaatagatataagaattttcagaacgcatattttcttttgagggagcttttgtagtaagcatctttcaaaaaatttgtccattttatytaaattgttgatatataggcataaagtttttcataatactctcttattgtgcttttaacatctctagtgtctgtagtaatgtcttgtcattctttcttgatattggtaatttatgtatttactgttttcttgattattattgtcagggtttatcaattgtgttgatctttagactgaacaaattttggttttattgatttttcctttttctcctgttttctttttaattgattttggtccttatcttttttgttcttttcctagtatcttaaggtaggggcttag

SEQ ID NO: 464165 - DNA, 563 bp, Homo sapiens
tcaatgtttgttaatagaaccagaagaagggccaagaggttttacctcgatgcttagagctgggctggcttagatcaaccaccaagattttttwctcccagaaagttcctttgagctctcttacctaatctcatgggataagacggaacatccataaaatgaccacacccatgtttgctggacccttttggaatcctattcagtgagaccatggtccaatatgctggccctgaacttgagtactggagagtgcacctctccttcaggagttgggggtaggatggataggaaggttcaggttccttgctctttccctagaacccagtgtccccattccagtcatctccaggctctgggcccaattcagttctggggaaagggaatttgaaggagcctctttttaagatttagcacctcgaggactcagtccaatcttgaatagaagcctgcttaatcctgaaaccaagttctaactttgtacccctgatatctggggctaattttgcagtccctccctccccaccttatgctctgaccttgtactttagtcctcctaatttggg

SEQ ID NO: 464166 - DNA, 486 bp, Homo sapiens
cctaatagcaacaagtaaaaatttctccaaacattaccaaatgtccccagggtaggggttggggagcaaaattgtccacagttgagaactgctggcccaaactagagtttycttcaataaaggtatagctagactaggacacctttcagtcacggtggcccctggcaccctgggttagcttaaagatgacaacgaccctctagcttgcagtaagttggaaaatgttattatcccagtggggccaaagagccagtcacatggagagaggcaatgtgaagcctcaagtctaaaggggaatgattcttccctagacttatatagaatgcaagaaattcctccccccggaaatattttacaaccactgccaagtattgcacaatctctcctaacatcagccacctcctcatactgtgacatttcccagtacagagtgacaaatgggggcaggaaaggggttgtggtggtgggatatcagaggactttcat

SEQ ID NO: 464167 - DNA, 617 bp, Homo sapiens
gctttggctatgggaatccaggaaagcagtcacctggactgattagcaccatctaaagacaaatagaaaacatgctaccactgcattacctctctgcttaaaaactgcaaagggttacctattgcctgctgtacttagcctgaatgtcttttttctaggctacttctgccaggctgcacctcatccactccatccatccaattttaaccccttctccttcccctcaggcactatgtgctctaggttaagatgtggagatttgggtgggaaagtggttgacggagaggagtaaaaccattatttttctgaagatttttttgtcaagaagtaacacattccccccmccattttttgcttctttataagctctacatccctaaatacacaaaacatgatcattttctagccaaccaagtcatgcataatgcatttttattggcaccttgaataaagatatggcagacatgaatatgaaatgtgcagatgaaagtgctgagaggagaactcacaatgggtgaacagggagcaagagagcacctggctgctcttgcaaagccaaaaaagattctgctggaagaatttcaccccacagtcctggggagacttgcagatgcaat

SEQ ID NO: 464168 - DNA, 389 bp, Homo sapiens
accatgctgttgcaaatgataggatttccttctttttaaaggcagaatagtattccattgtgccacatggataaactggaggacattaggtttagtgaaattagccaggcacaggaagacaaatattgcatgatctcacttataggtagaatctaaaaaaaaaaaaaaaaaaaaaaaaagtacaaactcactgaagagtagaatagtgkttaccaaggactggggtggggagtggagatggagagacagaaaatagagagatagtgatcagaaggcacaacatttcaactagacaggaagaataagttctggagatctattatacagctcgatggctatagctagtaatctattcaatacttgggccgggcgcggtggctcacgcctgt

SEQ ID NO: 464169 - DNA, 420 bp, Homo sapiens
agttagccagccggaggaagtcaggttcagagtggtggactggtgaagctctccaggcactaaacttttattcatcaccaaggtctctcagctagtagtctatttccatgaaagtcatcacaagattttttttttttttaaagcaggccaattaaatcaagcatattcctcagtatcatggagagactggagrttagagacaccaaaaccatccctggcttaatgactttgggatccctgggcccctccatgcagcagaacggcaattaaccaaggtgggtgactttctttctgcttgtgttgacaattggaaacagaagcagcttttgggtctggggtaggaaccagaactgagttaatactttagtttgccctgagaataaaaaaagaatgatagggctgaatgggggctccccactg

SEQ ID NO: 464170 - DNA, 575 bp, Homo sapiens
cccttgtctcttcctctaacatgaaagttgttctacatgctttgtaaggctaatgtgagcatgaaatgatgcaatccaaaggggcaaattttagacactcagtaagtgttatttaaagtcaaatatctgaaaatgattgactgtatgttgccaccatgaagcctcagcctgtgcacatgaatyggggtgactggaaggagagaatccagcccatggtgtatggccaggcctcacccaagcccgtgatcttgggtcctggctggactttgctgcctttcatcatagaggctgtaaaggactctggctctaaggaaaggactcagcatgcacagtgaagccaaagtgatctttctagaaagcaaagctaaaaactcttcaatggctccctgtggccctgaagatcaagttcaaatctttgaacatattttacaaccccttgtgatctggcctgtgtccatttccagactcatccactgttgcactccctctccttgtctacactccaagcactcctgagtttcttttaggtcctcaaggcctgggttcatccccttatcctacatgagggcagaaag

SEQ ID NO: 464171 - DNA, 538 bp, Homo sapiens
atcggctgactcctgggacaacactattttccctgcaccaggatgcctcctgtcagtatatctaaatgcactgaggtcagtattgcatgaggcgtcttcaatgtgtataaaatatgtaagtcaggctgggtgtggtggctcacagctgtaatcccagcattttgggaggctgaggcaggtgtatgacatgtgctcaggagttcaagaccagcctgggcaacatagtaaaaccccatctctacaaaagcatacaaaaaatggtggygcatgcctgtggtcccagctactggggaggctgagactggagaatcacttgaacccagaaggcagagtttacaatgagccaagattgtgccactgcactccagcctaggtgacacagaccctgtctcaaataaataaataaatatttacattttttaaaaaaataaaatatgtaagtcatatttggagagagagacaggtaaagagagggaaggttttggggtatgatccataaggagacagatcacagtatgttggagctgggcagggcctc

SEQ ID NO: 464172 - DNA, 607 bp, Homo sapiens
ttcagtaccactcacatttaatctttgtattgctttagatatgaagggtctcaggcaaaatctaattccttttctgaattgggattctgatttggtgcctgattctcatactttccacagtttcagctcaaggctagtgcaataacccaaccacaaagggacctggtaaacttgtcattgtcagcctggagaaatgacagaccactacatggaacaactttctaagtgtcagaaccaccccaagaaagagtaggctgactttacaggtggtgagctccctgtcactggaaaggttcaagcaaaagctggataactacctggtggagaggttatagagggaagtcatccttgaagatctttcccagtcctgtgtcagtgattctgcactctgttttagcctctctacttaggacgggctccccctgccgaagcttcgtgtgccctcaccactctgagtatccatttctctggcagaaaatactttgctaaatgrcagcataagtctgctttctctctattttcctgtgtgttttccctccacagtggcaggcaatacctcccttgttctttctgctccaaacacaactagggtttagtttatttattt

SEQ ID NO: 464173 - DNA, 491 bp, Homo sapiens
ttatatcttttgttatatgcctaaggccatcttagatgcctaacgctatgttccttttttcagtctattttttctctgtagttcgaattgagtaattctgttgttctaatttctaattcattaatattcttctctgaactcttcaaagggcatctgccatttagcccatctgctgcattcactgcattataaattttagttattactttaaatgctaagatttccatttgactcttcttggtgtcrtctttctttactaagactttctgtatccttgtgtaagctatttttaaaaacattgtttcaattgtgtttataattgctccttgaagcacttttatcatggctactgtaaagtctttgtcagataattgtaacatctctttatcacaatgttggcatctattggttgtctttttaaatttaatttgaagtcttctttgttctgatatgacggctgagttttttttattgaaacctgtactgttggg

SEQ ID NO: 464174 - DNA, 567 bp, Homo sapiens
atgcagcagtccctgcaacaccccaattctaggagtccaaaactgagcggtcagtggagactagtgcaagatcttagactcatcaatgaggcagtaattcctctatatctagttgtacccaacccctataccctgctctctcaaataccagaggaagcagaatggttcactgttctgggcctcaaggatgccttcttctatattcccctgcactctgactcccagtttctctttgcctttgaggatcccacagaccacatgtcccaacttacatggatggtcttgccccaagggtttagggatagccstcatctgtttggtcaggcactggcccaagatctaggccacttctcaagtccaggtactctggtccttcagtatgtggatgatttacttttggctaccagtttggaagcctcatgccagcaggctactctggatctcttgaactttatagctaatcaagagtacaaggtgtctaagttgaaggcccagctttgcctacagcaggtcaaatatctaggcctaatcttagccagagggaccagggccctcagcaaggaatga

SEQ ID NO: 464175 - DNA, 644 bp, Homo sapiens
atcttagcttctggcaccttcagaatcttcttcattggcttcttctccttctctgatgcatggatttttcccaagtcctctatgtcctcagcgtcctcaagttctttcagtgacaccattctttgaaggaactcatctgatcccatcccaggatgttcttccctcacttcaatttggatgatatcctgtgccaatcttctcttcctacatgtgctgtaccagctcatgagtagctgtgcctttgggggaagagtrggcactgtagactcagcaaagggtatgcctaagaaatgatctaagtgggaaagcagaatttagggcaaaatggggcagacaaaacctcactgaggacacctgaatcataaaataccaggtagggccagtggttgcatagatatgagtcttttaatctgatttcaaatactcagtctagtactgtgttctaccatccctataaccatgtgtacttgccagcaacatagcctggctttggcttcagatgatctttgagctttggtacaggaagttagtgatgcctggcttccttaaaagagaataaaatcatgtcctttgcagcaacatgaatgtagctggaggccataatcctaagcaaattaacacaggaacagaaaaccaaataccac

SEQ ID NO: 464176 - DNA, 644 bp, Homo sapiens
atcttagcttctggcaccttcagaatcttcttcattggcttcttctccttctctgatgcatggatttttcccaagtcctctatgtcctcagcgtcctcaagttctttcagtgacaccattctttgaaggaactcatctgatcccatcccaggatgttcttccctcacttcaatttggatgatatcctgtgccaatcttctcttcctacatgtgctgtaccagctcatgagtagctgtgcctttgggggaagagtaggcactgtagactcagcaaagggtatgcctaagaaatgatctaagtgggaaagcagaatttagggcaaaatggggcagacaaaacctcactgaggacacctgaatcrtaaaataccaggtagggccagtggttgcatagatatgagtcttttaatctgatttcaaatactcagtctagtactgtgttctaccatccctataaccatgtgtacttgccagcaacatagcctggctttggcttcagatgatctttgagctttggtacaggaagttagtgatgcctggcttccttaaaagagaataaaatcatgtcctttgcagcaacatgaatgtagctggaggccataatcctaagcaaattaacacaggaacagaaaaccaaataccac

SEQ ID NO: 464177 - DNA, 465 bp, Homo sapiens
cacagtcattgaatggaacataaatgcataaatgtgacctttgcattcacacttcttgttttcattttctgtttttagttagctctttattccatcgtcttctgaatagggtttaaaatagacacaatttatgaacatgccatatgaatagttgacaataagaaacttgagtgaggaaacaatgaagataatttagataagcatttttaaaaaccagccatttaaaaaaaattcaggtgccaaggtagtattttatttaataacaccaggyacattctgtagcatgcagggcagaaaaatttaaaacaataacatcataaatactaaaatgcatcatgaaatcctgtcaggaaatattgatgtaaaccccgtgaaagcattgagcgtgcagagtaataactgtgtgatcctcctaagctccattagaaatcaatctttgcttataaatggaaaacactttccagt

SEQ ID NO: 464178 - DNA, 546 bp, Homo sapiens
catttgtcaatttgggcttttgttgccattgcttttggtgttttagacatgaagtccttgccatgcctatgtgctgaatgatattgcctaggttttctcctagggtttttatagttctaggtctaacatttaagtctttaatccatcttgaattaatttttgtataaggtataagctgacagctctttcaaggtctgcctctactccagacagccacctcccctcaggtcaggtatttctagggcatcttacaagaagttactagcagggcagggatacraaggcatgttgaatttggatgcatgttgcaggacaactttgatgagcaattgttgattcagagctccctgctaggctagtcaaggctttgtcaggcttgcaatttggctctccttctgccaatctccctcttctccttcctttcacaggtggtgtgatatatatctcatccctgatatacatcttttgcctaatcctgtttatgcatctgctttcagagaacccaacctgtgatgacaaagttcatgctcgaagttaatatagagg

SEQ ID NO: 464179 - DNA, 588 bp, Homo sapiens
ggtggtgtgatatatatctcatccctgatatacatcttttgcctaatcctgtttatgcatctgctttcagagaacccaacctgtgatgacaaagttcatgctcgaagttaatatagaggtcttcctgtcccaggcactttgagagccgcaggttaccctgcagacatgaccaggtccaagaagactgcacacaaccagtcctgaaaaatggcacagaaatggtgtcaagaaaccacaattacgaagatatgaatctcttaatggggcgtaacatgcactttgtcaggaagcacaacaagaagagcctggagaagatgtaggccaacaatgcaaggccatcactgcacatgccaaggctgtcaaggccctcataaagctcaaggagkttaagcccaagatgtcaaagggcatcagtccgaagcttgatggacttgcctacactgcccatcccaagcttgggagtatatttgtgtctacattgctaagtggatctactggccagaggccaaggccaaggatcaaaccaaggcccaggctgtgcctttagcttcagctgcagctgcagttccagctcaggctcccaaaggt

SEQ ID NO: 464180 - DNA, 668 bp, Homo sapiens
aacataattcatctgttataatgggagcatatgaagctgtggtgaatagggaaatatattaacaaaggctgaaatattaatcaaacagtataagttatatctcagtaagatttttaagctatgaaactgtataaggaacttatttattgcaagaaatatctcagaattatattgggaaaggttctaatggaacaaaagtccaccaaaaagatctcactattaaaattatgggctgtaagtaattctgaattaattcctttgttggggtggtagggtgggagtagcacaggataattttcttttttaaattggtagaataaaataataataagagaaaggagggcagaaggagacatttctggcaacaaatgtggccttagcactttgaaggaaatgcatttttttgagcacttgtttagtatcttggcctgggataggtgaacttttcttttaaaatctgttttgcattcatgttattaaaaaaaattaagtgctgattcatctagaagatatttttaaccatattggcacgcactttctcaccttgacatatatagcatattttctggaaatgtgagcaaagcacattttstgctgcatacaataatacaatgcagtgcaatgtaattcatgtccctgagatagtgtgaggtaccaaaggcaaacaa

SEQ ID NO: 464181 - DNA, 584 bp, Homo sapiens
ttgtcctgagatattaataaaatcaaagtatttttcaaaattaaaatttcatataatacttaatttttagttcttagaactttttatggtaatggtaatgaataccmaggtaataataatagcttaactttattgagcacttttgtacctggcactgtacttagaatttatatcatatactcctcaaaacaatcttaagaagtagtatcattttaatgccatttttaaagatgaagaaactgaagttttataatgttaccttatactcatatcacatagctcataaatggcgatgtcaagatacaaacccaggctctttgtagccaaaggccatgtactttatttcaccctgcctctcaaggttttattcatttggtaatcagggcaataactagactccacatcattcaatgcacatgaattaatgtagtgtgttcttacttgtaaatgattctaacatttgccagttatttaaacttaatctattcaagtaccttgcccaaactaaacatttaatgaagtgtggctgatgactataaagagtatttgttttcataatatttatatattattttaagtgtgaa

SEQ ID NO: 464182 - DNA, 604 bp, Homo sapiens
ttttagcctcttctctgctaagctccagatatatactatatccaacttcctactcacatatccacttccatgtctaagagacatctcagactttatatgttcaaaactgaactcctaatctatctgcctcaattgtgtgttccacccacaattttcccatctcagttgatggcaacttcatcttcgagtttctcaggccttggagttatccatgacttgtctttttatctcaccctcacgccatctcaccctattcatgttactgcccatactcaggctgttgtgatatcttgcctggrttatggttcttgtcccaaaaggtctttctgcttgtcttcccagccctctataatttactttcatcactgcagagagtatgatcctttaaaaatgtaagttacatcagaatacttgtctgctaaaaaccctccaatgtccccccatctcactcagagtaaaagccaaagtcttccccatggcccacaggctcttcaggtctcacctgccctcagttctcccccgacctctttgcctatgacttgcctcagtctctctgttccagccacactggcctcttcactttttcctgagagagtcaggtctg

SEQ ID NO: 464183 - DNA, 473 bp, Homo sapiens
ctagcctcccacacaataaaagtgagagactttaacaccccactgtcaatattagaccgatcatcaagacataaaattaycaaagatattgaggacctgaactcagctctggatcagatgaacctgataggtatctacagaactctccacccaaaaacaacagaatatacattcttcttggtgccacatgggacttactccaaaatcaatcacatggttgaaagtaaaacaatcctgagcaaatgcaaaaagaactgaaatcataacagtgtctcagactacagtgtaatccaattagaactcaagattaagaaactcactcaaaatcacacaactacatggcaattgaacaacctgctcctgaatgactcctggataagtaatgaaattaaggcagaaaacaagaagtgtttttgaaactaatgagaacaaatgatgtaccagaatctctgggatgcaactaaagcagtgtt

SEQ ID NO: 464184 - DNA, 473 bp, Homo sapiens
ctagcctcccacacaataaaagtgagagactttaacaccccactgtcaatattagaccgatcatcaagacataaaattatcaaagatattgaggacctgaactcagctctggatcagatgaacctgataggtatctacagaactctccacccaaaaacaacagaatatacattcttcttggtgccacatgggacttactccaaaatcaatcacayggttgaaagtaaaacaatcctgagcaaatgcaaaaagaactgaaatcataacagtgtctcagactacagtgtaatccaattagaactcaagattaagaaactcactcaaaatcacacaactacatggcaattgaacaacctgctcctgaatgactcctggataagtaatgaaattaaggcagaaaacaagaagtgtttttgaaactaatgagaacaaatgatgtaccagaatctctgggatgcaactaaagcagtgtt

SEQ ID NO: 464185 - DNA, 508 bp, Homo sapiens
taaatagtatttcttttattagattggattcaattaaatgaacaaatttcattgacatttttaattaaaatttttattttgagataattatagatccacatgtggttgaaagaaatagtaaagagatatgctgcatactaaattttcctcaatggtagcatcttacaaaaacatagcaccatatctccacctggatattgacattgatacattaaagatgtaacatagttccataacaatcagattcttgatatcacctttttatagccacatctgcttccctccttaatgctggcaaccagaaatttgttctccatttctctaattttgttacttttactaaataaataaataaataaaagtatctctacytatagatgaaattttttttctatagaaaatctcgggtggagccaagatggctaaataggaacagctccagtctacagctcccagcatgagcgacacagaagatgggtgatttctgcattaccaactgaggtaccag

SEQ ID NO: 464186 - DNA, 596 bp, Homo sapiens
cacaaattaacaagtctcgtagtgactttattttatttatgtatttatttatctatttatttattttttttttagatggagtcttgctctgtcaccaggctggagtacagtggagccatcttagctcactgcaacctccgactccctggttmaagcaattctccttcctcagcctcgcgagtagctgggatgacaggcacgcgccaccacacctggctaatttttctatttttagtagagatggggtttcaccatgttggccaggatggtctcgatctcctgatcctcgtgatccgcccacctcagcctcccaaagtggtgggattacaggcgtgagccaccgcgcctggcctctcgtagtgactcctgcccatgcttctattcttgattggagtgtgctggcaggttaacctgggtatttgaccctgctgccttccacctcttgcaaaggctagacaactccagtgaaaaactgagggctaactgtatttcccacctagaaataattttcctacccaatgatgaatacctatttggtacccactaagtcataatgcttataaactttccctgtgcctagattttttaatactgtg

SEQ ID NO: 464187 - DNA, 547 bp, Homo sapiens
ttttttgtccccccaatcccctctcaacattttccagagaaatttataggacaagaattttaaaactagctaccctttccttcaaccattccycactcctccacgcacatccagatacatgaaatataccaagatctgtctcaaagacaattttaaaagtagctactattctacacagaagaggggggaaaaaaccctgaacttttatcttccccccaaaacttataccaaaaaagttatcagatttaaatgttcagtatccctttttttttttttttttttttaccatattaaacacagtcaaaatactgctatgttcagaaagaaggaggcaaaacctgtaggttatcccagctgaaaaggggctgaattctctctatttgctacacaacatttgagacacactttaagtacaggtctctccagagctaactggcagatgcatgtacagatcaaatgtacacatgaaaaatgagtgtgacttaggctggtgaaaacatgaactctacgcacacagccctgtccactgaatttccttctttttaag

SEQ ID NO: 464188 - DNA, 547 bp, Homo sapiens
ttttttgtccccccaatcccctctcaacattttccagagaaatttataggacaagaattttaaaactagctaccctttccttcaaccattcctcactcctccacgcacatccagatacatgaaatataccaagatctgtctcaaagacaattttaaaagtagctactattctacacagaagaggggggaaaaaaccctgaacttttatcttccccccaaaacttataccaaaaaagttatcagatttaaatgttcagtatccctttttttttttttttttttttaccatattaaacacrgtcaaaatactgctatgttcagaaagaaggaggcaaaacctgtaggttatcccagctgaaaaggggctgaattctctctatttgctacacaacatttgagacacactttaagtacaggtctctccagagctaactggcagatgcatgtacagatcaaatgtacacatgaaaaatgagtgtgacttaggctggtgaaaacatgaactctacgcacacagccctgtccactgaatttccttctttttaag

SEQ ID NO: 464189 - DNA, 624 bp, Homo sapiens
tgtcttaacctctttagttaggggtgattgctattttacctttgaataagaaataataaaatgtaataatttggagaaaaatatgtttagttcttacaggtgttgagggggaaattcttagtccagaagcaaatttatatgcagaattgaaatacgtcatatgtactgtgtttcagcagagtaaaaataaaaatccacattaaaagaaggaaattctatcatacgccacaacatgtatgaacctgaaggatattatgctaactaaaataagcttgatacagaaagataaatctcgtatgatctcacttatatgaggtatgtaaagtagtgaaactcatagaaacagaaagtagaatggtgattgccagtagctgaggggagggagaaatggggaattggtgttcrctgaatatagagtttgagtcatgcaagatgaataggttctagagatctgctatacaacctgtgcttatagctaacattactctattgtatactgtaaagtttgttgagagggcagatctcgttttccgcctgccccccaaacttaaaaaacaatctatattaatttcagtcctcttctcctttcatggcctctggtctaaacaccttcatttttaaaat

SEQ ID NO: 464190 - DNA, 333 bp, Homo sapiens
cagcatatttattatgttgctcttaagtagaaaatatctgtaaagaatattgcagtacccctctgaattctatagaaagagtcatcctttaaatttttctcccayctaaatgtttacttgtctcaccaaacatctggagctcagggggcatgaggagctcatttatttgatgcagtgcttctgcattgattttagaaggaaaacaatacactgtgccctaaataaagctcctagaaaaatctaaagtgttttgttgttgcggtggtggttatcctggattaccatgcggtctttttttctctccttacacacacatattagtgaagcatgcaa

SEQ ID NO: 464191 - DNA, 333 bp, Homo sapiens
cagcatatttattatgttgctcttaagtagaaaatatctgtaaagaatattgcagtacccctctgaattctatagaaagagtcatcctttaaatttttctcccacctaaatgtttacttgtctcaccaaacatctggagctcagggggcatgaggagctcatttatttgatgcagtgcttctrcattgattttagaaggaaaacaatacactgtgccctaaataaagctcctagaaaaatctaaagtgttttgttgttgcggtggtggttatcctggattaccatgcggtctttttttctctccttacacacacatattagtgaagcatgcaa

SEQ ID NO: 464192 - DNA, 588 bp, Homo sapiens
cctgtgtcaaattcattctcgtttagtagttctataaaaggacagcaagtattttctttcttagaaatcacagaaagagtaagttgactttggtaaaggagaaacatgcttggtgcacttgccataaacccgtcatttatgagttaacactcttttacattcatgtactaggccccatcctattgagtctccccaaaatctagggaaataggtgcagcaggaagaccctcagcagttgttacacagtatcccattcatgcaaacttttcttaaacactgcagtgacccagagctcactacccattggakggatcaatacttttttttgactaacctattgtatttttgaaaagttcttttggaaagttcttccttaagaactgtatttttctctaggtcactttcaaatgctgctcctcaatcttccatattttttatactgtcttagctgggataatgaacactagctactgccacacacaagcctcaaattctgagtggcctaaaacaacaaaagtttctttcttgctcaagtcaagtgcaatgtaggttggaaagccagatctattgtgtagcttcatcacctgg

SEQ ID NO: 464193 - DNA, 588 bp, Homo sapiens
cctgtgtcaaattcattctcgtttagtagttctataaaaggacagcaagtattttctttcttagaaatcacagaaagagtaagttgactttggtaaaggagaaacatgcttggtgcacttgccataaacccgtcatttatgagttaacactcttttacattcatgtactaggccccatcctattgagtctccccaaaatctagggaaataggtgcagcaggaagaccctcagcagttgttacacagtatcccattcatgcaaacttttcttaaacactgcagtgacccagagctcactacccattggatggatcaatacttttttttgactaacctattgtatttttgaaaagttcttttggaaagttcttccttaaraactgtatttttctctaggtcactttcaaatgctgctcctcaatcttccatattttttatactgtcttagctgggataatgaacactagctactgccacacacaagcctcaaattctgagtggcctaaaacaacaaaagtttctttcttgctcaagtcaagtgcaatgtaggttggaaagccagatctattgtgtagcttcatcacctgg

SEQ ID NO: 464194 - DNA, 463 bp, Homo sapiens
agggcacacagagccacggggaagaacactgccaagtgaggatggaggcagaggctggggaggatgcagggacgcagctgcaagccgggggggtcctggattgctggcagccaccaggagctgaagaggggtcgggacagattctgccttaragcttccagaaggaacccacctgcccacatcttcatttcagacttctggcctctagaactgaaaagaaaacatttcagtgcttttaagccacccagtttgtggtaatttgctatggaaaccaatacaagtgacccaaggaaggcttagctccctgcaagcgaggagaacgtcttcaaaaatcaaaaccaaaggctgtgacctgggggctggtgtgaaagagaacatctttacaaatcaaagccaaagcccgtgaccctggggctggtgtgacggcagaggcccgactggctgggctctggagctgcctggg

SEQ ID NO: 464195 - DNA, 535 bp, Homo sapiens
aaacaacgaaaacaaaacaccgtgtcttgaaaaccagaaaagtcaagaaagaatattgctttcttaataataaatacatttcatgggcaagaattgcaagggaatygtttaaattaatttccgctttgtatgtttggtttatacagggcttaagtcccagctgacagtgatctgtaaaagttctaacatattgaaatctgattttcttgcagccagaatcgcatagtccaaaatgatttctctgtcaactctgctaatcagacaggcagggctccgatggactcctagttcaaccaaattgcacccgctcttttgggggtgtaaataatagctgatgaaagctttaaagcagagctggtggcatttctctctggagagctggttcaagggtatggggacaacagtgagattaaaatgagcaaggagaggtgggggaggccttttcccacctggcagatgtcctgtgtggctctgaggaactttcctcccctctatgccccaccccttctagagcggatgcagtgggaagccaggg

SEQ ID NO: 464196 - DNA, 535 bp, Homo sapiens
aaacaacgaaaacaaaacaccgtgtcttgaaaaccagaaaagtcaagaaagaatattgctttcttaataataaatacatttcatgggcaagaattgcaagggaattgtttaaattaatttccgctttgtatgtttggtttatacagggcttaagtcccagctgacagtgatctgtaaaagttctaacatattgaaatctgattttcttgcagccagaatcscatagtccaaaatgatttctctgtcaactctgctaatcagacaggcagggctccgatggactcctagttcaaccaaattgcacccgctcttttgggggtgtaaataatagctgatgaaagctttaaagcagagctggtggcatttctctctggagagctggttcaagggtatggggacaacagtgagattaaaatgagcaaggagaggtgggggaggccttttcccacctggcagatgtcctgtgtggctctgaggaactttcctcccctctatgccccaccccttctagagcggatgcagtgggaagccaggg

SEQ ID NO: 464197 - DNA, 453 bp, Homo sapiens
ctccttcctgttccccattcgacggcacacctgtcctccctcctgagcagagctctggggtctccagggtccccacctggcgggtcttcttggtgctctctgcctgcccaaggatcccccttccgcggagctccggccgacccagatacccaggggaggagtctgtcctgtcccccayggccagaggcccgcaggcactttctgcctcatgatggggtggggcgcccacgtgtcctgcgcctgcctggcgctgcctggttcttctggctgtttccctcaccagcttcctgtctgggggtggggactagggggtggcgggtggccagctttttgacgtttgctgccgttcctggtttctatctgctcttcaatcgcctccatctcaaaggaaccaaccttcatggccagactgggccacctggtcccctgtgtccctccagggtgtgcaccagg

SEQ ID NO: 464198 - DNA, 502 bp, Homo sapiens
actgttcatctttgtcgtgggtacatcagatacaagcaagagtgataaaccaagcaccaacaaaatctatgttctctctgattgcctttgtgtagacagccacttccctagcggcagagagatgggcccagtggagtctctggggccagccacaggggctgtggtrgtgtggaggccaccacagccagcctaacgtggtgctctctgacccctaccggtggcctggctgctaggactggggcagggctgtttgcagaggaggtagcagagggaccctcataaaagaggattatagatggagatttgctggtaaacacccctgtctgccgcccccgcgggtattatccttgcattagagaaggttttagggaagagaggggaggggagctcaggaatgagctttgccatcacaggcacagaaggctctggggaatcttccctggttgattcaggcctgcccaggtagaacaacaggtgccaaccttcaagcatacggactccc

SEQ ID NO: 464199 - DNA, 632 bp, Homo sapiens
cactgggtgttacagagtttaaaagtaaagacatcagaggagtttagttggcaaaggttagttgcctggttattccagacctcatgstgtgctaccacattggcaggtccaaatccatccatggagagactcttgatttgcctgtcttagacaatttgttgttaaaagtgtttctgagtttatcagatacaggaatgctgggtcacactatcaaaactcacgagaggctgatgaagaaaaccagaataacaatgtactaatttacactgagaaatataaatcgaaagtagattgagttttatgtcaggttgggcgttgggcagtacatgctctccctatggaccagataagtggaaagataaattagcaggaagtatgcttgatcagcacaggattgaaacaaggcagatgagtttatatgatgcaaatacataattgcttgagtttaatagaccgtgatgtggccatctccacaataggaatacttcagcaaatagaaccagacagatgatatttttagactagagaatgttctttcctgggccgaacaagcctaatgattgcttcatatttccattacagaacactttcaaactatttttatacctcttttctgtggttaaattatcttc

SEQ ID NO: 464200 - DNA, 508 bp, Homo sapiens
tggggaaagacaagagttaaattataataaatactaagtaggtcctatcggactgacccactcacagatgacaactacaaactctagacaaattgtaaataaaaatcatgacataaagacactgctgaatgaaccaaagtggacagataatacagggggtcaaaccttgggataaagaaataatagtggatgaatgtcatgttgttaatgccttttagcttagggtgtccccagaagtcaaccaacagggaggataagacwcaaataaaaacccatgtgtttactggcttgaagaaccatagagcgggatttggggcaaccacagagttagaaaatgtgaagagaaaacccagacaggaaagaatcagagaaggagagctacaaattctgtgtataaaatattccagaatagctagctgacccctaaactatgcatgtattgagcagaatctcagcagcctgattaaagataaaaatcctaaactggagtatcagagtttggagttta

SEQ ID NO: 464201 - DNA, 621 bp, Homo sapiens
gacatcttgatttcccccatgattcaatcacatcccaccaagtccctccccagcattgggaattacagttcaacgtgagatttgggtggggacacagagccacaccatatcagcaagtgagaatacaagacagaaagaggaagggtggaagctgacaggagtccactcctgtcattactaactcactctcatgataacagcactaatccattcatgaggacagagccttcatgacctaatcacctctcaaaggtcccacytcttaatatcatcaaaatggcaattacatttcaacatgaattttggaggggacattcataccatagcagttgttaagctagaaacttcatttactagagacttgcagctggggatggccatggaaactaggctatttccaagtgactgtagtcagaagttatgtgtgtgacttctgcctccctgaacttatataaaactaatctatcataactgcacatctttcttctcctgctggctggaacatggttgagcctgtgaccccgctccacaggtataaacaaggacagcaataataaaatagcaagaagtttcaagcaacccaggcctctatattacttcaaggaatagagcaattcccaa

SEQ ID NO: 464202 - DNA, 621 bp, Homo sapiens
gacatcttgatttcccccatgattcaatcacatcccaccaagtccctccccagcattgggaattacagttcaacgtgagatttgggtggggacacagagccacaccatatcagcaagtgagaatacaagacagaaagaggaagggtggaagctgacaggagtccactcctgtcattactaactcactctcatgataacagcactaatccattcatgaggacagagccttcatgacctaatcacctctcaaaggtcccacctcttaatatcatcaaaatggcaattacatttcaacatgaattttggaggggacattcataccatagcagttgttaagctagaaacttcatttactagagacttgcagctggggatggccatggaaactaggctatttccaagtgactgtagtcagaagttatgtgtgtgacttctgcctccctgaacttatataaaactaatctatcataactgcacatctttcttctcctgctggctggaacatggwtgagcctgtgaccccgctccacaggtataaacaaggacagcaataataaaatagcaagaagtttcaagcaacccaggcctctatattacttcaaggaatagagcaattcccaa

SEQ ID NO: 464203 - DNA, 543 bp, Homo sapiens
gctacctcatgatgctagatgcgagataaataaattttcattttcttgataactttttatgttggggtctctttcttgcaatagccaaacatttaccttcaatagtgcactccttcatataagagtgcaggataaaaacatattttgataaatatttgataaaaacatattttaaccaacttaactgactttatgctcacacaaatgatgaaagacatttttatttatcttttttttggtagrgattagaaaactgaggctcatagacattcactgatgcgcacgctgcgacgcagtgagaaatctggaacttgcagtacttctgacaccaagcccaaaggtcttgctcaaatactacataatctctgccctgataaattgccatgtacattgagatttgcaaagcaaaatgacagttttctatctcagatgagagacagaaatattaattatagaataattatataatcagcagtggtactgagtataaagtgagataattataaggaatgtagggataaaatttcatgagggctgaaaggt

SEQ ID NO: 464204 - DNA, 579 bp, Homo sapiens
aagatggacatctttacttgtttattttacattattttttcctcttttgtgagatacctcatcaacattttgccaattattctattgagttgtttgtgttctttcttaatgatttgtgggatactttatgtattcaggatattaattcttcagcaggtatctttttctagtttgtggcttgccactcaaccttacagtttgttttgctaaactggaattcttaattttaatctgattgcatgatcaaccttttcttttaaggaaagctgattagatcttgtttaagatgctactctctagacagtcataaggatactcatgcacaatgtcttytaaaagatttaaagttttgcctttcacatttaaagttttgagtcatctgggattaatttttcaaaattgagtttattgaagtataatttggcacagtaaatgtgtatagtatgtgcataatgtgtatagttgtatggaccttgacaaatttatatgatcttatcattaccattacaatcagagatataaaatattttaaatgatgaacagctggtggtatccagttttttataataacaaatcaaa

SEQ ID NO: 464205 - DNA, 543 bp, Homo sapiens
gctacctcatgatgctagatgcgagataaataaattttcattttcttgataactttttatgttggggtctctttcttgcaatagccaaacatttaccttcaatagtgcactccttcatataagagtgcaggataaaaacatattttgataaatatttgataaaaacatattttaaccaacttaactgactttatgctcacacaaatgatgaaagacatttttatttatcttttttttggtagggattagaaaactgaggctcatagacattcactgatgcgcacgctgcgacgcagtgagaaatctggaacttgcagtacttctgacaccaagcccaaaggtcttgctcaaatactacataatctctgccctgataaattgccatgtacattgagatttgcaaagcaaaatgacagttttctatctcagatgagagacagaaatattaattatagaataattatataatcagcagtggtactgagtrtaaagtgagataattataaggaatgtagggataaaatttcatgagggctgaaaggt

SEQ ID NO: 464206 - DNA, 278 bp, Homo sapiens
tcataagtgggagatgaacaatgaggacacatggacatagggaggggaacatcacacactgaggccygtcagggggtgaggggctcagggagggatagcattaggagaaatacctaatgtagatgatgggttgacgggtgcagcaaaccaccatggcatgtgtatacctatgtaacaaacctgcacgttctgcatatatatcccagaacttaaaatatatatatattaaaaaagccaagagtagagaaaaaaaatacctcagctctgctcttaaggcc

SEQ ID NO: 464207 - DNA, 528 bp, Homo sapiens
atgccgtttgcccattgttactctattagcatggttaaactattctaaggcctttcttccttcaaactctgacgtgagtgcctgcttgcccatatgctgatttaagattttctatctaagggtaggtaacacatgcactggattcagttgatacaggtacgaactctaattgctttttcttgaataaagaaatgaatcaatatgaacaaataaatacataaagtgatacatcaggctcagcttcctatataatcattttcatttttgcatttttatttgtgaatccacaaagtttcttgcttcatttccttacatctttgcaaagtctctgcttgcaatattattattattactattatatttgttgtctaactaaaccaaccccatcctttgcataagacacctgagtgtaaagagataatatttttscttctctgagtgggatttaaagaggattcagcactcctcttcatttgtacagcccaagttataatcactgtttttttctagccaccatttctttttcat

SEQ ID NO: 464208 - DNA, 567 bp, Homo sapiens
agtttattggccattattacaagaaagggacagtgacatttacagaacacctacaatcccttagagtgtactatgagctttgccttagggacattaaacatttcctttcttgacctcattttatagatkaccactttcactttgagaatggagaaatgctcagagacattacctagagtgttcctttttcctgaactgatctctcagttttcaacgtcctctttagactgcctacctcacaattttcctcatcatcagcctagatttaatctccctgggaaagtttcctatgactcttaatatttaactaggtggacctctctatgttcccaaagcactaatcacccaggaatagcaagtatttctgaattataaccatgtacctgcatatttttactgctataccatacaatccttgaggatgaaaatacagctttgctcactgttttacgaccataaaacttatcaagtgactagcaaatgaagatggcctgtggaagtcagaaatggtattcaactctgcaggatcttgcctcaaacatctttaaaaaaccacatagcccttct

SEQ ID NO: 464209 - DNA, 598 bp, Homo sapiens
ggattggagtccaaagtccaagtctcttaatattagagcccagatgcctactcaccaaaactctctgyctcttgacccatttcggtggaatgtgtgttcacattgagtcatggaactacaatgttttgtagagcaggagaatgagcagaaagagagagagagagggaaaaagatctcctattgcctgcaacagaaaactaaacaacatcacaactcacaacatgaaatgatgttaattcattaggacattttttcattgctaagagctgtcagatttcagaaagtcatttaaaaaattaacttggaaacttttgtgacattcttcattttgtgcatgtgacttacctaacacatgtgtgcacttggcatctaatattcagtctcacatggccacttggatgtaggaactagcagcagttgtagagagggaaggtcatgaggatacttctgtgcggtaacatgataatttttggaccactctttcctcttctgtttcccctgcttccctcacatcttgtagctttgccagacccttggtttcaggagttccctgactgtacagtttgcaaacttgcaatttcacaccacatttatcacc

SEQ ID NO: 464210 - DNA, 563 bp, Homo sapiens
aacttggaaacttttgtgacattcttcattttgtgcatgtgacttacctaacacatgtgtgcacttggcatctaatattcagtctcacatggccacttggatgtaggaactagcagcagttgtagagagggaaggtcatgaggatacttctgtgcggtaacatgataatttttggaccactctttcctcttctgtttcccctgcttccctcacatcttgtrgctttgccagacccttggtttcaggagttccctgactgtacagtttgcaaacttgcaatttcacaccacatttatcaccatagcaacaacaacaaaaaaaaccctacaaagtggaaaatttgttgaatcagctgccagatttatgtcttgctggtgtccagtcaaacacatcactgcctcctgggctgtctgtgcaatggacgggtattattttcctaagagctataagcctgaccttcaattctcaactgtctcaattccttttttgctaatcttgttttcttctgatccacacttaatatgtggccaaaaagagtgtttactctttcacatttcaaatct

SEQ ID NO: 464211 - DNA, 546 bp, Homo sapiens
ttgttgaatcagctgccagatttatgtcttgctggtgtccagtcaaacacatcactgcctcctgggctgtctgtgcaatggacgggtattattttcctaagagctatargcctgaccttcaattctcaactgtctcaattccttttttgctaatcttgttttcttctgatccacacttaatatgtggccaaaaagagtgtttactctttcacatttcaaatcttattttcagtaggtcttcctccggggtggaagaatacacttcagaatcaactaaagtttaagaagtggtgttgatcatcctctgtgttggtcaagtaattaacatggagaaaattgcatccaaatctgaatactatcatttaagagagacgtgtgtgaattttagtcaggcaggccctgagattgggtattaggaaccaacgagttaagctgtgtttcaagttcaaagtctggtgtagagtgaaagcagaacctgaggaccaggatctgagggagaatgtcagtcagacaaacaggctgttcatactgtcaggtataagtggg

SEQ ID NO: 464212 - DNA, 582 bp, Homo sapiens
ttatatatgtgcttaataatttttatgagaaaactggatatatatacacaaggaaactgaaatcttaaagtcacaaaggtattatgaagaagttttatcttaatattggttcagaaatgaattttgtcctcaagaagcttacattcaaagaaaagagatacattatataagtgtatctataagtgtatctataagtgtacaggctttaaaatgactcatcacataaataaaattcaatggaaattcaaggaggaaacagatggagatgcctacaaggacaattgagaaaataatcttaaagaaggaggaatttaaggtaatccttgaagaataggtcttacttcaacatgccatgatgggaagarggattatagaagacacatatttgatcaatctttcttataatcagggcaattgcttcttataggatgatctgagatttgtgattattagtctagtctgctgtggtgaacagaataatggctgcgcaaagatgttgatgtcctaaaagtcagaatgtgtgaatatgttatgttgcatggaaaggaataattaagagtgcagatgaacatctaaacattg

SEQ ID NO: 464213 - DNA, 621 bp, Homo sapiens
tgagcacaccagctgtgcagggaccgttcttgtgccatgtctccaagtgtgttgattaaaccatatgctcattgatctccaggggctctgttctattgtggcactgactcagctgggtaaacagattttattgttgcttagagtctcaggatggccccaccctatcattcttaaactactctcagtaatcattggtttcagaaatatatccccaccccgacatggattawattttctttctgcctcagtgtgtgcaacttccactatcaatacacacttaatggcaaatttgacccaaaccgccctgtatttcacagtggctcaaaagttgagctatgtccctaactgaacatctcagcgtttccccatcacaagcttcccccttaaactattttgtcaaactgggcagatgtacaaagtcagtcatgtagtcatacacaggtatgaaaatacatattcagggtctaaacaataatataaatttaaaaatttaataattcaagcattgaaaagtgaaaattgagcctgtactattatcatcactgctagctgtttttgtttgtttgtttgtttaatttgataattataaaattaatttacagataaactgctacacataaa

SEQ ID NO: 464214 - DNA, 592 bp, Homo sapiens
taattattattatttctaataatcgtagcaatgtcctgttatagtgcttagcttctggaagtttttgacaagtgctaatgaggataaggttgcagttttgatggacataagggtaagttaatttcagtcctgctactgatacggtcagtgagaactaatgatcataagggccacatatattggaagtgttgctgactcaggttaacccatcactcttatagcaatactccatagtactggagttagcaagaataaggttgacgtcaacataaatggatccattcctaccaaccttgcctagacattgttccagttgctggaatctaagttcaataaggacacggtttaagtctctcattcattactgtaccctgaatgcttagctgagagcctggcttatagaaggtaacccttttactttggataaatggytaataatcaatttataaaatatttggtataatatttagaaagaagcctggcaaaaggactgggctatgttagcagattttcccataaatgttgtgatctgtggaaagtatttaacctttcaggatctcatcatgcttttcatttatcaagtgaggtttgg

SEQ ID NO: 464215 - DNA, 569 bp, Homo sapiens
agaaaattcaacatagtaaagatatgaatctacaaaatgacaataaaatgattgataggcttaatgtagttattgtcaaagtcccaacaaggttttttgcagacattgatgagcatattgtaaaatttatgtggaaagaaaaggcctagaatgactaaaacaatcttgcaaatgaacaaatttaagggaatcactctacttgatattaggggttaacatagagctatagtactcaagacaatgtcatattgataaaaggatatatacacagatcaatgcaacagaacccagaaatagacccataaccatatgttcagctgatattttgacaaacgtaattcaacagagcagagatagatgttttaacagatgatattagagcaattaaccatcaacaggcagaaggaggaggaagaggaagccccagcagcaacaaaagcagcttgatctaagtctcaagacttatacaaaaattaactcaaaatctatattgatttaaatataaaacataaaatattagaaaraaaagcaggaacaagtatttgggatctagacctaggagtagagtt

SEQ ID NO: 464216 - DNA, 605 bp, Homo sapiens
gccaagtactgcataacctcacttctatgttgaatctttaaaaaaaaaagtcaaactcatagtaacacagtagaatggtggttatcaggggctacaaggtggggaaaaagtgacgatattagtaaaagacattaataaaaccttcagtgataaaatgagtaattactggaaacctactgtacagcatggtgagtgtaattaagaacaaggctttgcatacttggaatttgctaggagtgtagaccttaagtgttctcactatgtttctactatgcatataaatccatggtaactatgtgaggtggtagatatgttaactagcttggttgtgataatcatttcagaatgtgtgtacacacatatatgtatatatatatataagtatatcgaaacaccatgttgtacaccctaaatgtatacaattttcatttgtcaatcatatctccatraagctgggaaaaaaatccagaactccttatataaaacaaacaaagaaacaaaaaagatagtatcattatacttggaattctgaagttttatgctgatgtgcttgggtgtggagctttacaatttgttgtgctgagtgcctggctggctctttcaat

SEQ ID NO: 464217 - DNA, 584 bp, Homo sapiens
gtaatggaggctgtgacagtagccacatccactttttagacatgatatccagaatcaataaagcaataagttatgaaaatacctggactgaggcaaaaatctgtttaagctgaaaaacagtctcttctgggtattgtaataaaaaataacttatctcagtgtttttatttcctaccgtagctgtcaaacagtaatastgatgagttaaatctgacaactctaatcatgtttctattattctccttataagttaagaagttttcgctttatacattatgatgctttatttcatccttttaagattgccaatagtacatgacctaagttttcctgttgtcatagttcaatggccatctttatgccacaatttttcaattctgagtctatattttcaacactgtttcttagattttgtaagggtttatttgcctatatgtttattgctatcatttctgcgactcatttggattaatcaagttcctggtaataaatgatttattgaactgtctattcaaaccaatcatagtcatatatttaatgagtgaacataggatatcgttggagaatactataacaatatgtca

SEQ ID NO: 464218 - DNA, 584 bp, Homo sapiens
gtaatggaggctgtgacagtagccacatccactttttagacatgatatccagaatcaataaagcaataagttatgaaaatacctggactgaggcaaaaatctgtttaagctgaaaaacagtctcttctgggtattgtaataaaaaataacttatctcagtgtttttatttcctaccgtagctgtcaaacagtaatactgatgagttaaatctgacaactctaatcatgtttctattattctccttataagttaagaagttttcgctttatacattatgatgctttatttcatccttttaagattgccaatagtacatgacctaagttttcctgttgtcatagttcaatggccatctttatgccacaatttttcaattctgagtctatattttcaacactgtttcttasattttgtaagggtttatttgcctatatgtttattgctatcatttctgcgactcatttggattaatcaagttcctggtaataaatgatttattgaactgtctattcaaaccaatcatagtcatatatttaatgagtgaacataggatatcgttggagaatactataacaatatgtca

SEQ ID NO: 464219 - DNA, 556 bp, Homo sapiens
tgggtggttccccaggctcactaaattagacattttattgaaggctgttgctaggaatttcttttttcatgaactccccaggcaattcttatatgcacatcaatttggggtccagtgagtcacccgtgctgcctattaaatatacacagatttccttggcttcacctgcttacygaatttcagattcagtaagtcagaaactgggtctcagatatttatcaagtctccacaagaccctggacgattatttaaatgctggaaatttggaaaacaataaggacattgtaccagcgatggtatggtagtaggaggggagaatgcgagactaggtgacatatttcttatttgggaagcggttctgagctaaccaaagtttgttagtgagtttgtgaccagagctgttgttaagaattcaacttggtaaaccctactaaaagatgtttaacctattggattaacatcatgttgagtgacatgcatgaatcacagttgtttgcctgcaggaagttgttggtgttttcagtaatctcttacatttgtgtagcacattgaaaag

SEQ ID NO: 464220 - DNA, 606 bp, Homo sapiens
agacagcatcatgccaagccatgaggtaaaaaataacacagaaagggaatggttataatagcacatccactgtcagtggctcaagaaccttttggctgcaagtacacacttagagggttgtactgcataagtrtttctcttaagacaaagaaatctgatttgctttgactagagcattctgtgtgaaccttgaacaaatgacctgcccacaattaacattttgccagggtcaattctgtagatcaatctggagagttttggatgggtgacagttttctcttaacaacacgtagagttttccctccaaatcaagctgttttccaaatgagtttacagagaaataaaattgatttgctttaggaccaccaatggggagctgatatcctttgttcaagttccccaaaggggctataaacttgcatgtttaacattgttcctgcctatgggctgttgagctctctcaggacctcttacccagaaagagcttctgcagttctacttttgtatgctaattgataatacttattttttagtaatgcttctttttgcattctatttgaattggttgcactgtaaattagagtgaggaagagagcagtgccaaat

SEQ ID NO: 464221 - DNA, 591 bp, Homo sapiens
accttttggctgcaagtacacacttagagggttgtactgcataagtatttctcttaagacaaagaaatctgatttgctttgactagagcattctgtgtgaaccttgaacaaatgacctgcccacaattaacattttgccagggtcaattctgtagatcaatctggagagttttggatgggtgacagttttctcttaacaacacgtagagttttccctccaaatcaagctgttttccaaatgagtttacagagaaataaaattgatwtgctttaggaccaccaatggggagctgatatcctttgttcaagttccccaaaggggctataaacttgcatgtttaacattgttcctgcctatgggctgttgagctctctcaggacctcttacccagaaagagcttctgcagttctacttttgtatgctaattgataatacttattttttagtaatgcttctttttgcattctatttgaattggttgcactgtaaattagagtgaggaagagagcagtgccaaatatatgcagccagatacaatccttaaaaaaggtggcagattgtaaagctgcgaattgtaaaacttgcctttg

SEQ ID NO: 464222 - DNA, 609 bp, Homo sapiens
ccataatctccatggctaaacacaatcacccatgtaacatttgtatcacaaatcaaattcattctccagaaaacaaagcctaacagattgaaaatttattagcatctgctgtgttgtgattatggcttttaaaatgattcacatcacacgtgtaaaacgmacaaatgcatttcaccattgcagaatacatggcatttgatcgtatataatgaaagatttttatctaacacaggatgctgcctttttttattgctccttgccaagagaatacctggaattctattattggtttaatataataataaaatgagattgtacccaatacgaaagccagaaggacacccatactgaagaaggtaaattaattgatttctctgagaagtaaactacttttttgtgaatttaactttaagaatgaaggttgttggcgtaatcacaatttgaagtattcattctccaaacacagttttattgtaagtaaaaattactcctttttttctaagaaactgaaaggactgtatttgttttcattaagcctatgatttccaaggccactcacatcagtagttgagactatgagaattgcgaataggaaactttagaagagta

SEQ ID NO: 464223 - DNA, 572 bp, Homo sapiens
aatacaccaaccctatcttcttgatagaaagatgagaattaagactgattaagtgacttgcccaaggtcacactgtgattaaagcactaggtctaggcctatatcaaattttgctaaatcccaaagttgctttcttttaaccactgatgcaatattacctcagaagtttcyacaaaaagaacatcagtactagactgaagaaattagtccttcagtttaattaatcttattttacagatgagagaattgaggtccaccagaggtgaatgttctccactatccatcaatatcacaatattttttatgctgttctcccatatactcataatatacatcgaaagccaatccttagattaaaactccatcataagctgtgatccacccactcccccaacacatacctgaatcactgaccaaatatattcagtagagtgctggtaaatgtttaacaatttgctctccaggatgggggttagccatgatttgtgacatttaccaattttcatagtgtaaacatacccctcatgggtaggtgtgacccatccatgtgtcaacacacccatcattgctag

SEQ ID NO: 464224 - DNA, 572 bp, Homo sapiens
aatacaccaaccctatcttcttgatagaaagatgagaattaagactgattaagtgacttgcccaaggtcacactgtgattaaagcactaggtctaggcctatatcaaattttgctaaatcccaaagttgctttcttttaaccactgatgcaatattacctcagaagtttccacaaaaagaacatcagtactagactgaagaaattagtccttcagtttaattaatcttattttacagatgagagaattgaggtccaccagaggtgaatgttctccactatccatcaatatcacaatattttttatgctgttctcccatatactcataatatacatcgaaagccaatccttagattaaaactccatcataagctgtgatccacccactcccccaacacatacctgaatcactgaccaaatatattcrgtagagtgctggtaaatgtttaacaatttgctctccaggatgggggttagccatgatttgtgacatttaccaattttcatagtgtaaacatacccctcatgggtaggtgtgacccatccatgtgtcaacacacccatcattgctag

SEQ ID NO: 464225 - DNA, 408 bp, Homo sapiens
agtggaaagatgagtatgaataaacttttgggctggcataagtttcagggcagagagcaggaatgaagagcacctctgctgtgtgccaggaaagagactggggaccagttctatagagtctgtcttaaagatgcaaatccagggaagaattgactttccaagttcatgaatcttaatggggaagctcagcatcagtttcatackaacatgcttgatgtttctgaccacaggaaaagaactaaaaaatgaacagtggttaaagtataccccattcctgttactggcagagggagataaagcaaagaagtaacaaggatgctcaggctcagaactggaattcattttctcctgaatcactgaacctaaggaataaacaatattcatttttctatcactcttggacctgca

SEQ ID NO: 464226 - DNA, 594 bp, Homo sapiens
ttttattaaaaataaatatagtacatatattcattcatatagaatatagaatatatatagtgtgtatagagtgtatatatacagtatatataaatagtatagcatatgtactatactatatatgctatatagtatactatatatataatactgtattatatatgtatactatattctgggctatatatatcatacataaatatatatattatatatttatacactagacatttgaatatctagggttttcatcatgtatttcaaaagtccacagagggtctaaagcagaaacagttaactgaatagccaagaaactttaaaagagctggaattgackaggtggttgggtactcagataaaacaacaaagaatttatcttgaattctctctatattgaccttaagagggagtcctagggattagaagacatttaatgtggcaggcatttatgaatgagtaggtttggggaattgcttgactctcttctcccaagtacacacccccaagagtaaaagaacatttatgtttctatgtagtttactttttcacatgtaaattcaacggcgtgactaaactagttgccattttctattt

SEQ ID NO: 464227 - DNA, 594 bp, Homo sapiens
ttttattaaaaataaatatagtacatatattcattcatatagaatatagaatatatatagtgtgtatagagtgtatatatacagtatatataaatagtatagcatatgtactatactatatatgctatatagtatactatatatataatactgtattatatatgtatactatattctgggctatatatatcatacataaatatatatattatatatttatacactagacatttgaatatctagggttttcatcatgtatttcaaaagtccacagagggtctaaagcagaaacagttaactgaatagccaagaaactttaaaagagctggaattgactaggtggttgggtactcagataaaacaacaaagaatttatcttgaattctctctatattgaccttaagagkgagtcctagggattagaagacatttaatgtggcaggcatttatgaatgagtaggtttggggaattgcttgactctcttctcccaagtacacacccccaagagtaaaagaacatttatgtttctatgtagtttactttttcacatgtaaattcaacggcgtgactaaactagttgccattttctattt

SEQ ID NO: 464228 - DNA, 570 bp, Homo sapiens
atttatgtttctatgtagtttaytttttcacatgtaaattcaacggcgtgactaaactagttgccattttctatttggctaccacgaaacttagggaaaaaaatgagggaacattattaccagatgtgtggtttacaagagtctaatgtttatcctcatttgttgttcatccattataaatactatatttcaatgttttatatgtctttgaatgcaactctaaagcagcacaccagcatggcacatgtatacatatgtaactaacctgcacattgtgcacatgtaccctaaaacttaaagtataataataataaaataaaaaaagaagaaaaaataaaaaaattaaaaaaaataaagttttcttataataataatgtgtgcataaagaatgaatggttaaatccccatctaaaatactagtttgtacaatatcatctctatttagtacctagtcttgtaaaagtacataattcttaaatcccagcttatattgttataaagacatgtgaatggattttgtaacttatgggcagttctatagatagactctcagaaaggactagaacaagg

SEQ ID NO: 464229 - DNA, 608 bp, Homo sapiens
taaatatagtacatatattcattcatatagaatatagaatatatatagtgtgtatagagtgtatatatacagtatatataaatagtatagcatatgtactatactatatatgctatatagtatactatatatataatactgtattatatatgtatactatattctgggctatatatatcatacataaatatatatattatatatttatacactagacatttgaatatctagggttttcatcatgtatttcaaaagtccacagagggtctaaagcagaaacagttaactgaatagccaagaaactttaaaagagctggaattgactaggtggttgggtactcagataaaacaacaaagaatttatcttgaattctctctatattgaccttaagagggagtcctagggattagaagacatttaatgtggcaggcatttatgaatgagtaggtttggggaattgcttgactctcttctcccaagtacacacccccaagagtaaaagaacatttatgtttctatgtagtttactttttcacatgtaaattcaayggcgtgactaaactagttgccattttctatttggctaccacgaaacttagggaaaaaa

SEQ ID NO: 464230 - DNA, 570 bp, Homo sapiens
atttatgtttctatgtagtttactttttcacatgtaaattcaacggsgtgactaaactagttgccattttctatttggctaccacgaaacttagggaaaaaaatgagggaacattattaccagatgtgtggtttacaagagtctaatgtttatcctcatttgttgttcatccattataaatactatatttcaatgttttatatgtctttgaatgcaactctaaagcagcacaccagcatggcacatgtatacatatgtaactaacctgcacattgtgcacatgtaccctaaaacttaaagtataataataataaaataaaaaaagaagaaaaaataaaaaaattaaaaaaaataaagttttcttataataataatgtgtgcataaagaatgaatggttaaatccccatctaaaatactagtttgtacaatatcatctctatttagtacctagtcttgtaaaagtacataattcttaaatcccagcttatattgttataaagacatgtgaatggattttgtaacttatgggcagttctatagatagactctcagaaaggactagaacaagg

SEQ ID NO: 464231 - DNA, 598 bp, Homo sapiens
ttcctatatgtagcaggacgttggaatgggccacttcctatataggttttcactgagaggctgtgttagtttgctagggctgccataacaaaacatcatagactaggtagcttaaacaacagaaatttgttttttcatagttctggaggctagaagtccaagatttaggtgccagcaaaattgaamccctctgagacctctcttcttgacttgcggatagccactttcttcctgcctcattgcatgaacttctctgtgcacatgcatcatccgtggccttttgtaagtcttataataataatttcttttctcacaacgaccagacagattggattaaggcccacccttatggcctattttatttaacttagtcacctctttaaaggtcctatctccaaatacagtaacattctgaggttcagggggttaggatctcaacatacgaatttggagacatggaaagcacaattcagcccataacatgggatattacaaaggtaaatactcaacaaatcctcattatggccataggtataatttattaagaatttacagtgtcaaagtaaagtaatgggtttcacaactcttagaccatgca

SEQ ID NO: 464232 - DNA, 570 bp, Homo sapiens
atttatgtttctatgtagtttactttttcacatgtaaattcaacggcgtgactaaactagttgccattttctatttggctaccacgaaacttagggaaaaaaatgagggaacattattaccagatgtgtggtttacaagagtctaatgtttatcctcatttgttgttcatccattataaatactatatttcaatgttttatatgtctttgaatgcaactctaaagcagcacaccagcatggcacatgtatacatatgtaactaacctgcacattgtgcacatgtaccctaaaacttaaagtataataataataaaataaaaaaagaagaaaaaataaaaaaattaaaaaaaataaagttttcttataataataatgtgtgcataaagaatgaatggttaaatccccatctaaaatactagtttgtacaatwtcatctctatttagtacctagtcttgtaaaagtacataattcttaaatcccagcttatattgttataaagacatgtgaatggattttgtaacttatgggcagttctatagatagactctcagaaaggactagaacaagg

SEQ ID NO: 464233 - DNA, 528 bp, Homo sapiens
ggtctgttataaggggaacattggtgaggcagagacgaaagggggagaggaagaccatcttgccttcattgagatgaaaatttacacaaatcaatktgtttctaacgtcacggagttctctgagtgtatttttaaaaagctgttcataaaaaagtaagtaaataaacttgagttaattaaaaacgtgtctacataatggcatcaatttcattgcattgtgcactttgggtgtaagttctaaatctttttgttgttattgttgtttgtttttaaagataaaaattgttttaatgttttaaagggaaataaaaaggattttttgccttttattattattttttattttactctaagttctgggatatctgtgccgaatgtgcaagtttgttacataggtatacatgtgtcatggtggtttgctgcacctaagttctaaatcttatatagataaacttttagggaaatggttgtattgatataaatggctttttgtataaaattcatgtttatataacttgagtttcaaag

SEQ ID NO: 464234 - DNA, 562 bp, Homo sapiens
ccatggtcagtgatacactctctgtcttaccattggtattgtcttatcttttgtttttctgacattgttggggaccaaactcacataatctgatatgagacataatttcatacccattaatattagctttgccagagatggacagaaaacctattwaaaaacactttaaaaaggtggaattttattttaccctcctataaaattctggagatatacaggccaatgctaataaggtagctctcctcacgaagtctttaacaatacaaaatccttccaattcactgctcctctatcctgaggttctactctttgtcttcatggtccaagatgacagcatttggattataagaaacaggatagacaaaataatagttaaaaaaaaaaaaaaagttacataatccttctgcttacatcccattggccagaatatagacacatggtcatacttagcagcaagggagaatgggaaatgtattcattatttcgaaccatacatgcaaaggtgaaaatcctaatactatgaaaagagagaaaagctattcagaaaaaactatcaatcatt

SEQ ID NO: 464235 - DNA, 518 bp, Homo sapiens
gggaagccatacaatgtcctttgaagcttttattcagaagtgatgcatttcattggccaaataatgtctatgagaattgaagaattttttgtttttatctaaatgacagtctaaaaaaaataaattcaatgtgttctggatgaccctttaaactraggacagccacaagatttcagaggctgcactggcttcagtgattagatggcacaaaataataccaactgagttgttttattaggactccctaggcaattagagacagtcggaaaaagtaaatgatcctgatgtctttgccctagttgaagccaaatgacatcaccagtgtacagtgaagatgttccagggctttgaataaagaagtgggaggatttagtcatcacaggtgcattgcaatataggtgtgccaaaaataacagcaatagccaccatcaccaccaaacttgggccataacattcagttccatacttaagtttaagaggataatttagtgtaagccagttattatctgttacattaa

SEQ ID NO: 464236 - DNA, 583 bp, Homo sapiens
agtgatttcttaaaatacaaatctaattggtcacccttctatttacaaagttctaaaaactccttattgctttcaagatgagatccacactgcttagctcgacatttggggtccattgcatactgtcattccccatccctctatctttgtcccstttactgaagctgcatcaagctacatgacaatccttgaatacatgctgtttacttgaaatactcttatgtctcttaaccacttcacatgaagactgttatgactgccatatataatttactgtcttaactatgctttatatctattcctattatagaatttaataacatactgtcttatcaaatgaaaatagtagacagtcttattcatctttgtacccccagtgcctggcacaagtgagctatacaacgttttatgatttgagctggacaaaaattattgaaatggcctatcaaggaaacccactacaggtaataagaatggaattatacacatatacaggaaatggaatatctttcacacatgaaacaataaaaaacacacagaggtgggaaaaaaggattggatggaatataagggtcttttcaac

SEQ ID NO: 464237 - DNA, 496 bp, Homo sapiens
atgttattttattctcattggagagagtgattctgtttcaatcatgtgccggagccactcttgagaggcaactgttaaatattcagcarttttgcaaggtggttgtcaagccactagtagctggaaattgggtatgatgggaggatttgcatctaagctatcagcaaacacttcaaatcagggttttattttaggttgccagtacaccattgatctatgctctagcaatagcaactgagttgcagttctcaattagaccatccccattctttgatgcctcctgtctatatacgatgctctttctgcctggaatattatctttgacattgtgttctagaaactatctatggctaataaaagacgtaagactccctggagcaggactccctctgggctccaagtgtcttggatatatctggaccgtgacactgagtctattgcttatagttttctgttttcctacgcatagcccttctaaattgtcatcaacttgagg

SEQ ID NO: 464238 - DNA, 536 bp, Homo sapiens
atgtgcagtctctgcacaggcccctagccgagcactctacatctggttcattttaaagtgtgttgtaggtgttagcataggatgagtgagcagggaccatggcttactgaaatattagagctctgaggcgcctctgtattgcccagttatcaacaggtctttactacaagagaagcaaccaggaaattgagttaatatttattactcaatcccataactcgcatgacctttagcacaaatatggaccccagaacmaaatccctagaaaatcaaaattcaggattgacttggttttaccacgactatggtttgtatatttatacatgcagtatacataggcctaatatatatcagagctaaaactcaagtggcaatcagtggacacagtaggaaagaatagctagcaaatttgcacatgtggttttgattaaaacttctatttccaaatataattgtttccttaaatgatagtcacagtgacttaatgtgcttatcagtagctataactttttttttagtaaaaatgtcggaatttc

SEQ ID NO: 464239 - DNA, 567 bp, Homo sapiens
tctcaattaacacatcgaaactcagattttttacaaagttcattaatatctgcatctgagctctgaggctgatcttgatcttgtgagattctcttgggggaaaaagaatacaaaatggcaagcacaatgcaaggcagaggtcttgagagttaagcatcattgtcttcctggtaaatcttcctgtgtctgagtttgaccttcccctcaagcctccagcatatatgttcttgaataagacaacttgatctatcccattctggtttattccatctgatgagcggattgtkcagaaacttaaaatgattaactcagcctccgtccaggtctacttttggtcacttgtaataaatactcaatcttcaagggtttctttagtgttcctgccctttcttctggggtgatccaagttcctgaacatcataaaagagagctggtttgttttgcccactcttcatttctggctctcaatctttatctgggttctatctgctgatgtggagttgggcatcgtgtaagcaacttcgactcacggcagatgctcttgctactgcctttggttgcaaggtc

SEQ ID NO: 464240 - DNA, 567 bp, Homo sapiens
tctcaattaacacatcgaaactcagattttttacaaagttcattaatatctgcatctgagctctgaggctgatcttgatcttgtgagattctcttgggggaaaaagaatacaaaatggcaagcacaatgcaaggcagaggtcttgagagttaagcatcattgtcttcctggtaaatcttcctgtgtctgagtttgaccttcccctcaagcctccagcatatatgttcttgaataagacaacttgatctatcccattctggtttattccatctgatgagcggattgtgcagaaacttaaaatgattaactcagcctcygtccaggtctacttttggtcacttgtaataaatactcaatcttcaagggtttctttagtgttcctgccctttcttctggggtgatccaagttcctgaacatcataaaagagagctggtttgttttgcccactcttcatttctggctctcaatctttatctgggttctatctgctgatgtggagttgggcatcgtgtaagcaacttcgactcacggcagatgctcttgctactgcctttggttgcaaggtc

SEQ ID NO: 464241 - DNA, 567 bp, Homo sapiens
tctcaattaacacatcgaaactcagattttttacaaagttcattaatatctgcatctgagctctgaggctgatcttgatcttgtgagattctcttgggggaaaaagaatacaaaatggcaagcacaatgcaaggcagaggtcttgagagttaagcatcattgtcttcctggtaaatcttcctgtgtctgagtttgaccttcccctcaagcctccagcatatatgttcttgaataagacaacttgatctatcccattctggtttattccatctgatgagcggattgtgcagaaacttaaaatgattaactcagcctccgtccaggtctacttytggtcacttgtaataaatactcaatcttcaagggtttctttagtgttcctgccctttcttctggggtgatccaagttcctgaacatcataaaagagagctggtttgttttgcccactcttcatttctggctctcaatctttatctgggttctatctgctgatgtggagttgggcatcgtgtaagcaacttcgactcacggcagatgctcttgctactgcctttggttgcaaggtc

SEQ ID NO: 464242 - DNA, 571 bp, Homo sapiens
tatacattcttctcatttgcacatgacatatactgtgaaattaaccacacaattggccataaaacaatcctcagcaaattaaaaaaaaaatgaaattatactaaacacactctcagacaacagtgcaataaaaatagaaatcaataggtaagaaaatggctcaaaaccagagaattacatggaaattaaacatgctcctgaatgacttttgggtaaacaattaaggcagaaatcaagaaattctttgaaactaatgagaatgaagatacaacataccagaatttatgggacatggctaaaacactgttaagaggaaagtttacagcactacacaccaaaataagttagaaatatctcaaattaacaatctgacatyacacctagaggaactagagaaacaagagcaaaccaacctaaaagctaatagaagaaaaataaccaaaatcagagctgacctgaatgaaagtgagatgtcaaaaactatacaaaagattaataaattcaagagtttgttattgaaaaagtaaataagattgatagactgctagccagactgataaagtaaaaaaga

SEQ ID NO: 464243 - DNA, 549 bp, Homo sapiens
cagtcagaagcacgacctttgtgttatggaatctttggctgtttgagtttgcttttagttaatggcctgtgtgtgaaagttaagcatattcacctgttttattgaaagaccatgggaaagagtttatacttatgtttgtggtgaaaaaaagaaaaggcattcatcttagctttctgattcctatgatgacccgaggctttcattttagtaaggaattcctctcttggcagagaaagaaaacagatggtgtatctttaagtacataatgtatgcttcctccacattatttttggagagcataaagtatgattaagggaagtgaactcatgctgtgaaaaacaggcactgcagttgaggtgcctgcgatagcttccatatgcaccaaggtgatgggttttcctgatccccactgctatcttcatcctgtaggatttgtaagaagaaccgttgctcaaaaagagaccatatgattctagtcagtgagtgaccagtttgtatgacakgcaagggctctccaagaacactgtaattacagattagatatcacta

SEQ ID NO: 464244 - DNA, 609 bp, Homo sapiens
ctaacatagttttaggtaattctggcaaactcattagcaaagtcttatacaatataagctacttaggaagtaatcctcacattctttctcatgctcactctgaacacaaggttattattgttccatatgttgacttaaaaataccttttcacagaatatagaggagagcatctttagagcatatgtaacaattataatcaatcttttccaaaaygtatctgaattttcaggaaaataccatatgtgatttcaacaaatacatagtcagtacaatatgaggtgggattctttggcacctaagaagaaaaaagctgagatttgcataaacaataatgactgtttttggctcacaagattggagagtcggaagagtggcctctaagttagacctaatctaatggtcttggcctgtttctctgtgcttctctggatggcatcttcctccctgtactgatgttagtctcaagcttagcacgaaggctgcagcatttccagtttatacttgtgcatttggatgttcagggcatgagacaaagactaacttctggaaaatctctcagacaagtgagaaaaaacattcccaacagatgtctcctcacctcctgcctg

SEQ ID NO: 464245 - DNA, 609 bp, Homo sapiens
ctaacatagttttaggtaattctggcaaactcattagcaaagtcttatacaatataagctacttaggaagtaatcctcacattctttctcatgctcactctgaacacaaggttattattgttccatatgttgacttaaaaataccttttcacagaatatagaggagagcatctttagagcatatgtaacaattataatcaatcttttccaaaacgtatctgaattttcaggaaaataccatatgtgatttcaacaaatacatagtcagtacaatatgaggtgggattctttggcacctaagaagaaaaaagctgagatttgcataaacaataatgactgtttttggctcacaagattggagagtcggaagagtggcctctaagttagacctaatctaatggtcttggcctgtttctctgtgcttytctggatggcatcttcctccctgtactgatgttagtctcaagcttagcacgaaggctgcagcatttccagtttatacttgtgcatttggatgttcagggcatgagacaaagactaacttctggaaaatctctcagacaagtgagaaaaaacattcccaacagatgtctcctcacctcctgcctg

SEQ ID NO: 464246 - DNA, 540 bp, Homo sapiens
gtttcatttcctgatggattccaactatcttagagactggctgaacatggtatagattcaataaatattcatcaatgaaagaataagtggccaaactgatagtgaaaatgggttaaattctataaatacgttaaagatataaggggctgcagtagatacctgctgagatagagagggtgataaagagagggagaggaggagaaagtaactcctgttacatggctgaaggtattactcttcaaagcatkgaatgcgaggaaaaatacactcaagttagaaaagaaaaagagcactatttacatgatcaatgtgtttactttgagaataggaggcattcggtagaagattgctgaaagtcttcaaattatgttattgataaggctctaggcttattaatcccaaatggacctctgccataacttccaccttctgaattatttatatatgtgtccttggatgtcaaataaacctatggtagtaacttttaaaaatatttcctaaggcaaaacattactaagcatcttttttttttttttatca

SEQ ID NO: 464247 - DNA, 540 bp, Homo sapiens
gtttcatttcctgatggattccaactatcttagagactggctgaacatggtatagattcaataaatattcatcaatgaaagaataagtggccaaactgatagtgaaaatgggttaaattctataaatacgttaaagatataaggggctgcagtagatacctgctgagatagagagggtgataaagagagggagaggaggagaaagtaactcctgttacatggctgaaggtattactcttcaaagcatggaatgcgaggaaaaatacactcaagttagaaaagaaaaagagcactatttacatgatcaatgtgtttactttgagaataggaggcattcggtagaagattgctgaaagtcttcaaattatgttattgataaggctctaggcttattaatcmcaaatggacctctgccataacttccaccttctgaattatttatatatgtgtccttggatgtcaaataaacctatggtagtaacttttaaaaatatttcctaaggcaaaacattactaagcatcttttttttttttttatca

SEQ ID NO: 464248 - DNA, 540 bp, Homo sapiens
gtttcatttcctgatggattccaactatcttagagactggctgaacatggtatagattcaataaatattcatcaatgaaagaataagtggccaaactgatagtgaaaatgggttaaattctataaatacgttaaagatataaggggctgcagtagatacctgctgagatagagagggtgataaagagagggagaggaggagaaagtaactcctgttacatggctgaaggtattactcttcaaagcatggaatgcgaggaaaaatacactcaagttagaaaagaaaaagagcactatttacatgatcaatgtgtttactttgagaataggaggcattcggtagaagattgctgaaagtcttcaaattatgttattgataaggctctaggcttattaatcccaaatggacctctgccataacttccaccttctgaattatttatatatgtgtccttggatgtcaaataaacctatggtagtaacttttwaaaatatttcctaaggcaaaacattactaagcatcttttttttttttttatca

SEQ ID NO: 464249 - DNA, 562 bp, Homo sapiens
gttgatagttattgatcttcaaatctcacctgtcatattagactattgaacgggagttgtgtcagagtcactggcaggcagttttgaatttgcctgagctggaggaacctatgggtttcattaaatcaggagcttttgttgcaatttttttttttttttttttttggcgacagagttttgctcatgttgcccaggctggagtgcagtggtgcgatgtcggctcactgcaacctctgcaacccaggttcaagcgattctcctacctcagcctcctgagtagctgggattaccggcatgcgccaccatgccyggctaatttttgtatttttagtagagacagggtttcaccatgttggccaggctggtctcgatctcctgacctcttcatccacctgccttggcctcccaaagtgctgggattacaggcgtgaaccaccacacccagcctaatttttttttggcttggtgtcaccatatcacattagaatcctggattcagaactcacacctacttatgaaagtggccaggccaactttttttccgcactggtccttggaagac

SEQ ID NO: 464250 - DNA, 504 bp, Homo sapiens
caggtaactttgaggcagggaggttgtggttatgcaaagaaagatgataaagaagaaatgggagagctagaagacaaacagccatacgtggtatgtgataaaaaagctaagtgagcacatggacagagtgctaaagctctaagagagaggaaatctttttatttcatggtagtaaagcatttaccacctcataatagttttgtgaccttatgaaaaaggctcgggctctctcagctctggtttccccagctgtaaaaytgcaatgataacagcttacctctgaggatagttgtgaaggtgaggtggtgagctaaagagctaaggaatcaattagtggcttttattatcatcattattgttattcaatgaggagatgatatttgagataagccttcctagaaagaatatttgaggaagtttaggagaatgggaaagagaacatctatgtgggtatgggatggtgaggggtggaaaaaaatggtgaacaggtggcatgtgcattgt

SEQ ID NO: 464251 - DNA, 576 bp, Homo sapiens
aatcacatcagggtgaatgggttattcatcccctcaagcatttatcctttgtgttataaacaatccaattatactcttagttatttttaaatatacaattgaattactattgactacagtcaccctgttgtactaaatagtaggtcttattcattctttctaactactttgtttgtacctatttatcttcatcatttctcttactcccctactacccttcccagactctggtgaccatcyttctactctcttcctcaataagttcaagtgttttaatttttagcttccacaaataagtgagaacatgtgaagtttgtctttctgtgcctggcttacttcacttaacataatgacctccagttccatccatgttgttgcaaatgacaggatctcattcttttttatggctgaacagtactccattgtgtacatgtactacatttgctttatccattcatctgttgacggacacttaggttgcttccaaatcttggctattgtgaacagtgctgaaaacacaggaatgcggctatctcttttgatatactaattttctttcttttgggtatataccta

SEQ ID NO: 464252 - DNA, 576 bp, Homo sapiens
aatcacatcagggtgaatgggttattcatcccctcaagcatttatcctttgtgttataaacaatccaattatactcttagttatttttaaatatacaattgaattactattgactacagtcaccctgttgtactaaatagtaggtcttattcattctttctaactactttgtttgtacctatttatcttcatcatttctcttactcccctactacccttcccagactctggtgaccatccttctactctcttcctcaataagttcaagtgttttaattttyagcttccacaaataagtgagaacatgtgaagtttgtctttctgtgcctggcttacttcacttaacataatgacctccagttccatccatgttgttgcaaatgacaggatctcattcttttttatggctgaacagtactccattgtgtacatgtactacatttgctttatccattcatctgttgacggacacttaggttgcttccaaatcttggctattgtgaacagtgctgaaaacacaggaatgcggctatctcttttgatatactaattttctttcttttgggtatataccta

SEQ ID NO: 464253 - DNA, 576 bp, Homo sapiens
aatcacatcagggtgaatgggttattcatcccctcaagcatttatcctttgtgttataaacaatccaattatactcttagttatttttaaatatacaattgaattactattgactacagtcaccctgttgtactaaatagtaggtcttattcattctttctaactactttgtttgtacctatttatcttcatcatttctcttactcccctactacccttcccagactctggtgaccatccttctactctcttcctcaataagttcaagtgttttaatttttagcttccacaaataagtgagaacatgtgaagtttgtctttctgtgcctggcttacttcacttaacataakgacctccagttccatccatgttgttgcaaatgacaggatctcattcttttttatggctgaacagtactccattgtgtacatgtactacatttgctttatccattcatctgttgacggacacttaggttgcttccaaatcttggctattgtgaacagtgctgaaaacacaggaatgcggctatctcttttgatatactaattttctttcttttgggtatataccta

SEQ ID NO: 464254 - DNA, 557 bp, Homo sapiens
tgcaatctttgtcattaccataacatattcatgggttctgggataaggggtagacatttttatggaggcattagtctgcttaccacagactgccctctggcccccaaagatacacatctatcccatatgcaaaatgcattccactccaagattcccagccttatcaacccattaaagtaacaactcaaagtccaaaatctcatctaactttyagattagctccaaagtgccaaaatgcatcatccgaggctctgggagtgatccatcctggggcacaattcttcttcatctgtgaacctgggaaattcaagaaacaagttatctactcccaaaatacaaaggtgagacaggcatgggataacagtgatagatatttccattcaaaaagagaagaggaagaaaaaggagttgccagtcccaatcaatttcaaaatcaagccaggcacattccattttgtttcaaggcctgagaataattctctgtggctcaagactcagacccccctgagctagtggctctgcctttggagtcatccttcctttttcttgaagggtat

SEQ ID NO: 464255 - DNA, 580 bp, Homo sapiens
agaaataattcccattttgatgaaagatataaatctacagattcaagaaactatgataatcacaaacaagataaacccaaagaaatccataccaagacacatcatcattaacttaataaaactaaagacaaaaaaaattgaaaacagccagaagaaatgacatcttaacctacaagtgtcatttgaataagagtggatttcttatttgaaaccatggatgataaatatcttataaaacataaagtagaacatattttacatagactatagtctcttataaaaataaaatataaaagaaaaatctctttgcactcccatgttcaagggtggaagaagagggatgtcccaggggagggaaggaggaagagaatttgcccttctcccacctttttgttctatcaggtcctcaacagatgggaagatgcccatccacattggtgagggtagatctttactcagtccaccacttcaaatgcyaatctcttctagaagaactctcacagacacactcagaaataatgtgttaccagccatcagggcatgttttaggccagtcaagttgacacataaaattagccat

SEQ ID NO: 464256 - DNA, 554 bp, Homo sapiens
taactgtctgtatttgcagatgacatgacagtctctgtagaaaatcccaaggaatctgcaaaagaactaataagtgagtgtagcaagttgcagtatgtaagatcaacacacaaaaatcaatccatttctatacattaaaaaagaaggtgtgaaaacaaattaaaaatayaatatcatttacagtcatttcaaaaacaatgaaatacttcattataaacttaaaaaaacatgtacagtactcaacatataaggatgtcaatttttccaaaattctacaggtttaatgtagttactgtcaaaattttagcaagtatttttgtggatatagacaagcttatttttccataaaatttatgtggaaacacacaggacctagaacagcaaaacccatcttgagaaggaagaataagtggaaggaatcactatttgaaattaaagcttactaatcaagacagtagggtattggcagatggacagacacacatagatcaacggaccccagaaatagactcacacaaatatgcccacctaatattccgcaaaagtatgaagcc

SEQ ID NO: 464257 - DNA, 554 bp, Homo sapiens
taactgtctgtatttgcagatgacatgacagtctctgtagaaaatcccaaggaatctgcaaaagaactaataagtgagtgtagcaagttgcagtatgtaagatcaacacacaaaaatcaatccatttctatacattaaaaaagaaggtgtgaaaacaaattaaaaatataatatcatttacagtcatttcaaaaacaatgaaatacttcattataaacttaaaaaaacatgtacagtactcaacatataaggatgtcaatttttccaaaattctacaggtttaatgtagttactgtcaaaattttagcaagtatttttgtggatatagacaagcttatttttccataaaatttatgtggaaacacacaggacctagaacagcaaaacccatcttgagaaggaagaataagtggaaggaatcactatttgaaattaaagcttactaatcaagacagtagggtattggcagayggacagacacacatagatcaacggaccccagaaatagactcacacaaatatgcccacctaatattccgcaaaagtatgaagcc

SEQ ID NO: 464258 - DNA, 572 bp, Homo sapiens
taattaatgaggataaagttctagttaaacaaaatgaataagttctagagatctgctatacaacattgtaacctatctttaactataccctattgagccataatccagccactgtactccagcctggcccacagagcaagaccctgtctctaaaaaccaacaataactacaacaacaacattgtattgtacactttaaaatgtgttaagatggtatatttcatgttaagtgttcttatcataataaaataaaatttcaaagtaaaattgagttgtttcttttacctgctgtctgggaggcagtagatgtgacctaggtgttattgcctgtgtttatgtgaacataatgataactgttctttttgtcattacttcarttgagttctgtgcatttttggcactagatgtgctgaatttaattgctgtttataatttatttaaaagcttacatgatgatttggcattgaagtgaaaagttatatcgtaagcagaaaattaactataagaggctagtgtgacctatttatatgtcatgcaggactatagtcaaggtatcaaatatcgatttgtcag

SEQ ID NO: 464259 - DNA, 380 bp, Homo sapiens
aagttgagatcaaggtgtcagcagggctgtgctctgcggagaatgctggggaaggatctgtccaggactctctccgcttctggtggttccttggcatgtggcagcatyactccaatcagcatgtggcatcctccctgtgtgcctgggtctgtgtccagacttccccttttcagaaggacaccagctgtgttgaatgacagcccacctggctccagtgtgacctcattctaacttaactaacatctgcaatgaccctgtttccaaatgaggtcacaatctgagggactggggcttaggacttcaacgcaggaattcgggggcatacaattcaacccagaacaacaaccttatccatgtcttcactctatttaaacttccta

SEQ ID NO: 464260 - DNA, 582 bp, Homo sapiens
cccatggcgtagctaccacttaaaagtgagaatatatgatatttggttttccattcctgagttacttcacttagaataatggcctgcagctccagttggagttgctgcaaatgacattatttcattctttttagggctgagtattatgtcatggtgtatgtttaccacatttctttatccactcattggttgaggagcacttaggttggttctgtatctttgtaattgtgaattgtactgcaataaacatatacatgcaggtgtatttttgatacaatgactttttaatttgagtagataaccagtagtgggattgatggactgaatgctagatctgcttttagttatttcaaaaatctccataatgctttacataaaggatgtactaatttmcattcccaccagcaatgtataagcatgcccttttcaccacattcatgccaaaatctgttttttttcttttgactttttaataatacctattatgctgggaaaagatggtatctcactgtggttttaatttgcatttctttgatgattggtgatgttaagaattttttatatgtttgttggtcatttgta

SEQ ID NO: 464261 - DNA, 582 bp, Homo sapiens
cccatggcgtagctaccacttaaaagtgagaatatatgatatttggttttccattcctgagttacttcacttagaataatggcctgcagctccagttggagttgctgcaaatgacattatttcattctttttagggctgagtattatgtcatggtgtatgtttaccacatttctttatccactcattggttgaggagcacttaggttggttctgtatctttgtaattgtgaattgtactgcaataaacatatacatgcaggtgtatttttgatacaatgactttttaatttgagtagataaccagtagtgggattgatggactgaatgctagatctgcttttagttatttcaaaaatctccataatgctttacataaaggatgtactaatttacattcccaccagcaatgtataagcatgcccttttcaccacattcatgycaaaatctgttttttttcttttgactttttaataatacctattatgctgggaaaagatggtatctcactgtggttttaatttgcatttctttgatgattggtgatgttaagaattttttatatgtttgttggtcatttgta

SEQ ID NO: 464262 - DNA, 585 bp, Homo sapiens
tttttaaggggaagttgttaacaatcactttctacaatatgtgactctctcttcaaagagtaaatcagagacaaatcttttttttcaaatttctttttttgaaaatcaataataatgaccctattttttagtttgaatgrattctcattaatttaaaatgcaaatattttggactaaatgtttgtgtccctcccaccccaaatttaaattttgaagccctaatccccagtattatggttttggagatgtgggcctttggaggtcaaaaggttgagatgaaaccatgaggatggagtcctcatgatggaattagtgaatttattataaaagacacagaagagcactttcttgtacacttcctttgtctctgtctctctgtgtgtttctctatctctcttccctgtgggaacacaacaaaaggtatctgtgtgacaagcatgaagaataccctcagcagaaactgactatgtgtatgctgatcgtgtacttcttagcctccaaactatgtggaaaaaaatttgttgtataagacaccaagtttattgcattttgttacggcagcctgagcagtctaacaagaaagca

SEQ ID NO: 464263 - DNA, 585 bp, Homo sapiens
tttttaaggggaagttgttaacaatcactttctacaatatgtgactctctcttcaaagagtaaatcagagacaaatcttttttttcaaatttctttttttgaaaatcaataataatgaccctattttttagtttgaatggattctcattaatttaaaatgcaaatattttggactaaatgtttgtgtccctcccaccccaaatttaaattttgaagccctaatccccagtattatggttttggagatgtgggcctttggaggtcaaaaggttgagatgaaaccatgaggatggagtcctcatgatggaattagtgaatttattataaaagacacagaagagcactttcttgtacacttcctttgtctctgtctctctgtgtgtttctctatctctcttccctgtgggaacacaacaaaaggtatctgtgtgacaagcatgaagaataccctcagcagaaactgactatgtgtatgctgatcgtgtacttcttagcctccaaactatgtggaaaaaaawttgttgtataagacaccaagtttattgcattttgttacggcagcctgagcagtctaacaagaaagca

SEQ ID NO: 464264 - DNA, 510 bp, Homo sapiens
tgaactagaacagaactcctttgacaggcaatgcacatgtttttaggagagcagacygtaagctttctctgagcctccgagaggcagaaggtaagaatgcttctgggttatgcatcctcaagtttttgtttaaactctctgaataagtacctcattccattttgctgaggcaaagtgagtggatggggaaagcaggccaagggcattatgtgaatgggtcacttcaaagggaaaaacatatctgaaacatggtagaagcaccccataactactttttcatgcctttggcctattggacttaaccattatagcaatgatgactcaaaaactacactaaagcagtgttaagaggaaaattgatggtgctaaatgcattcatcagggggacaaaaagttctcaagttaatgacctaacgtagcaactaggggaattagaaaaaaagcaacagaaaagacccaaccccaaagctagtagaagaaaaaaaaaactgaagtcagagaactgaaaaa

SEQ ID NO: 464265 - DNA, 510 bp, Homo sapiens
tgaactagaacagaactcctttgacaggcaatgcacatgtttttaggagagcagaccgtaagctttctctgagcctccgagaggcagaaggtaagaatgmttctgggttatgcatcctcaagtttttgtttaaactctctgaataagtacctcattccattttgctgaggcaaagtgagtggatggggaaagcaggccaagggcattatgtgaatgggtcacttcaaagggaaaaacatatctgaaacatggtagaagcaccccataactactttttcatgcctttggcctattggacttaaccattatagcaatgatgactcaaaaactacactaaagcagtgttaagaggaaaattgatggtgctaaatgcattcatcagggggacaaaaagttctcaagttaatgacctaacgtagcaactaggggaattagaaaaaaagcaacagaaaagacccaaccccaaagctagtagaagaaaaaaaaaactgaagtcagagaactgaaaaa

SEQ ID NO: 464266 - DNA, 488 bp, Homo sapiens
cctcaagtttttgtttaaactctctgaataagtacmtcattccattttgctgaggcaaagtgagtggatggggaaagcaggccaagggcattatgtgaatgggtcacttcaaagggaaaaacatatctgaaacatggtagaagcaccccataactactttttcatgcctttggcctattggacttaaccattatagcaatgatgactcaaaaactacactaaagcagtgttaagaggaaaattgatggtgctaaatgcattcatcagggggacaaaaagttctcaagttaatgacctaacgtagcaactaggggaattagaaaaaaagcaacagaaaagacccaaccccaaagctagtagaagaaaaaaaaaactgaagtcagagaactgaaaaaaaattgttatctaaaagtccacacaaaagatgaagccaagagtttttttaataaacaatactgatagatcattagctagattagcaaagaaaa

SEQ ID NO: 464267 - DNA, 510 bp, Homo sapiens
tgaactagaacagaactcctttgacaggcaatgcacatgtttttaggagagcagaccgtaagctttctctgagcctccgagaggcagaaggtaagaatgcttctgggttatgcatcctcaagtttttgtttaaactctctgaataagtacctcattccattttgctgrggcaaagtgagtggatggggaaagcaggccaagggcattatgtgaatgggtcacttcaaagggaaaaacatatctgaaacatggtagaagcaccccataactactttttcatgcctttggcctattggacttaaccattatagcaatgatgactcaaaaactacactaaagcagtgttaagaggaaaattgatggtgctaaatgcattcatcagggggacaaaaagttctcaagttaatgacctaacgtagcaactaggggaattagaaaaaaagcaacagaaaagacccaaccccaaagctagtagaagaaaaaaaaaactgaagtcagagaactgaaaaa

SEQ ID NO: 464268 - DNA, 488 bp, Homo sapiens
cctcaagtttttgtttaaactctctgaataagtacctcattccattttgctgaggcaaagtgagtggatrgggaaagcaggccaagggcattatgtgaatgggtcacttcaaagggaaaaacatatctgaaacatggtagaagcaccccataactactttttcatgcctttggcctattggacttaaccattatagcaatgatgactcaaaaactacactaaagcagtgttaagaggaaaattgatggtgctaaatgcattcatcagggggacaaaaagttctcaagttaatgacctaacgtagcaactaggggaattagaaaaaaagcaacagaaaagacccaaccccaaagctagtagaagaaaaaaaaaactgaagtcagagaactgaaaaaaaattgttatctaaaagtccacacaaaagatgaagccaagagtttttttaataaacaatactgatagatcattagctagattagcaaagaaaa

SEQ ID NO: 464269 - DNA, 442 bp, Homo sapiens
tcatcttggttgggatccattgctggggacttagtgtgttctttttgaggtgttatagaaccctattttgtcctattgmcagaattatttttctggtttcttctcatttgggtagagtatatcttctaattacttttgagactatgtcttctaattatttttgaatttattttttgatttgactgtgatttttcacttttttttttcactttgaggatgtgactttaatgtttatagtttattgtaacctaattcagctctgcgtgctttcaggggtgaagactgtataagttccctggttatttaaaatctttgtatggtggctttctcagatgctagttgtggtaacattatgctcagtgtgtgtgtgtggaggttcactgtttcctgtggggtagcaatggcagaggtctcatgaagcttatctagttcccaagttgtg

SEQ ID NO: 464270 - DNA, 442 bp, Homo sapiens
tcatcttggttgggatccattgctggggacttagtgtgttctttttgaggtgttatagaaccctattttgtcctattgacagaattatttttctggtttcttctcatttgggtagagtatatcttctaattacttttgagactatgtcttctaattatttttgaatttattttttgayttgactgtgatttttcacttttttttttcactttgaggatgtgactttaatgtttatagtttattgtaacctaattcagctctgcgtgctttcaggggtgaagactgtataagttccctggttatttaaaatctttgtatggtggctttctcagatgctagttgtggtaacattatgctcagtgtgtgtgtgtggaggttcactgtttcctgtggggtagcaatggcagaggtctcatgaagcttatctagttcccaagttgtg

SEQ ID NO: 464271 - DNA, 412 bp, Homo sapiens
aatggtgggaagaagtccaagccttgaccgaggcatctgtgggagctcttagtgaaatgcaccgaggtcttttcacggggaagggagggagccacttcagctcccttgccaggcccccaggaaagcaggtcacactcctaaatacagttctagctattcagattagcaggccctttttatttgcaggaattctgacgttccaagtagagagagattgtgattctatgccttatgcaaatctgaatctrgaggggactcctcctctggggatgcagttaacttgaggtgttccagaaaggctatctacaggtccactcatgctaaattcccataagagaagtaccagctgtgtctgcagcggtgaatgaggggggaaagtctttttcttcaagaccgttctgcagattttccc

SEQ ID NO: 464272 - DNA, 412 bp, Homo sapiens
aatggtgggaagaagtccaagccttgaccgaggcatctgtgggagctcttagtgaaatgcaccgaggtcttttcacggggaagggagggagccacttcagctcccttgccaggcccccaggaaagcaggtcacactcctaaatacagttctagctattcagattagcaggccctttttatttgcaggaattctgacgttccaagtagagagagattgtgattctatgccttatgcaaatctgaatctagaggggactcctcctctggggatgcagttaacttgaggtgttccagaaaggctatctacaggtccactcatgctaaattcccataagagaagtaccagctgtgtctgcagcrgtgaatgaggggggaaagtctttttcttcaagaccgttctgcagattttccc

SEQ ID NO: 464273 - DNA, 527 bp, Homo sapiens
ttacttgttactaaaacatacagaacagaccgaaagttgaaattggttaatttttatctaatctggataagataaacacaatgagtgaaataaatcattatgtcaaataacaaaaacctcatgcatagaaacttcaacatttctgaataacaaaaagtataacattatgtagggcaaggtgccacttttgtatcaactataaataagccctgaatctgaatgatgaaattttaatagtaactgtggaccgcacggcatagatgactgtattggacagatgctgttgtgaatgactcaaagtgtgcagatcactttttcctataatcacttgaaattacttgactttttgatctsttccttttttctgtctcttttttgtccacaacagatattccaaatatccaccgagttttcaaatactccagtccataattggtcttcccattcctagcagaagtactttgtcttctacttcccagaataatgttaattctcttattttagacttgcttgctttaatttgtatt

SEQ ID NO: 464274 - DNA, 527 bp, Homo sapiens
ttacttgttactaaaacatacagaacagaccgaaagttgaaattggttaatttttatctaatctggataagataaacacaatgagtgaaataaatcattatgtcaaataacaaaaacctcatgcatagaaacttcaacatttctgaataacaaaaagtataacattatgtagggcaaggtgccacttttgtatcaactataaataagccctgaatctgaatgatgaaattttaatagtaactgtggaccgcacggcatagatgactgtattggacagatgctgttgtgaatgactcaaagtgtgcagatcactttttcctataatcacttgaaattacttgactttttgatctgttccttttttctgtctcttttttgtccacaacagatattccaaatatccaccgagttttcaaatactccagtccatawttggtcttcccattcctagcagaagtactttgtcttctacttcccagaataatgttaattctcttattttagacttgcttgctttaatttgtatt

SEQ ID NO: 464275 - DNA, 577 bp, Homo sapiens
tgtattaatatggaagggcattctttgttggtacttgatgaggtwagaattaagaatttaaaacttattgttataaacatatacctaatttaaatcatttaagttatgatatattaagctaatacatgcttgaatttgttactacttttgaaaaattctgtgtctccccacaccttcctcattccacttcgctagttattatgtttcttttttaatttatgaagatggaatataatgcccaattcataatactgtttttcaggtacaaagttggcatagacaatactgaaatacatgtgatgacatttacagtagcaattcaaattaaaagagaaaagcatctttctaaaccatcttcaagtaaacagttgccatttatttctactagcaaatatttctatgtatcctaaaaattaaaagtgatatacattgagtaagactttacagtcctcagaatagtataatggaaaaatatgtatttgatatgttttcctgccatttcactatctagaaattgtcctaatccttaaaagagatcattagctagccactgaaatctcaggggaaaagctgttaa

SEQ ID NO: 464276 - DNA, 575 bp, Homo sapiens
attaatatggaagggcattctttgttggtacttgatgaggttagaattaagaatttaaaacttattgktataaacatatacctaatttaaatcatttaagttatgatatattaagctaatacatgcttgaatttgttactacttttgaaaaattctgtgtctccccacaccttcctcattccacttcgctagttattatgtttcttttttaatttatgaagatggaatataatgcccaattcataatactgtttttcaggtacaaagttggcatagacaatactgaaatacatgtgatgacatttacagtagcaattcaaattaaaagagaaaagcatctttctaaaccatcttcaagtaaacagttgccatttatttctactagcaaatatttctatgtatcctaaaaattaaaagtgatatacattgagtaagactttacagtcctcagaatagtataatggaaaaatatgtatttgatatgttttcctgccatttcactatctagaaattgtcctaatccttaaaagagatcattagctagccactgaaatctcaggggaaaagctgttaaa

SEQ ID NO: 464277 - DNA, 577 bp, Homo sapiens
tgtattaatatggaagggcattctttgttggtacttgatgaggttagaattaagaatttaaaacttattgttataaacatatacctaatttaaatcatttaagttatgatatattaagctaatacatgcttgaatttgttactacttttgaaaaattctgtgtctccccacaccttcctcattccacttcgctagttattatgtttcttttttaatttatgaagatggaatataatgcccaattcataatactgtttttcaggtacaaagttggcatagacaatactgaaatacatgtgatgacatttacagtagcaattcaaattaaaagagaaaagcatctttctaaaccatcttcaagtaaacasttgccatttatttctactagcaaatatttctatgtatcctaaaaattaaaagtgatatacattgagtaagactttacagtcctcagaatagtataatggaaaaatatgtatttgatatgttttcctgccatttcactatctagaaattgtcctaatccttaaaagagatcattagctagccactgaaatctcaggggaaaagctgttaa

SEQ ID NO: 464278 - DNA, 577 bp, Homo sapiens
tgtattaatatggaagggcattctttgttggtacttgatgaggttagaattaagaatttaaaacttattgttataaacatatacctaatttaaatcatttaagttatgatatattaagctaatacatgcttgaatttgttactacttttgaaaaattctgtgtctccccacaccttcctcattccacttcgctagttattatgtttcttttttaatttatgaagatggaatataatgcccaattcataatactgtttttcaggtacaaagttggcatagacaatactgaaatacatgtgatgacatttacagtagcaattcaaattaaaagagaaaagcatctttctaaaccatcttcaagtaaacagttgccatttatttctactagcaaatatttctatgtatcctaaaaattaaaagtgatatacattgagtaagactttacagtcctcagaatastataatggaaaaatatgtatttgatatgttttcctgccatttcactatctagaaattgtcctaatccttaaaagagatcattagctagccactgaaatctcaggggaaaagctgttaa

SEQ ID NO: 464279 - DNA, 360 bp, Homo sapiens
ttgtatcttaaaacttccctctggctcattctggtctkatcacaccagctttcttatggcttcttttatctgccaagaattatgctctggtctaattgacctccccaaatttgtatattaaaattctcaccaccaataatattaaaaaatgggcaatttggtaggtgacaggatcatgggagtggagcccttatgaaaggtgccagagagacccctccctcttccaccatgtgaggttagactgagaaatacatctctgtggtttataagctgctcagtctatggcattttgttatagcagcccatgctaatgaatacagatgaccgtgagtctgcagaccttcctaggaaattattgag

SEQ ID NO: 464280 - DNA, 360 bp, Homo sapiens
ttgtatcttaaaacttccctctggctcattctggtctgatcacaccagctttcttatggcttcttttatctgccaagaattatgctctggtctaattgacctccccaaatttgtatattaaaattctcaccaccaataatattaaaaaatgggcaatttggtaggtgacwggatcatgggagtggagcccttatgaaaggtgccagagagacccctccctcttccaccatgtgaggttagactgagaaatacatctctgtggtttataagctgctcagtctatggcattttgttatagcagcccatgctaatgaatacagatgaccgtgagtctgcagaccttcctaggaaattattgag

SEQ ID NO: 464281 - DNA, 583 bp, Homo sapiens
tgtttttcaggtacaaagttggcatagacaatactgaaatacatgtgatgacatttacagtagcaattcaaattaaaagagaaaagcatctttctaaaccatcttcaagtaaacagttgccatttatttctactagcaaatatttctatgtatcctaaaaattaaaagtgatatacattgagtaagactttacagtcctcagaatagtataatggaaaaatatgtatttgatatgttttcctgccatttcactatctagaaattgtcctaatccttaaaagagatcattagctagccactgaaatctcaggggaaaagctgttaaaactgacagctacattttttaacactacacatatagacatctcagagtttaaatacattggatttgtaatctctctgttatttagaagaggtgctgtataggtgaaggactcattttgtgaacctttcttagtatawcagctaatttattcttagaacatttctagagaaagaaaaacagcaagagatcatcagagaataaaaaaaggtattataaatatgagttaaaatcatttaaagtagcagtttatttttcaga

SEQ ID NO: 464282 - DNA, 622 bp, Homo sapiens
tctattatccttgttcaaagcatatctgatgtgggaggaaaggacccagggattctcacagtgctatctgaccttaccttgctccacctgtacctcacaataatttttatccataaaattattagttaagtttgcataagatctccgatgcatgtgagtctgatttgataatctaatactttgtgtatttttaaccacaataatgtgtttttatttttcaatttaatatgtattggaaatcttagtgattcaacacatgttaatctttatcatttctttaactcttagatatgtcatatttacttagccatttctctattggtggacatttaatctatttaatgggcttttgactatttttaaaaagctgtaattgacatcctattgcattttattgcacatatgttagtatttcrtaagacagatgatgagttaaggaaaattgtgcttataagttattcacattgtaaaatttaatagatatcaaaaattttcatctaaagtggtcttaaattatagatgtcaatttgatattattaaactttgaattattttgctaaacccatggattgaaagtataattttatgaaatcttaggtaccacaggaagaagtataaattg

SEQ ID NO: 464283 - DNA, 631 bp, Homo sapiens
agcattgtcaatttaaaaaaatcacaatagcatttaaaatttcagaaaactgaacaaattaatgttcacaagaagcagaaaaataaagtgtgatttactcattccttggaatagtgacacacatatcagattggattattccgagaacaggacttagagagagagagaaaaaagcaaattaaatcaaagagaaccaacaggatgaaagatttactctattagacatcgaaactttataacatacagcaattcagacacatcttgttcttgaagatggatagtatgctggagtcaccttgcctcagcttctggctacgaagtctcccctgaactcctcatgaagatgggctttayaaatacaaactaaccaattcccaaactcatactctatagggctgtcacactccaggccactgtgcttctgtcctaatcacgctagggccaaaaaccagagaaccagagacagctcttatgccccagagcccactgaaattattcaaatgagccagtcctaagcttgtttaccctgcttggtttcttcctgcaaacaccacagtctagggtcttgctcctgaattcctccctctctctgtttcctgatggacctgagttcttccctgtagtctctcct

SEQ ID NO: 464284 - DNA, 571 bp, Homo sapiens
acagcaattcagacacatcttgttcttgaagatggatagtatgctggagtcaccttgcctcagcttctggctacgaagtctcccctgaactcctcatgaagatgggctttataaatacaaactaaccaattcccaaactcatactctatagggctgtcacactccaggccactgtgcttctgtcctaatcacgctagggccaaaaaccagagaaccagagacagctcttatgccccagagcccactgaaattattcaaatgagccagtcctaagcttgtttaccctgcttggtttcttcctgcaaacaccacagtctagggtcttgctcctgaattcctccctctctctgtttcctgatggacctgagttcttccctgtagtctcycctggtgtgacatgctcccttctcttggaaattgtgagtatcttttcaatggcaattgtcttctgatctgtttgctttactataccttagcttttctattaatacgctatatattaaaacaatatttaacataggtgaaaaattgagaaaagatattctaaaaaatggtaaagcagaatcacaca

SEQ ID NO: 464285 - DNA, 497 bp, Homo sapiens
agttttctcacggaagtttcgtatctgactgtctctccactggaaatttctgttgctattcaaatagttctacaatttgcctccagaaaatatgtcaataagattaaaaagtcaacatttcataaattgaaattgctattttgacctcctaaaaatatataacttttattaaaaygaattactattaaaatacattccacataggtatggtaattgcttttattagaaaagttgaaagaagtgagataatctgagtaatatggtttacaacagatatgtaaaaacaaagaacacatatctgtcatctatgtttattcagttttatgtgttataattaaatgaatttcggttcttgcttctctcaattatgacataataaatgatagaaaatagacatgtttttccagaagtcattttataaacataatattgagtaacgtttaaaaattaaaagtaaaaattaaatatttatactttaatttggagaaaaaactgct

SEQ ID NO: 464286 - DNA, 724 bp, Homo sapiens
tgggagttaggtcctaatccaaggattttcagtcactgataaatacagttttctcacggaagtttcgtatctgactgtctctccactggaaatttctgttgctattcaaatagttctacaatttgcctccagaaaatatgtcaataagattaaaaagtcaacatttcataaattgaaattgctattttgacctcctaaaaatatataacttttattaaaatgaattactattaaaatacattccacataggtatggtaattgcttttaytagaaaagttgaaagaagtgagataatctgagtaatatggtttacaacagatatgtaaaaacaaagaacacatatctgtcatctatgtttattcagttttatgtgttataattaaatgaatttcggttcttgcttctctcaattatgacataataaatgatagaaaatagacatgtttttccagaagtcattttataaacataatattgagtaacgtttaaaaattaaaagtaaaaattaaatatttatactttaatttggagaaaaaactgctataagcctattattataaatgcaaagtaaggagaagtgttgagtccactggttgcatcaagaactttttaccaaacttagaggcacataatcagaaaaagatatgtatatttgttctataaattaagattaaaatgtatatatctaatgacattgagagataaggaaaggtattgatctat

SEQ ID NO: 464287 - DNA, 591 bp, Homo sapiens
ctacaagaacaagtaggtgggagttaggtcctaatccaaggattttcagtcactgataaatacagttttctcacggaagtttcgtatctgactgtctctccactggaaatttctgttgctattcaaatagttctacaatttgcctccagaaaatatgtcaataagattaaaaagtcaacatttcataaattgaaattgctattttgacctcctaaaaatatataacttttattaaaatgaattactattaaaatacattccacataggtatggtaattgcttttattagaaaagttgaaagaagtgagataatctgagtaatatggtttacaacagatatgtaaaaacaaagaacacatatctgtcatctatrtttattcagttttatgtgttataattaaatgaatttcggttcttgcttctctcaattatgacataataaatgatagaaaatagacatgtttttccagaagtcattttataaacataatattgagtaacgtttaaaaattaaaagtaaaaattaaatatttatactttaatttggagaaaaaactgctataagcctattattataaatgcaaagtaagg

SEQ ID NO: 464288 - DNA, 497 bp, Homo sapiens
agttttctcacggaagtttcgtatctgactgtctctccactggaaatttctgttgctattcaaatagttctacaatttgcctccagaaaatatgtcaataagattaaaaagtcaacatttcataaattgaaattgctattttgacctcctaaaaatatataacttttattaaaatgaattactattaaaatacattccacataggtatggtaattgcttttattagaaaagttgaaagaagtgagataatctgagtaatatggtttacaacagatatgtaaaaacaaagaacacatatctgtcatctatgtttattcagttttatgtgttataattaaatgaatttsggttcttgcttctctcaattatgacataataaatgatagaaaatagacatgtttttccagaagtcattttataaacataatattgagtaacgtttaaaaattaaaagtaaaaattaaatatttatactttaatttggagaaaaaactgct

SEQ ID NO: 464289 - DNA, 724 bp, Homo sapiens
tgggagttaggtcctaatccaaggattttcagtcactgataaatacagttttctcacggaagtttcgtatctgactgtctctccactggaaatttctgttgctattcaaatagttctacaatttgcctccagaaaatatgtcaataagattaaaaagtcaacatttcataaattgaaattgctattttgacctcctaaaaatatataacttttattaaaatgaattactattaaaatacattccacataggtatggtaattgcttttattagaaaagttgaaagaagtgagataatctgagtaatatggtttacaacagatatgtaaaaacaaagaacacatatctgtcatctatgtttattcagttttatgtgttataattaaatgaatttcggttcttgcttctctcaattatgacataataaatgatagaaaatagacatgtttttccagaagtcattttataaacataatattgagtaacgtttaaaaattaaaagtaaaaattaaatatttatactttaatttggagaaaaaactgctataarcctattattataaatgcaaagtaaggagaagtgttgagtccactggttgcatcaagaactttttaccaaacttagaggcacataatcagaaaaagatatgtatatttgttctataaattaagattaaaatgtatatatctaatgacattgagagataaggaaaggtattgatctat

SEQ ID NO: 464290 - DNA, 412 bp, Homo sapiens
atgataacaatttgtaaaattagcttatttgaaaataaaactataattatttaaggatattctaaaccaatttggaatgtcaatttgttgaagaagaccatatttttatatattaagatttatagaaattaaaatttttatctgagcaattcaatatattttatgatartaaattatataaattccagcagaaaatcatattagatgattatggtttatttaaggattctagtaaaatctttaacatagaaaaatactcatattggtatacgtacagaacacagtcatctaccattcatagttcaagctggagctattaaaatattagattggataactcaatatcaacattgatatccattgtaaatatatacaatagaagccattaatcttaccaaaaagatataaaatt

SEQ ID NO: 464291 - DNA, 412 bp, Homo sapiens
atgataacaatttgtaaaattagcttatttgaaaataaaactataattatttaaggatattctaaaccaatttggaatgtcaatttgttgaagaagaccatatttttatatattaagatttatagaaattaaaatttttatctgagcaattcaatatattttatgataataaattatataaattccagcagaaaatcatattagatgattatggtttatttaaggattctagtaaaatctttaacatagaaaaatactcatattggtatacgtacagaacacagtcatctaccattcatagttcaagctggagytattaaaatattagattggataactcaatatcaacattgatatccattgtaaatatatacaatagaagccattaatcttaccaaaaagatataaaatt

SEQ ID NO: 464292 - DNA, 592 bp, Homo sapiens
cttaagtctattcagtgtaaactgcctccaccttttttgatgtttatcaagagaaaccmaaaatacaagattggagaattaaatattgaaatagtcaactatgggaatgttctcaaaaaacaaggaagcaagcaaacaaacaaacaaaaacacattgtgctggccaacactgtgaaagctaaagtaactctggaaatgtatttggatcagttactgcaaatttataattttcctttaggaagtagacagtaggataaaccattgaaatgtttctttcttgttttgatgtagttccaatacttactaaatatgtggcttggacatgttagcttctttatttttaaaacagaacaaaaaatagacgtcatattgatttgaatactaaataggatagaagtaataaaccatatatggcaatgcttagtacattagtaaacacttgataaataagtggtagctattattattgcttgccaaataactttacagaggtgtcaaaaaattcaaaatcccacatgtcctcagagttatttctgcttgccaggtgtccctgcttagaaattaataggacgtacacaccaaaatttgacat

SEQ ID NO: 464293 - DNA, 612 bp, Homo sapiens
gtaaactgcctccaccttttttgatgtttatcaagagaaacccaaaatacaagattggagaattaaatattgaaatagtcaactatgggaatgttctcaaaaaacaaggaagcaagcaaacaaacaaacaaaaacacattgtgctggccaacactgtgaaagcyaaagtaactctggaaatgtatttggatcagttactgcaaatttataattttcctttaggaagtagacagtaggataaaccattgaaatgtttctttcttgttttgatgtagttccaatacttactaaatatgtggcttggacatgttagcttctttatttttaaaacagaacaaaaaatagacgtcatattgatttgaatactaaataggatagaagtaataaaccatatatggcaatgcttagtacattagtaaacacttgataaataagtggtagctattattattgcttgccaaataactttacagaggtgtcaaaaaattcaaaatcccacatgtcctcagagttatttctgcttgccaggtgtccctgcttagaaattaataggacgtacacaccaaaatttgacatttagatgtttcattccacttatttgtcttctagttt

SEQ ID NO: 464294 - DNA, 592 bp, Homo sapiens
cttaagtctattcagtgtaaactgcctccaccttttttgatgtttatcaagagaaacccaaaatacaagattggagaattaaatattgaaatagtcaactatgggaatgttctcaaaaaacaaggaagcaagcaaacaaacaaacaaaaacacattgtgctggccaacactgtgaaagctaaagtaactctggaaatgtatttggatcagttactgcaaatttataattttcctttaggaagtagacagtaggataaaccattgaaatgtttctttcttgttttgatgtagttccaatacttactaaatatgtggcttggacatgttagcttctttatttttaaaacagaacaaaaaatagacrtcatattgatttgaatactaaataggatagaagtaataaaccatatatggcaatgcttagtacattagtaaacacttgataaataagtggtagctattattattgcttgccaaataactttacagaggtgtcaaaaaattcaaaatcccacatgtcctcagagttatttctgcttgccaggtgtccctgcttagaaattaataggacgtacacaccaaaatttgacat

SEQ ID NO: 464295 - DNA, 612 bp, Homo sapiens
gtaaactgcctccaccttttttgatgtttatcaagagaaacccaaaatacaagattggagaattaaatattgaaatagtcaactatgggaatgttctcaaaaaacaaggaagcaagcaaacaaacaaacaaaaacacattgtgctggccaacactgtgaaagctaaagtaactctggaaatgtatttggatcagttactgcaaatttataattttcctttaggaagtagacagtaggataaaccattgaaatgtttctttcttgttttgatgtagttccaatacttactaaatatgtggcttggacatgttagcttctttatttttaaaacagaacaaaaaatagacgtcatattgatttgaatactaaataggatagaagtaataaaccatatatggcaatgcttagtacattagtaaacacttgataaataagtggtagctattattattgcttgccaaataactttacagaggtgtcaaaaaattcaaaatcccacatgtcctcagagttatttctgyttgccaggtgtccctgcttagaaattaataggacgtacacaccaaaatttgacatttagatgtttcattccacttatttgtcttctagttt

SEQ ID NO: 464296 - DNA, 503 bp, Homo sapiens
tttatatcatttgttagcctaagctgataaatattctactggattaccttctagaagtttttaagcatttattttctatctaattttttcagatatcaaataatccctcatatattatacatttcccatgaagtttttatttacattggatgaatttgtagttctttaaccatgtgaaacatttcattatgaaatatttcaataaaaatatgatgtataasttttatcaatatgtttttgttcattcttgcatatattagtttttttggctattaaattttctaagtggaaactttttggtaagatttttctttctggtttaactggctatctgatcgaaaaacaaccaaaatatctccagatggattaaagaattacacacaaaaatacaactttagtgaagtatatccatatgttatcaaatagcttaaaactaacttttgaaaaaaaatcaatgtgactacttaaaaattttgttcagataattacagggataccagttt

SEQ ID NO: 464297 - DNA, 260 bp, Homo sapiens
tgacataataaagcacatttatgaaacagtaaattgcttttcgtaaaggtggattatttgatgtattttgaagaagaaataacaactgtgaatcaaatatttatttatgaaattggcagagagtaaatgattaaagttttaatgatcagattgtcattttagagtaattatcattatacracagtgaagaaaagtttgaagaagttatagaaaaaggatgctattgttttaaattaatgcactggtctagctgtgatttc

SEQ ID NO: 464298 - DNA, 275 bp, Homo sapiens
cccagtcatggatctgaggccatatatrtaataatttgaacaaagttacctggggtggtattcaaagtttcttatcattggtaggatgcagagcagaatttacagtaggccttatggaaggtaggaaagagtctcatacatgctctaagtgaaatctggagtgcatgaagagaacatcagggaggaaaccaaggtaaagatgacgttacaggttgaaatgtgtggttggagagaatattacctgcttgtgctaccttcacataaatacaaaattg

SEQ ID NO: 464299 - DNA, 616 bp, Homo sapiens
tatctcatttgatagagtgattgtattagtccattttaacactgctgataaagacatacccacgactggacaacttacaaaagaaaaaggtttattggacatacagttccacatggctggggaggactcacaatcatggcaaaaaggagcaagacacatcttatgtgggtggcagcaggcaaaaaaagagcttgtgcagagaaaatcctgtttttaacaccactagatcttgtgagacccattcactattatgagaacagcatgggaargacctgcccccatgattcagtcttctcccatcaggtccctcccactacatatagaaattatgggagctacaagatgagatttggatggggacacagagccaaaccatatcatttcactccagcccctcccaaatctcatatctgcatgtttcaaaaccagtcatgccttcccaacagtcccccaaaatgtcaactctttttagcattaactcaaaagtccacagtccaaagtttcatctgagacaaggcaagtcccttccacctatgaccctgtaaaatcaaaaccaagttagttacttcctagatacaatggggttacaggggtaaggggattgggtaaatgcacc

SEQ ID NO: 464300 - DNA, 316 bp, Homo sapiens
cctaaataaatggagagataaaccaagttcaayaatttgaatgctttgtagtgttaagaaggtagttctactaaattgatttctagattaattgcaatatcagtccagatctcagtaggctttttatataaataacaaatattttttcaaaatttctatgtaatgttataaaatattataaattaatattgaaaatattttacatgaaagttcaaatttctggagccttttaagataagaggatggcagtgtttctatggtataaatactaagtatataaaaactgaagacttctattaatatcagacaaaatggg

SEQ ID NO: 464301 - DNA, 316 bp, Homo sapiens
cctaaataaatggagagataaaccaagttcaataatttgaatgctttrtagtgttaagaaggtagttctactaaattgatttctagattaattgcaatatcagtccagatctcagtaggctttttatataaataacaaatattttttcaaaatttctatgtaatgttataaaatattataaattaatattgaaaatattttacatgaaagttcaaatttctggagccttttaagataagaggatggcagtgtttctatggtataaatactaagtatataaaaactgaagacttctattaatatcagacaaaatggg

SEQ ID NO: 464302 - DNA, 316 bp, Homo sapiens
cctaaataaatggagagataaaccaagttcaataatttgaatgctttgtagtgttaagaaggtagttctactaaattgatttctagattaattgcaatatcagtccagatctcagtaggctttttatataaataacaaatattttttcaaaattwctatgtaatgttataaaatattataaattaatattgaaaatattttacatgaaagttcaaatttctggagccttttaagataagaggatggcagtgtttctatggtataaatactaagtatataaaaactgaagacttctattaatatcagacaaaatggg

SEQ ID NO: 464303 - DNA, 310 bp, Homo sapiens
cacagaccacccccaagaaaaaaccaaccctggcagtatcttsgttttaacatggtgggatcaagtcagatttctgtcttacagaactgtaacataataaatctgtattgtttaagctactaagtttgaagtaattttactaaaacttgaaaggaatttacattttgcttttaaagttctttatttttgaaactttagacagagatcaacaaatcctcaacaagagatagctcaatttttacctttgaaaaaggaattatgttacatatctataagaatgaataactacagcacagaaaaatactcataa

SEQ ID NO: 464304 - DNA, 580 bp, Homo sapiens
ttggagaaatacgaagtttttaatgtttgtattagaaaaaggagaaatgtctaaaattaatgacacaaatgtctacctgaaaaagtgaaaagaaaaccaaattaaacaagaagtagaaagtaaaatatagagaaaaactaaaatttyataaagacataacagaaatacaaaaggaaaagatgaaatttaaaactgattctttgataaaaggaataaactgaatttaattctcgatagtctgagaaagatacaagacagaaatctgtcagcaaccactttcaggaaataaagtgggcaaggttgggaagatggtgggtgttgtaaagatactacaaatatcaaaatgataataacttaaattataaaaactttatgccaataaatttgataatggttgaataaattgtatggttagcaaaataatctttacaattactctagaataaataaaatttcttcatatctttagatttgttaaagatactgaattttaatttaataccttcttaggggaaacaaattccagactcagatgccttcactgttacatttcattcttttaaataggtaaatgttacag

SEQ ID NO: 464305 - DNA, 580 bp, Homo sapiens
ttggagaaatacgaagtttttaatgtttgtattagaaaaaggagaaatgtctaaaattaatgacacaaatgtctacctgaaaaagtgaaaagaaaaccaaattaaacaagaagtagaaagtaaaatatagagaaaaactaaaattttataaagacataacagaaatacaaaaggaaaagatgaaatttaaaactgattctttgataaaaggaataaactgaattwaattctcgatagtctgagaaagatacaagacagaaatctgtcagcaaccactttcaggaaataaagtgggcaaggttgggaagatggtgggtgttgtaaagatactacaaatatcaaaatgataataacttaaattataaaaactttatgccaataaatttgataatggttgaataaattgtatggttagcaaaataatctttacaattactctagaataaataaaatttcttcatatctttagatttgttaaagatactgaattttaatttaataccttcttaggggaaacaaattccagactcagatgccttcactgttacatttcattcttttaaataggtaaatgttacag

SEQ ID NO: 464306 - DNA, 310 bp, Homo sapiens
cacagaccacccccaagaaaaaaccaaccctggcagtatcttcgttttamcatggtgggatcaagtcagatttctgtcttacagaactgtaacataataaatctgtattgtttaagctactaagtttgaagtaattttactaaaacttgaaaggaatttacattttgcttttaaagttctttatttttgaaactttagacagagatcaacaaatcctcaacaagagatagctcaatttttacctttgaaaaaggaattatgttacatatctataagaatgaataactacagcacagaaaaatactcataa

SEQ ID NO: 464307 - DNA, 586 bp, Homo sapiens
tatcctgagaatttttacaataatttgttacacagacatagattatttttgttagagaatctgctaaataaacatgaagtatactttttaggtcttctattaacattattaggaaaatttagaaaatttattcatttatatacaaaattaatagacacattaaatactctgtgccacccaatgcccaattcactgagaacattttactgaataaacaaaaaattttgacccttgattaccttattgttggaagtaacaaaccatagaagatagacaatgtaaaaataaataagtggttttgacaatggacaataagcaaaaatacctgttcacttgttgtattggtacattctcacactgctataaagagctgctagatgctggttaatatataaaggaaagaggcttaattgactcagaattctgcaggtctggggaggcctcagaaaacttacartcatgccagaaggggaagcaaaccatgtccttctgcacattgtggcaggaaggaaaagtgcagagtgaagggggtaaaagctttttataaaaccaccaaatctcatgagaactcactcactatcatgag

SEQ ID NO: 464308 - DNA, 494 bp, Homo sapiens
attcttcacttcatacatctttgatatctttatggtgagagaattcaaaaatcctctcttctagctattttgaaatatacaatacaatattgctaaccatagtcaccctgactccattcctcattttaaaaatggaggaagggacagtgattaaaggaatgcaagcagcctctgggctgtggaaaaccaaaggaaacaaactcttcccacagaccacccccaagaaaaaaccaaccctggcagtatcttcgttttaacatggtgkgatcaagtcagatttctgtcttacagaactgtaacataataaatctgtattgtttaagctactaagtttgaagtaattttactaaaacttgaaaggaatttacattttgcttttaaagttctttatttttgaaactttagacagagatcaacaaatcctcaacaagagatagctcaatttttacctttgaaaaaggaattatgttacatatctataagaatgaataact

SEQ ID NO: 464309 - DNA, 551 bp, Homo sapiens
ttccacctaaatgttgtgatgataatgggtctatttttcctgagacccattcctcactctgcccagttcagttcttaagacagaggggatgaamactgtggattatgtagctcagattttctgaaagctggcttccaggtaggctcaaacaataggagacacatgcagaaagatgaaaggcaggaacaaggagaaatctagatattgtctcaatttctccctgtcatccctaataacagttgcattttttacaggctcctgctcctttacataggcccactgtggttccagcttcccccaaatatccctccctgcagctccagtagtacagcctcctatccctgttctccaagggaaggtgatagtagcctcccattgttgctaaattgtaggttgcctcactgtcccctggttggctttaatttttttaaagttatttctactatcaattccctttgttttaaattctcaatgatttcaattttcctggctagtttctgattacttcagatacctaatggaaatctcaaagaaagtatgactcaagagaa

SEQ ID NO: 464310 - DNA, 536 bp, Homo sapiens
ttcaaggtctggcatccagctcaaaatgtagtatctctggccactcataattctcccagtgaagtccagataaggtcctcatttctcagtaaaatctaaacttaaaagaataaatatgtgtcctgtgtacaaatatgcaayggtgaagtgggaacaaggtggcagcaataaatacatctctatcaccacagtcatttgttcttgactatttgcaaatcatttcaggaagacatggtgaaacatcctacactgtgagtggcagaaccccatgtgcactgcaatctcatttcctaccctccagaggagtatataaacttttcctacataaataatggccacatttttgtatcgatacattgtaagttctaagatgtgtgtgttttttttaagaagaattaaaatagaaaagcatatacctaaaagatgttcctcgggatatatctgcatatattctctactcttgtcattttaaataaaaatacagtggtcccttgatatcctcaagagattgggtccaggaccccagaggataccaa

SEQ ID NO: 464311 - DNA, 447 bp, Homo sapiens
atctacagggacacaaaataatatgcaaaaaagtatttgaattatcttcagcacctttctaaagaaaaaaagctacttaaaactcacacttagaagtgctcaatatgagtcaatacattatgtcaccacctaaagtaacaagatgttaggctgcaactgctgtatgttttgaaagwgactcattacactacgaagtcacatacttgtttaatattataataagacagaactaaatttaaatcatagttataccaaacactagctactctgaatctctacatctcaatgttctcaccagcaaaatcaagctaataataatactagcttcttaaagttatttaaaagataaatgagctaagatatgtaatgctcatagcccatttagaaaggcaaaatataaggtatagtacatagaaaccactgaccattggtaattctgaaacacta

SEQ ID NO: 464312 - DNA, 639 bp, Homo sapiens
  misc_feature (1)...(639): n = A,T,C or G
atataaggtatagtacatagaaaccactgaccattggtaattctgaaacactacaggtcagacagnttgaatgaaccatatactaaangttggaanaagtatttgattaaactctgccttttttttttctgggaaagaacacatagattaatcactttgtataaycccaacctctcccttcttgggagtggggataggggaaacagttttcatcatctatgatcttaagtttcctcatgctctttctcattgttaagacaataccacttattttagcttattgttacaatagtatttcatttttttctaacaacttagtattagtcaagatgggatataataacaaatgactcttgaaatcttcatgggtgccatgggaagtttcaagaacacaacttgaaagtgaattgcatgactttgttctgtatttcattgaccactactcattcagtgagcctgaaagtaactgtgtatatcactgttagtatactatgcatgccagatacccaagactcaaacttttcctttcctttagataccacctacttagtcatcaattttggttcaacctactccactaaatagctttgacttccattcacttaccactttagattagtgctatagactcctatttta

SEQ ID NO: 464313 - DNA, 532 bp, Homo sapiens
gcatttttacgaaccaaaatcattgcagctaataaccaaatcaagaacacaatccaatttacaatagccacaaagaaaatgaaatacctaggaattcatccaaccaagggggtcaaagaccactacaaggagaagtacaagacactgttgaaagaaatcagagatgacacataaatggaaaaatatccatgcgcatggattggaagaatcaatattgttaaaatggatatactgcctaaagcaatttacagattcaatgctattcctatcaaaataccaatgtcattttttaaataattagaatgaaacctattataaaattcatctggaaccacaaaagagcttgaatagccaaagcaatcctaagcaaaaagaaaagccagaggtatcrcattgccagacttcaaactgtactataaggctacagtgatcaaaacagcgtggtactgatacaaaaacagacacacaggccagtggaagagaatacagcacccagaactaaatttgcccacctacaactatgtgacctttg

SEQ ID NO: 464314 - DNA, 532 bp, Homo sapiens
gcatttttacgaaccaaaatcattgcagctaataaccaaatcaagaacacaatccaatttacaatagccacaaagaaaatgaaatacctaggaattcatccaaccaagggggtcaaagaccactacaaggagaagtacaagacactgttgaaagaaatcagagatgacacataaatggaaaaatatccatgcgcatggattggaagaatcaatattgttaaaatggatatactgcctaaagcaatttacagattcaatgctattcctatcaaaataccaatgtcattttttaaataattagaatgaaacctattataaaattcatctggaaccacaaaagagcttgaatagccaaagcaatcctaagcaaaaagaaaagccagaggtatcgcattgccagacttcaaactgtactataaggctacagtgatcaaaacagcgtggtactgatacaaaaacagacacacagrccagtggaagagaatacagcacccagaactaaatttgcccacctacaactatgtgacctttg

SEQ ID NO: 464315 - DNA, 494 bp, Homo sapiens
attcttcacttcatacatctttgatatctttatggtgagagaattcaaaaatcctctcttctagctattttgaaatatacaatacaatattgctaaccatagtcaccctgactccattcctcattttaaaaatggaggaagggacagtgattaaaggaatgcaagcagcctctgggctgtggaaaaccaaaggaaacaaactcttcccacagaccacccccaagaaaaaaccaaccctggcagtatcttcgttttaacatggtgggatcaagtcagatttctgtcttacagaactgtaacataataaatctgtattgtttaagctactaagtttgaagtaattttactaaaacttgaaaggaatttacattttgcttttaaagttctttatktttgaaactttagacagagatcaacaaatcctcaacaagagatagctcaatttttacctttgaaaaaggaattatgttacatatctataagaatgaataact

SEQ ID NO: 464316 - DNA, 484 bp, Homo sapiens
gttgttcctggccaatgactgagcatgctcggagtattgatgaaggccatttttaagatttgtgataaccttccaacagaagactttggactggagactyctattgtctgggccaaaatttcctaaactgtgtttcaggctgtgactctttcattctcatccttcttccttctccccctcctttgacagaagccaggcttgcatcactgaagactccctgcacttagatctgctttttcttcttaatctttaactaacgttcctctcataaccttttgagtgacttataattgcatagtatcagcttcttggaaaacctgacttgataaactatcctatttgaaatacagatatatacgcatttaacaatttttgacattattagcacactgagtattaaatagtatctgaaaagagatacctttaaaaatgaaaacaccttcctattggggttttcttcaaaacagattatttttaaaaagat

SEQ ID NO: 464317 - DNA, 484 bp, Homo sapiens
gttgttcctggccaatgactgagcatgctcggagtattgatgaaggccatttttaagatttgtgataaccttccaacagaagactttggactggagacttctattgtctgggccaaaatttcctaaactgtgtttcaggctgtgactctttcattctcatcyttcttccttctccccctcctttgacagaagccaggcttgcatcactgaagactccctgcacttagatctgctttttcttcttaatctttaactaacgttcctctcataaccttttgagtgacttataattgcatagtatcagcttcttggaaaacctgacttgataaactatcctatttgaaatacagatatatacgcatttaacaatttttgacattattagcacactgagtattaaatagtatctgaaaagagatacctttaaaaatgaaaacaccttcctattggggttttcttcaaaacagattatttttaaaaagat

SEQ ID NO: 464318 - DNA, 484 bp, Homo sapiens
gttgttcctggccaatgactgagcatgctcggagtattgatgaaggccatttttaagatttgtgataaccttccaacagaagactttggactggagacttctattgtctgggccaaaatttcctaaactgtgtttcaggctgtgactctttcattctcatccttcttccttctccccctcctttgacagargccaggcttgcatcactgaagactccctgcacttagatctgctttttcttcttaatctttaactaacgttcctctcataaccttttgagtgacttataattgcatagtatcagcttcttggaaaacctgacttgataaactatcctatttgaaatacagatatatacgcatttaacaatttttgacattattagcacactgagtattaaatagtatctgaaaagagatacctttaaaaatgaaaacaccttcctattggggttttcttcaaaacagattatttttaaaaagat

SEQ ID NO: 464319 - DNA, 484 bp, Homo sapiens
gttgttcctggccaatgactgagcatgctcggagtattgatgaaggccatttttaagatttgtgataaccttccaacagaagactttggactggagacttctattgtctgggccaaaatttcctaaactgtgtttcaggctgtgactctttcattctcatccttcttccttctccccctcctttgacagaagccaggcttgcatcactgaagactccctgcacttagatctgctttttcttcttaatctttaactaaygttcctctcataaccttttgagtgacttataattgcatagtatcagcttcttggaaaacctgacttgataaactatcctatttgaaatacagatatatacgcatttaacaatttttgacattattagcacactgagtattaaatagtatctgaaaagagatacctttaaaaatgaaaacaccttcctattggggttttcttcaaaacagattatttttaaaaagat

SEQ ID NO: 464320 - DNA, 310 bp, Homo sapiens
cacagaccacccccaagaaaaaaccaaccctggcagtatcttcgttttaacatggtgggatcaagtcagatttctgtcttacagaactgtaacataataaatctgtattgtttaagctactaagtttgaagtaattttactaaaacttgaaaggaatttacattttgcttttaaagttctttatttttgaaactttagacagagatcaacaaatcctcaacaagagatagctcaatttttacctttgmaaaaggaattatgttacatatctataagaatgaataactacagcacagaaaaatactcataa

SEQ ID NO: 464321 - DNA, 459 bp, Homo sapiens
attttaaaatcatattatcgcatgtttatttccaaattaacagggcaataaaaatcmtctcttaaaaatcaggggtatcagtattcatctcttttcatgtaaaaatattaaaaaattagaagtgaaatatcacagaagatattttaaatatgaagacaaataatgaaataaggagaattttaaaagccaaatattttggatcagagtaagaagttagtggtaaaagataaaggttatccaacaacctttcgcaaatgaagccaaaaaagtaggtttgcgcaacactgaataactaaaattacaactcttttatatttcattaaaaaacatgccctttttcaaaaagtcagatcggtttaatcacaccataaaattatttacccaaagttaaggaaaaatagcatgctttcatataagtagaaaatttaaatacacaattgatatttaacgttctctaag

SEQ ID NO: 464322 - DNA, 606 bp, Homo sapiens
atcatattaaacatgaatttcaaccagcaaagaatattattaaaacttctggactaatgttattcacttgtattctttcctactacccggaaatgcttttgctggcaatgatttctcctttgatgttgtgaagtttcgggccattgttagagaaacaggtccacttgccgattagcaggcagtaggctttgtgacctaagttcagtaacagaaaatcattactttctctggcaatttgatacaacatgcttcatatattccaaaattcatcaattttctgctctgttgatgtcctcctttattatgttaaagaattgccacagtatagtttattcataatgctattttcagttgaattactagagctccactttagcattttaaaatcatattatcgcatgtttatttccaaattaacagggcaataaaaatcatctcttaaaaatcagggrtatcagtattcatctcttttcatgtaaaaatattaaaaaattagaagtgaaatatcacagaagatattttaaatatgaagacaaataatgaaataaggagaattttaaaagccaaatattttggatcagagtaagaagttagtggtaaaagata

SEQ ID NO: 464323 - DNA, 576 bp, Homo sapiens
agaacaatttatattcctttggatatatacccagtaatgggattgctgggtctaatggtagttctgtttttaggtctttgaggaatmaccacactgttttccacaatggctgaattaatttacattctctttaacagtgtatagtgttcctttttctctgcaaccttaccagcacctgctattttttgactttttaataatagccattctgactggtgtgcttactggttcttaatctcacccacatcttagaataatgtggaacattcaaactacccacacctgtttctaaaaactgaagttctgttttaattggactttagtagagccaagaaatgagtattacttaaaatcttgccatgtgattctactaggaagccagagttcagagccatggattacatttttaatataaatacatattattagttgaagcagttttaagttaggatagctgtaacgttgattgaaaggggaatacttaaaacagaaccctgccttgggtcgtcaagacttaaaaaattcttctgtttttattcgattaaatataatcatgcattcatttactttagcatt

SEQ ID NO: 464324 - DNA, 554 bp, Homo sapiens
gttcatgaatatctagcagaacaagagaacagaatggattggactaatagaaaacaagtattatttttaacctttttgcttaaaactttccttgctttgtttttctgagtcaaggatacttattttgaattatttaaagcctttaataattgagtaaactatactcctgtgaacaaaatttgaaggacgtttgtttctctctgcctggstttgccagaatttggaaactatttgtgagaatatttaatttatggcaatacagttattttcatcagtgtaataagaatacattttcttttgcaacaggacacaattgaagaaactggtggttttaccaaggcttttactggaagggtatatgttcctttaagtaattaagctggacttgccaataaaagtctcttgggaaaactggctacataccttgtcaacacagtccttgtacaaggttcctaacccgtgggaagtaaagcatgtcactttttaacaggcctaggagcctgttaaaaagctcctgggcctgttaaaaagcttgttcttgagacatcaagaag

SEQ ID NO: 464325 - DNA, 554 bp, Homo sapiens
ttgctttgtttttctgagtcaaggatacttattttgaattatttaaagcctttaataattgagtaaactatactcctgtgaacaaaatttgaaggacgtttgtttctctctgcctggctttgccagaatttggaaactatttgtgagaatatttaatttatggcaatacagttattttcatcagtgyaataagaatacattttcttttgcaacaggacacaattgaagaaactggtggttttaccaaggcttttactggaagggtatatgttcctttaagtaattaagctggacttgccaataaaagtctcttgggaaaactggctacataccttgtcaacacagtccttgtacaaggttcctaacccgtgggaagtaaagcatgtcactttttaacaggcctaggagcctgttaaaaagctcctgggcctgttaaaaagcttgttcttgagacatcaagaagagaatgatttaccaaactcgtagatatttgagggtggaaacccatgactgggcttggccttaaaaggtcttaactgagattccttatggaa

SEQ ID NO: 464326 - DNA, 595 bp, Homo sapiens
gtaatatttattcttgatatatgtttgttactttaacgggaatacataggctataaatagtccccttgcctctcacaagttagacagtcctgcccagaatgccctgctgaagagttgtagcagatcaccctgttcctccttaacctctctgttcctcatatgctcacctataaaatagtgatcatagtaacacccatcttgtgatgatgtagagaggttcaaagaagcgaattaggggaggccaggcatggtggcttatgcctctaattccagcactttgggagtccaatcacttgaagtcaggaattygagaccagcctggccaacatggtgaaacccacttctactaaaacaaacaaacaaacaaacaaaaaacaaacaaacaaacaaaaaacacaaaaattaactgggcattgtggcagttgcttctaatcccagctacttggttggctgaggcaggagaatccgttggacccaggaggcggaggttgcagtgagccgagatcacaccactgcactccagcttgggtaacagagcaaggttttgtctcaaaagaaaaaaaaaaagaaaccaattagggtggaaacacttaga

SEQ ID NO: 464327 - DNA, 492 bp, Homo sapiens
ttgcttctaatcccagctacttggttggctgaggcaggagaatccgttggacccaggaggcggaggttgcagtgagccgagatcacaccactgcactccagcttgggtaacagagcaaggttttgtctcaaaagaaaaaaaaaaagaaaccaattagggtggaaacacttagaacagggtgttcataagttgtcaccctcttgaagcaattgttggacactattttaaaaatgttttacttctgagtgaaatgttgcattttattttactrgaagattcttatgtagtttaagtacattttacggtattgtcaaagagcatgagcaaaatatttaggaaagatgagaccatatttcttttatttatgacattgccacaaaaaaatcaggtagatgaatttgtattaagtttttgtaccaatttcatatctaaaatttcaaagaattttattgcaacaaactctttcttaccattaactcaaaaaaattctgt

SEQ ID NO: 464328 - DNA, 580 bp, Homo sapiens
gtctgtagttttctgttaatctctacctatttttttcctttatgggtaatctgtacctcatataatgtactgttagggttgctkcttcttttatttctgaaagactttgcatagaattgttactatttattctttaaacattgtgagaatacaagagtgaaaccttcctgacctggaattattttgcgtgtgagtttcaaattatagatttaatgtatttaatagatgcaggattattcatggtgtttctttatttttaagtgaattttgtaacctcttttctctcaagtaatgtgtccgtttaccaaacttttaaaatgtatttgcataaagtttaaacattgtgtgcttactatcattttataactatagtataattagtgacagtctttcattactggctttagtatttagtattttttctcttttttgttgagtatagctagaattttttcattttttaataaattagctttttattttattgatattccattttggtgttctttcaatttttattgatttttgttcatatatgtattttattatttctttttaccttagtacatttcgactacaa

SEQ ID NO: 464329 - DNA, 580 bp, Homo sapiens
gtctgtagttttctgttaatctctacctatttttttcctttatgggtaatctgtacctcatataatgtactgttagggttgcttcttcttttatttctgaaagactttgcatagaattgttactatttattctttaaacattgtgagaatacaagagtgaaaccttcctgacctggaattattttgcgtgtgagtttcaaattatagatttaatgtatttaayagatgcaggattattcatggtgtttctttatttttaagtgaattttgtaacctcttttctctcaagtaatgtgtccgtttaccaaacttttaaaatgtatttgcataaagtttaaacattgtgtgcttactatcattttataactatagtataattagtgacagtctttcattactggctttagtatttagtattttttctcttttttgttgagtatagctagaattttttcattttttaataaattagctttttattttattgatattccattttggtgttctttcaatttttattgatttttgttcatatatgtattttattatttctttttaccttagtacatttcgactacaa

SEQ ID NO: 464330 - DNA, 580 bp, Homo sapiens
gtctgtagttttctgttaatctctacctatttttttcctttatgggtaatctgtacctcatataatgtactgttagggttgcttcttcttttatttctgaaagactttgcatagaattgttactatttattctttaaacattgtgagaatacaagagtgaaaccttcctgacctggaattattttgcgtgtgagtttcaaattatagatttaatgtatttaatagatgcaggattattcatrgtgtttctttatttttaagtgaattttgtaacctcttttctctcaagtaatgtgtccgtttaccaaacttttaaaatgtatttgcataaagtttaaacattgtgtgcttactatcattttataactatagtataattagtgacagtctttcattactggctttagtatttagtattttttctcttttttgttgagtatagctagaattttttcattttttaataaattagctttttattttattgatattccattttggtgttctttcaatttttattgatttttgttcatatatgtattttattatttctttttaccttagtacatttcgactacaa

SEQ ID NO: 464331 - DNA, 580 bp, Homo sapiens
gtctgtagttttctgttaatctctacctatttttttcctttatgggtaatctgtacctcatataatgtactgttagggttgcttcttcttttatttctgaaagactttgcatagaattgttactatttattctttaaacattgtgagaatacaagagtgaaaccttcctgacctggaattattttgcgtgtgagtttcaaattatagatttaatgtatttaatagatgcaggattattcatggtgtytctttatttttaagtgaattttgtaacctcttttctctcaagtaatgtgtccgtttaccaaacttttaaaatgtatttgcataaagtttaaacattgtgtgcttactatcattttataactatagtataattagtgacagtctttcattactggctttagtatttagtattttttctcttttttgttgagtatagctagaattttttcattttttaataaattagctttttattttattgatattccattttggtgttctttcaatttttattgatttttgttcatatatgtattttattatttctttttaccttagtacatttcgactacaa

SEQ ID NO: 464332 - DNA, 602 bp, Homo sapiens
aactatagtataattagtgacagtctttcattactggctttagtatttagtattttttctcttttttgttgagtatagctagaattttttcattttttaataaattagctttttattttattgatattccattttggtgttctttcaatttttattgatttttgttcatatatgtattttattatttctttttaccttagtacatttcgactrcaatagaaaaatacctttttgttgtggcttagtaaacaacgataagtttataatttataataatatgatcttatgccttatcagttcacttctcataggtctggaggatgagaggtctgaaatcaaggcactcaaaaattgatgtgctggtgagggcccatttcttggttcatagatggttccctctataggcatcttctcagaatgcgaaagagcaaggtagctctctggggtctcttttgtaagaaaactaatgcatatactatccttaatgtagtactaatttagtacccttatggaagagccccagatctatactttcatgatgtaagcgcctcccaaaagggcccatctcctaataccataagtttgggagttagggtttctac

SEQ ID NO: 464333 - DNA, 428 bp, Homo sapiens
tttccatttgtttatatcatctctaatttatttcagcagtttttgtagctctccttatggagatctttcacttatttggttaagtgtatttcaattttttttctgctgctattgtaaaagaaattgagttcttgatttgattctcagcttgatcattgttggtgctatgcagtagtactaatttgtgtacattcatttgtaaccctaagatttatgaattcattcatcaatagaagagtctttttggtggaattcttaggcttatctaagtatatgcttaaatcatcagcaaacagagataatttgwcttcctcttttccagttcggatgccctttatttcttcctcttgcttgattgctctgggtaggacttccagtactatgttaagtagaagtggtgaaaatgggcatccttaacttgttctagc

SEQ ID NO: 464334 - DNA, 428 bp, Homo sapiens
tttccatttgtttatatcatctctaatttatttcagcagtttttgtagctctccttatggagatctttcacttatttggttaagtgtatttcaattttttttctgctgctattgtaaaagaaattgagttcttgatttgattctcagcttgatcattgttggtgctatgcagtagtactaatttgtgtacattcatttgtaaccctaagatttatgaattcattcatcaatagaagagtctttttggtggaattcttaggcttatctaagtatatgcttaaatcatcagcaaacagagataatttgacttcctcttttccagttyggatgccctttatttcttcctcttgcttgattgctctgggtaggacttccagtactatgttaagtagaagtggtgaaaatgggcatccttaacttgttctagc

SEQ ID NO: 464335 - DNA, 508 bp, Homo sapiens
acattcatttgtaaccctaagatttatgaattcattcatcaatagaagagtctttttggtggaattcttaggcttatctaagtatatgcttaaatcatcagcaaacagagataatttgacttcctcttttccagttcrgatgccctttatttcttcctcttgcttgattgctctgggtaggacttccagtactatgttaagtagaagtggtgaaaatgggcatccttaacttgttctagccctcagtgggaatactttcaacttttcccccattcaatatgatgttggccatgggtttgtcatatatagcttttattattttgagatatgtttattctatgtctagtttgtttagggtttttatcataaagcaatgctggattttactgaatgtttttatgcatctattgagatgatcatatgtatttggtttttaattctgtttatgaaatacatcacatttattaccttgtgtatgttgagtcatccttgcatccctgggatgaga

SEQ ID NO: 464336 - DNA, 535 bp, Homo sapiens
ctgaccttctccataggaaaggaaaatgtaaatatcccagacagcagagagcaaactgtcataaaaataaaactgtactttcaaatagctgtagtccacagcacagctctaacccaaattgtcatttcarctgcttcacattattagaaaatacttaccttctagctttgaacatgaaagaaaagtactcttagtctatcagcttccctaactaggagattcatgtatttgttggggtcatataaagaaactgatagtgcaatttaataaggataatgcagagagggtttggagattctttgcaaagctgttgaagggatgagaaagaacacaagagactgcagtaacctttggttagagtgatttttatcacccctagtttgaaagggccagtggcaaagcaagtttactaactttaggataaagtagactcatcaggaaaagagcaaccacctaagcttaagggacaaagccaatcacccgtgggaagccagtgttaaaaatacttgatcttgctctctgctttcctgagaat

SEQ ID NO: 464337 - DNA, 535 bp, Homo sapiens
ctgaccttctccataggaaaggaaaatgtaaatatcccagacagcagagagcaaactgtcataaaaataaaactgtactttcaaatagctgtagtccacagcacagctctaacccaaattgtcatttcagctgcttcacattattagaaaatacttaccttctagctttgaacatgaaagaaaagtactcttagtctatcagcttccctaactaggagattcatgtatttgttggggtcatataaagaaactgatagtgcaatttaataaggataatgcagagaggrtttggagattctttgcaaagctgttgaagggatgagaaagaacacaagagactgcagtaacctttggttagagtgatttttatcacccctagtttgaaagggccagtggcaaagcaagtttactaactttaggataaagtagactcatcaggaaaagagcaaccacctaagcttaagggacaaagccaatcacccgtgggaagccagtgttaaaaatacttgatcttgctctctgctttcctgagaat

SEQ ID NO: 464338 - DNA, 471 bp, Homo sapiens
ttgcaaagctgttgaagggatgagaaagaacacaagagactgcagtaacctttggttagagtgatttttatcacccctagtttgaaagggccagtggcaaagcaagtttactaactttaggataaagtagactcatcaggaaaagagcaaccacctaagcttaagggacaaagccaatcacccgtgggaagccagtgttaaaaatacttgatcttgctctctgctttcctgagaatacaaatcattcactttaactcattgaattcactcagcagtcagaagaaaaggaagcctcttgttggaattcatactaagaagatcagaaagtgtagtggaaaagagaggactagaactgcaggtgcaagtagaagtyggtgtccaaaaagaagtgtatttgtattgttcatttgacctcatttattttagtatgcaagcgtgtgcttaaaaatatttcagccttctttttactat

SEQ ID NO: 464339 - DNA, 486 bp, Homo sapiens
ttctgttgctattgcagctgtcagcaccattgattcagctgagaagcagcccagaatatcacactgacacccatgctgttggttgtgtttttttgaaccagattgaaattaatatctattgtatggttcaatttctatgaagttcaatgtcaagcaaatgtaatttataaagataaaagtaagaacagtggttgcctatagtaatgattggaggttcacaacagagactcctggattctagtaatactcaattcatattcatgtaggttgtgatgacattagtattttacattctaaaaatgtttaatgctatatgctcaagatctgtgtctttygcatgtgcatatcatatttcatatttcaattaataaatcagtaaaaaaagttccagttcaggatacaatactgtagaacaatccaaaatattaatttattcctaaagtttttaaaatattagaataaatacagagcattttgttaaaacaa

SEQ ID NO: 464340 - DNA, 614 bp, Homo sapiens
taaattgagttaggaatttcaaaaagacatttcatgtgccttttcaactttcaatttcgtatgaaagttgaaaaaacttgaaatcagtaagtgtgcatgtatatgtaaaacaaaattactgcatataaaaacttttttgaggcatctagaaaatatttagcagtgtgccataatttagaggcacttaaaaatgctttttagtgatacataaaaaattaattaatgacacagtctatgaaaaacaartagagcagcttgaaataattcacatatttttcatgtaaaacttttaggagaagtccagtgatgtcacgatagctctacgatgttgatttattttgttgcttttatatgcttattttatatataaaatagctgaaagcagctatgaattctaaagcatggtaacaggggtaaaaggtcacacacatttcttttagatgctgcaaatattgcttctgttcacacgttatcgtccaaaaattagttacattgcctcatcaaagtgcaaggaggctggtaaatgtactttaatttgctaaatgccttgcaagatatagggatgtatattgagaagacaaagaatggaagtgagaattacttgttattttgac

SEQ ID NO: 464341 - DNA, 394 bp, Homo sapiens
taattttaattgagctattatggttagtatttatttttaagttctgaatttttttaaaaaattcaatattctatggtatattaacaagattgattggaataatgcatttttttwatgtagtgggttggtgatatgtttttcttctgagaaagaaggctgttcataatcttaaattatattaggttttagaaacaaagaaaattgtgggattcccttaatggctttcttacacttgagttctaaaatatttatcaatctcaaatatatttgcattatgttgaaaaatgactattaatagtttctgctaaaaggaattatcaactttttatgcatcaccatttcagagtgggctataaaaatatcagtatctgtcctacatatataccaatgtttt

SEQ ID NO: 464342 - DNA, 394 bp, Homo sapiens
taattttaattgagctattatggttagtatttatttttaagttctgaatttttttaaaaaattcaatattctatggtatattaacaagattgattggaataatgcattttttttatgtagtgggttggtgatatgtttttctkctgagaaagaaggctgttcataatcttaaattatattaggttttagaaacaaagaaaattgtgggattcccttaatggctttcttacacttgagttctaaaatatttatcaatctcaaatatatttgcattatgttgaaaaatgactattaatagtttctgctaaaaggaattatcaactttttatgcatcaccatttcagagtgggctataaaaatatcagtatctgtcctacatatataccaatgtttt

SEQ ID NO: 464343 - DNA, 394 bp, Homo sapiens
taattttaattgagctattatggttagtatttatttttaagttctgaatttttttaaaaaattcaatattctatggtatattaacaagattgattggaataatgcattttttttatgtagtgggttggtgatatgtttttcttctgagaaagaaggctgttcataatcttaaattatattaggttttagaaacaamgaaaattgtgggattcccttaatggctttcttacacttgagttctaaaatatttatcaatctcaaatatatttgcattatgttgaaaaatgactattaatagtttctgctaaaaggaattatcaactttttatgcatcaccatttcagagtgggctataaaaatatcagtatctgtcctacatatataccaatgtttt

SEQ ID NO: 464344 - DNA, 394 bp, Homo sapiens
taattttaattgagctattatggttagtatttatttttaagttctgaatttttttaaaaaattcaatattctatggtatattaacaagattgattggaataatgcattttttttatgtagtgggttggtgatatgtttttcttctgagaaagaaggctgttcataatcttaaattatattaggttttagaaacaaagaaaattgtgggattcccttaatgsctttcttacacttgagttctaaaatatttatcaatctcaaatatatttgcattatgttgaaaaatgactattaatagtttctgctaaaaggaattatcaactttttatgcatcaccatttcagagtgggctataaaaatatcagtatctgtcctacatatataccaatgtttt

SEQ ID NO: 464345 - DNA, 440 bp, Homo sapiens
actattaatagtttctgctaaaaggaattatcaactttttatgcatcaccatttcagagtgggctataaaaatatcagtatctgtcctacatatataccaatgtttttcaatttttagtcaattaagtatgtttcattgattttctgctgtgtgcgtaaaactgtgcatgatgatattatagaaggtactgtgaaaaggcttaaagcagtatatttaaccactgcctaccagartagtacatagagaagcaaacctaatctataagcaacaatgagagcgtgctacagataacttttaatattgtaaatatatatgatacagattataaaatctttatgaaataatctatagaagaggtgaaatgggtctctgccaggagaatgcaaaggcagtaaaaaattaaaaaccaaaatattgagaattattttgaggaaagtgt

SEQ ID NO: 464346 - DNA, 597 bp, Homo sapiens
caaacctaatctataagcaacaatgagagcgtgctacagataacttttaatattgtaaatatatatgatacagaytataaaatctttatgaaataatctatagaagaggtgaaatgggtctctgccaggagaatgcaaaggcagtaaaaaattaaaaaccaaaatattgagaattattttgaggaaagtgttagtagaatttaataatacatttaatagaaacataagattaaaaatgcaaagatgaattcaaagttgcttacattcaaaaataactcattaaatgtacagtattttaagcacacttttgatctatgaagagtataaatatgaataagacatagttctttaggctagacatagagaatattttttgtacagaaataaaatctagagtatgtaatattaggggaaagaaaatgcctcatagatgtcaataaactttgttccctctatttttttttactagtttcatttcctgtaataattgtggtaacagtaatgctgaaaaaattaaacctccaactcttaaaacaataaaagttattgcttgcttaaataataggaatgctatctgtgatttcctgcagggtcatt

SEQ ID NO: 464347 - DNA, 597 bp, Homo sapiens
caaacctaatctataagcaacaatgagagcgtgctacagataacttttaatattgtaaatatatatgatacagatkataaaatctttatgaaataatctatagaagaggtgaaatgggtctctgccaggagaatgcaaaggcagtaaaaaattaaaaaccaaaatattgagaattattttgaggaaagtgttagtagaatttaataatacatttaatagaaacataagattaaaaatgcaaagatgaattcaaagttgcttacattcaaaaataactcattaaatgtacagtattttaagcacacttttgatctatgaagagtataaatatgaataagacatagttctttaggctagacatagagaatattttttgtacagaaataaaatctagagtatgtaatattaggggaaagaaaatgcctcatagatgtcaataaactttgttccctctatttttttttactagtttcatttcctgtaataattgtggtaacagtaatgctgaaaaaattaaacctccaactcttaaaacaataaaagttattgcttgcttaaataataggaatgctatctgtgatttcctgcagggtcatt

SEQ ID NO: 464348 - DNA, 597 bp, Homo sapiens
caaacctaatctataagcaacaatgagagcgtgctacagataacttttaatattgtaaatatatatgatacagattataaaatctttatgaaataatctatagragaggtgaaatgggtctctgccaggagaatgcaaaggcagtaaaaaattaaaaaccaaaatattgagaattattttgaggaaagtgttagtagaatttaataatacatttaatagaaacataagattaaaaatgcaaagatgaattcaaagttgcttacattcaaaaataactcattaaatgtacagtattttaagcacacttttgatctatgaagagtataaatatgaataagacatagttctttaggctagacatagagaatattttttgtacagaaataaaatctagagtatgtaatattaggggaaagaaaatgcctcatagatgtcaataaactttgttccctctatttttttttactagtttcatttcctgtaataattgtggtaacagtaatgctgaaaaaattaaacctccaactcttaaaacaataaaagttattgcttgcttaaataataggaatgctatctgtgatttcctgcagggtcatt

SEQ ID NO: 464349 - DNA, 532 bp, Homo sapiens
atttaaccactgcctaccagaatagtacatagagaagcaaacctaatctataagcaacaatgagagcgtgctacagataacttttaatattgtaaatatatatgatacagattataaaatctttatgaaataatctatagaagaggtgaaatgggtctctgccaggagaatgcaaaggcagtaaaaaattaaaaaccaaaatattgagaattattttgaggaaagtgttagtagaatttaataatacatttaatagmaacataagattaaaaatgcaaagatgaattcaaagttgcttacattcaaaaataactcattaaatgtacagtattttaagcacacttttgatctatgaagagtataaatatgaataagacatagttctttaggctagacatagagaatattttttgtacagaaataaaatctagagtatgtaatattaggggaaagaaaatgcctcatagatgtcaataaactttgttccctctatttttttttactagtttcatttcctgtaataattgtggta

SEQ ID NO: 464350 - DNA, 532 bp, Homo sapiens
atttaaccactgcctaccagaatagtacatagagaagcaaacctaatctataagcaacaatgagagcgtgctacagataacttttaatattgtaaatatatatgatacagattataaaatctttatgaaataatctatagaagaggtgaaatgggtctctgccaggagaatgcaaaggcagtaaaaaattaaaaaccaaaatattgagaattattttgaggaaagtgttagtagaatttaataatacatttaatagaaacataagattaaaaatgcaaagatgaattcaaagttgcttacattcaaaaataactcattaaatgtacagtattttaagcacacttttgatctatgaagagtataaatatgaataagacatagttctttaggctagacatagagaatatwttttgtacagaaataaaatctagagtatgtaatattaggggaaagaaaatgcctcatagatgtcaataaactttgttccctctatttttttttactagtttcatttcctgtaataattgtggta

SEQ ID NO: 464351 - DNA, 597 bp, Homo sapiens
caaacctaatctataagcaacaatgagagcgtgctacagataacttttaatattgtaaatatatatgatacagattataaaatctttatgaaataatctatagaagaggtgaaatgggtctctgccaggagaatgcaaaggcagtaaaaaattaaaaaccaaaatattgagaattattttgaggaaagtgttagtagaatttaataatacatttaatagaaacataagattaaaaatgcaaagatgaattcaaagttgcttacattcaaaaataactcattaaatgtacagtattttaagcacacttttgatctatgaagagtataaatatgaataagacatagttctttaggctagacatagagaatattttttgtacagaaataaaatctagagtatgtaatattaggggaaagaaaatgcctcatagatgtcaataaacyttgttccctctatttttttttactagtttcatttcctgtaataattgtggtaacagtaatgctgaaaaaattaaacctccaactcttaaaacaataaaagttattgcttgcttaaataataggaatgctatctgtgatttcctgcagggtcatt

SEQ ID NO: 464352 - DNA, 548 bp, Homo sapiens
caccttttctttctaagatagaacatattcaatatatccaaggcttccaaggcttcagtacttctctaagtttactgtctcgtcttcagattcaggtatgatgtgattactctaagtatagcctgattctttgccaaaagtaagaacaaaaatacrcatatgacccaattcagtacaaaggcaaatcagggcaaattaccttaagagtttttaagataaatgtttctcttggtgtctctttcttggtcttctgggtaaggttgtatctgaatatgttgaccctaaatgtctgcagacatttttgcagaaatgttaagggtaaaagtgacacagccaatagcaaagaagtgccagaaaatacgtaagcaaactgtgacctctttttacctcttgattgacttttatgttaaataatgaatttaccttatgcttgaaagaatttgaaatagtatttggcagtgaagaatttactcctcccatattttcattcaagagaaatttccaggaggagggttgttggtgggttacctccaactcaaccacttcag

SEQ ID NO: 464353 - DNA, 548 bp, Homo sapiens
caccttttctttctaagatagaacatattcaatatatccaaggcttccaaggcttcagtacttctctaagtttactgtctcgtcttcagattcaggtatgatgtgattactctaagtatagcctgattctttgccaaaagtaagaacaaaaatacacatatgwcccaattcagtacaaaggcaaatcagggcaaattaccttaagagtttttaagataaatgtttctcttggtgtctctttcttggtcttctgggtaaggttgtatctgaatatgttgaccctaaatgtctgcagacatttttgcagaaatgttaagggtaaaagtgacacagccaatagcaaagaagtgccagaaaatacgtaagcaaactgtgacctctttttacctcttgattgacttttatgttaaataatgaatttaccttatgcttgaaagaatttgaaatagtatttggcagtgaagaatttactcctcccatattttcattcaagagaaatttccaggaggagggttgttggtgggttacctccaactcaaccacttcag

SEQ ID NO: 464354 - DNA, 294 bp, Homo sapiens
aaggtgcaaatggctttctacttaatgatagagaaaagcataaataaaagtacattgtatacatgaaatggttttgtttgaattgggtatagaatatcaaatgagaaatatatartaaggaattgaatatacggaaatacagatatagatggccagagcacctacttgtagctcttgatagcagaattatcagtcaactgaaaagatattttaagacctccaagaataagtagataatttctattctgtattttgttaatgaaagaaaaccagggtaataactgcttgaatttt

SEQ ID NO: 464355 - DNA, 294 bp, Homo sapiens
aaggtgcaaatggctttctacttaatgatagagaaaagcataaataaaagtacattgtatacatgaaatggttttgtttgaattgggtatagaatatcaaatgagaaatatatagtaaggaattgaatatayggaaatacagatatagatggccagagcacctacttgtagctcttgatagcagaattatcagtcaactgaaaagatattttaagacctccaagaataagtagataatttctattctgtattttgttaatgaaagaaaaccagggtaataactgcttgaatttt

SEQ ID NO: 464356 - DNA, 508 bp, Homo sapiens
aactgcttgaattttcatcactagcatgtttcctacatacataaacatagtgagtagtgagtatattcacatataaagtaacaaagaattatagtaaaccccaacatccaatcgggaaaaatgttgtaactctatatattcattaaattgttcacaaactgacatcttttagcatatawtatggtttcctttagcttgttaaagagcatggactcatgactaaaacataagaacacccaatgaagttcaactaaatcaattcaactatgaaaaataaaatgactagtgatcatctctttattattattgaaagaataacttacaagtaaaaacattcaatttttgaaaacagctttgtatttattgaatttatgcatataacgttagttgcatttcaaaataaaatggctgccttaaaagtgatgcaaaattacatatttatacattctctgaattaagcaggattaattgaaaagtggttatgaaggcatgactgcaagctacaaat

SEQ ID NO: 464357 - DNA, 508 bp, Homo sapiens
aactgcttgaattttcatcactagcatgtttcctacatacataaacatagtgagtagtgagtatattcacatataaagtaacaaagaattatagtaaaccccaacatccaatcgggaaaaatgttgtaactctatatattcattaaattgttcacaaactgacatcttttagcatatattatggtttcctttagcttgttaaagagcatggactcatgactaaaacataagaacacccaatgaagttcaactaaatcaattcaactatgaaaaataaaatgactagtgatcatctctttattattattgaaagaataacttacaagtaaaaacattcaatttttgaaaacagctttrtatttattgaatttatgcatataacgttagttgcatttcaaaataaaatggctgccttaaaagtgatgcaaaattacatatttatacattctctgaattaagcaggattaattgaaaagtggttatgaaggcatgactgcaagctacaaat

SEQ ID NO: 464358 - DNA, 508 bp, Homo sapiens
aactgcttgaattttcatcactagcatgtttcctacatacataaacatagtgagtagtgagtatattcacatataaagtaacaaagaattatagtaaaccccaacatccaatcgggaaaaatgttgtaactctatatattcattaaattgttcacaaactgacatcttttagcatatattatggtttcctttagcttgttaaagagcatggactcatgactaaaacataagaacacccaatgaagttcaactaaatcaattcaactatgaaaaataaaatgactagtgatcatctctttattattattgaaagaataacttacaagtaaaaacattcaatttttgaaaacagctttgtatttattgaatttatgcatataacgttagttgcrtttcaaaataaaatggctgccttaaaagtgatgcaaaattacatatttatacattctctgaattaagcaggattaattgaaaagtggttatgaaggcatgactgcaagctacaaat

SEQ ID NO: 464359 - DNA, 449 bp, Homo sapiens
taacgttagttgcatttcaaaataaaatggctgccttaaaagtsatgcaaaattacatatttatacattctctgaattaagcaggattaattgaaaagtggttatgaaggcatgactgcaagctacaaattgagcctatttttagtaacttgctctagctgagatgttatatgttcagatttgttgacacgaagctttattgagaagcattacttattcccaataactcaaggaggagcctgttttgggaggaaaaaccacatcaagtatgttttgttgaatcaagaggattttatttttagaaaactactaatgattttttctgaaaacgtgactattttgaaatctaagaaaaatcaaatatttgatacttaacataatttgcaacttgacataaaactactcagtttagttggtcataatatactcattcctaacttattccactt

SEQ ID NO: 464360 - DNA, 590 bp, Homo sapiens
ctctgtaattaccagtgtttgaaccacaacctctttcttctctaaaccactagctgaaatctaaactcagcactccaacctcccatttattgatttctgctaggcttcttgacgtctcaccttgtgcatacatatctttgatactggccacacttaagggrcatttgtatgcagatattcaggctctctctctgtggttacctccttcttggaaatttgtctcatgagccccatacacactagatactctgaactctaatctctgtcacctcaacacagtaaaatttcactttctgtatatgctttctttcttcacatcactatttgggaaatgttattagaggaaaaacgtctgagtgaatgtaatttatagtctataattatttctttttaataataatcccactcaagctctgtatacattgattgttctcccgtgtcttccaataattgtctaacatattttgcccagcttttatagccaacttcagggtgtgagtttgtgctactttatcatgacctgaacctgaaatcctctaattttattgaaatggatggttattgtagttcatgttgcatttcttgtgttt

SEQ ID NO: 464361 - DNA, 590 bp, Homo sapiens
ctctgtaattaccagtgtttgaaccacaacctctttcttctctaaaccactagctgaaatctaaactcagcactccaacctcccatttattgatttctgctaggcttcttgacgtctcaccttgtgcatacatatctttgatactggccacacttaagggacatttgtatgcagatattcaggctctctctctgtggttacctccttcttggaaatttgtctcatgagccccatacacactagatactctgaactctaatctctgtcacctcaacacagtaaaatttcactttctgtrtatgctttctttcttcacatcactatttgggaaatgttattagaggaaaaacgtctgagtgaatgtaatttatagtctataattatttctttttaataataatcccactcaagctctgtatacattgattgttctcccgtgtcttccaataattgtctaacatattttgcccagcttttatagccaacttcagggtgtgagtttgtgctactttatcatgacctgaacctgaaatcctctaattttattgaaatggatggttattgtagttcatgttgcatttcttgtgttt

SEQ ID NO: 464362 - DNA, 590 bp, Homo sapiens
ctctgtaattaccagtgtttgaaccacaacctctttcttctctaaaccactagctgaaatctaaactcagcactccaacctcccatttattgatttctgctaggcttcttgacgtctcaccttgtgcatacatatctttgatactggccacacttaagggacatttgtatgcagatattcaggctctctctctgtggttacctccttcttggaaatttgtctcatgagccccatacacactagatactctgaactctaatctctgtcacctcaacacagtaaaatttcactttctgtatatgctttctttcttcacatcactatttgggaaatgttattagaggaaaaacgtctgagtgaatgtaatttatagtctataattatttctttttaataataatcccactcaagctctgtatacattgattgttctcccgtgtcttccaayaattgtctaacatattttgcccagcttttatagccaacttcagggtgtgagtttgtgctactttatcatgacctgaacctgaaatcctctaattttattgaaatggatggttattgtagttcatgttgcatttcttgtgttt

SEQ ID NO: 464363 - DNA, 560 bp, Homo sapiens
ataatcatataactgaagactttccagtgggatagacctaataacgtacaactttggtaccaaayaaggtacaaataactgtacaactataaatagtcaaatattatctttagttttcttctgtgcctgtcctctaaaagcctccgcctgtgctccgtcagtggcgctcttaagccacttttatggtttggagctgcctgagtcataaatcattgtttaaataacatatttaaaattttattgtgccttagtttatcttttaacacagtggtcctcaacccttggtaatgagctatggcttgttaggaatcagatcatacagcaggaggtgagcggcaggtgagtgagcattaccacctgagctctttctcctgtcgaatcagctacagcattagatccttataggaatgtgaaccctattatgaactgagcatgcaagggatctaggttgtgcatacctcatgagaatctaatgcccgatgatctgaggtggaacagtttcatccctgtattagtcagggttctctagagggacagaacttataagatatatgtatata

SEQ ID NO: 464364 - DNA, 560 bp, Homo sapiens
ataatcatataactgaagactttccagtgggatagacctaataacgtacaactttggtaccaaacaaggtacaaataactgtacaactataaatagtcaaatattatctttagttttcttctgtgcctgtcctctaaaagcctccgcctgtgctccgtcagtggcgctcttaagccacttttatggtttggagctgcctgagtcataaatcattgtktaaataacatatttaaaattttattgtgccttagtttatcttttaacacagtggtcctcaacccttggtaatgagctatggcttgttaggaatcagatcatacagcaggaggtgagcggcaggtgagtgagcattaccacctgagctctttctcctgtcgaatcagctacagcattagatccttataggaatgtgaaccctattatgaactgagcatgcaagggatctaggttgtgcatacctcatgagaatctaatgcccgatgatctgaggtggaacagtttcatccctgtattagtcagggttctctagagggacagaacttataagatatatgtatata

SEQ ID NO: 464365 - DNA, 560 bp, Homo sapiens
ataatcatataactgaagactttccagtgggatagacctaataacgtacaactttggtaccaaacaaggtacaaataactgtacaactataaatagtcaaatattatctttagttttcttctgtgcctgtcctctaaaagcctccgcctgtgctccgtcagtggcgctcttaagccacttttatggtttggagctgcctgagtcataaatcattgtttaaataacatatttaaaattttattgtgccttagtttatcttttaacacagtggtcctcaacccttggtaatgagctatggcttgttaggaatcagatcatacagcaggaggtgagcggcaggtgagtgagcattaccacctgagctcttyctcctgtcgaatcagctacagcattagatccttataggaatgtgaaccctattatgaactgagcatgcaagggatctaggttgtgcatacctcatgagaatctaatgcccgatgatctgaggtggaacagtttcatccctgtattagtcagggttctctagagggacagaacttataagatatatgtatata

SEQ ID NO: 464366 - DNA, 558 bp, Homo sapiens
tattgtgccttagtttatcttttaacacagtggtcctcaacccttggtaatgagctatggcttgttaggaatcagatcatacagcaggaggtgagcggcaggtgagtgagcattaccacctgagctctttctcctgtcgaatcagctacagcattagatccttataggaatgtgaaccctattatgaactgagcatgcaagggatctaggttgtgcatacctcatgagaatctaatgcccgatgatctgaggtggaacagtttcatccctgtattagtcagggttctctagagggacagaacttataagatatatgtatatatgaaaaggagtttattaatgagaattgwctatacgatcacaaagtgaagtcccatgataggctgtctgcaagctgaggggcaaggaagccaacaaaggcttagttcaactacaaaagcctcaaaagtaggaaagctggcagtgcaacatttagtctgtggccaaggacctgaaagcccctggaaaaccactgctgtaagttcaagtgttcaaagcctaaagaacctggagtctgat

SEQ ID NO: 464367 - DNA, 558 bp, Homo sapiens
tattgtgccttagtttatcttttaacacagtggtcctcaacccttggtaatgagctatggcttgttaggaatcagatcatacagcaggaggtgagcggcaggtgagtgagcattaccacctgagctctttctcctgtcgaatcagctacagcattagatccttataggaatgtgaaccctattatgaactgagcatgcaagggatctaggttgtgcatacctcatgagaatctaatgcccgatgatctgaggtggaacagtttcatccctgtattagtcagggttctctagagggacagaacttataagatatatgtatatatgaaaaggagtttattaatgagaattgactatacgatcacaargtgaagtcccatgataggctgtctgcaagctgaggggcaaggaagccaacaaaggcttagttcaactacaaaagcctcaaaagtaggaaagctggcagtgcaacatttagtctgtggccaaggacctgaaagcccctggaaaaccactgctgtaagttcaagtgttcaaagcctaaagaacctggagtctgat

SEQ ID NO: 464368 - DNA, 558 bp, Homo sapiens
tattgtgccttagtttatcttttaacacagtggtcctcaacccttggtaatgagctatggcttgttaggaatcagatcatacagcaggaggtgagcggcaggtgagtgagcattaccacctgagctctttctcctgtcgaatcagctacagcattagatccttataggaatgtgaaccctattatgaactgagcatgcaagggatctaggttgtgcatacctcatgagaatctaatgcccgatgatctgaggtggaacagtttcatccctgtattagtcagggttctctagagggacagaacttataagatatatgtatatatgaaaaggagtttattaatgagaattgactatacgatcacaaagtgaagtcccatgataggctgtctgcaagctgaggggcaaggaagccaacaaaggcttagttcaactacaaaagcctcaaaagtaggaaagctggcaktgcaacatttagtctgtggccaaggacctgaaagcccctggaaaaccactgctgtaagttcaagtgttcaaagcctaaagaacctggagtctgat

SEQ ID NO: 464369 - DNA, 605 bp, Homo sapiens
tacttttagtattcagctaaggggaagttgaatagagacatatttaatttcagttcattgaggttaatgtgtttgatttaaagccacttccatgtaaaatgaagttgtttctggcagttcagagactttctattgctcactccatagattcatccagtgtygtagcacagaggtgcagaggcagagaatgttgtgagacacatgtcatgcagtacttggtaccagaggctgcagagaaggaaagaaacagctgcccttaacctagctctcctttccactaattcttaccgtggtggtgatgtggtgagaaccaatatgtccttcatgtaaggggatctgctgtaggcaaagaatctggaaaaaagaccctgagcgtttttgtggaagagtgacccagttgctcttgacccccttctgagtgtgtctccatagtcacaaaacggaaaaaaatctgagttcttactttaaccatttggataaaaataaatctctctaggggaaagataacactagagtctccagctttgtaacttctgggatgcatctactgggtctcatcttctcttgaaatgtaaatatatatccctagtgaggtaaatccctca

SEQ ID NO: 464370 - DNA, 627 bp, Homo sapiens
tatcaagcaagaaggataaatggtatacccaagagagctttgatgactctcccaaatacatttctgagtaagagaagccatccagaaaagaatatatattgtttaattctattataaaagttcaaaaataggttaaaaaagtctatgttattagcaatcagaataataattacttgcagatggagcagatggtaatttaagggaattttattgtgaaatatgtacaatcactttgttaaaattaattaactatatactatttgtgtattwcaataaaaatgtttaataaactatctcatcgttgttatttacatttcttaaatagcatttaggcatgggtgaaaaggtttaacttgactggcatgaattgctcaaatactgtacattccaaagaggggtccctctgcaggactagaccttagtctaggagttcatctctgagcccttggagtattttgcttgataaaagtgttcttgttttcctgaagtcttgggccatactctcccagttcgaccagaaaaggttatgttatcaacgtgacttatgtgaacatctgtttttactctgggtgtaggaagaaagttgcccttaacatgtcatgaagctgaagtcaatcatataggcat

SEQ ID NO: 464371 - DNA, 627 bp, Homo sapiens
tatcaagcaagaaggataaatggtatacccaagagagctttgatgactctcccaaatacatttctgagtaagagaagccatccagaaaagaatatatattgtttaattctattataaaagttcaaaaataggttaaaaaagtctatgttattagcaatcagaataataattacttgcagatggagcagatggtaatttaagggaattttattgtgaaatatgtacaatcactttgttaaaattaattaactatatactatttgtgtattacaataaaaatgtttaataaactatctcatcgttgttatttacatttmttaaatagcatttaggcatgggtgaaaaggtttaacttgactggcatgaattgctcaaatactgtacattccaaagaggggtccctctgcaggactagaccttagtctaggagttcatctctgagcccttggagtattttgcttgataaaagtgttcttgttttcctgaagtcttgggccatactctcccagttcgaccagaaaaggttatgttatcaacgtgacttatgtgaacatctgtttttactctgggtgtaggaagaaagttgcccttaacatgtcatgaagctgaagtcaatcatataggcat

SEQ ID NO: 464372 - DNA, 627 bp, Homo sapiens
tatcaagcaagaaggataaatggtatacccaagagagctttgatgactctcccaaatacatttctgagtaagagaagccatccagaaaagaatatatattgtttaattctattataaaagttcaaaaataggttaaaaaagtctatgttattagcaatcagaataataattacttgcagatggagcagatggtaatttaagggaattttattgtgaaatatgtacaatcactttgttaaaattaattaactatatactatttgtgtattacaataaaaatgtttaataaactatctcatcgttgttatttacatttcttaaatagcatttaggcatgggtgaaaaggtttaacttgactggcmtgaattgctcaaatactgtacattccaaagaggggtccctctgcaggactagaccttagtctaggagttcatctctgagcccttggagtattttgcttgataaaagtgttcttgttttcctgaagtcttgggccatactctcccagttcgaccagaaaaggttatgttatcaacgtgacttatgtgaacatctgtttttactctgggtgtaggaagaaagttgcccttaacatgtcatgaagctgaagtcaatcatataggcat

SEQ ID NO: 464373 - DNA, 627 bp, Homo sapiens
tatcaagcaagaaggataaatggtatacccaagagagctttgatgactctcccaaatacatttctgagtaagagaagccatccagaaaagaatatatattgtttaattctattataaaagttcaaaaataggttaaaaaagtctatgttattagcaatcagaataataattacttgcagatggagcagatggtaatttaagggaattttattgtgaaatatgtacaatcactttgttaaaattaattaactatatactatttgtgtattacaataaaaatgtttaataaactatctcatcgttgttatttacatttcttaaatagcatttaggcatgggtgaaaaggtttaacttgactggcatgaattgctcaaatactrtacattccaaagaggggtccctctgcaggactagaccttagtctaggagttcatctctgagcccttggagtattttgcttgataaaagtgttcttgttttcctgaagtcttgggccatactctcccagttcgaccagaaaaggttatgttatcaacgtgacttatgtgaacatctgtttttactctgggtgtaggaagaaagttgcccttaacatgtcatgaagctgaagtcaatcatataggcat

SEQ ID NO: 464374 - DNA, 535 bp, Homo sapiens
cattgcaatcagctgttgccatgtaccttttgcatttagtggtcagggtcttcggaattgtatgaatctgatatcaaatcctagttgtattgctgactagctgtgaaaaaagattttaaacttattattttcagtttactcatttattaagtaccaatattaatattgaaactagagaaatagattaaatggcatacttgtatagtaattgttacataggaaaactctcaataaatcaatgctgttattattaccattaatattccctagatgtgaagattgccttcagaggaaacatactggaaaaaaaaatgagttttacagaagtttttcagcagaagttgattggttttacacacacacacacacacatacacgcacacatatttacacacatataaatatgtatmttttatatatatatgcacacacatttgtttctatttaaaatgaataaagtacgttagtcatgtgtgcccaattttctgatacactaaaaaatggaaatatcttggcagacactattgataggcta

SEQ ID NO: 464375 - DNA, 592 bp, Homo sapiens
aataagttcagcttatagatgatgtttatgattatattctgtgggcagcaagccatccagatgccgaggcaagagaccaggggcacgagttgttccagtgtaataaagwacataaaacaacaagagttatactagatctacatagacatgattatatatgaatatcatatgaattatatgtatatattatatatattatatatgagtatcattaatcatttgtagcaattactctttatgccaatattataataatactcgctctataatcataacctaggaaaaactaggccatacagagataggagctgaggggacatagtgagaagtgaccagaagacaagagtgtgagccgtctgtcatgcctggacagggccaccagagagctccttggtctagcggtaacgccagcgtctgggaagatgcctgttgccaagcagactgtggtctagtggtagcgtcagtgcgaagggaaaacacctactacttagcagactgggaaggggagtctccctttccccaggggagtttagagaagacactctactccacctcttgtggagggcctgacatcagtcaagcctgcccacag

SEQ ID NO: 464376 - DNA, 631 bp, Homo sapiens
aaaaaaatagacatgttagaatttatcaaaattaaaaactttcagtcatcaatggaaaatatcaagagtaaaaaggcaaaccacagaatgggagaaaatatttttaaatcacatatctgataaggtattaataatccagaatatatagagacctcctacaactcaaccacaacaacagaactcaattttaaaatgggcataggccagcctcctagagaaacactaatctgatctgatcaccctrccctctggactgaacacgcacagcaccctgcctccctggattgggaaagccctctacagcctgagttgctgaggtgccccacctccctaggagtgaagccaacattgcactgctgcacaccccccagggccaaagccacagatgtgcccccatcattcctggaccttgctgtcactgcacctgacctcacagagcctgcgccactgctgtgtcccattactccagggcttagagttcttggtgcatgaattgccactgtgtcctattggttctgtagcctgaattgcaattgtaccctgctcattggggcctaaacctctggaaaacctcttccttcccagagccatgccattgctgcaccctaacacccaggatgagtcagcaaca

SEQ ID NO: 464377 - DNA, 602 bp, Homo sapiens
agtttaatataaatatatatgtttgaaagagtaataaaaaaggaagaactgaattgcatccatagcaggacaagtttcctcatacgttaaagaggtgttcagaaaattccatacagtatctgctaaataaacatgtttcgcagcttagcaaagattatatgatagcagcatccatgatttgaagtaaaacagcatttgctttcttctgctggaggtcgttgctcggggcgatgtgcatgttcttagacctacagccttaaggaagggcttgggggtggctcagtgcatggccccagtgcagacacttccaaaccccaaacaatgaatcaaccaaccaaacacacaaacatcaaacaattgtctcctttgagttcctcttgaccgaatggaggctcagcaaggactgctgtagaaggtacattaacagattttggaatgaggaaaataccttaatacctaggtattaagcctcgcatgcattagctatttttcctgatgctctccctcccccaacccacaataggccccactgtgtgttgttcccctccctgtgtccatgcrttctcattgttcagctctcacttataagtgagaacctgtgg

SEQ ID NO: 464378 - DNA, 590 bp, Homo sapiens
aaaaataaatcatatgtttagtttttcccttcccttcattatcatctacctaggcttttaactccattaatatctaagaactaagattcgattcttatctgtcactccagaggcatcattatataattatcaccctggtacattttctacagttaattgagtttgaattttttttatttttttataaacggagtcttgctctgtcgcccaggtggagtgcagtggcatgatcttggctcactgcaacctccaccttctgggttctcctgccttagcctcctgagagtttgaamcttttaaaaaatgtaaatcatttttctttgatttattctgtgctctaaaataaatatccatggcactttctatccataaaggttctaagtaaaaaatcaataggaaatgcagaaagttgactattacttttacttatttttttactacatgcaatataaaaggaaaaagaaaacagtaaaaagatatttgggcttgcttctggaaaagcaaatgaatgtaagcaaagaaagtgaaatccatgttctttcccagtgagctagaagaaaaaatggttagaaattatatatgacaaaaga

SEQ ID NO: 464379 - DNA, 598 bp, Homo sapiens
atttgcccctccttgccttccgccatgattgtgaggcctccccatgcatgtggaactgtgagtccattaaacctctttcctttataaattaaccagtcttgggtgtgtttttatttgcagcacgagaacagactaatacactctactttatcattaagtagactatctttaattttttaacattctcattgtagaaaattcaaacaatacaggaatacaaaaaagtgtgaataccccttrtagtcccacagtctccagagaccagagataatatactgccatatctctttttttaatttttacttattattattatttttttttttgtagagacagcaggtctcactatgttgagcagtctggtctcaaactcctggcctgaagagatcttccggttgggcctcccagagtgctggattacaagcctgagccaccatgcccagctctgccagacctctttcttaggataaacacatacacatgactgcaatatagataatgttctacaatgtactttcctcacctaatgaattttatgattactatatagagatcaatctcattcttttcatgggctgaagtcattgactgaatatgc

SEQ ID NO: 464380 - DNA, 604 bp, Homo sapiens
gtgaaaaacagaaaggaaaaattccaggttcaaacaaaaagctgatcacaggtgactttttaagtggtattatgaactgttcttgtggctcaaggtcttacctgggtgcctgttttaaggaaattcataaagtaagactggaaaagagtaagaaaacttttaaaatgtcatggaatcactgtaaaatatgccactatttggcattagccaaacaatgtactcatgatacttaatattttgtaaatttctatagtatagtttaaatggaaaaaaaagttctaattgttgttttgcttcctggactcttgctttttgsaaagtgtctcactggagatcaaaatgtactcctgctgggagaataagtattttagtgaccaagttctatgtggcttcagtcaaagcatctcaatgtgtggtgtgtgtatctacatagagatagatatactattatcaatttctcagactatattttgaaattgccagtttcaagcctagaattactcaaatgtcaaattgagtcttccgatttaagtattttaggctcttataatcagcatgagaaataaacttgtatacaattcctccaacttccaacaaagggatt

SEQ ID NO: 464381 - DNA, 604 bp, Homo sapiens
gtgaaaaacagaaaggaaaaattccaggttcaaacaaaaagctgatcacaggtgactttttaagtggtattatgaactgttcttgtggctcaaggtcttacctgggtgcctgttttaaggaaattcataaagtaagactggaaaagagtaagaaaacttttaaaatgtcatggaatcactgtaaaatatgccactatttggcattagccaaacaatgtactcatgatacttaatattttgtaaatttctatagtatagtttaaatggaaaaaaaagttctaattgttgttttgcttcctggactcttgctttttggaaagtgtctcactggagatcaaaatgtactsctgctgggagaataagtattttagtgaccaagttctatgtggcttcagtcaaagcatctcaatgtgtggtgtgtgtatctacatagagatagatatactattatcaatttctcagactatattttgaaattgccagtttcaagcctagaattactcaaatgtcaaattgagtcttccgatttaagtattttaggctcttataatcagcatgagaaataaacttgtatacaattcctccaacttccaacaaagggatt

SEQ ID NO: 464382 - DNA, 604 bp, Homo sapiens
gtgaaaaacagaaaggaaaaattccaggttcaaacaaaaagctgatcacaggtgactttttaagtggtattatgaactgttcttgtggctcaaggtcttacctgggtgcctgttttaaggaaattcataaagtaagactggaaaagagtaagaaaacttttaaaatgtcatggaatcactgtaaaatatgccactatttggcattagccaaacaatgtactcatgatacttaatattttgtaaatttctatagtatagtttaaatggaaaaaaaagttctaattgttgttttgcttcctggactcttgctttttggaaagtgtctcactggagatcaaaatgtactcctgctgggaraataagtattttagtgaccaagttctatgtggcttcagtcaaagcatctcaatgtgtggtgtgtgtatctacatagagatagatatactattatcaatttctcagactatattttgaaattgccagtttcaagcctagaattactcaaatgtcaaattgagtcttccgatttaagtattttaggctcttataatcagcatgagaaataaacttgtatacaattcctccaacttccaacaaagggatt

SEQ ID NO: 464383 - DNA, 558 bp, Homo sapiens
ccaactcagacagtgactcaggccacctgccgggggaggaccctgaggatacccatgctcaggtagtagagtcgtgcccttcctctgagaccaacatgtcctctatcctgtggagtggccacccttttccaccaacccggaggtagtttgacttcgtgcctaatctcttgttgcctttttctcttttcaggaattcctgtctctgcacctgcttagaacatggggttttgactttaaactcattcacatgagtattcattatctctcctagggggtctgtattgtcaaaccagactctaggggctttggccccaaggcgtgaagggggttaagaagggaaagcataagaagggaagctgttttggggtgtggggcctccccagcctccctcaaggaagaccacacatgcaggcatcagtcagctatccttgyactcagtgaggatctgcaaggaggaccctcccaaatggagggcatgcttagaagctgctctagattggagaagaggtggcaatgattagggggaaagaaggagaaaggaaagaaaaacctagtttc

SEQ ID NO: 464384 - DNA, 621 bp, Homo sapiens
ttgaatggagaattttattaactgatgatgagtgagtataagagcattttgaagccartgggttggcacgtgcctataatcctagcactttgggaagctgagatgggaggatctcattagcccaggagtttgagaccaacctgggcaacatagggagacctcatctctacaaaacaattaaaaatatattagtaaggtgtagtgatacatgccctgtggtcccagctacttgggaggctgaggtgggaggatctctttgagcatgggaggccaaggctgcagtgagctgtgattgtgccattgttctccagcctgggtgacagtgagactggctcagaaaacaaaaggttatttctctgccattacagaagaagcatgctacactgtcttctcttattaaaatgcaattaataaaccctggacagaatgcattgttgagcagctatccaaggactctgagaagtaaattttagcaggtgaaatggagaagaaagccagaactttaaattccactgaaccagcagtgaatttcctgttttttttcccctgtggtatctcctcgctgatttctcctgggcttgccagaaacccagaactgaaaagtaggggcaggcaaaaata

SEQ ID NO: 464385 - DNA, 621 bp, Homo sapiens
ttgaatggagaattttattaactgatgatgagtgagtataagagcattttgaagccaatgggttggcacgtgcctataatcctagcactttgggaagctgagatgggaggatctcattagcccaggagtttgagaccaacctgggcaacatagggagacctcatctctacaaaacaattaaaaatatattagtaaggtgtagtgatacatgccctgtggtcccagctacttgggaggctgaggtgggaggatctctttgagcatgggaggccaaggctgcagtgagctgtgattgtgccattgttctccagcctgggtgacagtgagactggctcagaaaacaaaaggttatttctctgccattacagaagaagcatgstacactgtcttctcttattaaaatgcaattaataaaccctggacagaatgcattgttgagcagctatccaaggactctgagaagtaaattttagcaggtgaaatggagaagaaagccagaactttaaattccactgaaccagcagtgaatttcctgttttttttcccctgtggtatctcctcgctgatttctcctgggcttgccagaaacccagaactgaaaagtaggggcaggcaaaaata

SEQ ID NO: 464386 - DNA, 558 bp, Homo sapiens
ggcgggcggcgcggcccggggtggttttgcggcccgcgcctcccgacatttccctccgtagtagttggcggcaggggccccaggtgggggtcgggggcgcctgcgcgggttgcctccggcaggtgtggctcggcgggcttagtcaggcgctaattcgggcgtgccsgcttcggggaatggagggcgggagcggcgcttgttcttgcctcgggcgcggataggaggggccctcccggccttgtctgaggggctggcgaagaggcctcccacccgcggcggccgcgggcagcatgtggcgttcgggcggcggggattgggcgggagcagttatgtcgcagtggcggggccccaccgctcccctaacatgctctgcgccagagccttttcggggcggctgggcagacggcgcagtccccggggccgccctcgacacggccgctgaggccgctgggggctgctccccaatctcttgaccttgggttgtgtaacctgctacggagccggcggagcggggcgggagaggtgcgggtggagggaggcccgcctgccccaggacat

SEQ ID NO: 464387 - DNA, 607 bp, Homo sapiens
tctttgctttcttaggctctctctgggagtgarcttttggatcctggaggtgcatcttctgcacccacttggcaaatgccacttgtgttcatggtagagatttattctaagccttaaaaattacctctgaatctttccataaaaagcccgactgaattgggtgactattggagtaattatggcattgaaaattctatgcttcaagggccagacaatgaattctttgaagtgggaaaacttctatatttggaaaaaaaaattagctctcattctacacaactgtcctgctggtacttacagaaagatcaaattgaaaagagggcacatagagtataattgctaaccttagggactcccttaacaaggctaaagaacaaaaatcaaacttagaacaaaagttaaaattcacagccactataaatcttcattcttcacccacccatgttcccctttatcccagcttcctgtccctgactccgtagtagctgttttggattgctgggcctctggcttaaacctgcttttctcaaaatctggtcccacctcctcagcaaattcctataacttcaaaattcctccaagttccctagaaaatattttaaatgtc

SEQ ID NO: 464388 - DNA, 593 bp, Homo sapiens
agaaaatcttcatcctatatccatatttctcagagattaagacatttattttttaagctactttattttcttattcatttcatttattttctgaatgactggctttcatataagtaggaaatacttcacgtcaaaaatgacaattggagattaactcgttggcgtcctatgtgtttatttacatagcaactgtgttgtaccagtaaaacttcatctctgatataaattaacgcacataacaatagaatttataatggacaaagaattatcttttctccaattttataattctaacattttcttcaaaaggaaataaaatattaaagtcaaatatgcagatgctcccagagtcctacacatcgatggcattctctagcaacaaatcccagatgtttttaaatacagcaagcctawtttctgacttggttaagagaaatctgagttgtaaaatttagcatgcacgtaatatggttgacatcctgaatgaggaatagaaatcataatgaatgaaagtataatgtaactaagcacagcacattaaaaattcattgaactaacaattgtattgggatatttaatgaagaatacaaagc

SEQ ID NO: 464389 - DNA, 633 bp, Homo sapiens
ttttgtggctggattgccagggcacgctgttcatgattaatacatctttttgatttgttgttagaattttttgtagcaacttatatttttcatatttttatttcctttttatgtggtatgacttttttaccattttatttacaacatttaaaaaattgatttcagttgtatctcatttatacatgcttacaatattttagaggacttattctttgttttgtccaaactgagtttttattttgtggccaaaatattttattcctttacctttatcttgattagcattatctattacattagggtttataaaactatctcatttgtgttttcctttaatcatattgtgtttctctttttgttctttcttaaattttttcaggtgagttgctttgcctcttgatgctataaaattaaacatcacatattgtttcttctggaagttascccaaagatgctaacttttatatcaagtttcttatttttttctagatatccttaatatatatacacatatatgcatatatgaaattattatgcttagaattatctacatataattatcattgcatcttcataatattttaatactttttttagttgtaaaattctagacttaactttcttttccttcaa

SEQ ID NO: 464390 - DNA, 580 bp, Homo sapiens
ggaagcaggacagggaagaatccaaacaagagtgcaaaatttagtcaaagtaccatctaaaaactgatgttatgaagagatgctgctctggagcataaattacatcttaaaatttgrcctatcttgagaggaggcaactgaattttcatagccaatgagtaattgggtatgagcagatacaatggaatgtaaagttcctggcgatttcatctctctttgcctacaatttaagcagttctagtagcccaaaggcagtcttcaaaagcatattgtggatgcgagtttgatgcaaaccatggcgaaactgggggattggtgcatgcagtctttaaagtgatctgagagaatctgggtgggacatcaatagtatccacctcacatgatatcagccatgttcaagaataatgcatattccttgccatatgtcttaatatcaaaatcagctctatcaataaaatgaaaacatagttagctttctaaaattcagtctctggtgttatctatggaaaggcaccaaaaagaaaaatagctggaatttttattctgttatgttgagactactgtgtcatttcaggttcaa

SEQ ID NO: 464391 - DNA, 580 bp, Homo sapiens
ggaagcaggacagggaagaatccaaacaagagtgcaaaatttagtcaaagtaccatctaaaaactgatgttatgaagagatgctgctctggagcataaattacatcttaaaatttgacctatcttgagaggaggcaactgaattttcatagccaatgagtaattgggtatgagcagatacaatggaatgtaaagttcctggygatttcatctctctttgcctacaatttaagcagttctagtagcccaaaggcagtcttcaaaagcatattgtggatgcgagtttgatgcaaaccatggcgaaactgggggattggtgcatgcagtctttaaagtgatctgagagaatctgggtgggacatcaatagtatccacctcacatgatatcagccatgttcaagaataatgcatattccttgccatatgtcttaatatcaaaatcagctctatcaataaaatgaaaacatagttagctttctaaaattcagtctctggtgttatctatggaaaggcaccaaaaagaaaaatagctggaatttttattctgttatgttgagactactgtgtcatttcaggttcaa

SEQ ID NO: 464392 - DNA, 580 bp, Homo sapiens
ggaagcaggacagggaagaatccaaacaagagtgcaaaatttagtcaaagtaccatctaaaaactgatgttatgaagagatgctgctctggagcataaattacatcttaaaatttgacctatcttgagaggaggcaactgaattttcatagccaatgagtaattgggtatgagcagatacaatggaatgtaaagttcctggcgatttcatctctctttgcmtacaatttaagcagttctagtagcccaaaggcagtcttcaaaagcatattgtggatgcgagtttgatgcaaaccatggcgaaactgggggattggtgcatgcagtctttaaagtgatctgagagaatctgggtgggacatcaatagtatccacctcacatgatatcagccatgttcaagaataatgcatattccttgccatatgtcttaatatcaaaatcagctctatcaataaaatgaaaacatagttagctttctaaaattcagtctctggtgttatctatggaaaggcaccaaaaagaaaaatagctggaatttttattctgttatgttgagactactgtgtcatttcaggttcaa

SEQ ID NO: 464393 - DNA, 580 bp, Homo sapiens
ggaagcaggacagggaagaatccaaacaagagtgcaaaatttagtcaaagtaccatctaaaaactgatgttatgaagagatgctgctctggagcataaattacatcttaaaatttgacctatcttgagaggaggcaactgaattttcatagccaatgagtaattgggtatgagcagatacaatggaatgtaaagttcctggcgatttcatctctctttgcctacaatttaagcagttctagtagcccaaaggcagtcttcaaaagcatattgtggatgcgagtttgatgcaaaccatggcgaaactgggggattggtgcatgcagtctttaaagtgatctgagagaatctgggtgggacatcaatagtatccacctcacatgatatcagccatgttcaagaataatgcatattccttgccatatgtcttaatatcaaaatcagctctatcaataaaatgaaaacatagttagctttctaaaattcagtctctggtgttatctatggaaaggcaccaaaaagaaaaatagctggaatttttattctgttrtgttgagactactgtgtcatttcaggttcaa

SEQ ID NO: 464394 - DNA, 632 bp, Homo sapiens
tatgcttaattgcccatggtgatatatgctcagaggtgttcactgcaacattatttacagtgggtaaagattagaaaaatctgggctatctcccaatagtggtgaatgttttaaaccaaaactaacagaaaataacacttatcaaggagacattcttaatagtgactatgacctacaatttgtaacatttgtcatttccaaaatatgttgaggatatttaacatacagttgcattttgtaatcattaaataatttgtatagttatgaatgcaatatatgtacaaaaatgatagaaaaagttatataaacaaatataagtgatatttaattcactttttattagcagtacacttatatacataattgagtttacaattatgtgcatacattttttctgttctatatttttattttttaataaaaattgcatatatttaagtgtacaacctgatttttttatatacacatacayatacatagtgaaatgattaatacagtcaagctaattaacataaccatcttctcacatagtttagatgggagcacttgaaatctactctcttcaaaaatttctggtaatacaatacaatatcattaactacagtaaccatgctgtagatattagatctcta

SEQ ID NO: 464395 - DNA, 633 bp, Homo sapiens
ataatagtgacacaacctatcaaaatccctgggataaagcaaaggtggtgctaagaggaaagttcacaggattaaatgcctacatcaaaaagtctgacagcgcacaaatagaaaatctaagatcatacctcactcaactggagaagcaagaacaatcaaaacccaaacccagcaaaagaaaagaaataacaaagatcagascagaactaaataaaattgaaacaaacaacaagaacaaaagatacatgaaagaaaaagtttgttcttcaaaaagataaataaaattgatagaccattagtgagattaaccaagtaaagaaaagagaagatccaaataagctcaattagaaacaaaacaggggatattacgactgataccacaggaacacaaaatattatttaaggctagtatatgaacacctttatgcacataaacaagaaaatctggaagagatggataaattcctggaaatatacaaccatcctagattaaaccaggaagatgtagaatctctgcaaagaccaataacaaggagtgagattgaaattgtaatgaaaaaattgccaacaaaaaaagtccaggaccacacagatacacaggtgaattctatcagatattcaaagcattggtac

SEQ ID NO: 464396 - DNA, 475 bp, Homo sapiens
tcttcccaaatcctgagctgttgaagagatgacacagggtgtctggagaggaatgccttggagatgcaccaaggtagagaggagagggtcctcatgactggaaagggggrgaagtccatgggtcttgcaaggaccaaaggacccgccacctggccccaggcctgcctgggaagatggcagactctcagaggtcaaatgttgtgtgtacccacaaaggctggactctaggccctggggctccagctttgccagtccccaaaactgaagggacatgaggctgtgctgatgggttctactgacaactagctgggacaaacacatataaccagaggggtcctcagctgctgggaaagactccaggatcttgtacaacctttgtcagtcagggctgagactaaattcctgccagtcatcagcttggcaggtaagtaaagatttggaatggagtatcttttaaatctgagttgctgggctg

SEQ ID NO: 464397 - DNA, 475 bp, Homo sapiens
tcttcccaaatcctgagctgttgaagagatgacacagggtgtctggagaggaatgccttggagatgcaccaaggtagagaggagagggtcctcatgactggaaagggggagaagtccatgggtcttgcaaggaccaaaggacccgccacctggccccaggcctgcctgggaagatggcagactctcagaggtcaaatgttgtgtgtacccacaaaggctggactctaggccctggggctccagctttgccagtccccaaaactgaagggacatgaggctgtgctgatgggttctactgacaactagctgggacaaacacatataaccagaggggtcctcagctgctgggaaagactccaggatcttgtacaaccttkgtcagtcagggctgagactaaattcctgccagtcatcagcttggcaggtaagtaaagatttggaatggagtatcttttaaatctgagttgctgggctg

SEQ ID NO: 464398 - DNA, 556 bp, Homo sapiens
cttgccatggagtcctaaaggtcagaagtctgaaatggacttcactggactgaaatcaaggtgttatcaggcttttgttccttctggagactctggaactgcatctatttcttcctttccatcttctacaggctgcgttgcctcttggtcccttcttcttccatcttcaaagccagaaatggtttgctgagtctttattatgctacattactccgacgcatctgttctgtattaaaatcttctctttaatcatgtaaagtaacttatcctcagattccagatattcagaagtggatattttgatgggagcttrttcagcctgtcacataggtaaaatagttgtgttgctttgtaccttttttttccttatatgataaaccaaccttgcattctttgaggaaaaaaaagcaacaacacttggtcgtgatatattatacatcttgcatgttgtgagatttcatatgccatagagctaaattaaggatgtttgtacttatatttatgaaggatattaatctagagttttttatttgaattaccctgtttagttttagtg

SEQ ID NO: 464399 - DNA, 603 bp, Homo sapiens
aatgctgtaacaatctgatgcaaagtgctccagcattgctgagaagttcagtgtaggctttcatttgttagtcatttcttagcaataaagattctgctatgagactggtctttgtgacaataggattcaaaaatgatagaaaatgtggatgtattcactgtagtgggcaacaaggtgagaatggcaattgggtgttgctcttacctgtatactgacctatgcaaccaaagcaatcaggagtgggtgagcagaaggtaagcactggcttagaaaatcgcaatcttttggctagttttcaaaactgatattattgtccagccaagatcttatccactaaaagggaggccaagtctccataattaaagactgtgactccattacatacaatacatctctcttcactcttttctcaaaaayatatgtggatatttaccaaaatattaaataaaaaattgttttaagggatataggatctgaagtgacattgactgcacaataatcaaagaggggagaaatcatgtctcccatcttagattggaaatgtactcatatcctgaccatatcatataagtgcataaaagtgtgcataaagtatatatatac

SEQ ID NO: 464400 - DNA, 622 bp, Homo sapiens
tcccactccttgcttgtagtaaggatgccttaacaattgcatttggagttcattaaaaaattaaaattcttacataatagctacattcaaataaatgtatgaaagaatcaataaaaaaagcataattttatgttgtcattgtactttaatatttcacagttaacacaatataataatcatgcccaaaaatattcaaatgwaaattattctaattattcaaaattttaccatcttgtatgccatataatttgatcaaaaataaaaatatttataaggaccaggaacagtgtctattaaaatataatgttgaattggaaacaaatatacattagtagtaagagtaaagaaaatataaactcgcataaatatcaatacttacaacaatcactgtaatatatagacaatacaattcttatcttttaaattatttcactaatgattttctatagaagaaaaaatatagtctacctgaaattctactaaaagaaatattacattttaacctggaaatagaaggcaatggaattatgcatactatcaatttttacccttcactcaatattaattttagcttgtagtaagtaagtaaagttggcacataaaactatattattgccatagc

SEQ ID NO: 464401 - DNA, 537 bp, Homo sapiens
catgcagtaacagttctgtaattatttgtttccttattgacaaatcgttttgttcttcaatgtataatttttattacagtgaatgctacgaccacacactcagttacctaaacctgaaatgtggaaattatctttcacctctctgttctttacttaccctgtgcagttgatattgttatgaagcgatgtctattaagtacatggattctggaggtaaaacatccagtttcaaatmacattctttcattacctgaataactttggaaaagttaaaatcccagtgccttgatacccacatcagtaaaattatatgcaaatgtttgctattgtccatattcacaatatctaatgttattcttatttgttcttttctttgccatcatcagtctgtattagtttagatagctgtcatttctaatttgaatattgaatttttttttcaaaaacaccccattcctttttaagtttttttcaatccaatgcttcactacaattagaataatactcccaaaacacaatactgattattttacattt

SEQ ID NO: 464402 - DNA, 510 bp, Homo sapiens
ctattgtccatattcacaatatctaatgttattcttmtttgttcttttctttgccatcatcagtctgtattagtttagatagctgtcatttctaatttgaatattgaatttttttttcaaaaacaccccattcctttttaagtttttttcaatccaatgcttcactacaattagaataatactcccaaaacacaatactgattattttacattttccttgaagcatctcagtagagattccaaaatcactgtgtttcaatggcctacatgaagttttatctgcttgtttgaagaagattatttctcattacatactttaattgtagccaaatttagggtaaggccaaaggcaaactcaggacttctgaatccaaagcgagtattcttcgccagtttgcctcaatttgttataatatttaatgtacctaaagaaaagaatctatacattttgtttctgagatatttaatgaaaacatgctatttagttgtaaacttaacaagtttaccaat

SEQ ID NO: 464403 - DNA, 510 bp, Homo sapiens
ctattgtccatattcacaatatctaatgttattcttatttgttcttttctttgccatcatcagtctgtattagtttagatagctgtcatttctaatttgaatattgaatttttttttcaaaaacaccccattcctttttaagtttttttcaatccaatgcttcactacaattagaataatactcccaaaacacaatactgattattttacattttccttgaagcatctcagtagagattccaaaatcactgtgtttcaatggcctacatgaagttttatctgcttgtttgaagaagattatttctcattacatactttaattrtagccaaatttagggtaaggccaaaggcaaactcaggacttctgaatccaaagcgagtattcttcgccagtttgcctcaatttgttataatatttaatgtacctaaagaaaagaatctatacattttgtttctgagatatttaatgaaaacatgctatttagttgtaaacttaacaagtttaccaat

SEQ ID NO: 464404 - DNA, 503 bp, Homo sapiens
cttcctggccacataggtttataccactatcttttcactgtcatgctcaggctctccagcttcctctgggaggtaggtggctgggtttacacagagacaggttcttaactagactgtacatccctctaacagcagagcctcaaatttgaagaggtggttgtctgttagtcagagattccctttagagaacatcagtcctgccacattatggggratataaactgttaagttattccctgtggttaacttagtagcctccggcaccagcaaggctactgcggcaactactcagagacaggacagccatgctttagctaccaaatcaagctccttgcttaggtagcctatggactacttggctggatcttgggcctgcgttagaactcccagggtcgttcccttcctttctgatacataaagcttgaatgtcttttctaagggaagactaaggtctggtgccttaagcaaggcttgctttgattggttaaagatccctttagcct

SEQ ID NO: 464405 - DNA, 503 bp, Homo sapiens
cttcctggccacataggtttataccactatcttttcactgtcatgctcaggctctccagcttcctctgggaggtaggtggctgggtttacacagagacaggttcttaactagactgtacatccctctaacagcagagcctcaaatttgaagaggtggttgtctgttagtcagagattccctttagagaacatcagtcctgccacattatggggaatataaactgttaagttattccctgtggttaacttagtagcctccggcaccagcaaggctactgyggcaactactcagagacaggacagccatgctttagctaccaaatcaagctccttgcttaggtagcctatggactacttggctggatcttgggcctgcgttagaactcccagggtcgttcccttcctttctgatacataaagcttgaatgtcttttctaagggaagactaaggtctggtgccttaagcaaggcttgctttgattggttaaagatccctttagcct

SEQ ID NO: 464406 - DNA, 503 bp, Homo sapiens
cttcctggccacataggtttataccactatcttttcactgtcatgctcaggctctccagcttcctctgggaggtaggtggctgggtttacacagagacaggttcttaactagactgtacatccctctaacagcagagcctcaaatttgaagaggtggttgtctgttagtcagagattccctttagagaacatcagtcctgccacattatggggaatataaactgttaagttattccctgtggttaacttagtagcctccggcaccagcaaggctactgcggcaactactcagagacaggacagccatgctttagctaccaaatcaagctccttgcttaggtagcctatggactacttggctggaycttgggcctgcgttagaactcccagggtcgttcccttcctttctgatacataaagcttgaatgtcttttctaagggaagactaaggtctggtgccttaagcaaggcttgctttgattggttaaagatccctttagcct

SEQ ID NO: 464407 - DNA, 578 bp, Homo sapiens
atattttggaaatcatattaaaaawattctaagacagaatgatcaaataagctgaaaactgaaaatcaaaccttagatttagcaatatgacactcgttgctgaccataacacattgatttattttaggaactgggtaggaaagtctgaagaaagcacactcaggaatgaaagcagagatttaaaatcagaatgaatagttattgtctaatagaaatttattataaagtagagcataaaataggttgatattttgagggtaaactatcataacattttttttctttttcctaatgttgaaaaaaatatagttcattgatatgcttatgcatatattgaatagagaaggaaatttacagatgccggagagagcgggttgaaatcctttacttcatagagtaggacaatgataatggtatctagtgcaaaggggaggagtagctttgaacaagagcaaaaacagtttatccacaatagtagaagatatgtgggagcatataaacacagaatttacttcccaaaatatatgaatgtaaatattttaacaataaagtcaatattgctttgattgttggattag

SEQ ID NO: 464408 - DNA, 578 bp, Homo sapiens
atattttggaaatcatattaaaaatattctaagacagaatgatcaaataagctgaaaactgaaaatcaaaccttagatttagcaatatgacactcgttgctgaccataacacattgatttattttaggaactgggtaggaaagtctgaagaaagcacactcaggaatgaaagcagagatttaaaatcagaatgaatagttattgyctaatagaaatttattataaagtagagcataaaataggttgatattttgagggtaaactatcataacattttttttctttttcctaatgttgaaaaaaatatagttcattgatatgcttatgcatatattgaatagagaaggaaatttacagatgccggagagagcgggttgaaatcctttacttcatagagtaggacaatgataatggtatctagtgcaaaggggaggagtagctttgaacaagagcaaaaacagtttatccacaatagtagaagatatgtgggagcatataaacacagaatttacttcccaaaatatatgaatgtaaatattttaacaataaagtcaatattgctttgattgttggattag

SEQ ID NO: 464409 - DNA, 515 bp, Homo sapiens
tgaactctttaaaactatgcaaactcctcatcagcagaggagtcaagaaggcctttcagagttggaaactgatgctaaaataatgagccattattcctaaaatataaaaatgtagcctcattactggaaagkttttggttgtgattttcagtgtgttactagtcatgtgacttgaaagagttacctaaaaaccttctagagctaattttatatctgcacataatgataaaatcacttacctcatagagctgctagccaaaaacatatgtgttattatgtagtattttgaaattacatattttatacaatagaatattatatacacacatgtatattaaacttgtttactgctgagaaatgtaaagaaaaacaactttgaaagtggtttggtagtatgcactaaagcttaatgtatgcacaccttagaactccacaattaaactcctaggtatatagtcatcagaaagacatgtatatttacaataaaatatgtataagcatactaacattagtac

SEQ ID NO: 464410 - DNA, 414 bp, Homo sapiens
tgacctgggtccttctctactcacatgccctgcccaagggattctttgcggccagagagaggraaggaagattcagcggaaagaggagcctggggcagaactaggagggagcggaaggagcctgtacttctgtcattaacaagtcttaaacctcagaacctcagtttcctaatctgtgaaaagaaggtcttaaatctatcttgcagcatgaatgaggactgcgaagcagcagccagcatcctgcttgacacatcgcagctgatccatataatcggggctattggaaaaacaaaaccccagctacaatactagctgcggaggaagggagcagtcttgaggttgtgaaagacttgtgtggaaggagcgctcgatgtgggcctcatccccagcatccaccagggcagctttacttta

SEQ ID NO: 464411 - DNA, 632 bp, Homo sapiens
ggaatggtttaaaagagtggagtggcattcccagagcagggctctaggaagattaatttggcttttctgggccacctgaagctggaagctcttttgaacctccactgggttataaatggttgctctgggttgcccaaagaaacgatggactccagaaagaaatgccatcgtttggagatggcccacttctcccagcacatcctgacccagtgaggagggaaagccaggcccttgcccaggccctaccaagattgcacagccttgaatgagactgccccagcctgagtgtgtaccttgggcttgacccaagagtgaagggaggaggagcgcggtcctggggagaagcttctagatctccaatgggcatgggctttgtagtctaaccagctttcagattccacctccaccacttgtccaatttgtggactcaagtaacctcttcattattttayccttggtttcttcaaccgcacttgtcactcttcatggtggcctcgtctggtgggggctgctgggaagcgtgaatggataataccaggaggccatatgcacagtggctagcatacagcaggtgtttgaaaagtggttgctcccttgatgatgtttggctccccaccatgtggtaggagcac

SEQ ID NO: 464412 - DNA, 632 bp, Homo sapiens
ggaatggtttaaaagagtggagtggcattcccagagcagggctctaggaagattaatttggcttttctgggccacctgaagctggaagctcttttgaacctccactgggttataaatggttgctctgggttgcccaaagaaacgatggactccagaaagaaatgccatcgtttggagatggcccacttctcccagcacatcctgacccagtgaggagggaaagccaggcccttgcccaggccctaccaagattgcacagccttgaatgagactgccccagcctgagtgtgtaccttgggcttgacccaagagtgaagggaggaggagcgcggtcctggggagaagcttctagatctccaatgggcatgggctttgtagtctaaccagctttcagattccacctccaccacttgtccaatttgtggactcaagtaacctcttcattattttacccttggtttcttcaacygcacttgtcactcttcatggtggcctcgtctggtgggggctgctgggaagcgtgaatggataataccaggaggccatatgcacagtggctagcatacagcaggtgtttgaaaagtggttgctcccttgatgatgtttggctccccaccatgtggtaggagcac

SEQ ID NO: 464413 - DNA, 588 bp, Homo sapiens
agtccacacttgtttggcctcagaaccctctttccattaatatctattaacatcgtgtgagcaagagctctgggaatcacagggtggaaaatgccgctctggccctgaacaagcctcctgatctcttcctcgatatcatagcagtagaaatagtaataataataacaacaactactgccaattgatgccatttattgagagcttactatgtgccaagtgctatactttgcttgtactattcattgaattctttccagaatcttgtaggtcatttctgtgtttagaccatggaataaacaagaataatgagacacttagaaatgcaagccctggcctaagggcatagagtcaataagaggtgaagctggcatttgaacccagatgatctcttctaactagtccctgcttccagacccagcctccccagttcatccaccctgctgccgttggagagacctttctcctgcacggttctcaccatgtctgtacctcaactcctctgctctctgttttcayagcactccctattgttgaaggtccaagctctttagtatgcccctttggctgcatcctaagccccctctggtt

SEQ ID NO: 464414 - DNA, 616 bp, Homo sapiens
atatccataggggattggaggacccatcgtgggtatcaaaatccatggatgctcatgtcctgtagttggccttgcagaaaccatggatatgaatttgcttactatacaatttgcttatccatttaccacctgatggaaatttaggttgtttccagttttgggtattatgaataaaactgctatgaagatttatatcttttcatggacatgtgtttctatctctttggagcaaatacctaggagtggttttcatggattgtgtagtaggtatatgtttaactttttaagaaattgccaaactttttccccaagtgyttggaccatttttgcattcccaccagcaatgtgtgaaagttaaagttgttccacatccttatcaaagcttattatagtcagtctttttaattttagcagttctagtgagtattcagtagtatcttactacgttttcatttgcatttccctaatgactaatgataatgaacattgttttatgtgcttatttggcatttgtatactttggtgaaattcctgttcacatcctttctttatctttaaattgagttgttggtcctattattgaactgtgtttttatatattcagaataccagtctt

SEQ ID NO: 464415 - DNA, 616 bp, Homo sapiens
atatccataggggattggaggacccatcgtgggtatcaaaatccatggatgctcatgtcctgtagttggccttgcagaaaccatggatatgaatttgcttactatacaatttgcttatccatttaccacctgatggaaatttaggttgtttccagttttgggtattatgaataaaactgctatgaagatttatatcttttcatggacatgtgtttctatctctttggagcaaatacctaggagtggttttcatggattgtgtagtaggtatatgtttaactttttaagaaattgccaaactttttccccaagtgcttggaccatttttgcattcccaccagcaatgtgtgaaagttaaagttgttccacatccttatcaaagcttattatagtcagtctttttaattttagcagttctagtgagtattcagtagtatcttactacgttttcatttgcatttccctaatgactaatgataatgarcattgttttatgtgcttatttggcatttgtatactttggtgaaattcctgttcacatcctttctttatctttaaattgagttgttggtcctattattgaactgtgtttttatatattcagaataccagtctt

SEQ ID NO: 464416 - DNA, 615 bp, Homo sapiens
tgatgaatgccctgaatagagtattgggtaagttattatttataggtctttcttttttttgtttatgtgctaaatcaatgctgcatgggaaaaatggagaatattttacagggatattttggaaatattgcaggttctgttccagaccattrcagtaaagcaaatattgcactctgtcgcccaggctggagtgcagtggcgcgatctcggctcactgcaatcactgcctcctgggttcatgccattctcctgcctcagcctcccaagtagctggcactacaggtgcatgccaccatgccctgctaatttttttgtatttttctgtctttttagcagagacggggtttcaccagtgatatatatttttttcactgaattgttcactttgtgcttttttattggatattaacaaatgataactgtatatatttatggggtacaaaatgatggtatgatattttttccatacacacacacacacacacacgattgaatcaagctaattaacatatccaaacctcaaatatttgttatttatttctgctgtgtaacttaaacattgtaccgtttgactaacatctccttattatccctactctgcagcctttggtaacc

SEQ ID NO: 464417 - DNA, 589 bp, Homo sapiens
  misc_feature (1)...(589): n = A,T,C or G
nnnnnnnnnnnnnnnnnnnnnnnnnnnnnnnnnnnnnnnntatgcgtccattttgagacagaagtaaacccttgaaaattctaaaagtcttcccttccttggaatgaattgaccacactgtctgataccaagttgwtgctgttctttagtcagagagggcccaagggctgctttggccagctttggaagcagagacagggcctccaaccctctgcgaactagcctaggtggatacctctgttaatgaatctccactgtctttctctctatgggctttttctaacatctttcagtactgagtcctttctgtcacaaatcactttatggggcaaccatgtagtgacttatctaaatgaacagagtaactaccatttgttaactacctactatgcattgggcattgtgctaatactttacatatataatatgatgtcatttcacaacaacacaaagtggtaatacagagttttaactaatagttcaaattctagagtcagactacttgggttagatgtctttacttcatctcttataagctgagggaccttgcagaagttacataatctctttgttccttagtttccgtatc

SEQ ID NO: 464418 - DNA, 625 bp, Homo sapiens
aaagcagcaagagaaaagaaaccggtaacaaaggagctccaatacatctggcaatggacttctcagtggaaatcgtatgggccaggaaagagtagcatgactttttttttagacagagtctcactgtgtcacctatgctggagtgcagtcgcacaatcacagcacaccacagacttaacctcccaggctactgtgatcctcccacctcagcctcccaaatagctgggactacaggcatctgccaccatatctggctaattttttttttattttgtatagatggtgtttcaccatttcccaaagctgttctcaaactcctgggctcaagcgatcctcagcttcccaaagtgctgggactgtaggcatgagctactgtgcctgggcagcattacatatttaaagtgctaaagaaaaaactttatcctagaatagtatattcagcaaaaatatccttcagacatgaaggagaaataaaaactttctcagacaaacaaatgctgaggattttcatcaataccagacctgtcctacaagaaatcctaaagrgagtttttcatatataaaaaaaaggatgttaatgagcaataagaaaacatctgaaagtagaaaactcactggtaatagt

SEQ ID NO: 464419 - DNA, 622 bp, Homo sapiens
ttaaaaaaaaaaagaggctgggcactgtggctcatgcctgtaattccagctttgggaggccgaggcgggcagatcacgaggtcaggagatcaagaccatcctggctaacacagtgaaaccccgtctctactaaaaatacaaaaaattagccaggcatggtggcaggcgcctgtagtcccagctacttgggaggctgagacaggagaatggtgtgaacctgggaggcagagcttgcagtgagccaagatcacaccactgcacttcggcctggacaacagagcgagactccmcctcaaaaaaaaaaaaaaaaaaagactgagagaatttgttgctagcagacctgcaacacaagaaatattaaaggaagtgcttcaggttaaaaggcaatgatatcaagtaataactcagatacacaggaagaaatgaaatacactagaaattgtaaatatgtaaataaacaaaaatccttttctcttttacatgttttaaaaactcgtaagattatatatagaagaaaatatgttttagttataccatatatagatgtaatagtaatacacagaacaaaattaacacaatagaaaggataagaaaagaagctgtatttgagtaaagttgttgt

SEQ ID NO: 464420 - DNA, 521 bp, Homo sapiens
atgatcctatacttattgctatagacagaaagaagtccacaaaattttaaggtggtaacaagataacaggcacatactgtattactggatttatataaaattatgtataygtatgtgcttctatgtttatgacttacatttgcatgtgtgcgagaatgcatagagatgattagaagaaaaccaatcaaaatatttttgtctgtattataatcagaaataataacagaagttatcctacttttaaatatatataaacttatttttacctcaaatgtactggcttcagtgggaaaatattcagatagttatgtacattaaataataaagttatttgcatttaaatcatgtgaaaagcagctatcaccactatttttcaatcttcttttggggattttgataaattaaaaggaaaataatcggtaaaaatttagaaaaaagacaaatatacctttgtccttgataagactgtatacctatgaaacacaaaacactctatgaataagctactagaattaagaaaa

SEQ ID NO: 464421 - DNA, 604 bp, Homo sapiens
tatttttctatcccttcacttttagcctatgtatgtgtttcaatttaaaatgagtttcttatagacaatayatatagttggatcttgttttttaattcattcagccacactataccttctgactgagtagttcaaaccacttacatgtaatgtaaccactgataggaaaggaccatttttttcataggtttttctcattgttttttcaattttttcattgctttctgtttgtcttgtaattcttttgtccctcttctcctctcttgctgtcttcccttgtttttcattgatttttttttgtattgatatactttggttctttttttcttttgtgtatcttctataggtgttttctttgtgaatgccatggagcttacataaaatatcttatagttacaataatctgttttaagctgataatgtaactttgattgcagaaaaacctgtacacttttacttctccctttacatctttttattttgtgtatcaattcacacatttttatatttatagttatttttcatattttctttttgatacatagttttgctttctcacccaggctggagagcagtggtgtgatctcagctcactacaacttct

SEQ ID NO: 464422 - DNA, 638 bp, Homo sapiens
ctactcttacagtggttgtctgtgtaaccctctttagataagaacaaacacgaacaatgtgagcattagatgagatgatacatgaaaacactgagtactaagtaaatactagatgtgactattatcattgcaattttatgctgatttttagctaaatacttttcgtaacatcactcacaactgtgaagaagattgagtattagtactgtatagctctaactgtagtgagcgtgtaacaaatgtaaatacataagagggaaggagagagggaagaaaaagtatttttgtattatattctttaatattttatttaaattggaaaatcacttcttttccatagatgtaataacctgaaatatgagatatgacctaaacaaataagcacatccaaaatctrtacagtaatttaagaactgcgaggtctagctctcatgatttgattccagcattgcactgcaagccaaaacgtcctactatgttaccttatggactttgaaggtagctattctcaatttccccatgataatggccttaaatatttcaaggacttctgagattcaggttggttctagagctttcttaacctgtagttggacaaaatttctagcttcccagatagccttaagaaactcagactt

SEQ ID NO: 464423 - DNA, 605 bp, Homo sapiens
ctggtggcattttccccctgccttagagatctgtggaactttgaacttaagagttatgatttagggtatctggcaaaagaaatttctaaaagtattcaagaggaagcagaacataaaagtttggaaaatttgtagccctgacatgcaatagaaaagaaaaacccattttctgaggagaaattcaagcctgctgcagaaatttgcataattaacaagaagccaaatgttattcactaagacaatggggaaaatgtctccaggacaaatcagagaccttcacagcagcccctcccatcaaaggcccagaggcctaggagggaaaaatggttttgtggactaggcccagggcatgttttgctgtgtgcagccttggaacttggtgccctgtgtcctagctgctccagctgtggttaaaaggagccaacatacagctcagactattacttcagaggttrcaagccctaagctttggcagcttccacatgacattgggcccacaggtgcagagaagtcaagaattgaggtttgggaacctccacctagatttcagaggatgtatggaaaggcctggatgtccaggcagaattttgcttcaggggtggaac

SEQ ID NO: 464424 - DNA, 544 bp, Homo sapiens
cttaactctatcatagtgattattacaattttatgtaattttatgcctgtttatctgttttccatgttctctgaggacagggcccatcagtttggttcaactcatatcaaatacctgggaatgtgggggcttcatgttgaataaaaataattgatttttaaaatttagcagttatagctatattcctttgttttgttttkttttttactaatcaatgtaaatttgtttttcacatcctttccagaaagtaggctttgttgggagggagatggatatcttggaaagcagcaccaaaggcaaactgggtgcagaaggaaaatgggcacaccaaaggcagactgcactgacccaatagttttggatactgctgctccatttgcctctgagcttaacacagtttttcatgattcatatttttggataacatcataacatgtttatattgtcttccctgaaaatggaaagaatatcacaaaattgagctggtggtcttgtaccagagagaaatatgttcaaatttaaaattatgtgacaaactgagaaa

SEQ ID NO: 464425 - DNA, 628 bp, Homo sapiens
ggggatgtgtgaaagagaaagaagaatagagcttacttggaaatgggggcaagggaagaaataaaaggtaacaggaaagaaattctgcctcagtctgctacccacctttttggaggggagatagtaattattttaggctttgtgagccatatgggctctgttacaactattcaactttgctgttgtagcataaaagcaaccatagacaatatgtaaatgaatgagcatggctgtgttccaatttatgaatactgaaatttggatttcatatacttttcacatgtcatgaaatattatccttcctttgatttttttcaatcatwtaaaaatgttaaaaccattctcagtttgcagaccatactaaaacaggaagcaggccagatttggcccatgggccatagtttaccaatccttgtaacataccagtaaagaccattatacaagtttcagctttagaattccacaatggttgcagtaagagtcttacatggtatcttacccagaatagatttttttaagtgttcaattctactaagaagaactgtgaatttttcgctctcaggatcagcagatgtctggaagtctaaataaatatatatctgaaataaatttcttcactactttcaaa

SEQ ID NO: 464426 - DNA, 580 bp, Homo sapiens
taaggctgagcaccccagttaagcttctgaacgttggacaatctgtctgttgctactgctttcttagaagttcatggctaaggggtcattcattccatattacagctgagcaggtaccctactttcatctaccttatatacccagcctcagctacattgttagaccatataaatgtcaacagaaaaagtagaagaaagagaaatttttcactagaacgttggctccaggagagctgagattttatcatctttgttcactgctaaatttataatgcctagcacgtactagatacacattctgtgttgaatgaaagaaaaaataaattcacagggaatacaaacatctttaattttgctattatttctaccctattttcgaggagtcttggagttcatatttacccagaccctaagttaaggcttagagccttaacatgcaaaatacaaaaataactgaatttygaaaataaattatgccatttagtagcaaaacaaataaagatgatttttatatgtagaaatacataaaagaagagaacagcaaagagatacaaattcattttacagcactgaggaagcc

SEQ ID NO: 464427 - DNA, 595 bp, Homo sapiens
gttatgagcaggaactttggggttaaacagacgtaggtttggattctgtatttaccatgtactagttttatggagcttgtgcaaactacttgatctcactcccatttatatagtagggaaagcaatataagatcatgaggattagattagctaatattattgaatgcttaataagaagccatgcactcaatgaatggttgctattgttgtcattgttatattgttactaatagagggttgcctatcctttacaaaaacttccataaataagctcatgtctcagatacaatcacaatgcaaagtgaaaatgagctaaatggagtccaraagaagtaagtccttaagtttcatggttgtcagaactaaaattttccatgcatgtgtatatgtgtgtgtgtgtatgagtctaggccttaaaagaaacatagtttattatagagattgcgtgggtgtgggcaattgaacatacttgccacactactttcccagagcagatctggtctctgttacagttctgaagaagagaaatgcaaccatcctaccaattctttagtgttctgtctgtttcattagaaagtaatggcttcagctatta

SEQ ID NO: 464428 - DNA, 563 bp, Homo sapiens
ttttctgggttataactattctagtgggtgtgtagtagtatctcattgtggttttagtttgcatttctctaatgaataatgatattatatataattttatgtgctattagccatttgtatgtctttggtgaaatgtctattcagatcttttgtccattttaaaaattgggttgtctttttmtcaaggtgtaaaacattctttatatatattttatcatatatgtaattttaaaatattttctcagttggtggcttatcttttccttagcttaattatatctttttttttttttgtcagagtctagagtgcagtggtgcattcttggctgactgcaaccttcgcctcccaggttcaagtgattcttgtgcttcagcctcccgagtcgctgggattaaaggcatgtgccaccatgcctggctaacttttatatttttagtagagatagggtttcaccatgttggccaggctggtcttgagcccctggcttcaagtgatccgcccacctcagcctgacaaaatgctggcattacagatgtgagccaccatgcctggcctaatagta

SEQ ID NO: 464429 - DNA, 581 bp, Homo sapiens
ccaggtctctagactctatgtccatgattacttctaaaatattcactgctacatcaatctattaacaaagtttttttaaaagcccagccactacttgctatgattttgaacccattctctgttttcttaaaaatggagttgctctgacttaaaatataagataacaaaaacaacaacaaaaaaaatgaaggcacaaagtctcctaaatatgctccatttggcattctgtgctccattccctattgtggtactttttgatagctatgctagcatattcttctgcccagctgcttttaatttactcttttatgggggcatgaatgtcattactatgtcccctatttcaaatgttcttgatgttgtagttctgccgtatcattttttctcatccttttaccacattctctctcattaaaggacatgtcacttccttcattaacttaaaattcactayggatttttaattatctgtgagctttcagaaattctttaactcaaaagttgctgtcatttttgttacatgcatgagctcaattgctgagaatcctttccaaacaaatccttttagagggtacttttga

SEQ ID NO: 464430 - DNA, 623 bp, Homo sapiens
agaaaatttacaggacatggataaattcctggaagtctacaaccctcctagattaaatcagaaagaaacagaaactctaaacagaccaataacaagtagtgagattgaaatggtaatttaaaaattgccaacaaaaaaaaaagtccaggagaagatggattctcagctgaattctattgaacattgaaataattggtagcaatcctactgacactattccacaagataaagaaagaggttcccttccttaatcattctatgaagccagtatcaccttsataccaaaaccaagaaaggacataacaaaaacaaaaaactgcagaccaatatccctgatgaacatagatccaaaaatcctcaaaaaaaatactagctaaccaaatacaacagcatatcaaaaatataatacactatgatcaagtgggtttcacaccagagatgcagagatggtttaacatacacaagttgttgtacctgagcaagttagaaaaaggccacactttgagatgaattaagagtcctttattagccagcaaccaagagacggctaacgctcaaaattctcttggccccaaggaaggggcttgattaacttttataccttggtttaggaaggggagggg

SEQ ID NO: 464431 - DNA, 440 bp, Homo sapiens
tctgtctcaaaatttctagccgcatcagcttcagtgaactgaactctgcctcctcaactcagcaagaccaactctttctgggttgwctctctctgcctcccatcctgcaaactgcctccaggaaatgagtctgtccttttgtttcctgtctctttttgttgcatgatgttcaatgtctgaccagaggttattcacatccagttgaacctcattatttgggaattccactttactacttggtaaaatatatttataatctcaaaagtcaatactcagggaacttttgcatcatttgcagccacgcccagggagctgaaatgtttaaattgcccaacacacacgttcccagctgaggtccaacaaggagccactctgctttcttgtttcactcataccataaacaggtgtccttctcactgtctgttgagtgtcgcttttct

SEQ ID NO: 464432 - DNA, 594 bp, Homo sapiens
cttgtagcttctttcaacttcagcattccacagcctcattttgaatcagcaaataaaggatgggtttttgtctgccaaaagaaggtacatgtaatgcacatttaatttgagaaggatttagccctcatgtaagtctttattcaggtgtagttgttcagccrtttatacatctcggaatgagttcagtatgtgtcatgtggaacctgtttgaaacaaattttaatctctgaaacttactttttaaggaggaagttgaaaattatcttttattttagctgaaggggcaagcttaggtgaagattgtgtgaagagtatgaagataatgtatctgaaacaatatccagagaaggaaaagcaaaaaaggagaaaataaaggagaatggagggaaataaaggagaggagaagacaggaaaagagaaaggaggagaggaagggagaggccagaaggagagaaggggaagctaggagtaacattagttttatcaggagcattgttaaccatatttgctgtacaggttatatgtcaaactttttgaaatccttattctatagctacagaactagagaagagcatcttctctaaccacagagga

SEQ ID NO: 464433 - DNA, 518 bp, Homo sapiens
catataggcattcaataaaactttataggaatgaaaaataaaaaatagaacagagaccgtatyttcaaaaatgtttaaattccagaaggaagtgcagacacaaaactaactagaatgaatacatgaattaaccaactgtcaactatcttcctgcctcattcaaaaaaatggtacacacaatcacacctattgtgcttttttgcttaagaatgggaaatcaaactcataagaatgagaaagaaagaaacatgttagtcacagaaactaatcctcactgtgattgaaaatcatcttgtagttttctggtaataagggcaaaaaacaaacacataatgggttgactaattcatgtttttttaatagaaagaaatgtactattcttccagagaaagagcttatcccttggtgctacccatgactcttctagatgtcatactgatagaattcaaaaattttgagcatctatgtacaagtagacatcatttaaagcactcctgggggcaattcacagtgaaaat

SEQ ID NO: 464434 - DNA, 581 bp, Homo sapiens
  misc_feature (1)...(581): n = A,T,C or G
nnnnnnnnnnnnnnnnnnnnnnntatctaatatattgattatgttgaagctgttttctctcaatggaatgtccacatcttaaatctactcaagttatgtaggctctgtgaagcctaaattcaaaatgacacctcccttcactaattttttttttatgctcagtctgtstgtgttccattattaaactcccatgttatgctttttcaatatttcataacttaataacacacgagttgtgtatactatttgcaagttaaatacatgcatctccaacaagtgccatgaaactaaccttttgaggttgtcaccataatccttagcatgatgctaggcacaaaatagtttctcaacaaatactggatctttcactcctttacttgagtttcagccagtgataaagaatgctaccactgcaaattaacaaaactgtgagcacagctctccctatgaataatctattcctgttttgaattattgattaaatttccttcagataaattttactcaatagatttaaagccagaaacaagcagggaggactttctgggagaaagtcaaccaaaacccatgacaaagaggag

SEQ ID NO: 464435 - DNA, 581 bp, Homo sapiens
  misc_feature (1)...(581): n = A,T,C or G
nnnnnnnnnnnnnnnnnnnnnnntatctaatatattgattatgttgaagctgttttctctcaatggaatgtccacatcttaaatctactcaagttatgtaggctctgtgaagcctaaattcaaaatgacacctcccttcactaattttttttttatgctcagtctgtgtgtgttccattattaaactcccatgttatgctttttcaatatttcataacttaataacacacgagttgtgtatactatttgcaagttaaatacatgcatctccaacaagtgccatgaaactaaccttttgaggttgtcaccataatccttagcatgatgctaggcacaaaatagtttctcaacaaatactggatctttcactcctttacttgagtttcagccagtgataaagaatgctaccactgcaaattaacaaaactgtgagcacagctctccctatgaataatctrttcctgttttgaattattgattaaatttccttcagataaattttactcaatagatttaaagccagaaacaagcagggaggactttctgggagaaagtcaaccaaaacccatgacaaagaggag

SEQ ID NO: 464436 - DNA, 539 bp, Homo sapiens
ttatataaatacaggctacagcagtggttctcagagtaatccctggttagcagcttctacatcacctgggaacttgttagaaatgcagatcttgggcctcyacctcatcctattaaatcagaggctctggggatggggcttagcaatctgtgttaatgagcactccagatgtttctgaagcaggctaacattggagaccactgggctagaaagaccaaccctcctcccttcttgctttgcattatttctttctctttattccacctcattccagaaaggatttggagtggaaaaatctgacttaacaacagtttgtgaataagaacaaaggttttattttacaaaaaaatttctgtgactcaatgatgtgttgtggctgctgccaaaagtaaatagtttgcattaaaagtagtgaccagaacaagggaagcaatagctactcccctcttcacatttgacaggttctgtatatctccatattcttttagaccatatctggagtttgttgaggaactaattttaagaagacattggaaagg

SEQ ID NO: 464437 - DNA, 573 bp, Homo sapiens
tgcctcagaactcattcttgccagaaagggagttgtgagaatttgcaggcaacttgccatcttggttgggctcctttcgtgggcagacatgtaattccaaggaactgagccatatgcctgaatcaagagattcctttgaacccaacaatatttgttgcagagatatctgaatagattagattgaaacaggagtgggtttggttaattggtatgcatagtattacgtcagaacgaccttcctcgtgtttcagtgtgcgtactcacatcccaggatttggtgactacgtctgtcctccccgtttaccttattgaggcagcatggcatagtatgcaatggtatgggcgttgtgacctaagctttcttagtaattcccaattagcttggggtttattatgagggtgaaatgaaataatgtctatgacggccaggtggggagtgcgtgttcaacatgtgttagttcccttcctttgctgtcactgcttagattttgacttctatgtctttgattcctccagtgggaagagctctctcctragttacctgtgaaagtcagttgccaggttgtttttaag

SEQ ID NO: 464438 - DNA, 598 bp, Homo sapiens
ggtgccagcatctgcaggtctaaatagaagtggagatgttcagttcttgcaggcttcctgctgtgaatggcacaactcacacaataatgtagcttcacatacagctcgggaagcasatatgcattgaagacacttgctgcagcctctactgtgttttgaataaagaaattcttaatagccctgtccttgggcacacatgtggctgccaccctttttggcatgatcattgttccttttgtcaccttggaagtgaggacccgaaagagcatggcatctactactaccttccattggccataggtttacgtcatggttaaatgagaccaaaatactgaatgcccatttttctttccagagaagagttcaatttctagaatctaattttctataagacattaatatctacaatgtgagcaatcactattgtgtatagcagctctgtaactcaaacctggattggactatactatctgtgtggccttgggcaggttactgaaacttactgcttgtttcctcatctgtataatggggacaataacaacatctacctaacagggttataaggaaaagggtatgaattaaggggcattatgaaacc

SEQ ID NO: 464439 - DNA, 585 bp, Homo sapiens
ataccacccaaaagatttttggaacctcatttttggtaatgtttatcagaacatttgtaatgatggtccatcttcatccttagatgtttagaaacagccccaagtcttctcatgccatctcataatgtaaactgcatttaagtcacaaacaagatttagcgataatgaaatgagatacttattctggatgggcctcaaaaaccaattytgaagacgatgtttaagcagaaacaccccaaaaatatctttaaagcaaagacatctttattagatgaataaatagcctttcagttaatctttacagaattttagaatttacagtttaggaactttgaaaataaatttttccaatgtccttatttatagaagaagaaggaaacaaatttagaaaagttactttgaagaacaacattcaaattgtaaaatctaatgtttgttttaaaacctctctctcagtggtaataaacaataatgaattgcgctccagtacacatcttgtaaattacattgagtatagtgactttaagccaggaagggtaagatctgggaagtttggactttttaggccaagctaccggttcagat

SEQ ID NO: 464440 - DNA, 649 bp, Homo sapiens
tacaaggtaatagactttgatagaaacaaaggcatgtattagctaacgttcagagacaggtttgccatgatgcgcttgaagtcctggtctttcgcttttacgggccctaagactttcaatctaattttgtatttgaaattttgcttctttttttttttaaaaaagcagtcctcctcccacacacgttatatgtgtttcaggaagacaaagcataggtccaaccatagtctaaggcttattagcaaaaggagcacagctcagcttattcccagatagaaaagtaatgccatctcaaggctagtgactgcaaggaacagtgagtttttggcttcttctttttattctcccctaaaaatggtagaaaatgttgtcacaggtacattaatgaagatttctaagggcagaaatcatttcatacaatagcccaacttgcttaggrgtaggttgtgctgttccacttagtggtgctttgcttgtacgtaaccatcagtttcatcaagggctttgccagtggggcttaggtaatatttgtattttcattaccacatttttcagtcagcatcaccttttatgttgaactctacagaatgtgaatattcaacaaattctgacctacaaaaactgcactttcataagatatcacctaata

SEQ ID NO: 464441 - DNA, 503 bp, Homo sapiens
cacagtgatttttacattctgattgtttaaaaatacgtgtaagaattacaatttgcatttgagcttgttcaagcaagtgcaaacaattcaagtcttataatttaatactgagttatccttccctgcaatttgaagatgaggaaattgaattatttactttgtgtatcagtgcagatatcatagacctgatttattgctgataatgatagtaagtagattagcctctgaatattcaaaatttaaaacacatcttttttaattgttaaaagtctcctaagaattaatgcttgactttgaaaagcaagaaaacatattttggtaagtgcaagttttcaaaaacattaatggagactagtcagaagtattccctactgttataattttctctgcttcaaaatttcagaaactctctgaccccaaatatacatgcacrgtgatttcagataatttcacctatgtgtaaagtgtgatagatagctgtgaatttaggtacattattttaa

SEQ ID NO: 464442 - DNA, 636 bp, Homo sapiens
taaatttaaaaacacattaatagcactgagaatggcacattgttaagtgttcaataattggtttttattacaagaaatttggcaatgatttcataagcaaaatttcccactgatccaagaactcagrtatttttaaaacattcctgagatttttttttgctataaaacctacattaaacactaataatgtggatacttctgtctgttattatgttgctgttagaaacatcacagaactttccaagctgacatgtcttacatctttcctagtccaagcttctggatgtcctgccaagtgcctcaaatcatgactccctcactttgagaaaagatctatttcctattcttctgcttagtgtcttggggccctgacatttgcaaactttattttctatcatccgtctaccaattgctttctgcttagatatggataatgggaagcaaaaccgggaagttggaggactagaagaggaagccaggttatttctgtgccttctctctcatctttgggctgcatttctaacataggctgattctcctccataattccatctctctctggctgaccttctctctgtactcacaacttctgttgggcaaatgcctgccatcatcccagttcccagttgggaccct

SEQ ID NO: 464443 - DNA, 442 bp, Homo sapiens
tgaaaaaattaagtaatgctaaaaggaatataaagaaaaatagcactatatctgccccacccttatcctgccctgctttccaatggcaccagtttttattcttttaactattttttctaatattcaccttcacatttttaaacattctacacatgctgctattcattgtttataaagggtacactgtactctattgatttcctatrtgaaagttggagattctactgacttttgagcccattgacaagatcaaatttacacaaagaactcagaatacgaagaggaaagaaaatttcaggagcattctttggagaaattggtgctgtgactactagcccccttttcacctcaaggacaggaatgctatgtcagtttcaacttgctttgcctcaagtctaaaaacagtaggctccaaagtgaccatcagagggatccacaggac

SEQ ID NO: 464444 - DNA, 632 bp, Homo sapiens
  misc_feature (1)...(632): n = A,T,C or G
gacacattatctttgtttcttatcttatttttatctccatcttatacaatccaatttctcttcccctccacaggctcccaacctaaagtatttcatatttgtaccttcaacctccaatatttttatttgtaccttcaacctccaatatatatatttctatatctgtgaatgtctttaaaatatgaacattaatatttgtgtacatgtaatttacataaatagtgctagactacaaaaattatgttttcgagatctgttcatgtggctaaatatctactttgttcatttcttgtgactgctgtataatctaaatttagcctaaktatcccctggtcctttgctagcacaaataatgctgagataaacatcctcttaaatatctctggtgcatgcttgtgagaatttctatagtgtttagggtctacagagtaatgaatcaattccactaagtgctgctttatagctttctaaggtgaccataccagtccatatctaccagcagtacacgaggtttcccatctctccatagtcccaccagcatttgatgtgcaatgttctaattttttgcacttcagtaagcagtatctcccagttttaagttatattcctgttgattaaaatnnnnnnnnnnn

SEQ ID NO: 464445 - DNA, 589 bp, Homo sapiens
ctggagtaaaactgaaatggttaaaggtgccaacccccagaagaaggctttgctcaaattgtaagaattctctactacagtttttaatcaacaccagagttaattcactccttggactcagaaggcattttgttctttagaaggctttctttctttctccactggctttattgaggtgtagttgagaaattaaaaaaagtatackcagagtgtacaatgtgatgctttgatatacctatacattgtataatgatttccacaaactaatcaacacattcatcaccatgcatactccttttttgggggtgtatttgtggttaggacacttaagatctactccttcagcaaatttcaagtaaataacacaatattaatcagtcaccatggctaaccattagatttgcagaacttatctattatacctgaaagttcgtgccttttgaccaacatttccccacattccccctacaacaacatggatgaacctggaggacgttctgctaagtgaaataagccagacacagaaagactaatactgtacaatttcatttatatgtggaccctaaaaagtcaagctcgtagagagtaa

SEQ ID NO: 464446 - DNA, 528 bp, Homo sapiens
atgggttaccctgtctttctctttcttttcctttccttctgtatcatcactttcggtgtaagtccttgaataatacaggaaagtgatacaagtaagaaagaatatgatagtttcttagtcatgaatgttctagaacatcattgcctcctttctgagatctgggttgaakggaaaatgtggctatcaatgtcccatttactcagtcgtggatataacacattcatcctgcactttgagtgttgctggactcccatgcattgctggtccactggaactttacactcatgggactcttgaatgctatatgcaaatagggcagcaaggcatgccctaaatgcagactgtgtgcagctcctctgctcgtgcttcattgtgttttcagacttcacttacaaaaaagttcaaagatagtatcattaagaatccaaagacggtgacagctagagcatgaaaccaagtgcagggctcttctgcacatggcttcctgtacaatggcactggttataaagccatggaaccagccttgcc

SEQ ID NO: 464447 - DNA, 526 bp, Homo sapiens
gggttaccctgtctttctctttcttttcctttccttctgtatcatcactttcggtgtaagtccttgaataatacaggaaagtgatacaagtaagaaagaatatgatagtttcttagtcatgaatgttctagaacatcattgcctcctttctgagatctgggttgaagggaaaatgtggctatcaatgtcccatttactcagtcgtggatataacacattcatcctgcactttgagtgttgctggactcccatgcattgctggtccactggaactttacactcatgggactcttgaatgctatatgcaaatagggcagcaaggcatgccctaaatscagactgtgtgcagctcctctgctcgtgcttcattgtgttttcagacttcacttacaaaaaagttcaaagatagtatcattaagaatccaaagacggtgacagctagagcatgaaaccaagtgcagggctcttctgcacatggcttcctgtacaatggcactggttataaagccatggaaccagccttgcc

SEQ ID NO: 464448 - DNA, 554 bp, Homo sapiens
caagaaaaacaaactgacaatttaaaatattaaaaacctattagctgagacaatgggaagccaacattagccctgacgtaagaaacgtgcctacttaagggagcaagagctgttataatcagcctaccaattactgagaattagagcaagataccttggaagggtaaagtgattgtaataaaagtgttgtcagagcttaattagataaagaaaacacacaggctgcatgctcatagctttgatatttactctgtccctgtgatcacaatgatgaagaaagcaaccccatcctgagtctcagggtcacctgtagacctgtggaatgtgtrccttgattcaactttttgaagacataaacaacgaaaaataggaggtgtgaatgccagctcattgataatagtaggttttttaattattattatactttaagttctagggtacatgtgcacaatgtgcaggtttgttacataggtatacatgcaccatgttggtgtgctgcacccattaactcatcatttacattagctatccctccccactcccccaacccttgt

SEQ ID NO: 464449 - DNA, 682 bp, Homo sapiens
ttcaagtaacctcagaggttgacattttatttctaaaatgtaaaaataaaaatatgttggaagaacaggaaataaaaatggcaaatgagatgtttttgtgcaacatcaagaattgtttttctaaggaataaaacataaaataygactcacttggtttaaagacttcctttactcctaaaaaagtagtaaagttcaagccatttcttaaagtgtaatgctttttctttgtaaagtattgcgttttgtaccaaaaattttaggtaattatttttatatgttcagtttaataatgtaaaagttgcatacctaagaaattgtgttttatccaaacaattgttagttggggaaagggagggtaaggactagataactttaatcttgcaatatcaaatgaattttactatagaaagttcaacagtaatagtgttttaagggctgttatggattcaatgtgcccaccccattcatatgttaaagccctaatcctcaatgtgattttatttggagatagggcctgtgaagagtgataaatgttaaataaccttggaagggccctaatccaacagggctggtgtttttataagaagaggaaaagatacaagagctctctcattctaccacattaagacacaatgagaaagcagctgtctgaccccatttggtcatcctcttcattttgaga

SEQ ID NO: 464450 - DNA, 614 bp, Homo sapiens
tgtctttaccagcaatgtgagaacaatctaatacacacagctacattccctaatgtcttttctggtcatcttcggtctcaagtagccatgtggtttccaagatggctatgaagggcagagcctttctgagacctggatttacataccaggtgtagagctcaggacagaagatagatctgggaagactgtgcctcgaggatcygatccctcccagaatagccaggaggcaaagctagggcagggaagaaggggccacattggacttgactctgacttgcagcagctggtctagacactgagaaaatgtctccaggcctcatgtccacctatccagaccccctaatccaggggctcaaaaccaaaaagataggctcacagtcaaaccaatcaagtgtccaatatatttaaccaataattttgaagccactcctattttatcaacaattcaaaaactagctggatttaccaaatattatcacctatatataacacatacatagacataacagacacacagacagaagcagatcttatagatttataagattcttcatttgccagttttcaaagtttccctctccacccccatcaacctcttgattacctgtaagttt

SEQ ID NO: 464451 - DNA, 540 bp, Homo sapiens
tctgcttctaaataatgtcaagtctggctgtgagacctggaactgctgtagccgttttgttcccagcctaagaataaaaccaacatatagaggaaagaacccaaacattctcagaagagcagagctggagctctcacatcctgtgcttatgccacttccaagcctcttgttaaagagaacctgaatttccctgttgtccatgccagtgtgagtaggagtgttcagtttcttgcattctaactcatactttgccttccttgggcactcacttcctgtacagcagmacatgccacctggcagctagaaatgtgtcacttgcattaaacattttacagccattgcataaaattcatatcatttgttaagagaaatagatacaaatgaggtagttattttccttcttttcatacatttttattttattacattttgtgaatattatctgatgtgaaaagaaacataaaataatgccatagtagcaatgaatatcatttctaggctataatttagagctacatatcggctaatgtagatataacc

SEQ ID NO: 464452 - DNA, 654 bp, Homo sapiens
aggagaatggagctgtgattctaaaagcagcatttcttctattatattaacatgcttcccataagttctacttcatctcataaaataacaagggaagagtaaatatggtatttttaatgagacctaaaaaactaaagtattgctgggatagtaaatatcagttcaacttgtcaaaagttgttctcagatggaytttaatatgccctagactgtgaattccttgaaaagtaagactgtatcttactcactttgacatccccagctgctgtcacagtttttgttgtattgtaattactaaaaacaaatttggctaaacttttgaactgatcagtaaagtactgtttgatttctaatatttcatatcaagtgagttttgaatgctctactggtagttttttccttgtcattttttttgcaagagctaaagctacaatttaatagaagtccaaatggaaacatcagtattaacaaggtacatttcacaggttcagtgattttgatgtggttccctccacctcctgctcccatgactacctggcaatttacgatggtgccaataccagcgatccccttcttggcaaattctgcggttccaagcgcccaccaaatgtgaagagcagcaataatagtatgctcctggtgttcaagacagat

SEQ ID NO: 464453 - DNA, 654 bp, Homo sapiens
aggagaatggagctgtgattctaaaagcagcatttcttctattatattaacatgcttcccataagttctacttcatctcataaaataacaagggaagagtaaatatggtatttttaatgagacctaaaaaactaaagtattgctgggatagtaaatatcagttcaacttgtcaaaagttgttctcagatggactttaatatgcyctagactgtgaattccttgaaaagtaagactgtatcttactcactttgacatccccagctgctgtcacagtttttgttgtattgtaattactaaaaacaaatttggctaaacttttgaactgatcagtaaagtactgtttgatttctaatatttcatatcaagtgagttttgaatgctctactggtagttttttccttgtcattttttttgcaagagctaaagctacaatttaatagaagtccaaatggaaacatcagtattaacaaggtacatttcacaggttcagtgattttgatgtggttccctccacctcctgctcccatgactacctggcaatttacgatggtgccaataccagcgatccccttcttggcaaattctgcggttccaagcgcccaccaaatgtgaagagcagcaataatagtatgctcctggtgttcaagacagat

SEQ ID NO: 464454 - DNA, 590 bp, Homo sapiens
atgattattcttgagagttggctaccaaggattaataaggggcccttatgtatacttttagagtcatttctgatctgagtgacgcttacatgggtctgttaatcagtgaaaataaatcaagtttaagtgtatgatttatgcactttactgcataaaatttatactatggctatgcaattttgcaccttaacattgtacaaagtgcaaaacctacattatcttaagtagcccttgcactgaatgcctgatagtagtatatctatgcaattttttttgattagtgtcaaatttcagtacgttttcctttatttttactttcacctttttaatgcttatatgctcttatgagcatattgttttttatgccagtatcacagaatattttacgatttctcttgaaagtactcagttgatatataacaygttcattaaattgattttggcttgtatgaactgatttagtatctgtgttctaattatttcacctgttttatgttcctctatgtcgtttcttttcttcctttgacttaagaattttaattacccccttcttaaagtggttgaatgattcttcccaatctgtaacttct

SEQ ID NO: 464455 - DNA, 580 bp, Homo sapiens
gatttgttgagcaggcactacttggcaagacctcattgagttcttgacttttactatgctatttaatattcttatctccatttcatatatggagaaactgagacttggattaagtcgtttgttcaagatctcataagagggagaatcagcatatgaaacttttaaatcttggaatgttgtcaagtaggttttcaaccactgcactagtctgactgcctggagaggatgtgactatcacggtaattatagtttcgtgggcattatacgatgacacagcaaagaagaaaaggatcatatgtttttattacaccattaaaattcaagtttcattcattaaaattcacagtggttcatgcctataatcccagcatttttgcaagccaaattgggccgttcacttaaactcatgaatttgagaccagcctgggcaacatggcaaaaccacatctctacaacaaatagaaaaattagttgggcatggtggtgcccatctgtagacccagctactctgcaggctgaggtaggagcatgacktgagccagaaagtcagaggtttcagtgagctgagattgtgctatta

SEQ ID NO: 464456 - DNA, 548 bp, Homo sapiens
tatggacatatttgaataagtaaaatcattgataattgacatagtccacatgattctgccaatacaaagtgaggaattctggtaacacttagttattaatggacaatttgtatttttattttttttcaggccattattgagtaataaatttcataattccatcctaggagtattctgatgtaatttataaacccctcaatatatcagtattacttatttttaagctacttgattctagaaagcaaaaaataactcaataactttcaataagaatagggatttcccactaaaggataagttcgactgtaatagacattaattgtactacttgagaggaaatgtgattgttaaacataaacctaaaactgataactttgggratactcaaaacatcattacaatccccagggaaaatctttgaaaggtagaaccaaagtgggatgataacttgcttaactgaacctgatattttcttctctgagaaaagattgcaaagtgaatgaggtggcagtgaatgaagcacagcaaaatgaagctattaagccctg

SEQ ID NO: 464457 - DNA, 531 bp, Homo sapiens
  misc_feature (1)...(531): n = A,T,C or G
nnnnnnnnnnnnnnnnnnnnnnnnntttcaaaatggagtcaatcctctcaaaccctgcactgctttatcaatgaagtttacgtaatattctaaatgctttgttgtcattttaacaatgttcataaaatcttcattggttagattccatctcaagaaatcactttctttactcacccctaatatgcaactccttgtcatttcaagtttcataatgagattgcagcaaatcaggcgcattttcaggatctaattcctaattccggttctcttgctatttccaccacactgcagtcactttctccattgaagtctgaacaccccaaagtcctccatgaagattggaatcaacttcttccaaactcctgtcaatattgatattttgaactacacctatgaatcaccaatgttcttaatggcatctagaatggtgaatctgttccagaaaattttcgatttacttttcctaaatctgtcagaggaatcactatctatggcagccatagtmatatgaaatgtctttctataataaaa

SEQ ID NO: 464458 - DNA, 432 bp, Homo sapiens
gaagaagtggatgatttccaacatttttatactttgatatgaatgacaatggttgtgaccaatgattaactagggttcctcctatcatactcttgctcattaatattagtcaaaggaaaacttcagaaatccaatggagacragattgcaagaaatatgatgctgtgggaatatcaagtatagtagatatcacagtcaaagtgttagaagatgccaaggaaaaaagggaatttgtaaatgtacaggacacaaataattttacatcatcatcaagggtagaaacaatatgggaactatattcttattctttgttactcacttattattttcatctctgttttactccatgatcttatataaaaaccattatgtgcggctgacgtttaattttcaggtggggatatggctaagcaaatatcatcatacattaat

SEQ ID NO: 464459 - DNA, 495 bp, Homo sapiens
ttgccttgcagtttgagtatcagcttggccatagttcagtagagtgccaagtgggatcctggagttgccgattccagaacttggcttctgggtggcatttctggacccatcaaggattacagggcagcccacctctctgatgggagagacccaggcttggcagaatttataataagtggattgaagagtccttagcccttgagagaacatcagtggtagccagcagtattcacaatggggtagtggtggtcaggggagagactccttctgcttgagaagaggtcagagaagagtgggaaggactttgaagatgggatgcctgctcagccacagtagaatggagcaccaaggcaakttctaaggtttttatttcaagcactgactccaagatgatatttcttaacctgccttgggccaaagaggaacttgccaccattaagggaaagacaggaacctagctggattcatcatttgctgactgaagagccctagggc

SEQ ID NO: 464460 - DNA, 495 bp, Homo sapiens
ttgccttgcagtttgagtatcagcttggccatagttcagtagagtgccaagtgggatcctggagttgccgattccagaacttggcttctgggtggcatttctggacccatcaaggattacagggcagcccacctctctgatgggagagacccaggcttggcagaatttataataagtggattgaagagtccttagcccttgagagaacatcagtggtagccagcagtattcacaatggggtagtggtggtcaggggagagactccttctgcttgagaagaggtcagagaagagtgggaaggactttgaagatgggatgcctgctcagccacagtagaatggagcaccaaggcaagttctaaggtttttatttcaagcactgactccaagatgayatttcttaacctgccttgggccaaagaggaacttgccaccattaagggaaagacaggaacctagctggattcatcatttgctgactgaagagccctagggc

SEQ ID NO: 464461 - DNA, 495 bp, Homo sapiens
ttgccttgcagtttgagtatcagcttggccatagttcagtagagtgccaagtgggatcctggagttgccgattccagaacttggcttctgggtggcatttctggacccatcaaggattacagggcagcccacctctctgatgggagagacccaggcttggcagaatttataataagtggattgaagagtccttagcccttgagagaacatcagtggtagccagcagtattcacaatggggtagtggtggtcaggggagagactccttctgcttgagaagaggtcagagaagagtgggaaggactttgaagatgggatgcctgctcagccacagtagaatggagcaccaaggcaagttctaaggtttttatttcaagcactgactccaagatgatatttcttaacctgccttgggccaaagaggaacttgccaccattaagggaaagacaggaacctagctggattcatyatttgctgactgaagagccctagggc

SEQ ID NO: 464462 - DNA, 616 bp, Homo sapiens
catttaaatctgatagacaattttaattttagggtaaataggactttaatactaaataaatctgtttagcagggttctttattttatatatttattttaaatagaaggtgtgtgagaagatgacagggaccagagcatagtttttaaatcyagaataatttttacattacaaaagacaaaacataatgaaactaaattccatgggaaaaacttaaaagaaaattaactgatgatgtttctatgaaagatgtaacaccagtgagtgaggacaaaccagcaagagacataagacctacatgacatcagacagaggttgcttaaaggacgtgttactttttcttgccccagaattggtttaatgctctgccatcactttaattctttattgtttttgaacaaaagttttcacatttttcatttttgcaccaggcctcataaattataccagtcctggtgtcaaaatctgtaaacttgtacaggagaaaacagcagctgacagatttggcaaaataattcaaaataaccaacagatatttatgagacaagtatgttggagaacagcagccgaaacagggataagttttaccttttccagtagtgagttagtgcacggggc

SEQ ID NO: 464463 - DNA, 616 bp, Homo sapiens
catttaaatctgatagacaattttaattttagggtaaataggactttaatactaaataaatctgtttagcagggttctttattttatatatttattttaaatagaaggtgtgtgagaagatgacagggaccagagcatagtttttaaatccagaataatttttacattacaaaagacaaaacataatgaaactaaattccatgggaaaaacttaaaagaaaattaactgatgatgtttctatgaaagatgtaacaccagtgagtgaggacaaaccagcaagagacataagacctacatgacatcagacagaggttgcttaaaggacgtgttactttttcttgccccagaattggtttaatgctctgccatcactttaattctttattrtttttgaacaaaagttttcacatttttcatttttgcaccaggcctcataaattataccagtcctggtgtcaaaatctgtaaacttgtacaggagaaaacagcagctgacagatttggcaaaataattcaaaataaccaacagatatttatgagacaagtatgttggagaacagcagccgaaacagggataagttttaccttttccagtagtgagttagtgcacggggc

SEQ ID NO: 464464 - DNA, 549 bp, Homo sapiens
taaatcagtttatccggggcttctcctatatatttagcagtacaacaaaatctcatactttgttttcacatgtatatattcaattttaaattgaaatgtctcttcagattatcaaaaatgtctgacattgcatggctgttttctatcacatttctgtaataccttatattttatttttgacaattgactaattcctggatatttttctagctygttaccaaaattcaataattcagcactttttgatgttacattgaaagaagaaaatggacagagaaagaaaaagaagcagaaataaatagatgaatctaccattttttaactgaattatgttgaattataatttacaatagagccagggaatgtatccaattatgcatgtggaggaagataatataaattctgcttatgcaacttcttgtctgttatttagttctgtggtatgagacttatggtgctgtcttatgtcctataattatttataatttataaacatagtcgttttcattaatctaagtttaaggaaactgatgctagagtgagaaaaag

SEQ ID NO: 464465 - DNA, 574 bp, Homo sapiens
tttgaactgaattgcttaatgtgttgttgtaaaaaacaaaaaggcatataacctaaggtgaccatgatttaatagttcagtgccacaatccacacagagagcagtaaaactagacatttcctgcctgatgatgactagtgatgtcattcagggtaaactattaatttcttttgatgccaaagttcaggaagcaccatgtgttttaatgttgactaatactagctttgggggaagtttcctaattaaaggctcagacagtgagccttaacatttagcaataataataatgacagctctaagaaaggagaggaaaacataaaatataatttcattatttttcacagtgatctattcttaattattcttaccttagctaattacaacatatactcaaagatggtaataaaaaattaatcagcaagggctgtataaaaaaccagaaaacaatcagcataggctgacacaaaatgagaaaatgagaacttgacctggaaattgaaagataaaagaaaacaaaaaacagcaagkcttattgagtgaaaatggcgaatggaaaaacataatagcatattga

SEQ ID NO: 464466 - DNA, 569 bp, Homo sapiens
agatgtgaatagcacattcttccactctggcttccccatatgcatatagtatttgatattagtgatgcagtactttttgctccttagttcagctaaaatccaggttattgtctcatgacaggaataattaggcacgcagacatattgaaagatgaggagggtggaatttattaagcaaaaggaaagctctcaagaaaaagaggggttctgtaagcaggtttccacctcacaaagtcaaataccagaccaccaacatgagctgaagaggctaagctccttgtgcataaggcacaaattcctggtgacttcaccccattcttccagtgcacatgtgggcttttagtctgaagtgctccccattgatttatttcctttactgcacatgtgttaagggacggaatgtttcaccatgcacatgtttagggaagctccctgtgctcaatgacctgggggattagagcttctccagggacccttccttatctgcttargcatttgactgtcttctgcctctatcattctccactctgaagaagtacatctaactgccattaggataaggataagga

SEQ ID NO: 464467 - DNA, 543 bp, Homo sapiens
tcctactatgagataaaggaaaatgaagtgcaaaaacgatgcaagcactgaaatatgtgaactaatttggttgtaacagtagagagcatttctcaatctgcacactgaaagcatgtagggaacctcaaaaaatactctgtgtccatctcactacaattccagtttgattgttctgtaatgagagttcaccattagtatgtttcaagagctccttcagatgattctaatatgtggtcagggttctaaaaacaactgaactgacacaatccctaaatagtcctgaggttaattcctctaccttcaactatatttatttctttgcttcgtctgattgtgtcatttataaaatagtaagtattcataacagagtctctgaaagttccttttagcatcaacatagtataatcaacaatgctttgctctcttctaccacttttggtcttcagtgtgatctgattaatgaactgataaytatttctgtcactaaaggttgttaactctacagtatactattttatgagcatggtgaaataaattatcatg

SEQ ID NO: 464468 - DNA, 519 bp, Homo sapiens
agaacccttacctgaactcaatcatgctggcaccctcattttgaacatctatccttaagaacagtgaaaaataaatttctgctttataagccacccagtctgtggtactttgtcatatgaaaccaaactgacttatccatcatagtaattaagttatgggatatgaagaaaagcaaatgtcactcaatgactttacctcctttttagagcaggtggtgatacattttccactgtacacaagatagatgtatcaagttaggagattcagacctagctattgtcttcatttggagattgagtatgaaagagatgcatatgggtggttaagttaacamgggatggacttacaatgttgatttgtcaattttactgggccacatggtactcagatatttgcttaaacattgtgggtgtttctataacacctggataaggagggattccttctgtctgactaccttttagctgggacaccaggttgttttcttttcttttccttttcttttcttttcttttatt

SEQ ID NO: 464469 - DNA, 575 bp, Homo sapiens
aattccatgtgaagatttatcatttttactgatcagtcctatggagccaaagaagattttgaaaaacaaacaaacaaaacaaaccaataatcttggctttgtgtataattttctaaacagataaatttttcatctgaaatacaacatttcatctatttaatgttgtaattcttaagtggcaattttactatctaaatttgcattcaagtataaaaacacatcaaccattttttttaaatttattcaatgtctctctcaggataggatatgttatactgtggtgcacaaagacaaaatcttagaagattaacaccgaagacatttggttctgggttacagaaaatttgctgcaaaactgcaggaatctctgargcagtttttttccctacctaatgactcactctgtatttccagctgtttcagtttattgcaacttcatttgttaccaccaggagggaagaagaggacatgggtggagcaatgactctttaatgcttctatcctgaaatgaccaacaccagttcctttcacttttcattgaccaaagtctcaacttacttcaataggtatatgta

SEQ ID NO: 464470 - DNA, 636 bp, Homo sapiens
cataggtgggaattgaacaatgagatcgcatggacacaggaaggggaatatcacactctggggactgtggtggggaggggggaggcgggagggatagcattgggagatatacctaatgctagatgacgagttagtgggtgcagcacaccagcatggcacatgtatacatatgtaactaacctgcacaatgtgcacatgtaccctaaaactwtaattaaaaaaaaaaaagaaaaaaaaaaagaagtttgtctttctgttcctggcttatttcatttaacattatgacctctagtttcattcatgttgttgccaatgataggaccgcattcttttttatgactgaatagtacttcagtgtgtatatgtgccaccttttctctatccactcatctgttgatggacatgcaggttgcttccaaatcttggttattgtcattagtgctgcaagcagcacgggaatgcagatatcactctgatatattgatttttttccttttaatatttatccagcacaggattgctggatcatatggtagatttatttttactttcttgaggaacttgcagattgttatccacagtggctgtactaattcatattcctcctgagagtgcttgtgggttaccctttcctca

SEQ ID NO: 464471 - DNA, 636 bp, Homo sapiens
cataggtgggaattgaacaatgagatcgcatggacacaggaaggggaatatcacactctggggactgtggtggggaggggggaggcgggagggatagcattgggagatatacctaatgctagatgacgagttagtgggtgcagcacaccagcatggcacatgtatacatatgtaactaacctgcacaatgtgcacatgtaccctaaaactttaattaaaaaaaaaaaagaaaaaaaaaaagaagtttgtctttctgttcctggcttatttcatttaacattatgacctctagtttcattcatgttgttgccaatgataggaccgcattcttttttatgactgaatagtacttcagtgtgtatatgtgccaccttttctctatccactcatctgttgatggacatgcaggttgcttccaaatcttggttattgtcattagtgctgcaagcagcacgggaatgcagatatcaytctgatatattgatttttttccttttaatatttatccagcacaggattgctggatcatatggtagatttatttttactttcttgaggaacttgcagattgttatccacagtggctgtactaattcatattcctcctgagagtgcttgtgggttaccctttcctca

SEQ ID NO: 464472 - DNA, 589 bp, Homo sapiens
atattaacacgtttttacatttatattaaatacaaaatgaaaatctaaaatataagcacataatagagaactgggtaaacctgggtaatacatctacattttccaggagtaagcatatgcctttacgcgaataaacgaaagccaaataaatttgtataaaaattagctctgcactttgctcactataactgtttttgcatatacccagatactattcaaacatatacaagtcaggggcctcttataaagtctatcatcatgaacacttaggacactacttgaactacaaagtataaggaatgttttagaaatatcattacattttagaacattctctagagacttgaatagtataggtttgtatcattataactgaatgcagatttccagtagaccttccacactgatctcagatatctaaaaggagagggatttgtgccatttaggcaaaaggggattaaagaagtgacagtaggaaaaactgaaaataaagaaatactccagcctgggtgacagagtaagaccctgtctcaatcaatcaatcaatcaatcaaggattrtggtagtgctataaaccacatttgtataa

SEQ ID NO: 464473 - DNA, 635 bp, Homo sapiens
gtaaacatatgagaatcaaaataccaaaactttaaaattcaaacaaacaaacaaacaaacaagcaaatggaaatctgtttcctgcaaagtatgaaatattttaaatttttctatccaatttcttcaaaaaaccaagatggatctcttcttaaacctatacctcttcaaaaattggccatattgaaattaaccttagaaaatgtgtgtctcactatctctcccytctaaacacacacacacccacacacacacacacaaaagcatataaagaaaacatacttgtgtcttattatgcacaggataattgctaatgtaataggcaattatattcagaaatgatttgcatattcacaatgtaaaaatgctgttatgctgtggatatgcaatgaataattaatcagttacacttgaaacaatacctatgaaacacacactggtgtttagcaataatcatgaaagaatcattgcaaatatgtatgtgaaatagattacaaatctatcattaaaattgattcagcaatttaagatatttgatttccacctaccaaattattaaagagataaactttactaggtaacccatggttttggttgtagatcatatgataaaaaggataaattatagatttgaaaag

SEQ ID NO: 464474 - DNA, 518 bp, Homo sapiens
aataaaacaaacgttttaacccacaaaaaagagtgagaagatgaaaaaaaatgatacactgactaaattagcagaaaggctacagccaaaacacaaatgaggggatataattatgaaaaaaaaattggactagcagaaatactgagatgctctgggtttaaaaagcatctgagaatctgatactaaggtgggctctggaaacamgattagctgacactgagagtctctctcccaactcagtgatccagattattattctaactcctcactcagctttacaaacaaacaatttccgaggtttgttttcaggagtgaaagaatctcatgagcgcctgccttaaggataccaagctccttgagggtcccctagcgaaagcctagttgccatcctgcaaccctgtcatagagctccagtcatcatggcccatccttgtatggtcagtttccagtcagccttcttagttcctctccgttaaatatgatcaccccacatttggcagaaagactccaaacgagag

SEQ ID NO: 464475 - DNA, 399 bp, Homo sapiens
ataaggttatatacttccaatttttaacaataatagttcttatgtgtcaattaaaacttccattgaaaatatttttattggggaatagagaataaattttaaaataaagtaacaattgatgagatttgaaacctaagtataaaggttttatgtcttagacctgtgagaattgaggtgtgtgagttgaaaaaaattctataatttttatttccttatctgaagtatggaaatgaatatacaaatattctatccaggctaytgaaaaaaatgatgaaatgaatagaatgagttaatgcttttgaacccatttgaacaatgaattcacatatgtggtaaaatggccacatatacaaatactaagaaaaaagagaaagagagagaggtgaggttttcccacta

SEQ ID NO: 464476 - DNA, 535 bp, Homo sapiens
  misc_feature (1)...(535): n = A,T,C or G
nnnnnnnnnnnnnnctattaatttattcattctttcgacaaacatttattgagtactcatgtgcatggtgtcatgcctgtgactgagaacacagtgaccaataaagcagggtaccaacagttcatagtttagggagtctaatctggagatataattcttgcatattatttagtcaaagaatttttacatatattttagagacactgaaaaataagctgctaaacaaacattaaaaagtgttattgttaggcctgtagaagtttcccatgccaacaatctaagaaaagtgttccctaaacctcaccctataaattccaagagaaggtcactttcagggtttgtccgcaggtgtacgatcaacatacccattaaccacatagtaaaatmttagcccttttgcccaacatcatttgtcctctatctctaggctattaaaggaagagaaatgggaaagaaaagctgtttcaaatatcactagagctccactgcagttcaatttcaggcctttgtgtaggccatcttgctatggatttct

SEQ ID NO: 464477 - DNA, 535 bp, Homo sapiens
  misc_feature (1)...(535): n = A,T,C or G
nnnnnnnnnnnnnnctattaatttattcattctttcgacaaacatttattgagtactcatgtgcatggtgtcatgcctgtgactgagaacacagtgaccaataaagcagggtaccaacagttcatagtttagggagtctaatctggagatataattcttgcatattatttagtcaaagaatttttacatatattttagagacactgaaaaataagctgctaaacaaacattaaaaagtgttattgttaggcctgtagaagtttcccatgccaacaatctaagaaaagtgttccctaaacctcaccctataaattccaagagaaggtcactttcagggtttgtccgcaggtgtacgatcaacatacccattaaccacatagtaaaatattagccsttttgcccaacatcatttgtcctctatctctaggctattaaaggaagagaaatgggaaagaaaagctgtttcaaatatcactagagctccactgcagttcaatttcaggcctttgtgtaggccatcttgctatggatttct

SEQ ID NO: 464478 - DNA, 582 bp, Homo sapiens
atttaaagatgaacagacttctcaattttctccttagcatctgggagattttcacaggggtaagaataattttcccctactgcctcctgtattcctaggttatcattctggtgtacagggtcccaaagcattagaaaagctagttccttgcaccaaattcataaatttttccagaggctggactgacaactgatatccaactgctcaaatgggacaattgcattttgcatctttccccctcctcagtcatgggcagaggtggtacctgtgtgagagactcacctccttggggcaaaaggttatgttaaygattgagcagaggaactttaaaaatgatgctaaggtatggctagtttacctctacaaaatattacctttactcaagtatctggagatcaaatggtttgtgtgccactcaaaatcataatataatagaattgtgttcttttggaaaagacttgatggattttaaggaatctctttcataattgtctcccatgcaaccagcttgactttattcctctgttgtccccagcatgtccactctccaggctgggctctgctgactaaccttattttgtc

SEQ ID NO: 464479 - DNA, 428 bp, Homo sapiens
gcaagtctgacatatgtaagactatttggtcagatcacctaagttttatgaagaaagctgcgtggtgggggccctcaaaggaaaggcagggactaatgtttccccccacgggcatgctgctctgcccttgctgcatgggagtcccagcctgcaattcctttcccccatttgatgccttagggaaragcatcctattttctgtcagcatctgctcaggagtaacctcctttatgagaccttccctaatttttaatattttgaggttttctaccactcagcttccagagtctcagtagcatctctagtagtgggctcatctgatattatgtacatatctttcccctatccccttcttctgactaaaaaataaggaaatatttaaaaagtctatggcccccttagggcagagattgtatcttattcctgtt

SEQ ID NO: 464480 - DNA, 522 bp, Homo sapiens
ccctctgtccttccaagcggaagacccacttcatctcccctgcttcctggattccagaccacagggcttatcccaggagccccaagagattcaggtggcctgatgatgagaacccttaatccagcactcgctgattttaggattagtaaatcttggtttaagatgctggggagaggatgaaagatgaggctagtgaaaattatgggatacaaattttctaatgacgtatttccttaactgcctcgggtcgcacatctgggctaacaaagagaactatacagtcccagaaatttatagatagaacagttctttagggaactttactgaccttctttcttctcccatccctcttcttcaccaacccacaagattaragagagaagtattccttttgctcatttttttcagacggaaagaaggcctcattattgataccgttgatggttcagaggtgagaattaccacaaatattacacacaagattaagaggttagatttgcattcatcaccaatctcagtttc

SEQ ID NO: 464481 - DNA, 589 bp, Homo sapiens
tcatgtgactgtgaccagagttcctgtccttcaacaaaaatgccaaagtaggactctgtggagcccagcagaagacaacactgcctagtggacaaggcagtacctcaacaaccccctggcattagctgggggtgatcactgattgaacattccagcacatgtgaaacactctgtggaaattcccgtgttttctttaaagctaggactttggagtaatttgatgttctatatagaatgatgagagaactagccagagcaatattggcyactcataatttttatatagatatttgccctagtctcttaggctgctacaacaaaatactgtattctgggtgggttctaaacaacagaaatttctttctcacagttctggaggctgttaagttcaagatcaaggctcaggcaaattctgtagttggtgagggcttgctttctatatcagttcatagttagcaccttcttgctgtgttctcacttggtggaaggattgacgggtctctctagggcctcttttagaaaggtatataatcccattcacaaggcctctctctacatgaactaatcaccttcctcataacatcacctt

SEQ ID NO: 464482 - DNA, 618 bp, Homo sapiens
ttaaatttatactagattatatattttaagtaaattcttttttaaagttcatgctcatgtttttattatgtggttaacttggtaaaagaaaaattccttgctggattatattttgcatgagtctctcatttctgagggaactactctaaaatgctcatcatacaccggcaccatatccctgagagtcgacagcttgaaaataagatgagctgggttaaatcattgccattataattacatataagagaactgctgattccacatttgataatacattgactctggagtaaataacagattataggagtgaaacggaaatggttattcatattttgttggtgaggcagttttgctactgactttacaaaagagcttagaagctacagaaaaaaagtgttccatagattgttccaattatttcctatggagacccactgtaggaaattaagtgaaaaaagttaacctttcttagatgggtcgtttaaaaaacctcaaaarcaaataacttataagtgctttagattttaaagttacttataaaaatgttcgttgtctagtttattttcatatattatcttttcctatattactgttgcttaaactcttataaaatgtttt

SEQ ID NO: 464483 - DNA, 630 bp, Homo sapiens
catgctttagctttttaatctcttgtggcccattcaaattaattaatgtttatcaatttgtcctctgaaagtgactataaaaataatatcaatatatacaggcatatgttacaatttattattcaacattccagtttttttaacaaaaaacaagcataacataattccttgtaatccacagttcaccttaagtatgtatttacatctgtgtagccttacatcaactagtttataattttatgatactgccatgtctatatgcatgtggtgaaaccagatagaattgaaagttytaattgctttccttgtcaggatttcacaagacagtcttggattccaggagtcatgtcctgattcctgctattcacagggctatgtgaaagaagattgttaaactgggccaataaaacaaattttgtacacaagcacagcttttgtttactctgaaagctcactgagtgtcatttttgtttttgctatcaccttggggattgtgcatctccctagagaaatgttgcgtgagtaggggctataaagagttaagagaaaacagaaagtgagaaatgagagggaactccagtccctgcggcttcctatttactttgcttttaaaaaaattcccctagtctt

SEQ ID NO: 464484 - DNA, 574 bp, Homo sapiens
aattagactccttttgttcttttactctttccttcccttgaatccataacccagctctgtcaaagtcaaataactagcaagtaacatgaaacaataaagcatcagccacgtgaaacttctctaggaaaagaaaagtagtgggattcggaaccatgtcaaattactttcagagacccttgaaaggtattttttaaaggcatatcgttacgaagtaaaagaaaaagcaagaatgaacataaaaacaagaaaacagattaggaatcttaaatagttatagatttaccaactgaatatgaattttggcaacagtgccctgcaaccatgtacattttcttttaagaataagagagggagagaaaggagagaaacaaagagagagagagagagagagagtgagaaagagagagacgttactgaccaaygtacaaagactttggcaacacaatactttgccctgccaacaaactaattgaaagatagaaggatgagagtccaaaaagtctaattttctttttgtgattatgttttatcaagtcatttgctttcacccagaattggagactgagacagcttg

SEQ ID NO: 464485 - DNA, 574 bp, Homo sapiens
cccaaaactttgctgaattcatttatcagttctaggagctttttgggtgagtctttagttttttctaggtgtacgatcatagcatcagcaaaaagcgacagtttgattttctctttactgatttggatgtcctttatttctttcttccccttggctgattrctctgactagaactcccaatactatgatgaatagaagtagtgaacatgtgcatccttgtctgtttaataatgttggctgggtgtgtgggcatagatggctgttattaccttaaggtatgtcccttgtgtgctcgttttgcctagggtttaatcacaaagggatgctggatttcgtcaaatgctttttctgcatctattgagaggatcatatgatttttgattttaattctgtttatgtggtgtatcgcatttattgacctataagttggcttcattttggagttgatttctaattctattttactgtggtctgagcgagtatttgatataattttgattttcttaatttaccaatatttgttttgtggcctatcatatggtctatcttggagaatgttccatgtgctgatgaa

SEQ ID NO: 464486 - DNA, 574 bp, Homo sapiens
cccaaaactttgctgaattcatttatcagttctaggagctttttgggtgagtctttagttttttctaggtgtacgatcatagcatcagcaaaaagcgacagtttgattttctctttactgatttggatgtcctttatttctttcttccccttggctgattactctgactagaactcccaatactatgatgaatagaagtagtgaacatgtgcatccttgtctgtttaataatgttggctgggtgtgtgggcatagatggctgttattaccttaaggtatgtcccttgtgtgctcgttttgcctagggtttaatcacaaagkgatgctggatttcgtcaaatgctttttctgcatctattgagaggatcatatgatttttgattttaattctgtttatgtggtgtatcgcatttattgacctataagttggcttcattttggagttgatttctaattctattttactgtggtctgagcgagtatttgatataattttgattttcttaatttaccaatatttgttttgtggcctatcatatggtctatcttggagaatgttccatgtgctgatgaa

SEQ ID NO: 464487 - DNA, 508 bp, Homo sapiens
cccgagtggccaactgatattaattgaaattagtgtttacaaggcacattcacatttgttatattttaggatgtagcaaccttattaactagttgttattgtctaaaattttcgtaaaaggaaaacaggtcccagagaggtaaaaaactttccctgaagtcacaaagctggtatatccaaggctttcatattcaaaggcatctttattgtaaaatgtgacagagttgtgacagacaggctttgaggggtcctccatcatcccttccttcttgttgttcatgcccttgtctaaacttcacttgaggagtctgtgggcaggactcatratgtacttctaatctacaggatatgacaaatgggatgaaatgtcactcccatgactatgttgtcttactagcagatgactctttcttggtagcagatttgctgaagaatccgtctctcctcattgctggctttgaagaagcaagataacaaattaattaatctcaaaatgtaagaaaatgga

SEQ ID NO: 464488 - DNA, 601 bp, Homo sapiens
ctattttgctgaataattgaagtataagggcttcaatcacatcttctacttttcctacgtaatgagtcccactctacctattcacattgcaggctatgaagaaaccatgaagaagggctagaccatgaaggacaggaggagggaaagtaggcaaggggtgttttgggctccagctgggatcagagaaaaagagacacaacattgagtctaagctctctccctctagcccactctggatattttgttacaaccagaaggataagaagaaggatgaacaaaataaattatgctcttttaagatagaagtcagattcctctattttctaccaccaatcagctctaagcaaaacccagtgctgatgctgtatgtatttcaaataatctacatttagactttttttttttwaaaaaagcctgattttaaaaagtatgtgttaaatgttttcattctaggattccgttaaagggtatctatagatgcatacccacaggtaaatttgccttttgcatataaaactaaaaagtgtatcctatttgttttaggagctgtaaatttaattaaagggatactatttaagccaattacaacactataattaag

SEQ ID NO: 464489 - DNA, 586 bp, Homo sapiens
taaatttgccttttgcatataaaactaaaaagtgtatcctatttgttttaggagctgtaaatttaattaaagggatactatttaagccaattacaacactataattaagaccaggggtcttatcttggacgtattcattcattcattcattcagagtttcattaatccaactattatttactgaacaactactatgttctacctgctgccaacatggcttagaccagagcttggtaaatctacagcttcaaaagtcaaatcctgtccactgcctgcttttgtaaataaagttttagtggaacataatcataaccagttgtttacatactgtctgtggctgtttttacaccagagaccatgtgggctgcaaagatgaaagtagttactatctggctattacaaaaagtttatgatccctggcttacaggataagagatattgtgcctragttagttatctgatttgaataatgaggacataagtgtttacctggtgagacttatattgttcggtgtacataaaagtgatattttaaaatatgaagtaacaagaactatcactcattgacaactcgtcaatgagtcag

SEQ ID NO: 464490 - DNA, 567 bp, Homo sapiens
aggatttgttattagaagcaatattttctctcataccaattacatgcaaccaccagcttttgaaagacaaagtaagttgccgccagaatgacccacaagttcctattttcctttttgtctcaaggtcatgttaaaaaacatattcggccttgtatggctacttttgctattttctagtgttactgttcatatgtcctttctcyagtttgggctgctatagtcctttgaagccttgttatttatttatttatttatttattgttgttgttgttgttgttttctatcaacttcagattgaactggcttccttctttcagatggcactcaccatgtcaatgataacaatcaacaaaagacacccatacacccaaagcttgcgccttactgaccaaaacctaatagtctacttgtactacctgccaacattcttaaaaatacacaacatactcatccctataagctcacagcagcattttcactaaaggatgaaatcctggaacatttaattatcttgaaagcaaatggtaattaaacacttttcctaacactgggaagctggggtggtga

SEQ ID NO: 464491 - DNA, 589 bp, Homo sapiens
ttttgggaattctttgtaaaaaaaaattttaagccctgctacatgtaagcagggactttgccgtcctgaccackgttttcacagtgattacaacagtgcttagcataaagggactgctcaacagatatttaatgactatcttaagaaatactgcagtgtacttggagaccatggttggtaaacactgccctatgacttattagagcgcctagtgagtaaaaaccttccatttcttcataaaatgaatgaaatgggtgttttctataggcaagatataggaacttatgtggttattgagtcactaaatctgaatttagtgttaaaataaggcctctgcttacctgtctagtcccattgtccataaattcctttccaatcctttttaatcatttgttcattaattgatctctcacattttttaatttttacctgctcctttttctgcaataaatgtctttccccacttcttaagctggctagatcctctttatcctttaaggatctgtttagaaatattttaacacaaaattctgtatgagaacatcatacagatccctcaatgtcaagctgttcaaagtcaaatgagtgt

SEQ ID NO: 464492 - DNA, 468 bp, Homo sapiens
gtgttgtgctaaattgcagtccaacaaacaccgcacagcaatatcgtacacgctctgaatgaggaagaaggagaggcggcaactttcaaaatcaggttttctgtgtttccttacattttctcgcaagcctttaatgacatttttgaaggtggctatggggacatcaagtgtcatcaccagcctattcaagtcttgccacagagccatggagatataccccagggaagcccagccaagtgtcaggcttataaacaycaggcaggaatagatacctacgaaatgaaaagggtcaggtgatccctccctctcctcccatgtctgtgcctctctttgcagctgccttgtccctaaaaatcatcgctccacttattttgtcgaagataaagccagacattagttaaagcagagaaaacagattttattcagtaactactgatagtagagaacggggctgagctgtgttcccat

SEQ ID NO: 464493 - DNA, 596 bp, Homo sapiens
tgcagtaaacaagctctgacactgtgatttcatccccaacccaaccaatcagctttgcacattccctagccccttgcctgccaaactatccaaaaaaaaaaagaaaaagaaaaaagaaaaaaaaaaccctagtctttgaattttgggggaggcagatttgagtaataataaacccctgtcstggtccctcagctgcctctgcatttattaaattctttctctattttagaaagcctgctgttctcagctccattggcttacctgggcaatgggcaagataaacctaccaggcagttacattaataaaagagaaacacaaatggtaagcatgcttgaaaagaaatataagtctgtgtatttctttggaagaaacacaaaaggaggaggaatgataagacaggcaataaatacactgtcctaaatattttcatgattctcctgcctccttcgtatccttcttatcccaacaacttctccccagaaaccttcaacttaaacatggtcctgccagaactgggtttgtccttccctttacattttcctctcacctaccctacaccccttccatatctaatctgttctttaacttccaggtc

SEQ ID NO: 464494 - DNA, 596 bp, Homo sapiens
tgcagtaaacaagctctgacactgtgatttcatccccaacccaaccaatcagctttgcacattccctagccccttgcctgccaaactatccaaaaaaaaaaagaaaaagaaaaaagaaaaaaaaaaccctagtctttgaattttgggggaggcagatttgagtaataataaacccctgtcctggtccctcagctgcctctgcatttattaaattctttctctattttaraaagcctgctgttctcagctccattggcttacctgggcaatgggcaagataaacctaccaggcagttacattaataaaagagaaacacaaatggtaagcatgcttgaaaagaaatataagtctgtgtatttctttggaagaaacacaaaaggaggaggaatgataagacaggcaataaatacactgtcctaaatattttcatgattctcctgcctccttcgtatccttcttatcccaacaacttctccccagaaaccttcaacttaaacatggtcctgccagaactgggtttgtccttccctttacattttcctctcacctaccctacaccccttccatatctaatctgttctttaacttccaggtc

SEQ ID NO: 464495 - DNA, 599 bp, Homo sapiens
tttgggcaaccctggagttacagtcttgtggtacatctacagggagaagaatgtatattttagctagactgtccctatccctaaaagaaaaaggaagaaaaaataataaagaaggatatatatacttgaaaaaataataaaataataaagacgcatatatgtatgcytttataaaatttagctgagactctatttttattttacaaacattccatttaatagtgcatgaacttaactgcagacaaagagacagaaacagaaacgaaggaattcctcaactcccgattacagttagagagatatttttctaaaggaatcttctaaggataaacgtacactaaattaagtagaagacattaagatttggagtggttttcttattcccttttacaatcaggttgattaaggtgtgagttgactttggtacaatgcatccatttcaagtttgatgacgtgtctattactctaaaaggtcctcttgtgccctttgcagtcagttccgccctccccctgaggccagcagtcaatgatgtagtttctgtcactatacaggttagttttaactgttgtagaaattcaccttgatggcgccacacagg

SEQ ID NO: 464496 - DNA, 599 bp, Homo sapiens
tttgggcaaccctggagttacagtcttgtggtacatctacagggagaagaatgtatattttagctagactgtccctatccctaaaagaaaaaggaagaaaaaataataaagaaggatatatatacttgaaaaaataataaaataataaagacgcatatatgtatgcttttataaaatttagctgagactctatttttattttacaaacattccatttaatagtgcatgaacttaactgcagacaaagagacagaaacagaaacgaaggaattcctcaactcccgattacagttagagagatatttttctaaaggaatcttctaaggataaacgtacactaaattaagtagaagacattaagatttggagtggttttcttattccyttttacaatcaggttgattaaggtgtgagttgactttggtacaatgcatccatttcaagtttgatgacgtgtctattactctaaaaggtcctcttgtgccctttgcagtcagttccgccctccccctgaggccagcagtcaatgatgtagtttctgtcactatacaggttagttttaactgttgtagaaattcaccttgatggcgccacacagg

SEQ ID NO: 464497 - DNA, 583 bp, Homo sapiens
tcttgtgccctttgcagtcagttccgccctccccctgaggccagcagtcaatgatgtagtttctgtcactatacaggttagttttaactgttgtagaaattcaccttgatgscgccacacagggtgcactcttttcatcactcggcataatgtttttgagatgatccacgctatttcatgtttccgtaatgtgtcctattttattgctgggtagttcgggtagttggggtagatcgcagcacattctggcgacaggtgagactgcggttctgacctgcaggcctcggtgaacatgagcaagggcacctgggcgccgggagagacctcccttcccctacagaaagcaagcgtgttatgttaacaaccgaacggggaccctgctttcatcccaaagaacagcacccgactgcgtagtttcttccctggctctaggaggtgagaacacattccccgctagcacagacatcctacaaactcctgcggaggctgcggttagaagcagaggctgtgtgaagggtgactctgggggctatgaaaaaacacgaaggttttcacagagcatgagaactcaaaagactggaga

SEQ ID NO: 464498 - DNA, 637 bp, Homo sapiens
tgtccacccttcttcaaataatggcttgtaatgcgcagactaaaacatggaggattacacaagaaactggttcacttcacatcattatccttgtgatgtagcattctacttgaaattggaagccgttcgatatcagagaaaccatrtctatgaaactagagaggctgctcagatgactgcaaaccagccatccttacttgttttaccactagtagtgttataaggacggtggtccaatttcaggaatcttgtagggttctttcaaatacagcaatgtacaaatatgctgccccagcagagcacactggacactcgggcatgatgctggagtttgtcatctcttccacggccttctccagaccttagcacttacctcatgttagcactttatgttctgcaaagacagaaacaaagtggtccaaatttagaaaaaatatatatatatttgggggaaactttatttgaggtgcttaacagattacttttaatctgtagaatacaacaccaaactctgacaatactccacagactccaaatctatcaggcaagtttttcctgtcctttgctttcatataaactgaatcataaagtgtatagtgggttttgggggaatataactgcccaatgggttcatgtt

SEQ ID NO: 464499 - DNA, 637 bp, Homo sapiens
tgtccacccttcttcaaataatggcttgtaatgcgcagactaaaacatggaggattacacaagaaactggttcacttcacatcattatccttgtgatgtagcattctacttgaaattggaagccgttcgatatcagagaaaccatatctatgaaactagagaggctgctcagatgactgcaaaccagccatccttacttgttttaccactagtagtgttataaggacggtggtccaatttcaggaatcttgtagggttctttcaaatacagcaatgtacaaatatgctgccccagcagagcacactggacactcgggcatgatgctggagtttgtcatctcttccacggccttctccagaccttagcacttacctcatgttagcactttatgttctgcaaagacagaaacaaagtggtccaaatttrgaaaaaatatatatatatttgggggaaactttatttgaggtgcttaacagattacttttaatctgtagaatacaacaccaaactctgacaatactccacagactccaaatctatcaggcaagtttttcctgtcctttgctttcatataaactgaatcataaagtgtatagtgggttttgggggaatataactgcccaatgggttcatgtt

SEQ ID NO: 464500 - DNA, 621 bp, Homo sapiens
tctgtgtgtattcctttgtatgaatataggccaatttatttatttattctactgttgctgaacatgttgacctaaaagaaagaggctgaagcacaaaatagaatctagagtttacttgagccaacatgaagacagctgcctggaagactcacaccaaaagaaccttggatctgagctccctttggcctttgtcacaagcaggtttttaaaggtcaaaaggggggatgcacaatgggctgacagaaaggtgcctgtcaggaattctcattggttttcagaaatagcattgatgagagcttggctatcccttgttatagggtgtgggatacagtgtttggtgtggcattattagattaatttacagctacctggggtgatagcaagcagttkcaacagatgaatacatagctcaaaaggaaggaagcagaaagtggttgctgtcttgatttaatgtctctctgatcatgtgaagtggctcacattcctcagataaaaattcttttaaaaatctttcttctttaaagcatagatgatcaaaagctcagccaaggtgtccctctttgccaggaacactcattcccggatagtctttcccacagtgagggcaggggaggaaaggag

SEQ ID NO: 464501 - DNA, 621 bp, Homo sapiens
tctgtgtgtattcctttgtatgaatataggccaatttatttatttattctactgttgctgaacatgttgacctaaaagaaagaggctgaagcacaaaatagaatctagagtttacttgagccaacatgaagacagctgcctggaagactcacaccaaaagaaccttggatctgagctccctttggcctttgtcacaagcaggtttttaaaggtcaaaaggggggatgcacaatgggctgacagaaaggtgcctgtcaggaattctcattggttttcagaaatagcattgatgagagcttggctatcccttgttatagggtgtgggatacagtgtttggtgtggcattattagattaatttacagctacctggggtgatagcaagcagttgcaacagatgaatacatagctcaaaaggaaggaagcagaaagtggttgctgtcttgatttaatgtctctctgatcatgtgaagtggctcacattcctcagataaaaattcttttaaaaatctttcttctttaaagcatwgatgatcaaaagctcagccaaggtgtccctctttgccaggaacactcattcccggatagtctttcccacagtgagggcaggggaggaaaggag

SEQ ID NO: 464502 - DNA, 553 bp, Homo sapiens
tactagccactcaggaagcctattttaagatagtcccaatctcaaacttgttctaagacttgtatgctgactgaggagaaagagcctcatgacaaaaattcaactagagctgtgggtgacagttgtgtgtctcactactggtctgggcccaggtttcccgtgagcacctaatgaatagactcawttgcagggatcgtcaagatgctcactatgtctacctcatagcctcaaaagaagtgataactaacagaatttgtgtagtatcctgaagggaaattaatccagatatagaggaaaagataaggattttttaaaacagacatgtgattcaacagttgtttaagatgcagaaagctgtaagagacagttgttcccactctaatgacaagaaaaagctgtatggtctgcaaaatcatacgtgctttgatcccaccagagagctgaagttgcaaggcccctgagtcagctgaagtccaaagcgtgagaaaaccccctatagaaggacaaacacatgaagcagttcatctttgacagataatggaaggaaaagatg

SEQ ID NO: 464503 - DNA, 619 bp, Homo sapiens
cattttaaattcatggttatggattatagtttcagaattatattaatcacagtatatagttatgctttacattttttggttaaataaaattatgaaaaggctgagtcaaccaggtacatgtttttttttgaaaatgaaaaaagttaagatataataccttgcaatctcagagtattcttcaagcaaactgacacagggcacaatttttatctcaaaagttttttgaaattgaattacagaaactgacatgttcttgctctgtcagcaaagaagcaatgttactccaaaggcgatgtrtttttatggaacagatctttatttttaatactattctccaataaaagatgtcatggcttcttaaacaaatgagtggtctagcactggagaagaaaatttatgagataagtctagagcatcttttagagccagacagtatggtgaatatggtgaactaaaaaatcaaaccccacaatgagtgggtatatcaaaagtacacaggagcaaactgaaatagtccgtgattgtcaaagctggcagaatttgagtaacaagataaataatgtagtgttggactatagcccaaagtataaattaaatattcataaatccatagacacat

SEQ ID NO: 464504 - DNA, 619 bp, Homo sapiens
cattttaaattcatggttatggattatagtttcagaattatattaatcacagtatatagttatgctttacattttttggttaaataaaattatgaaaaggctgagtcaaccaggtacatgtttttttttgaaaatgaaaaaagttaagatataataccttgcaatctcagagtattcttcaagcaaactgacacagggcacaatttttatctcaaaagttttttgaaattgaattacagaaactgacatgttcttgctctgtcagcaaagaagcaatgttactccaaaggcgatgtgtttttatggaacagatctttatttttaatactattctccaataaaagatgtcatggcttcttaaacaaatgagtggtctagcactggagaagaaaatttatgagataagtctagagcatcttktagagccagacagtatggtgaatatggtgaactaaaaaatcaaaccccacaatgagtgggtatatcaaaagtacacaggagcaaactgaaatagtccgtgattgtcaaagctggcagaatttgagtaacaagataaataatgtagtgttggactatagcccaaagtataaattaaatattcataaatccatagacacat

SEQ ID NO: 464505 - DNA, 489 bp, Homo sapiens
aaacagcatcaagatataaattctccctaaattaatttatagacttaatgtgatatgaataaaaataccatagagttttctccggagctaatcaagttgactaggaaaatttacacataaatatagctaggttttggcatcagagtgatgctagcctcataaaatgggtttaaagtgcttcctttgcttgtgtatttttggaagagtttgaaagggttgatattaattcttctttgaatatttggtaaaatttacccatgcaaccatctggtcctgggattttctttgttgggaggtttttgattactgattctatctccttatttgttattgatctgttcaggctttcartttcttcttaattcagtcttggcagattgtatgtgtttaggaatgtgtttattccttctaagctattcagtttgttggcatataattgttcataatagccccttatgaatatttttatttctgaggcatctattgtag

SEQ ID NO: 464506 - DNA, 627 bp, Homo sapiens
gacaagtttaaggccatagtctttgagtttgtggagagtgcctggagacacattttagggaaggaggcagtgactctgggcttagcccagataaaccagtgtctgcatgtatattataatttcccttgagtgaggcacacctccccgccttgtcctgaacctcactatatctgaaccttttatgccactgatagaagtcaaattttgcatgagctatccttgagtagaataaaattttttaacactatggttaatatcascttcttttctgagagcaggtgttggaaaccaaatggagtatgaaacagggagtttatatctccacttagttagactgccttctgaaatacctgtagaaagaatttaaaaagcaagcatctatcaatacagtcacttgtaaaataacgtccagtgaactttacacaaaattggttagaaacagaggcaatgaacttgctcttctgtctcacctcatgccctgccaagggcaaaggctgtggtttgaatacaaagaacagttaaatcaagggcttatttactagatattttattttacttcacttacaatgtaggttctacgaagctggatagattgactctatttaatcatatttgccaggagttttt

SEQ ID NO: 464507 - DNA, 627 bp, Homo sapiens
attcctgaaccagttccatttgtgttattatcataaattttaagtagatttttaaaatattgttgggcaagttcttacttggcttttcttttttaaaaatgacttgcctatcttttacttattattcttgcacatatattttagaatatgcttgtccaaaattatttagttctgaaatcatctagttggaatttttattctaattgcttaatagttttgggagaggttgaaaatctttgtactcgagtgaattcaacaatgattaggccaggcgcagtggctcacacctgtaatcccagcactttgagaggccgaggtrggtggataacttgatgtcaggagtttgagaccagcctgaccaacatggtgaaacccatcagtactgaaaatacaacaacaacaaaaaaaaaatagccagatgtggtggtgcagatctgtaatcccagctacttgggaggctgacgcaagagaattgcttgaacccgggaggcagaggttgctgtgagctgagattgcaccactgcactccagcctgggcaacaagagcaaaactccatctcaaaacaaacaacaacaaaaacgatgatagtagtatatctctccaattattgtgatttcatgttcttt

SEQ ID NO: 464508 - DNA, 558 bp, Homo sapiens
aacatactgtttcttaactagagatgtgcatcaggattatatggggaaattttaataatacctatgccaagtctyatttctagaggttcctctttgggaggcatttctattttaaatatttctcaagtgatcttatctcatatctaagaactgttatgatgttgaaaatccttatcagagaggcaggtagcctacatgcctcactaattgtaataatattttaaaaggcaaaacaaagatagacatgtagtgattaaatacattaaccaataagaggctaagcaatattcagtgactcaagtgaaggatgctttttaactgttagtgatccttagtgtgcaacttctgaagtggttaatgcctgaggtaaatggaccagtagaatcaagagaaaatttcttccacttattctatggatttaaatacttgagcaaaggactaaaggagttcagttcttgacatagtaatatatctctagtagctgggattacaggtgtgaattcgaaagagtcaagggaaaggtattaggtgatagtacctggtgtatttgaattgttt

SEQ ID NO: 464509 - DNA, 486 bp, Homo sapiens
gatgaactcccccacctttgaggaagcttctcagaaagaccatataatgtctatattgctctcatagacaagacttggtcatacagaaagtctaggtgcaaaggttggtgaaatgaaatatttgccttaggacatatggctgtccatctaaaaagtggggtctgagatcaatgtagaaaagtaaaaatgttgtgatatacaattaatagcttctgccacacaaaatcaatccaatttctccttgccctctcataagccatccttgcttctagactctgggatgaaaagatttatgcactaagattcaatatgttactaaaatggtttgactgtgtttccacccaaaatctcatcttgaattgcaatcccyataatctccataatccccatgtttcaagggtgggaccaggtggaggaaattgggtcatgggggcagtttccctcatgctgttctcatggtagtaactgagttctcacaagatctgc

SEQ ID NO: 464510 - DNA, 634 bp, Homo sapiens
aaagatttccttcaatcacaaagaacaaaggggttttgaaccatatgagcactcccagctgctgcagaccctgggatcagcctagcttctacttttcttctgaaaaagttttgaccacgtgctttcctattagttccctattgttcttgcctccaatgagcactatttggaagcttacctagctaataaagaataaagccctttgagcataaacgggagggatgctattcctcacaccttcttccctggcttgctccaatgataattccagctctagaaactctccatgaagagtgactggaggtctcatacagcargaataggagggaggacatctctgcatcctcttctctggcttccaccttaaataaattattgagataaagttctccaatttctcatttagggaggctgaggaatctacatgtgcctgaaggagaaaggagacacttcttgtgccttttctcctggcttcagtgataactccagacgaggaatatcctccggctaggagggtgtaagacttataattgcttgaaccagagagtgggcactcccagcacttttttccctggcttgtcccagaaatacctcaagatctgcagactttctctggaattagtttctgcctgca

SEQ ID NO: 464511 - DNA, 487 bp, Homo sapiens
aaataaaccttttacctaccacctacttattcttcattgcattctctactgtgtctcttatacactttcttttctcttctatccactcatattttgttatcttcttaatctcaataaatgatctcattttattctttctacaagactgtttatccagtgatataacactaaatgtttatttcaatcatcaaaccttgagatatacatttttaaaaaactcagataaccaatttctcaacaaaatatgtagtattgaaaccagtttattaaaacatctttaacagttagttggcacaggtcctagaatagagtgtgttacgggtgaaagmgatctgagttactctgagttactggcggtgtgtccatatgagtccatagcaacttcagtccttacctcctcagaagaaagactttgactgaagagcataaagcagaaaaagagacccaggtgagttccagagcaggggtggaagttttttttaaaagg

SEQ ID NO: 464512 - DNA, 373 bp, Homo sapiens
tgtgcctcactgaagttttccaggctctcacttagatgtttgggtctacaattgtatgactatcttcatagcaaaatcatgtgttaagaaaagtgcagcaacaacaatattaaattttgtttttgcaaataaagatttttattagtgctaatggtagctaaaatgtgtaaatattattttacatgtaaatattcaacaaacgttttgaagtatgtattaagtggtaggtggtaaaggtgccayagtcaataagacaaatgaaattcctgctttcgttttagtttgggaagtcgactaatcttcaaatagataaccataagcatttgtcagctaataaaagatactatggggaaaaaaagccaagagttagaat

SEQ ID NO: 464513 - DNA, 623 bp, Homo sapiens
gtgtggcaagtatattctggcccaacaattgccaagcaagcaacttactgattctcaaattagaagataagcctggaaaggatcttaagttcatctaatttaacttctgtaatacaactttttgtgtgctgacttgacccagctttgaggtcctggctagaggccagttgttaccttttttgagtagccaattaagttcacatctcaaccacttcccttatctgactctcacactccaggccactgtgcacctgccctaattgccccacggccaggtaccagataaccagaggcaaaccttatgaccagagccagctgatattatgcaaattagccaataccgaacttgtttaccctgcatcacccttttcttcctgcagaaaccacaaaaaacgtgcttgttcacagtgtcccattcttcytctgcctcatgcttccctcattcccagtgtggcaaggctgtgtttttcccagggaaatgtgagtaacaaaactgtgaaactctttctggtttctctcttttgatgtgcctccggcctcaccatacctcactcagggtaacatggttaacactacctcttcatcttctcaaagagaaaaggaatatacagacaagacaggtg

SEQ ID NO: 464514 - DNA, 623 bp, Homo sapiens
gtgtggcaagtatattctggcccaacaattgccaagcaagcaacttactgattctcaaattagaagataagcctggaaaggatcttaagttcatctaatttaacttctgtaatacaactttttgtgtgctgacttgacccagctttgaggtcctggctagaggccagttgttaccttttttgagtagccaattaagttcacatctcaaccacttcccttatctgactctcacactccaggccactgtgcacctgccctaattgccccacggccaggtaccagataaccagaggcaaaccttatgaccagagccagctgatattatgcaaattagccaataccgaacttgtttaccctgcatcacccttttcttcctgcagaaaccacaaaaaacgtgcttgttcacagtgtcccattcttcctctgcctcatgcttccctcattcccagtgtggcaaggctgtgtttttcccagggaaatgtgagyaacaaaactgtgaaactctttctggtttctctcttttgatgtgcctccggcctcaccatacctcactcagggtaacatggttaacactacctcttcatcttctcaaagagaaaaggaatatacagacaagacaggtg

SEQ ID NO: 464515 - DNA, 621 bp, Homo sapiens
atatttatttatcatttccaatcttggcataagtaattctgatttaactggccttggtgaggcataggaacagttatattaaaaaaaaaatcctcaagtgggtatgttatacagtcttaggtaagaatcattagaatagatgagtttgggatgggacaaataaaaccaaaagagttattgagctaagaagtgattagagtttcaatgaagaaaaartaatttattgatatagccaaaacaccttacactctggccaacatacagtgctacagagagagaaacaggagtttatatattttaaaaatctgttggtgtttatgtttaaaaagtcatcatcaaactttaaagcagcaattttacttgtgcagagagaaacagattacagagaagtggtaaaacaagtcttgggagagtgaagggttaataaaatatatttaagaaatttaagtaatttgagagaaactggttgttagcatgaagaagcgatcattgaaagattttaatttttttttcttgtagtaccgatctaatatattggaaaacatggtaggaaatagtaaagagagagaaattatttagggtcaagtatctcagaggaagtggcagagtatagtatttagg

SEQ ID NO: 464516 - DNA, 621 bp, Homo sapiens
agcaattattaaaatttattttgcctaataaacttagaagccactgttctgctataaattaatatgatgagatgctaaaaactgatggaaatactttagggcacctttgttatatatgtgtcaagtgttttgaaattattttattttcattgtattcactagtataaaaactgcataaaaatcagcaaaaaagagatgaacacaatgactgtgctctattctagctgaactgtaatatcctgctgaatcataaaaatgtcaccacatcttattctttaaatacattcatcagttattctaggtgttaatatttggattaaacagtgataagaactacattattttttgtaacatttgctcataaaaacacctctttcaatgtgaatggcataaaacttggaagattttttttctgtctaccattatgtttcttcctttcctcaaaataaaaaaawtttaatatcatagtgtctatagagtttttgggcaacatttcactatagaaaatactaactaatttgttttactataaaacatgaaagtttatgtattatcctagtttttttgttcaaatgactttggatggaagtatttagtgatttatgctttaatttagtatca

SEQ ID NO: 464517 - DNA, 574 bp, Homo sapiens
gactcacatgtaggaattatcgcacaaagactttgaagaagctatgataaccatgaggcaaggtagacattaagcttgcttaaaatgaatggagagagagttctgagcagacaaatagaaactttaaaacaactaactggaaatttcagaaataaaaatatattatctaaagtagaaaattcactaaataggctcagtagcagaatggcaacaacagagaaaaaaagttagtgaccttgaatatagaacaaaagaaattatctaattcgtggaatcaacagatacaatactttttaaaaaatatcaaagcctccagagcttatgatacaataacaaaaggytaacgatttatgtatttgaagtttcagaagcagaggagaaagacaatgcagaaaaaataccaacttttattttaagttcaggggtacatgtgccggtttgttacacagataaacctgtgtggtggaagactgttgtacagattattttatcacccaggtattaagcctagtaaccattagttgtttatcctgatcttctccctcttaacaccttccatatatatgcaccaaca

SEQ ID NO: 464518 - DNA, 585 bp, Homo sapiens
ctagtacagttgaatgttcaatttgccaatagctgtgtctgacctgatcctttaataagtaacaaaccctaggggatcagtcagccagctagtggaaggttaattatactagacttttttttttcataaatgagatagcaatttgtcctcgctggaatagatacttcatacaaattttgatttttttttctcagtttgctaatcttctgatagtaataccatctgcaggctttattcaattccatatgaagcatcatgatatcacactcaaaatttttatgacctaggaatttatttttcagcgaaataagtaactaatcttctamctttaatatgctttttatgctcattttattgctttcaatgctcaaattttattttctttctgcaaagcatctttgctatctcttcaagagatattttctggaatcaaatatgctatttagccaaataaatatagaaatatgataaaggcaacaagcatgttaaaacatgcattaagtttccttggctcattgaacatttgtccttataaaggtaatgaaatgtacagtgaaaagcttgtagaaagtctcagaaaaattt

SEQ ID NO: 464519 - DNA, 585 bp, Homo sapiens
ctagtacagttgaatgttcaatttgccaatagctgtgtctgacctgatcctttaataagtaacaaaccctaggggatcagtcagccagctagtggaaggttaattatactagacttttttttttcataaatgagatagcaatttgtcctcgctggaatagatacttcatacaaattttgatttttttttctcagtttgctaatcttctgatagtaataccatctgcaggctttattcaattccatatgaagcatcatgatatcacactcaaaatttttatgacctaggaatttatttttcagcgaaataagtaactaatcttctaactttaatatgctttttatgctcattttattgctttcaatgytcaaattttattttctttctgcaaagcatctttgctatctcttcaagagatattttctggaatcaaatatgctatttagccaaataaatatagaaatatgataaaggcaacaagcatgttaaaacatgcattaagtttccttggctcattgaacatttgtccttataaaggtaatgaaatgtacagtgaaaagcttgtagaaagtctcagaaaaattt

SEQ ID NO: 464520 - DNA, 585 bp, Homo sapiens
ctagtacagttgaatgttcaatttgccaatagctgtgtctgacctgatcctttaataagtaacaaaccctaggggatcagtcagccagctagtggaaggttaattatactagacttttttttttcataaatgagatagcaatttgtcctcgctggaatagatacttcatacaaattttgatttttttttctcagtttgctaatcttctgatagtaataccatctgcaggctttattcaattccatatgaagcatcatgatatcacactcaaaatttttatgacctaggaatttatttttcagcgaaataagtaactaatcttctaactttaatatgctttttatgctcattttattgctttcaatgctcaaattttattttctttctgcaaagcatctttgctatctmttcaagagatattttctggaatcaaatatgctatttagccaaataaatatagaaatatgataaaggcaacaagcatgttaaaacatgcattaagtttccttggctcattgaacatttgtccttataaaggtaatgaaatgtacagtgaaaagcttgtagaaagtctcagaaaaattt

SEQ ID NO: 464521 - DNA, 495 bp, Homo sapiens
ggcgggtgtttgttgtctgctaaattctccattccccttttacgactggagtgtcattctgcccctacaccacatttgtacattgtgggtatggggcagataacttgtggtaggcattcatatcaggaaaaaacacacatccaatgtagacytgatgatgggaatattgtgcattgcccagggatctgggacctccaccagagggctgcacagacttacagattgtcttcctaagggaggaagcacttgctttggtcaatgaaatgttaatggggttgatatgggtcgcctctgagcagtgaacaatttgtcatttctgtctctcccttagccgtgatgatagacactgtttcagatggtgaggactcagtcagaccaattccagtgtgttgataatttagagctcccagccaattgaaagacttgtttcatgagcaagaaatcaaccttttgttaatcattctaagccagtgaggttttggtaaccagagcata

SEQ ID NO: 464522 - DNA, 534 bp, Homo sapiens
gtgatggaaagaatcctgggggctctcacagaatccaaggacaaagtgtgcatctgaaaatcactggaaacttgaggaactccagagacttcaggaaccccctgagcatcttccacctctcagaaaccacagggcttcttgcatatctgctccttcatcttgcacctgcccgccccacctgcagccccatctctctggcttcagctctcagctccagcgctcaccatggacagactcaacgtcccaagtmctcaagagggaaacccatttggttctctctcactgtcatgccagcctggccactggtgagtctactgagggaacccttaggtcaagtgtccaattacagtgcactcaccagaggcttggagctggggaggcagggccacttattcagctgtggaagtgacccagaggcaggaaacaattggcatcttttataacttgagatggtttgttctccagtcattttcaaatgactgtcaaatacgaacaaaattgtagcatgtcaaagtagtttacggaatacaaaag

SEQ ID NO: 464523 - DNA, 536 bp, Homo sapiens
aaatttctcatcaggatatgagtttactgggaaaaagcagtgatgtatccagccttaatgatcctcagcccagcgggaacctgaggccccctcaggaggaagaggaggtgaaacatttagggtatgcttcgcatttgatggaaattttttgtgactctgaagaaaacacggaaggtacttctytcacccagcaagagtccctcagcagaacaatacccccggataaaacagtcattgaatatgaatatgatgtcagaaccactgacatttgtgcggggcctgaagagcaggagctcagtttgcaggaggaggtgtccacacaaggaacattattggagtcgcaggcagcgttggcagtcttgggcccgcaaacgttacagtactcatacacccctcagctccaagacttagaccccctggcgcaggagcacacagactcggaggaggggccggaggaagagccatcgacgaccctggtcgactgggatccccaaactggcaggctgtgtattccttcgctgtccagcttcgaccag

SEQ ID NO: 464524 - DNA, 545 bp, Homo sapiens
ctgattaccctggctgtttatgagttcaccctgagaaccttacccttttaactggtgttcatcaggcactcacgtatgcgtaggcttttccttgagtacaactaaaaagaaacaacttttactgtcagacatataattaaaactgtaacatacttagatggcaaccctagtaatcactttgaggccattaggaaaaggtcacaaaccattttgctatacttacagacctgtattcaaggtaactcttagaacaaatgtagcagctgcattttataaaactccactaatgataaatttacccatttagatctatcttattaatccattatcttcctactggaaggacctgcgagcaaacagagaactttttcctttggtgctagagcataaatgaagctgggstagaagaatttcccaaagaccaaatgcattagttcattccagctgctaaaacagaatgtgatagattgagtgaattataaaaaacagaagtttatttctgacacttctaaggctgggaagtccaagatcaaggcagatttggt

SEQ ID NO: 464525 - DNA, 596 bp, Homo sapiens
aaaccattttaacaagaagaaaaagatttcagatataagaccaacagtaacctgtttaatttttaggactgataactatacagatactacctttagattctctggatggctaatatttgcaacacaagctttttaaatataagtttttaatttgttgcccattgttatatttaggtttgtaaatttttcaaatttaattttaaaattgtttatatggtgggtgttatatcaaaactgatgatatggtggatattttagaaaatgtaagtttcatatttctatttgaaattcatgttgctatttaccaaatataatagaagctttaagacctttacctctgtagtagctcattacatttcacagaataactaatgaagatctaagaagtgatatataacatagcattggaaattgtttagtatggtttatgttaaataaaaacttcaacttttatgaagaatatcagaactcccttcagctggtggacaayatagtctatcaaaatacatcttgattctttctaaacttcactcaagataatactaaagttaaaatgtttcatagtagattatttctattcttccatgaatgttatc

SEQ ID NO: 464526 - DNA, 609 bp, Homo sapiens
tagtaacacacctaggagaaccctaagcctgtcagttttgttggtatcgtgggacatatgtagtcacaaatgtaaatagggagtactggaagatatatattcaatagagtaattrtgggttggcacattcccaggtaacatagtaggaccacagactttggagccagactgccttctactagctgtataaacttgagcaagttattttaaaacttgatggctcagtttccccatccctgtaaatggagatgctaatagtacccaccacatgggattgttgtgatggttagaagagctaatatacacaaatactggtacatagtaagtactatgtaagtgtttgctacttttgtcattattaaggctagaatggatggtgacagaaggctgtctccttgggcttgaggccatttcagcgctctagtcttcaagagtgaggtaattttattttacagcagtaagagcaagcagccccatctagccttttgttgccctctgctccttggaggtgaaagagaagtacgaattggggataggaagttatctagaatcagctctgtccttccacatccctgttctttggagatatttagaaacgttctatagatt

SEQ ID NO: 464527 - DNA, 609 bp, Homo sapiens
tagtaacacacctaggagaaccctaagcctgtcagttttgttggtatcgtgggacatatgtagtcacaaatgtaaatagggagtactggaagatatatattcaatagagtaattatgggttggcacattcccaggtaacatagtaggaccacagactttggagccagactgccttctactagctgtataaacttgagcaagttattttaaaacttgatggctcagtttccccatccctgtaaatggagatgctaatagtacccaccacatgggattgttgtgatggttagaagagctaatatacacaaatactggtacatagtaagtactatgtaagtgtttgctacttttgtcattattaaggctagaatggatggtgacagaaggctgtctccttgggcttgaggccatttcagcgctctagtcttcaagagtgaggtaattttattttacagcagtaagagcaagcagccccatctagccttttgttrccctctgctccttggaggtgaaagagaagtacgaattggggataggaagttatctagaatcagctctgtccttccacatccctgttctttggagatatttagaaacgttctatagatt

SEQ ID NO: 464528 - DNA, 588 bp, Homo sapiens
  misc_feature (1)...(588): n = A,T,C or G
nnnnnnnnnnnnnnnnnnnntttagtctctaccaatgacattgtctcagaacagggggaaaatttaacagcttatatttattattttaaaattttagatgatcactccagagtgattttgcaacccgtagaggatgatccttcctcagattatattaatgccaactatattgatgtaagtatttttatagttaagtatgtctactttattggcttatatatatgaacctttttgcttattacctataaagtgattgctagctttttaaaatataaaagtacaaactgtacacttttccttgttctgcgtcctagtacttactgacattgttgtgctttctttcacacctgactttggtttgggctgtagatttggctgtacagggatgtaagtaccactatatgtaaataacagcaccctattataaatacaaacattcttaattacagttattactaacgctctgttactactagttatttctgcatgcttcacctaattagcttcatacaatatatctctgttcgtttttttgtaattctttcacatgcrtaaagatctattttaccaccttcccttttcttgtgt

SEQ ID NO: 464529 - DNA, 645 bp, Homo sapiens
gagttatgaattgtcattatgtatttagttgaactaatatattttataaagcatagtatatgagtatatgagttcaatttctgatcataatcttactcttattcattatataaatttatcaaacatcattatgtaaaactaagctaatggtctaatttttagaataaaaaaatcaacagttctatgacaaattttgtaattgttcttacctatttagtttaacctgggttttctgccaggacttgtacactggagccttgttataaaattatttcatgggtcatatggtaggactgtattttaaataagacttgttatctagtctttctgttaagaccccagtgtattttggtctatttctatacaatttcataattttccctctcccattagttcattatatgtaaacgatatgagtatatacttctgcaattggtattttttttaagaagtggaaatgaaatacttayaaagcttggaaaaatttttccataaaacattgtgctattttccataaaacattgtggtatattaaaaatttgaaatcttccaaatttgcaataacgtaatactcatgctattaaattttaggttggagatctcagttcacatgtatttatatgtgtattgagttgcccacaccag

SEQ ID NO: 464530 - DNA, 590 bp, Homo sapiens
gatatcaaaactgctttttctcttaaaatctttgccaagttctgttttgatgatgctataaaatccattcattcatgtattcattccacaaatgtttatttgagagtttactatgtgccagacatgtttctaaaccttgggacacatgttaaaatcgcctcgtgtggatcttagagccgattgaattaagacagcaataaaaataaataaatcaactaatatatcatacatcatgacaagtgmtatagagaaaaataatgttggggaaggaagtagggaatattatttaggcagggtaagaaatggtttacaattctgaaaggatgatcaaagaaaaactcattgttgagaaagtaatatgagtagagacctgaaataagtgagggagtgacgggttatgtccagggcaataatgtttctgacagaggggagagtcatttcagaagcctagaggcatgtgtaaagctgttagaatgccagacagtcaccaggccaagatgtgcagatatccataagtgaaggggaaagaaatacaaaatgaaggcagagaaatcacaaaattggataagtggtgccttgtaggccatgat

SEQ ID NO: 464531 - DNA, 590 bp, Homo sapiens
gatatcaaaactgctttttctcttaaaatctttgccaagttctgttttgatgatgctataaaatccattcattcatgtattcattccacaaatgtttatttgagagtttactatgtgccagacatgtttctaaaccttgggacacatgttaaaatcgcctcgtgtggatcttagagccgattgaattaagacagcaataaaaataaataaatcaactaatatatcatacatcatgacaagtgatatagagaaaaataatgttggggaaggaagtagggaatattattkaggcagggtaagaaatggtttacaattctgaaaggatgatcaaagaaaaactcattgttgagaaagtaatatgagtagagacctgaaataagtgagggagtgacgggttatgtccagggcaataatgtttctgacagaggggagagtcatttcagaagcctagaggcatgtgtaaagctgttagaatgccagacagtcaccaggccaagatgtgcagatatccataagtgaaggggaaagaaatacaaaatgaaggcagagaaatcacaaaattggataagtggtgccttgtaggccatgat

SEQ ID NO: 464532 - DNA, 482 bp, Homo sapiens
atgagtttatttatatcagcataggtttatggatatatatattatatatatccatgaatattttatacctatccatggatatatattttatactttaagttataatctgatactgcttttaaaacttattttgtgctcaaattgtttcagctttgatcactgtatacacacacatataaatatttctacatgtattcatctgtatttacataagaatgtaaacgtaagttcatactgatattgcctactctaatccaatactacatggttcattctagccttcctccttggcttatttctatccttccactccagttgtggggtttgggaacctctgcctacatttcaaaggatgtatggaaatgccaggatgtccaggcagaagtttaccgtggaggcagaagccttatgsagaactttgctagggcagtgcagaagggagggagcccccacacagagtccccactgggacactgcctagt

SEQ ID NO: 464533 - DNA, 570 bp, Homo sapiens
attttacacattactagtgaatctgaaaagctgctacttattgatattgaaccatktttagaatcaagtttatataattttaatcttacacagattgaggtcccattgtaacagttcgtcattgatggatccatttttgtcctatttttaggaaatttacttttagaagaaccacagaaaacacttttgaagcttttactggggtgtggaaggaggtttatcatacttcccctttggaaaaaaaacaaaattgaaaacagacatagaagcaaaatgatgacagtatagtatcattttgttgtttgtttgtttgttttggtacaactaggctaaagaacatacatataatcatgcgctaaagaccatatatgtaattatgggctaaaattggagcttccaaccactgtcccctaagtttgtggcttggtattgacagctgaaagagttgaatttccagattctacacttaggaacattcacagatttcacaggccttgttcgggcctaatgctattcggccctgatttggtcatacttactaagtaaaggcagggcaaataaagatgatgg

SEQ ID NO: 464534 - DNA, 570 bp, Homo sapiens
attttacacattactagtgaatctgaaaagctgctacttattgatattgaaccatttttagaatcaagtttatataattttaatcttacacagattgaggtcccattgtaacagttcgtcattgatggatccatttttgtcctatttttaggaaatttacttttagaagaaccacagaaaacacttttgaagcttttactggggtgtggaaggaggtttatcatacttcccctttggaaaaaaaacaaaattgaaaacagacatagaagcaaaatgatgacagtatagtatcattttgttgtttgtttgtttgttttggtacaactaggctaaagaacatacatataatcatgcgctaaagaccatatatgtaattatgggctaaaattggagcttccaaccactgtcccctaagtttgtggcttggtattgacagctgaaagagttgaatttccagattctacacttaggaacattcacagatttcacaggccttgttcgggcctaatgctattckgccctgatttggtcatacttactaagtaaaggcagggcaaataaagatgatgg

SEQ ID NO: 464535 - DNA, 597 bp, Homo sapiens
aaaagctgacacttttttatgcacctttctatatgccatgtacctttctaaacactaaatatatttcaatacgtagccctcccaataacactaggagatagacagtattattattcccattttacatgaaaggagggtaaataacttgtcaaagttattcagctaagaagtggcagagytgggattcaagtacaatggctgcagaatccctgttctgaaacacaaccaactatagtctgatattccttttcaagccccacaaagaacacaagtatacttccatcaaaccatgaaacacatcatattgttaagatttatgagatttttctcttccactggtcattcattcattcattcagttaacaattcctgagcacacactctgtgccagaaattgtgcttggtatcagaaatacaaagtcacatgttcatattttatgtcaaggagttttagtctacagcagaggtcagcaaactacagtagatgagtcaaatcctgcttgtcacctgtttttgtaaataaagttttattgagccatagccatgctcattggtttatgtattatccagagctgctttcgtgctaccacataaata

SEQ ID NO: 464536 - DNA, 416 bp, Homo sapiens
atttttttaaatttatttaactttatttcaacttaaggaaagctatactgtgaatttctattttcttacctggttctcctctggttcatctgctgtccatatttctaaacaaagagagccttttgaacggctctgtaactcttagaaaaaataatcataatcctcactgagaaactgagagttatttaaaatgaatacacttgcatttgatatgagtttatttgtaacactactttgacttttacattttaatttagtccataaaatctaagaaaagcaaataaacacttttttagacacttttaacatgtatcccatygatgtttgtaatggttagttttacatatcaacttgcttaggctatattacctagttatttattcaaacactaacctaggtgatgctgtgaaggtatt

SEQ ID NO: 464537 - DNA, 552 bp, Homo sapiens
cagtgagatcacttattccatggacacatcctgtagtcatttctctagtctccaaatgtccgattcaatggatatcttggtggctggaaaagctccacattggtttcttgatctgtgagatgagaactatgtgtagtggggggaaatcaaggggatttctctgaaacttcctcacaagagagtaagtcaagactaatattgcccaactcaatgagtgtactaaaacacattgagttatgcagtttaaataggtgaatagtatgatatgttaattatatctcattaaaatgtttaaaattgcaatttggggaaatggcatacagtaatgttacctttagacacctagaaaatgcaccttaacatatctccatttcatttaccaatctggcacctagagaaaccagatacatcctcttggtaacrgtggttactgcaaactcaattaagcagcaactccaattaaaattggcatttcagatatattatctttactagcacaaattaacatggacttgggaacatggtatatagccattgacctagcaaatttgt

SEQ ID NO: 464538 - DNA, 565 bp, Homo sapiens
tctcaccttcccctattgtagaagtcctttgaaaggaccttaaatgcaattgtatattaaatatctaagcagaatcaatatacaggcctagacttctgttttttttaagttttttgtttgtttgttttgttttgttktgtttttgagatggagtctcgctcttgtcacccaggctggagtgcattggcgggatcttggctcactgcaacctccacctcccaggttcaagtgattctcctgcctcagcctctcaggcagttgggattacaggcgcctgccaccacactcagctaatttttgtatttctagtagagacggggtttcaccatgttggccaggctggtcttgaactcttgacctcaaatgatccacctgccttggcctcccaaagtgctgggattataggcgtgagccaccgcgcccagcattaagtatatttttaaattttggttttttggagatagggtatcactctgttgtccaggctagagtgtagtggtgccagcatggctcactgcagcctcgacctcctgggctcaagtgattgtcctgcctcctgagtagc

SEQ ID NO: 464539 - DNA, 565 bp, Homo sapiens
tctcaccttcccctattgtagaagtcctttgaaaggaccttaaatgcaattgtatattaaatatctaagcagaatcaatatacaggcctagacttctgttttttttaagttttttgtttgtttgttttgttttgttttgtttttgagatggagtctcgctcttgtcacccaggctggagtgcattggcgggatcttggctcactgcaacctccacctcccaggttcaagtgattctcctgcctcagcctctcaggcagttgggattacaggcgcctgccaccacactcagctaatttttgtatttctagtagagacggggtttcaccatgttggccaggctggtcttgaactcttgacctcaaatgatccacctgcctyggcctcccaaagtgctgggattataggcgtgagccaccgcgcccagcattaagtatatttttaaattttggttttttggagatagggtatcactctgttgtccaggctagagtgtagtggtgccagcatggctcactgcagcctcgacctcctgggctcaagtgattgtcctgcctcctgagtagc

SEQ ID NO: 464540 - DNA, 565 bp, Homo sapiens
tctcaccttcccctattgtagaagtcctttgaaaggaccttaaatgcaattgtatattaaatatctaagcagaatcaatatacaggcctagacttctgttttttttaagttttttgtttgtttgttttgttttgttttgtttttgagatggagtctcgctcttgtcacccaggctggagtgcattggcgggatcttggctcactgcaacctccacctcccaggttcaagtgattctcctgcctcagcctctcaggcagttgggattacaggcgcctgccaccacactcagctaatttttgtatttctagtagagacggggtttcaccatgttggccaggctggtcttgaactcttgacctcaaatgatccacctgccttggcctcccaaagtrctgggattataggcgtgagccaccgcgcccagcattaagtatatttttaaattttggttttttggagatagggtatcactctgttgtccaggctagagtgtagtggtgccagcatggctcactgcagcctcgacctcctgggctcaagtgattgtcctgcctcctgagtagc

SEQ ID NO: 464541 - DNA, 543 bp, Homo sapiens
cataacgtgctttgcagcaatttttactagcataaaagataccagggcaacagaggctcctttaacctaccacttcaacaaaattctgtaaaatcaaaagcgttacagaagctttcactccgctaggcacctaggtcttcctgcaaaacccagactctattcaacagctccctgcaagaacacaccagtctgccacatatcacatattgtaccgtcatcggtactcagacacctgaaccacctggactgacagagttaggctgtcagctctgagatgtctgctagagtgcaagaaacactgaagcagctaagcccttccaggtacaccaggtggtaaccttggcaccaagtgcctctatagtaaagtccctttttccctgttagaagatgcgtaagatcgttccaaagaaaatgttacaatcctaagggcctttttgcayaacacaggaaaaggctggccttctctagtcaaaaactcttgtctgcggggggagatggagctacaaatgtaggaaacccagcttctagtcgcaattctgtgac

SEQ ID NO: 464542 - DNA, 614 bp, Homo sapiens
cttcaacctgagttcaaggcaggtatgtggccaagagtaggaacattcgagaagaaatccatagccagattccatttcaccttcccattatccatcttccagtctatcccaaatcctttaaccatgagagaaagagaaggccatgcagcagagcctattgctgtgattttagcaagatctttcggggcttttcagcccttgactcccttggctaargtggggtgtgggggtgagtgcagaagtgggttattcctgggcaataagtcttccttgggcttgttactccacagatgaaaaacacagaccctgaccagatccttgatgtagaataacttcctgttttgctccaatatctttagtttctgtattttcagaaacaagatgagttttttcattatctcatttcccatccctgctcagctacactgctcccaccaggcaccatcttgactctctgcttttatgcatatgctcctcctgcctgggacttcctctcccacctctgcacttagccagttcctgctcattctttgggtccagctgaaacattacctcctctaagaagcctgcccagttatatttcctttttctgtgtcccacggaattctatatct

SEQ ID NO: 464543 - DNA, 614 bp, Homo sapiens
cttcaacctgagttcaaggcaggtatgtggccaagagtaggaacattcgagaagaaatccatagccagattccatttcaccttcccattatccatcttccagtctatcccaaatcctttaaccatgagagaaagagaaggccatgcagcagagcctattgctgtgattttagcaagatctttcggggcttttcagcccttgactcccttggctaaggtggggtgtgggggtgagtgcagaagtgggttrttcctgggcaataagtcttccttgggcttgttactccacagatgaaaaacacagaccctgaccagatccttgatgtagaataacttcctgttttgctccaatatctttagtttctgtattttcagaaacaagatgagttttttcattatctcatttcccatccctgctcagctacactgctcccaccaggcaccatcttgactctctgcttttatgcatatgctcctcctgcctgggacttcctctcccacctctgcacttagccagttcctgctcattctttgggtccagctgaaacattacctcctctaagaagcctgcccagttatatttcctttttctgtgtcccacggaattctatatct

SEQ ID NO: 464544 - DNA, 614 bp, Homo sapiens
cttcaacctgagttcaaggcaggtatgtggccaagagtaggaacattcgagaagaaatccatagccagattccatttcaccttcccattatccatcttccagtctatcccaaatcctttaaccatgagagaaagagaaggccatgcagcagagcctattgctgtgattttagcaagatctttcggggcttttcagcccttgactcccttggctaaggtggggtgtgggggtgagtgcagaagtgggttattcctgggcaataagtctyccttgggcttgttactccacagatgaaaaacacagaccctgaccagatccttgatgtagaataacttcctgttttgctccaatatctttagtttctgtattttcagaaacaagatgagttttttcattatctcatttcccatccctgctcagctacactgctcccaccaggcaccatcttgactctctgcttttatgcatatgctcctcctgcctgggacttcctctcccacctctgcacttagccagttcctgctcattctttgggtccagctgaaacattacctcctctaagaagcctgcccagttatatttcctttttctgtgtcccacggaattctatatct

SEQ ID NO: 464545 - DNA, 552 bp, Homo sapiens
aattcttaaattacggtatgaaaacctgtatagtaaaccactgatgaggaaataaaattcagaagaaagtcatttgcctttatattcattttaatctttgcaaatatgaggttttgctaatggtttgtctccctagataacatcataatggtgacaaaccagacatatccatctaacttagggtttctcaaccctgacactatgattctttgttgtctggggctgtcctatgttattgcaggacatttagcagcatctctggtttgtatcccttcccccaatcgtggaaactgaaaatgtcttcaaacatcgccaaatgtcccctggggtgcaaaatcttcttcagctgagaattgctgctatatgaggctgcaaatatattctccaaaatttgtttcctaagacactcttaagaggtttgcataatatgtttttttgaaagtttgcattgcctgatgctataggaacctctrtagttcataatcatttaacatgtggcgttcattcaatatactaagtctctagtaaactgagtctttttcctgttaacaa

SEQ ID NO: 464546 - DNA, 455 bp, Homo sapiens
cattttttacaaactgaaggactgtggcaamcttgcatcaagccaagtctattggcatcatttttccagcagcgtgtgctcacttcatgtctctgtgtgacattttggtaattctcacaatatttcaaacattttcattattattatatctgttatggtgatctgtgattagtgatctttgatgttactattgtcattgtttttgggtgccatgaactgtactcatgtaagatggtgaacttaataaatgtatgtgttctaactgctccactgaccagccattccctgtctctctccctctccttgagccttcctgtttcctgagacagaacaatattgaaattagggcagttaacaaccctacaatggcctctatgtgttccagtgaaagaaagagttacatggctcttactttaaattaaaagttagaaatgattaagcttagtgaagaaggt

SEQ ID NO: 464547 - DNA, 462 bp, Homo sapiens
attgtcttgcacatagttgcagctcagtaaatatttctttagctagaaaagaccacagaactagtattcagaagatgtgtgttctagtcctgacttgacaccgatgagttttgtgggcatgggcaaatggggtaagagctctgtgatcttgagcacattccccaacctctctaaggcttagtttccttatcagggaatataaggctcataggcttattacggggtttacacggagatgatagwtacaatatgattgaacaatgcctggcatagtaaaccttagttattattattaagggggaaatcctttaattattttaattaattcatgaagcctaatggaaataacagtttcccatattaagcctacatttagtaaatgggttttggtagataaatatttctaaagcatgagagttgaagggaagggaagggaattaaaaggattttaggtgatgggag

SEQ ID NO: 464548 - DNA, 566 bp, Homo sapiens
gccagtgtggccagagagcagtgagtagtaggaaatgagatcagagaaacagtcatgaaaccaggtatttcaggcctataattataggctgaggtaaagcattttgatttattgtaaatgttatagaaaactatcagaggaccttgagccagagaatgacatgatttggcttacattttataaggactagttaaggggcttctatggagaattgattgtaggaaggacaaggtagaaccagagagatragttaggaggctactgtcatggtctagttcagaggcaacggtggtaacagtgggtgagagtttcagagagacacggtgtaactttgtataaggaaaacctccagttattacaactgtccaaatatagaatggtctgggtgctagagatgagatttctatattgggaggggtttggtctaggacaggaatcagcaatctatgatccaaagctggcccaccatctgtttttataaataaagttttattgaaatacaattatactcattattgtctatggctacgtttgcactacaaagcagagctgaatagttgcaacaa

SEQ ID NO: 464549 - DNA, 507 bp, Homo sapiens
actgggtccttcccttcaaggcagcaggtctcctcctggcccagggtgtgtctagaaatatctgggtgccaaggcttgaaatgagcaccgtaacgactctgcctggtgtcctatcctattgwggctgagctggtatccatgttgcaagacaaagtcttctttattcttccttctcctcccctcaggtagaaagaaggagtctctttcagagttgtgagctgagctgcctggggttggggtaggcgtcgcacaaccattctcttggccaccccaggttgtgtctcactaggtcacgtgcaccccaagtccacacggcaccaggacttgcccaggaattgcagtccttgtggcctagagtgactttcgagtttatttagaactccataacactttagcccatggtatgaagggtggctggaattcaagttccaacttctcagatggacaattcccctgaggttagggctggttgaaatgttccctccatgggtgccagctgagacccac

SEQ ID NO: 464550 - DNA, 477 bp, Homo sapiens
ttcaaaaactgtcagtccataaaaattctacctgcagaaaacagactgctatggtctgaacatatgtgtcccttcaaaatttatgttaaaatcctaatccccaaggcaatagtgttaggaggtgggacctttgtggagggggttgggtaatgaaggcagagccttaatgaacggggttagtgtccatataaacgagacctcagagcctgccttgcccttccaccatgtgaggatacagcaaaaagatgtcgtccataagcaatagcccctcaccagacactaaacctgtgtattgatcttggacttcccagcctccagaactataagaaatagatttctattgtttgtaagtcacccagratatggtctttttattacagcatctgaatggactaagacacagactgataaaactaccctgttgcgaacatgtgttgcctttcctaaacaaaaaaagtgtgactcacagggaagaat

SEQ ID NO: 464551 - DNA, 572 bp, Homo sapiens
attcagggtggcttccatgatgaagtattgtttgtttgaaatctgaagtcttggtagcattaatgagacaattaggtggagaagcagtccagaagactcagcaaaccctgttttatatgccacttgctacaacattagtctcccgatgaatttagtgaccaaaaacagagcaaaaataaagatctataaataggcctagaagaatgtatgccacttggcagtgttaacctctgaggagggctatagggaagctttatggagtagtgctcaagggcatagactttgttaccaaaccttctaaatttaagttttggctctgccacttcccagctgtgtgttttctctacatctctcagtttcctcatctataaaatrtatgtgtgcatgcacaattgcttaagacagatcttggcataatatgcgctctataaattagcatatactatgtaaatatttgtcaatgttattgctactggcagaattgtgtcccccaaaacttcatatgctgaagccattaatgtgatgttatttggagatatggcctttgggaggtgattaggtttaaatgagtt

SEQ ID NO: 464552 - DNA, 565 bp, Homo sapiens
gcttcatttcccatattttatatacttatggcgtaattagctatattttttctgacttggaataaaagataaaatwatgcaatagcaccttgatatcagctttattaacatttttatatacactttaaagatcttcctcatactctaaaggaattaaagtaaaaataaatcaccattatcacttgcttgagtaattttgatatcatttaatagcccatctgcatagatttatgttacagaatctattgacctaatatagacattaggttaaccttcaggtagacttgatagaaagagccattaagcatgcatggatggttaaaacaggtatacaagcaaagtttataaaccagcacgaatgagaagaacccaacctattaaaccgatctctttcaccatcccatccagctagcaaatacttaataaattataatctgtgttttaaaatactttactcaataattttgcagtacattgcacaggcaatagccatgtcagactatctaaagactcctggaaagtgttaattgacaggaatctatgcagttgggagtctagtcttgaa

SEQ ID NO: 464553 - DNA, 565 bp, Homo sapiens
gcttcatttcccatattttatatacttatggcgtaattagctatattttttctgacttggaataaaagataaaattatgcaatagcaccttgatatcagctttattaacatttttatatacactttaaagatcttcctcatactctaaaggaattaaagtaaaaataaatsaccattatcacttgcttgagtaattttgatatcatttaatagcccatctgcatagatttatgttacagaatctattgacctaatatagacattaggttaaccttcaggtagacttgatagaaagagccattaagcatgcatggatggttaaaacaggtatacaagcaaagtttataaaccagcacgaatgagaagaacccaacctattaaaccgatctctttcaccatcccatccagctagcaaatacttaataaattataatctgtgttttaaaatactttactcaataattttgcagtacattgcacaggcaatagccatgtcagactatctaaagactcctggaaagtgttaattgacaggaatctatgcagttgggagtctagtcttgaa

SEQ ID NO: 464554 - DNA, 565 bp, Homo sapiens
gcttcatttcccatattttatatacttatggcgtaattagctatattttttctgacttggaataaaagataaaattatgcaatagcaccttgatatcagctttattaacatttttatatacactttaaagatcttcctcatactctaaaggaattaaagtaaaaataaatcaccattatmacttgcttgagtaattttgatatcatttaatagcccatctgcatagatttatgttacagaatctattgacctaatatagacattaggttaaccttcaggtagacttgatagaaagagccattaagcatgcatggatggttaaaacaggtatacaagcaaagtttataaaccagcacgaatgagaagaacccaacctattaaaccgatctctttcaccatcccatccagctagcaaatacttaataaattataatctgtgttttaaaatactttactcaataattttgcagtacattgcacaggcaatagccatgtcagactatctaaagactcctggaaagtgttaattgacaggaatctatgcagttgggagtctagtcttgaa

SEQ ID NO: 464555 - DNA, 565 bp, Homo sapiens
gcttcatttcccatattttatatacttatggcgtaattagctatattttttctgacttggaataaaagataaaattatgcaatagcaccttgatatcagctttattaacatttttatatacactttaaagatcttcctcatactctaaaggaattaaagtaaaaataaatcaccattatcacttgcttgagtaattttgatatcatttaatagcccatctgcatagatttatgttacagaatctattgacctaatatagacattaggttaaccttcaggtagacttgatagaaagagccattaagcatgcatggatggttaaaacaggtatacaagcaaagtttataaaccagcacgaatgagaagaacccaacctattaaaccgatctctttcaccatcccatccagctagcaaatacttaayaaattataatctgtgttttaaaatactttactcaataattttgcagtacattgcacaggcaatagccatgtcagactatctaaagactcctggaaagtgttaattgacaggaatctatgcagttgggagtctagtcttgaa

SEQ ID NO: 464556 - DNA, 538 bp, Homo sapiens
tatttcgttaaaacaaatacaactgattgatttcaggaaaaacttmttttgggggaatattaaaataagaattagtaaaagcatataaaaacaaaatttggagaaaatgattgcaatgttgttgaaattgcaagcaagaagttagtatctgtaaacaaatgtgaaagtatgagtttgcatggacttttttcagattcaagtaatgaatgcttatgaatggcctaatattcaaagtgtacaaacatgattaaagaaatagatttgaaagtttcactcctgaaatttaattactcataagtttatgtccggccacagctaattatactctggatttgaagcgtactgagagctctgtagtatcattgtataaatggggatttcggtaagaatttaaatctgagtgggtcagaggcataatttaatgtaactttgaccagtatgtaagggaatcaagtgtgttagtgaagcatgggagcaggacattttaggtctaagtaacatgaaagttcaagtggctggtattgcattgtttctagat

SEQ ID NO: 464557 - DNA, 588 bp, Homo sapiens
atcttcttaacaatgtcctgcaaggaccaaattttctttgctttaattttttttgaaatccaatttatttttaaaatrtaattagtgggatgttttgtggcttaacaaatagatatttatcttatccaagttcataaatctctctttcatattctaaataattcataatttcagtttttacatttaaatatatgctataataaatggtattcttttaatttatcaattatttctagtatatagaaatataattagtttttcaagtgtaaacaatttcttgtgatcttggtatatttattcattagttatagtagtttcagctagattccttcaattttacctgactatcatactttatgtgaataaaaaaagctttgttttttcttatccagactgaagctttcatttaatttttgtggcatgttcactgaatagaccacatagtaaatgttgattcagagtgctgagaatggatattttcgtttgatgttaggtaaaaagttttctgcctttcaatattgagaagattgatgctttttcttctggttcactaagagattttattgtgatgggaattgttacagtttg

SEQ ID NO: 464558 - DNA, 588 bp, Homo sapiens
atcttcttaacaatgtcctgcaaggaccaaattttctttgctttaattttttttgaaatccaatttatttttaaaatataattagtgggatgttttgtggcttaacaaatagatatttatcttatccaagttcataaatctctctttcatattctaaatawttcataatttcagtttttacatttaaatatatgctataataaatggtattcttttaatttatcaattatttctagtatatagaaatataattagtttttcaagtgtaaacaatttcttgtgatcttggtatatttattcattagttatagtagtttcagctagattccttcaattttacctgactatcatactttatgtgaataaaaaaagctttgttttttcttatccagactgaagctttcatttaatttttgtggcatgttcactgaatagaccacatagtaaatgttgattcagagtgctgagaatggatattttcgtttgatgttaggtaaaaagttttctgcctttcaatattgagaagattgatgctttttcttctggttcactaagagattttattgtgatgggaattgttacagtttg

SEQ ID NO: 464559 - DNA, 562 bp, Homo sapiens
gttttgactttttaaaaatttttaaaggtgaatttcatttttttttacttctattttcagatcaggtgtacatgtgcaggttttttacataggtaaactcatgtcacaggggattgttgtacaggttattttgtcacccaggtatyaaacctagtaaccattagttatttttcctgatcctctccctcctcccacccttcaccttccaataggccccagtgtctgttgttcccttctaaatgtctgtgtgttctcatcatttagttcccacttataattgagaacatgcagtattggttttacgttcctgtgttattttgctaacgattatagcctccagctctcctcatgttcctgaaaaggacataatctcattttatatggctgcatagtagtccatggtgcatatgtactacaatttctttatccagtctaccactgatggacatttaggttgattccatgtctttgctatagaaaatactgctgccatgaacatacacatgcatgtttctttatgatagaatgatttacatttctttgggcatatattcaataatgg

SEQ ID NO: 464560 - DNA, 554 bp, Homo sapiens
gtttttaaaatgtaaattcattaatttggttgatactgttgtcaattacttatgaaagagaaatactgaaatttctagatataataatacatttgtctatttctgttcatagttctgtcagttttgtttcatatatttcgagcattgatgttaaatatatatawatatttgggattgttttgttttttcaattaaaatatttattttgatatgccctctttatctcttataatattcttcacaccagtctttattctcataaaaatatagctattccaactttcttaagatatttatataattatgattcatatatgagtatacttgcactatgtatttttaatgttttggctgtctgtttctttatagttcatgtgcatccactggaaatgcctacagttatattttactttttttttaatctactcgagtcatctcagggagggtgtattgcttttttattgaaatgttttagaccacttacatagaatgtaattatcaatatgactaagtttaaatatactatcttgttatttttttttaagttgtcccat

SEQ ID NO: 464561 - DNA, 554 bp, Homo sapiens
gtttttaaaatgtaaattcattaatttggttgatactgttgtcaattacttatgaaagagaaatactgaaatttctagatataataatacatttgtctatttctgttcatagttctgtcagttttgtttcatatatttcgagcattgatgttaaatatatataaatatttgggattgttttgttttttcaattaaaatatttattttgatatgccctctttatstcttataatattcttcacaccagtctttattctcataaaaatatagctattccaactttcttaagatatttatataattatgattcatatatgagtatacttgcactatgtatttttaatgttttggctgtctgtttctttatagttcatgtgcatccactggaaatgcctacagttatattttactttttttttaatctactcgagtcatctcagggagggtgtattgcttttttattgaaatgttttagaccacttacatagaatgtaattatcaatatgactaagtttaaatatactatcttgttatttttttttaagttgtcccat

SEQ ID NO: 464562 - DNA, 508 bp, Homo sapiens
tgacccctgtgcctcctgagagggagacatttcccaggaaagttccacagacacctcatataggagagctccagctggcgtctggtgggtgcccctctgggacgaagcttccagaggaaggagaaggcagcaatctttgctgttctgcagccttcagtgttgatacccaggcaaacagggtctggagtgaacccccagcaaactccagcagacctgcagtagaggggcctgactgttagaaggaaaactaacaaacagaaagcaatagcatcaatatcaacaaaaaggatgaccacgcaaaaactccatccgaagatcaccaacagcaaacaccaaaggtaggtaaatccacaaagatgaggaaaaaatggtgcaaaaacgctgaaaattccaaaaaccagaatgcctcttctgctccaaagtatcacaactcctcaccagcaagrgagcaaaactggatggagcatgagattgatgaattgacagaagtaggcttcagaaagtgggt

SEQ ID NO: 464563 - DNA, 551 bp, Homo sapiens
gtgaatgtatttctgaacacttcctactgtaactttgatttctctatttttacaccaataccacactgttttgattactctagctttatgataagtcttgaagttgggtagtttaaatcctccaatggtgttctttttaaaaagttttttggctattctaggtcttttgcaagtctataagaatattaragccagcatgtcaatttcttaaaaaaatacctgatggaattatgactgatgatattgccttgaatttatagacgaatttaggaaaaatggacatcttaacaatattgaattttctaatccatgaacatagtatgtctctcaatttatttaggtcttatttaatttctctcactaatgttttgtagctttcaatatacaggtcttatacatctcttttgaaacttatctgtatttcatattttggggctattgttaatgagttttaaattttccatttctaatcatttgttgctattgtataaaaatacacttgatttttgcatactgattttatatcctgaaattttgctaaattcacttat

SEQ ID NO: 464564 - DNA, 572 bp, Homo sapiens
cttttctctgtgtatctttggaagagtacctacaaggcagctggtaaaatggacctattccttagtggtagcatgaaaacatagtaactaacaaagactaacaatcattcagagggcaggccatgttctgccttgatggctacacatggtctcatttcatcttcattgccatctcctccacatccattccattctcttcatgtgaagtcgaggaagtttaagcaccaagaattttaatattttgtccgaggtcagttagttgatgagtggtggcactaggcctacaactccccctattaatgcctgggcccacgaacttagcaatatatgtacacgctacagcctccctgagtggaaagcttacaggtcacaggtcccaaacamcagagaaccaatgataatctttgatgaacttttcagcagacacaaactgaataaaataaaacaatgtaggaattatttttaagtgctaattctatctacctattgatgtactttatttatatatttacttacttatttataattttatcctgaaattgtgtccttcctactttgggggtgctgaaata

SEQ ID NO: 464565 - DNA, 567 bp, Homo sapiens
ccccctgggaaagttcatcctcccttcttcctggtcactgaggaaaatatgaccctgtgtctcctgtcattctgataagaacacatctaatttaatcgaagctaagcaatccgggcctttaaaaataattttattgtttcactgctaccttcttctccttagtcacctctacctagatagagtgggaaccaaagttgggggtgcagccattttggcacatggtggaattgtactgtttgccactgagmcttccttttattttgactgcaggcggaccgcccatcttatgcaattcttcagggacacgtctcggatctcagcccgtaagttataaaagcatgcagttccaatgggatctcaacctctaagttatgaaagcatatgcagttccaacccccattgactccagttcccaagatgttgcttcagttcttggatctcaaaatcactggcaaaaagtgacgcctcatctggaatggagctgatctgcagggctggtggtagctgtaatgatcctgctcacatctgtggcgaggtccactggacttccatgggaatcattagtgg

SEQ ID NO: 464566 - DNA, 567 bp, Homo sapiens
ccccctgggaaagttcatcctcccttcttcctggtcactgaggaaaatatgaccctgtgtctcctgtcattctgataagaacacatctaatttaatcgaagctaagcaatccgggcctttaaaaataattttattgtttcactgctaccttcttctccttagtcacctctacctagatagagtgggaaccaaagttgggggtgcagccattttggcacatggtggaattgtactgtttgccactgagacttccttttattttgactgcaggcggaccgcccatcttatgcaattcttcagggacacgtctcggatctcagcccgtaagttataaaagcatgcagttccaatgggatctcaacctctaagttatgaaagcatatgcagttccaacccccattgactccagttcccaagatgttgcttcagttcttgratctcaaaatcactggcaaaaagtgacgcctcatctggaatggagctgatctgcagggctggtggtagctgtaatgatcctgctcacatctgtggcgaggtccactggacttccatgggaatcattagtgg

SEQ ID NO: 464567 - DNA, 567 bp, Homo sapiens
ccccctgggaaagttcatcctcccttcttcctggtcactgaggaaaatatgaccctgtgtctcctgtcattctgataagaacacatctaatttaatcgaagctaagcaatccgggcctttaaaaataattttattgtttcactgctaccttcttctccttagtcacctctacctagatagagtgggaaccaaagttgggggtgcagccattttggcacatggtggaattgtactgtttgccactgagacttccttttattttgactgcaggcggaccgcccatcttatgcaattcttcagggacacgtctcggatctcagcccgtaagttataaaagcatgcagttccaatgggatctcaacctctaagttatgaaagcatatgcagttccaacccccattgactccagttcccaagatgttgcttcagttcttggatctcaaaatcactggcaaaaagtgaygcctcatctggaatggagctgatctgcagggctggtggtagctgtaatgatcctgctcacatctgtggcgaggtccactggacttccatgggaatcattagtgg

SEQ ID NO: 464568 - DNA, 408 bp, Homo sapiens
gtttacctctgttttccacattttctacttttgtgttactttttgcagtttgtatttttgtattgtaagttaaaaaatcttatcaatcacaatgtaagtgyaaatataggaataaactgttagttttctaaaggaaaccaaccaatttgactatgaatatgacattcatctttggaagatggtcttgaactttatgcttagtgcattaccaaaagtcagaaagatcttcctgtccacaatcttgtaaagataatttttcttacactggtaatgtccctgagttattggcaaaaacaccagaaattatgattctctctaagagctaagagggttcttttttgggaaacaagctttctgtaacagggattctcaacccagttgcccaccagaaccttctggctgaacaat

SEQ ID NO: 464569 - DNA, 563 bp, Homo sapiens
tccaaaatccttgccactggcctgatctggtttgccagaatttcctcctcagaaatgaatgagatgggatgtggggcatgggtccctcagacactctccacgtcctccctgggagcaccctgacattcgtagccacacactttcacctggtcatctggctatgtcctttctaaagggatacaagcaaaaggaatcacatgggacttcgaggaaagctgaaagactcaaccgaatagactttgtgttgtccttccttcttccagcctaggctgtgactccagcagtccccccggaccatgcgctgatcctgaagatggcagccatgtgctggaggcaagggcaaaaaaaggagctggaacctcagaygacaccttggaactgctattttctgccatgtcctggatgcttcttcttcctgggggatatcaacattaatcttatttaagccactgctttggggtgggggaagggtatgcctcttatcagcagccacccctaaccccagctgacagagcacagcgtagcagtggggtgcatcaccttggcaaccagccactaactgc

SEQ ID NO: 464570 - DNA, 560 bp, Homo sapiens
atacaatgcagaatgtagaacaaggaatattatcagagataaagagtgataatacataattataaaagaatcaagtctcccacaagagacaatactaacaacacagctttaaaatacgtgaagcaaaaactgatttatttgaaagtgacagcaaaatttacagttacagctggagccttgaatacttctctctcagcaattggtttaacaagaaggcaaaaataagtacagataatgataacctaaacagtgtcattgaccattttgacataattgacacctagagaacactccgacaacaataacaaaatacccttcttcacaactgcaaatgaaayatccacctagagagactgtagtctgggccttcaaacacaccttaacaaatttaaaagcataaaaatcatacaaagtatattttaaaagatcaaattaaactagaaaataacaaagatatctgaaaatctctaaatatttggaaactaataatgtacttgtccgtaaaatgtggataaaatggaattatctgagaattaaaattcttttgaactgaatgacaa

SEQ ID NO: 464571 - DNA, 533 bp, Homo sapiens
ttttgttgttgtacagggtgagtgggagaacmccgtgaagttcatagatagttctagaccatattatttagttactaagtcttaattggaatattttattcttctaaaataggagggaaaaatggctagcttatgggaactccaacattaatccccttctttctgtatttcttttcttttcttttttttttttttttttgagatggtgtctggctctatcgccaggctggagtgcggtggcgtgatctcggctcactgcaacctccgcctctcaggttcgagagattcccctgcctcagactcccaagtagctggaactacaggtgcgtgccatcatgcatggctaattttttgtattttagtagagacagggttttaccatgtttgccaggatggtctcgatctcctgacctcgtgatccacctgccttggcctcccaaagtgctgggatacaggcgtgagccactgcacctggcccttctttctatatttctaattggctatttcgaaggcaagatatgttgtatcctgtt

SEQ ID NO: 464572 - DNA, 533 bp, Homo sapiens
ttttgttgttgtacagggtgagtgggagaacaccgtgaagttcatagatagttctagaccatattatttagttactaagtcttaattggaatattttattcttctaaaataggagggaaaaatggctagcttatgggaactccaacattaatccccttctttctgtatttcttttcttttcttttttttttttttttttgagatggtgtctggctctatcgccaggctggagtgcggtggcgtgatctcggctcactgcaacctccgcctctcaggttcgagagattcccctgcctcagactcccaagtagctggaactacaggtgcgygccatcatgcatggctaattttttgtattttagtagagacagggttttaccatgtttgccaggatggtctcgatctcctgacctcgtgatccacctgccttggcctcccaaagtgctgggatacaggcgtgagccactgcacctggcccttctttctatatttctaattggctatttcgaaggcaagatatgttgtatcctgtt

SEQ ID NO: 464573 - DNA, 583 bp, Homo sapiens
aagtctgtaatcccagcactttgggagtccgaggcaggtggatcacgatgtcaggagatcgagaccatcttagctatcatagtgaagcttcatctctactaaaaatacaaaaaattagctgggtgtggcagtgcatgcctgtagtcccagatactctgcaggctgaggcaggagaattgcttgaacccaggagacagaggttgcaatgagccaagattccgccactgcactccagcctgggcaagagagcgaaactccgtctaaaaaaaataataaaataaaaataaaaaaataagttactgacccttacatcaaagatcagtttgtgaccagtgggaagtttacccctctgagccccaatcttttcaactgtaaaatagcaatatggtttgcaaagctgcactaagattaaaggagatgatgcctgatacctagaagaaatgcartaaatatttattttcttttcatctcgtttgtaaaattatttcagtagcatgccatgaaagaaaatgttcatagcagtgtttcccaaagatgaagtacccacaaacattgcctaagcaacagtttccataagtattta

SEQ ID NO: 464574 - DNA, 473 bp, Homo sapiens
ttaatgttactgtggatttcaatttttcaaatgtttgtataagaattaggagaaactactagccagaaaccattttaaataggaatttaacatttaaactttataagttgtattccaggccaaacctttggcctcccctactttctttcagggagttcaatccacctgtggagctgtaagtatcttacaaaraataatacctacagactcaatcagacaccgttttaaaaatatgtaaaatatctgtcctagggattgtatgaggcccccactcatcagatgtaagtgtccctttgttttcagaaacacataattagttttatacaaataattagttgtcattcaaatcctaacagaagaacataatgaaccatttgggaccataagttccatggtcagtatggagaacaacgaatacacagaaagaaataaaaataggcataggattggaaacacccttgaaaatgttagga

SEQ ID NO: 464575 - DNA, 585 bp, Homo sapiens
ttacagatgttgtattcttattaatttttaaataatgcatattttaactgcttccatttgtagtactatgatttttcttctctacactggctgtctgagtttttactttctctttgcatactatggtctcttctttttctctccctctttctttctctccttttgattatagtctgtttgcaaagtttccatgttgttcctttctatcttgctcctttttaacctgagtggctgtacccaggtctcttatttacctgttttctctttctcagaaccacctagccttccttccctcagctacagtttgtgcctgagagttgccttctacacattccttggggtctgaggatatggaggtgggacagatggagagctcttctagcacaaaatgcagccctaactgggctctttcagtttttyttattattatttaaatgttctgtttgaaatccctctctgtccagagcaggatgcattcccttttgtgggcttcaccgtgtttcctccagcttagctcatcagttctgtaataatgctctccctaactttgctctccctaataatgctctccttaactttagtggg

SEQ ID NO: 464576 - DNA, 510 bp, Homo sapiens
aaatgatcacctttccttaggaatatgcatgctctctccctataagaaatactatttgctgtcaatgttttgttgataccttcttcaggagagctcatttctgtgtcgtacaaaagtggttctgctggcatgatcattatcatcattaagcatttatgaagcactttagagttatttactagaactcatgatatgcctataagatagattggtataatggtcttcttataaatgagaaaatggaggttaaataacagccaaggttacatagataatttggataaaagactcaaagtccctgacttcctgtttagtatataaatgaaaacccttaagtggcataaaaaagtcatctrcttcaaaactttacaccttaacagttagtgggcataaataactagagagatggtgttttgctctaaccctgtggctgacagaattgtttcagtagatctgtgatgtcaaggccagtgtctctgcagttctcttggtggtcccttcttgatatca

SEQ ID NO: 464577 - DNA, 389 bp, Homo sapiens
tgtttatttcttggaaattatttacagyattttttagtcctatgctgtattctagaaacccaaaatgctgcaatatgccagttggaactgtgtttcattctgtcttgtgttttccctaaacattgctaatgtgattaatgaaccagactagaaaattggagtgctttttttttctcccacctcctatggatgtaaatggagacgacactttaaaaaacattctctattcccttccctccacccgagggaagaaatgtacatttctgtctctaaattacacttcctctctggcatcagacttattcccaaaagattttcaactcaaaacacagtgtgttttctgtgcaaatcacataaccaatctaaattttaatagcttcaatattgtg

SEQ ID NO: 464578 - DNA, 456 bp, Homo sapiens
atgagccaccacactcaacccatagtttctgactctatttcttatctggcatttgcaaagaaaggaagtaggaccaataagagtagagagtttgagtcaatgctgccttttggatctaaactacagttctatcacttactgtgtggccttaagaaagttacttaacctctctgggccttggtttcccagaaattggtgataataataacatttgaaagggtctttatgaagatatagcaagcataccatactatcctgaagcttttcagtcactcaattaactgctgtttcttactattgccattagaaaccagtwcttaaggttcccaagccactgctctctgcatgacaccatcttatctcacattccctatgttacaactcctgcttctgttctgaattgtaacagacaagaaagaaatggcatcatattgctaagactgttaacctgacacc

SEQ ID NO: 464579 - DNA, 609 bp, Homo sapiens
ttattagtggcgatttagtgattactttacagtaagcgcgcgcrcacacacacacacacacacacacacacacacacacacacacacacgtatatatataaactccccccaacaagagaagacactgaatggctcacttcaaagttcaggcagtgagtctctttttaagttgtcagtgaaatacacctagggcttatgttttatggtttgcacagtatggtcataatccttataaatgtctttcacctagtggcaaggtaaccaaatgacagcatgaaatttttgaaagctgaatgatttttcatcagttgagttagaaaaactacagaaataagtgacagcaattgtcttggtaaggcttgttttaaataattcagacgatttgctttgttctaacttgcattttaaactatgtataaccttctcaaatcattactttctaaagtaaacatattggttcatacactagggtatgtggatttaacacagcaaggaaaggccagagcaaatgcctaggcctgctgtgccacagtcagggcagagctctttacacaaaggctgataattggtaatagaagctgagtggaaaacagcctctaggctctgcaa

SEQ ID NO: 464580 - DNA, 609 bp, Homo sapiens
ttattagtggcgatttagtgattactttacagtaagcgcgcgcgcacacacacacacacacacacacacacacacacacacacacacacgtatatatataaactccccccaacaagagaagacactgaatggctcacttcaaagttcaggcagtgagtctctttttaagttgtcagtgaaatacacctagggcttatgttttatggtttgcacagtatggtcataatccttataaatgtctttcacctagtggcaaggtaaccaaatgacagcatgaaatttttgaaagctgaatgatttttcatcagttgagttagaaaaactacagaaataagtgacagcaattgtcttggtaaggcttgttttaaataattcagacgatttgctttgttctaacttgcattttaaactatgtataaccttctcaaatcattactttctaaagtaaacatattggttcatacactagggtatgtggatttaacacagcaaggaaaggccagagcaawtgcctaggcctgctgtgccacagtcagggcagagctctttacacaaaggctgataattggtaatagaagctgagtggaaaacagcctctaggctctgcaa

SEQ ID NO: 464581 - DNA, 372 bp, Homo sapiens
  misc_feature (1)...(372): n = A,T,C or G
gcagacatctaaccactcagttctttaataaatatttgaaattcaatggttgattggtccagaagattcttgacatctatgattgcccaatattatttaaccaaaagttgacaggaaatgatcagagagaaaggagtgtacgaagaggatgacaataattataggttgtatatacaattcttataataggactttagtgaatataaatacmcacacatacatatataaattatgcttatatatttgaaatactcaataagtttacattctacatgaagagacctccttctacctgtccccttgcccctgactaaaaaaatncgactatggagctcttggtaattgtcaattttttgccacagacttagtcat

SEQ ID NO: 464582 - DNA, 543 bp, Homo sapiens
  misc_feature (1)...(543): n = A,T,C or G
nnnnnnnnnnnattgtcactgtttagtgggcactcaagtcaaaagtttccactgcctaaggtgacatacttcacactccaacttgtctttctggtgtgcagtgctgaatccttcttaaaggctttcaaaaataggctggaaaaagaaatattatggtggggtgagtagggtgggataagtcatacatggaataatctccactttcagaatcaatgaagcttgtggtttacaacattgtggtttaacwctctatgcagcaagcccgcatctcctaatctatattcaggtaatgattttgagtattatgcagcttgaaaacttgaagtgaattttctgggtggttaataagtgatctgtacaagtattaacgaacaatgaccttgcactggaaccaatgctgcctaagtgtttatctcgtcattacttctctaatatcacagtgttttgcctccttactttcctggctctttactgtgagccagtgtttctaccttgcaaaatcaggcatgctaagtggggacattggatgtgtatccacatatc

SEQ ID NO: 464583 - DNA, 543 bp, Homo sapiens
  misc_feature (1)...(543): n = A,T,C or G
nnnnnnnnnnnattgtcactgtttagtgggcactcaagtcaaaagtttccactgcctaaggtgacatacttcacactccaacttgtctttctggtgtgcagtgctgaatccttcttaaaggctttcaaaaataggctggaaaaagaaatattatggtggggtgagtagggtgggataagtcatacatggaataatctccactttcagaatcaatgaagcttgtggtttacaacattgtggtttaacactctatgcagcaagcccgcatctcctaatctatattcaggtaatgattttgagtattatgcagcttgaaaacttgaagtgaattttctgggtggttaataagtgatctgtacaagtattaacgaacaatgaccttgcactggaaccaatgctgcctaagtgtttatctcgtcattacttctctaatatcacagtgttttgcctccttactttcctggctctttactgtgagccagtgtttctaccttgcaaaatcaggcatgctaagtggggacrttggatgtgtatccacatatc

SEQ ID NO: 464584 - DNA, 632 bp, Homo sapiens
tcttgaatgacaatatactgaaaagatggagaccatatagtttccatcttaagaactgtttacagaaaattcagaatagtctacatttataagagattcacatgtaataaaaacatttaaaatgtgatacaccatagtcgctccttatacatgggggatacattccaagacctctagtggatgcctgaagccacaaatagaatcaatccctgtataggctgtggggttctcttctataaaaacctacctatgataaagtttaacttataaaccaggcacaggaagagattaacaacaattactaatgaccaaatagagtaattataacatttactgtaataaaagctatcaggcactgtggcaggaactcctgcagtttgaagtgccacaacaaaactagcatgaatttctgtttccttccttgcaatttcatggacagaagattcattcttaccatagatcttagcaaccgtggcatagaattttttatttaaaaagtggagaattttcactttgcacttaaagcaagcactttaaggcttctctttggcrtatctgaatttccagcatcattactcttgcactttggggccatcattaagtaaaataaggactacttgaacacaagcact

SEQ ID NO: 464585 - DNA, 598 bp, Homo sapiens
cgtcttgctctgtcacccaggctggagtccagtggtgtgatctcagytcaccgcaagctctgcctcccaggttcacaccattctcctgcctcagcctcctgagtagttgggactacaggcgcccgccaccacgtccagctaattttttgtatttttagtagagatggggtttcaccatgttagccaggatggtctcaatctcctgacctcgcgatccgccctcctcggcctcccaaagtgctgggattacaggcgtgagccaccgtgcttggcctgaatggtctccaggccatcttgatgcagcctggtggtgaggagagggtgtggtttctcctttctttgaaaatcgtggcccttgtttaggtggggaaaatgtttcaacagtgcattttggaaagagaattagataaccccaagttctctttaagttgatattttagatgtactttatagaggtattgagagtttcagatagcttattcttgatagcctttttgttgttaatgatggctactaagattctggatcccacacaatgggattgtcaggaagggagtctactctgccactgttcaataagtaggtgcccatctgcttg

SEQ ID NO: 464586 - DNA, 302 bp, Homo sapiens
tagaatcaacaaaatccccagctcccacccacacacaccctccacggccttccttgattgggaagccagtactgtctctacgcacaggtctcccraggcaagtatgttttttcagaccaatgccaaacttgacctcaaactgccggatttcagggtcttcaccactacttttggtccagggaaagtgaactaggcaattacacctggtgtagtcagcacttaacctgacaatgtttagcttcagctgagaaatctaaagtgccctacagaagacccaagtgtcactccacatcttagaaaag

SEQ ID NO: 464587 - DNA, 630 bp, Homo sapiens
tctttgtaataaaaccccctcccttcactttatttctctcttcattcagggttactcctcataaatttaagaarttcttttattgttttaagcaggagtttacacatacctgggagtaattaatttaactttttacagatttctttgtagtgtgggggtaactttctgacctttcttctatttagaatgaatgaatgaaatggtactgggtttccatagaatagtctaaagaaggggaaaagagatgtgatgggaataacaacttttagacccaaatggggaagaatctaaagaacagactttctacttgaagagattcaagtccattgctcttagaaaagttttctggtaataactcaacttggaataatgcagcaagtttatattggtagccacctatttgtagctgaaaagactggaaatagttcacacaatgaaacccagctatgaggcaaactgacataaaccaaatgttcctgatagatccacctactctttgcaaacagaatgggatctgcaacagtgggagtctggtccatctctaattttattctgtcttattggtactcatcctgattagattggagatggagtaaatgtcttaattaacttaaacatataactactcca

SEQ ID NO: 464588 - DNA, 369 bp, Homo sapiens
aaataaaagaataaataaattcaaatgtcttacacagttatgggtaaggacacattttttttctattttaaattgatgagtttggaggtggaaactgatcattttgcttttaatcttctttttgttttccctccatttcttctacaaggagaatagatygaccatttgctaactatgctccagcacaatcattcctgagctgtatacttaatgtggcaggaagagcaaatcaaaagctaacagcatgtgttccatcctttacctggaaaaaaaaagatgtagtcaaaggccaaaacttggtaacaagctaggcttcacaagaagggcatatatcatctcgaaaattatgtcaccataatctatggcagg

SEQ ID NO: 464589 - DNA, 598 bp, Homo sapiens
ataggaacatgaggtgtttattgctataaatttctctyttaagatatgagaaccaaacttcagtgtaaaattaatgctgtaatgccatataaggagaacactcatttggggaccattacacctgaattcatattctgactctactatttaagtcatcaggatctatttcctcttctacataatggaagcagaaagctttatctgtcagtgctattgtaaggaccaagtgagataaagtgtgtggtagaaatggggagtggagatgagagaaaggttactattaggagattaacccatgtgtttttcctgaattactataaactctggtcaggtaggattctattgcctcaaggaaggcatcaaacagcagaagaagagtaaacaggagccagtccttgggtttggaatttcaggagcctaacttgagagggaatggaaaaaaaaatcatgtctatctatcatcaatttggaagagtatgttataagtaggagctaactttcctttttcttacccccactccagtcttcaacttttaatgacacaaaatgttccaggctggacaacggaggcatcaatttagatgctgcagggcaagga

SEQ ID NO: 464590 - DNA, 528 bp, Homo sapiens
cccagaataacattatagccttggctcctacttccaatcagccaagctgaaatcacttgtcattctgggcttctctaccttgctgacttggtttaacattttcttctgttatgatgtataattccaacaccactagtgacaaaaatcttttcaacccttcaaggttccgtttaaatatctcctttcatgtgagcctctttattcctccaactggaagtgatttctccctaatcatttctcaaaaccctatttatcccatttcatcttgtttgacaatatggtcttttatttctctaaactgtgttcttaatttccttctccaaagctgtttctcctctctcccttctcaatraatagcatggacatttatttatattttttcaggtgaaaaatctaaataacactcttgattcttccctttaatctcacatgcataccatcagtaaatactgctggctcttgttctgatagcctcctattcacccactggtgagggaggaaaccccctccctaaatagtatgaagatg

SEQ ID NO: 464591 - DNA, 564 bp, Homo sapiens
accttgatttatattttgggcatctgtgaggcaagatatttccaaatttctttatcctgaagggggcaacccttaggcagtagtccaagagtacgtaaaaatgtgcagatggggccatttattgggcagaacacccagtaaggtaagatgactgtgtaaagtttggccaattgtccttatccttgggtaccatcctttatcatggctgtcttggttaagagatggaaaccagcaacattccactgggctccatcacataggatgatggcaattccatctgtgaartgtacaaaatctcattgcaaataactccattaattccagcgagtttcctgggtagccaaggggtctggaaaagtggtgtctttctccagtgccaaaacatggcaagaaattgaggacagagaaggccatcctctcctgcaagtagaatatacagatggcccagatttggccccatcctgtagcaaagagaccttggtagccatactgaaccttgagggtgatgtaaggcataatggacagctggatatggagggtaacaggttcacagtctgttaaagc

SEQ ID NO: 464592 - DNA, 423 bp, Homo sapiens
aaaggtcaatagctgtttgtttcttgatactgtcaggaatgaaacatctcttgatttaccaataattttcaaaaatgtagccaaggtggcagggctttatactatgtgggrcaattgcctattccctttttataagctattttatattttcatgtccttaattaatgtgtcaaatgacctcaggaggatgtcatcaatatagtttcatagcagtgcttctgggaaatgtagatgcattgaagacattccttgcaaagactgtgtgcaatggcaaagctgctggtgtactccatgggcagcctggtaaaggtgtgttgggtcccttcagagggaaaggcaaactgcatctcagaggctgccaaaataggcactaaatagactgcattaactaaacctataatagcaaaatatttactgattgct

SEQ ID NO: 464593 - DNA, 516 bp, Homo sapiens
ttcaagtcacttaaaataaatctcttatgtatttgtgtgcacatttaaagtcctgttggtcttgttccctgattgataaacagaaaggaaataacatatttgatatatatctgctatgtgtcaggaatcatgctaagcaagytacacatattaactcatgtgtggaggtaaagatttttataaccaccatgcgaaagtgtctaatgtgtattcttcagttgtcataaaagactcttccaaatatcccttagccatctctcatccttcctcaccaaagactgcataatgtggtgaccaatcataaacattacttctaccctaggagaggagttcaaacacagcagaaggcaaatgaatgaacacaggcctacaggagtttgaagcctactataaaaatgaaaaagaaaactccttgatagtcttctataaaacacaatattcaagaatgaaacatagaaagtaaacactgtgtactgctaaatatttaaaaatataaaaaactgctgcacagattcc

SEQ ID NO: 464594 - DNA, 516 bp, Homo sapiens
ttcaagtcacttaaaataaatctcttatgtatttgtgtgcacatttaaagtcctgttggtcttgttccctgattgataaacagaaaggaaataacatatttgatatatatctgctatgtgtcaggaatcatgctaagcaagctacacatattaactcatgtgtggaggtaaagatttttataaccaccatgcgaaagtgtctaatgtrtattcttcagttgtcataaaagactcttccaaatatcccttagccatctctcatccttcctcaccaaagactgcataatgtggtgaccaatcataaacattacttctaccctaggagaggagttcaaacacagcagaaggcaaatgaatgaacacaggcctacaggagtttgaagcctactataaaaatgaaaaagaaaactccttgatagtcttctataaaacacaatattcaagaatgaaacatagaaagtaaacactgtgtactgctaaatatttaaaaatataaaaaactgctgcacagattcc

SEQ ID NO: 464595 - DNA, 519 bp, Homo sapiens
tccttgcactttggaaggctgaggcaggagaattgcttaagcccaggagtttgagaccagtctgggcaacatggcaaaaccctgtctctacaaaaaatacaaaaattagccaggcatggttgtgtgcacctgtagtctcagctattcaggaggtttagggagaggatcacttgagcccaagaggttgaggctacagtgggccatgattgtaccactgcacaatctgcttggatgacacagtgagagcctgtctcaaacaaacaaacaaaaaaacaaggttcattgtggcactgttcacaatggcaaagacttggaaccaacccaaatgaccatcaatgatagactggataaagaaaatgtggcacatatacaccgtggaatattattcagccataaaaaaggatgagttcatgtcctttgcagrgacatggatgaagctggaaaccatcattctcagcaaactaacaccagaacagaaaaccaaacacagcatgttctcactcataagggggaggtgat

SEQ ID NO: 464596 - DNA, 558 bp, Homo sapiens
tagagacagggtctcaccatgttgcccaggctgatctcaaactcctggcctcaagcagtcctctagtctcagcttcccaaagtgctgggattacaggcatgagatactgtaggcattctttatatattyagtacttgcttggtaatattattgcaaatattgctgaagtatgggaaaagttcttaattttaacatggttgtatttttccttgagggtttattcttttttatgtttaagagatcttcacctaccctggatcagtaaagatattttcctatgttttaaaaacatcatagttttgcctttcttacttaggttttcaatttacatggaactaatttttgtgtacataggaaagaaccaatttcatttctctccatatgggaaaaatggtcccagcaccatattttgagcagtctgtcctttcccttatgatcaacagtgttattctgtcatttaagttatctattatgtataagtctgtcctgctttctgtattgtgttgcattggtctacttgtctatccctgagcaaataccacactatctgaattatta

SEQ ID NO: 464597 - DNA, 654 bp, Homo sapiens
gttctttcttgccttctgccagcaatgattccattatcaattaagtttttgaagcctctgttatagtgtttgaatgttaccatgccactctttgatttccaggagttggtggtggttctcaaaaccttcactatgctgktgggggcctttttcacacatacccaggttgtggggtaggtccagtagttgtcttggtttaaatacataattatcgaattccttctcaaggtctaacctctctggaattacctctaacctctggctaccaaggatcctctttcccagtttctttggccagaaaaattagcttctttcatagttttatctggcccagttggcaaatctcactgactggggattattacccacacggcgaagttgtgagagaaaggagagaaaaaaaattagaaaattcatgccatgcactttttagacagcattcactccttttcttggctcatctagccatagacacaggtttcacattgaaattttatatacctatggctccacctctgctactgcaagactgattcatctctgcaatagggtttgctttgcagcagggctgcaaaaaaaaaaaaaaaaaaaaaaattcacccagtactccccacttttcctggcctcagggtagaaaatgttttccttccagtg

SEQ ID NO: 464598 - DNA, 559 bp, Homo sapiens
gactcttgttatgttttagcaaagagactgatggcattttggccctttcctagaaatttttggaactttgaacttgagagagatgagttacagtatctggctgaagaaatttctaaacagcaaagtattcaagaggtgacttgtgttctgttaaaggcattcagttttataaggaaagaagagaataraagttcagaaaatgtgcagcctgacaatgcgatagaaaagaaaatcccattttctgaggagaaattcaagctggctgcagaaatttgcataagtaacaaagagccgaatattaatctccaggacaacagggaaaatgtctccaggacatgtcagaggtcttcacagcaggccttcccaacacagacctgaaggcctaggaggaaaaagtggtttcatggggtgggctcagggtccctgtgctgtgtgcagcctagagacttggtgccctgaatccaaactgctacagccatggctgaaaggggccaatgtagagctcaggtcatggcttcagagggtgccagccccaagacttggcaacttccatgtggtg

SEQ ID NO: 464599 - DNA, 500 bp, Homo sapiens
gtagtcttcagctttcctttgtaggtgaaaactctagtcaagtctctattgttttattgactcataaggtattctgttgagtgcctattttataccatgtcctcttctaggcactaggaaaataaatgtcacgagtctcgcattttaagagcttcctttatctagaaacaaaacaagccccaggaatagctaagccactatcatcttgccctgcagtttggcaacagctttctcaactgtctttctgtgttcttttccctgctgcaatagaaaatgaaccttttcargaataaatgaggttatatcatttctctgcccaaaaccctctagaagatttccattacatttaaagaataaaatcctaagtattagtctctgacatactttgccttaagtatctccttattgtttcttcaacatattaagcacatgtccaactcaaatcctctgaaccagctgtcatttggtctgaaacatttttgccctaaaaattttcatgg

SEQ ID NO: 464600 - DNA, 611 bp, Homo sapiens
ccattcacattagcaagagaacaatagcaagcggctttgaactgcttctccatctggcatttcagttactgtttagattaataagtacaataggaggtgaaattttctgggccagaatttaatggggctcagcactgctcctttcagaaagggcccatccacctgtgaacaaagccttctgtctatttccgtggtcctgactaaagtgactgatgagatgtgagtctgtttcaagttgcaaaagggaaggacttacattccagttaactacactgtcttcttctgatacgaattatgccagctgagataatcaataacttatcaggctgctgagagcccattagcatgtrgttaaaatgctagtgttcacggcagtattcttcaatgtggaaagtggccctttggtataacacacttcaatattttaagctcaataataataactcttgtttaacaagatattagattgactcttataaattagaagattgttttcatgatctgtgtaatctactatattaataaatatagaactgaaggctcttggcacaattcatttctcacttccacttacaagtgggctctaaatataagggatcaggcttacccaa

SEQ ID NO: 464601 - DNA, 581 bp, Homo sapiens
tcccatggtcttgggcagttcctcccctgaggctctgcaggggacagcctccctctctgctgatttcacgggctgcggttgagtgtctggggctcttccaggtgcacagtgcaagctgtcagtggatttgccattctggggtctggaggatgatggccttcttctcamagctccactagggtataccccagtagggactctgtgtgggagctctgaccccacatttcccttccgcactgccctagcagagatcctccatgagagcccacccctgcagcaaacttctgcctggacatccacgtatttccatacatcctctgaaatctaggtgtaggttcccaaacctcaattcttgacttccgtgcacccacaggctcaacaccacatggaagctgccaaagtttagggcttaccccctctgatgccacagcctgagctctatgttggaccctttcagccatggctggagtggctgggacacagggcactaaatccctaggctgcacatagcacaggtaccgtggacccagccaacaaaacactttttcctcctaggcctctgggcttgtgatgggaagggc

SEQ ID NO: 464602 - DNA, 581 bp, Homo sapiens
tcccatggtcttgggcagttcctcccctgaggctctgcaggggacagcctccctctctgctgatttcacgggctgcggttgagtgtctggggctcttccaggtgcacagtgcaagctgtcagtggatttgccattctggggtctggaggatgatggccttcttctcaaagctccactagggtataccccagtagggactctgtgtgggagctctgaccccacatttcccttcygcactgccctagcagagatcctccatgagagcccacccctgcagcaaacttctgcctggacatccacgtatttccatacatcctctgaaatctaggtgtaggttcccaaacctcaattcttgacttccgtgcacccacaggctcaacaccacatggaagctgccaaagtttagggcttaccccctctgatgccacagcctgagctctatgttggaccctttcagccatggctggagtggctgggacacagggcactaaatccctaggctgcacatagcacaggtaccgtggacccagccaacaaaacactttttcctcctaggcctctgggcttgtgatgggaagggc

SEQ ID NO: 464603 - DNA, 605 bp, Homo sapiens
gcgaactacactcactcaaacctgctgcactcaacccctcacaggaggagcagacgcagaagcccaggtgatcgcttttgggcactggcaggaacaaattgtatactggccccacagcagcatctaggggggtgcctgtgatccctgaagccccagaagcaatgttacagtcagtgctcttttagctttgccatcygcaggtggcttaagtgttgacagctcaatggaaggttagcgtgacagccttttgcacctgcacccaagttcttatctggtgtctaggaagaatgaggtcacacaaacaaactggagatggtaaatgcaggggcttttattgccaaataaagtggctttcagagtgagagggaagggaagctggaaagggaacagagctgtgaggtaattttctgaagctatgccattaagccatccctgtgaagtcaagctgcttctctgcgacatcgaattgtagtctttaatgtccatgtgctcctcttcttctcctccctctggcagcagagcctgggtttttatgggcacaggtttggggttcagggtaggccatgggtggttttggaaaaggcaacatttgaatgggaaaatag

SEQ ID NO: 464604 - DNA, 591 bp, Homo sapiens
tagggaagctaacagtgcagccttcagtctgtggccaaaggcccaagagcccctggtaaaccactgggattccaagagtgcaaaagctgaggaacttggagtctgatgtttcagggcaggaagcatccagcaagggagaaaggtgaaggccagaagactcagcaagtctgctttattctatccatgttggcagttgattacatggtgcccacccacattgagggtgggtctggctctcccagtccactgactcaaatgttaatctcctttggcaacaccctcacagacacacccaggaacaatattttgcatcctccaatccaatcaagttgacactgtattaaccatcatagccctcttcttgactaagttgtatgaggtcctaaggagttgggccagatggaaataaaaggttgacratgctctataagggctaagaaggtctacaactacttcagtatggtaggacatgaataggcctgcatcttatctataaacacagactgagtgactagtcttacccgaaaagatgacacccgagcatttaactgataaacctggactctggactttgcattgactgcccatact

SEQ ID NO: 464605 - DNA, 436 bp, Homo sapiens
cagttaactggtgaccttaattctatmtgtaaccttaactctattttgccaggcaacataacataatcataggttccatggattaggacatagacatctttgagtaatgggaagtttcattgttctgcctaccatgagaggacttctacatattaggtggatttgtatgcctacaggcaagaccaagtaggaatgtttattcctgttcaaaaagattcattaagagagtgagacaggatctcgccttgtctcccaggctgagtgtagtggcacaattatggctcactgcagcctcaaactcctgggctcaagcaatcctcccatctcagcctcctgagtagctgggacttcaggcacgtgccaccacacctggctaagttttttgtttttttgtttttgagacagggtcttgttatgttgcccaggctggtttcaa

SEQ ID NO: 464606 - DNA, 406 bp, Homo sapiens
aatgcaaatattagatagtaaccacttcaagcttcaaagcttacaaagtaaattataaaatctggatccttctcaaaaaacaaaggtcaagttgtgtaattaattataatttggtgtgggaggcttcagaggacttttcttaactgtagggtaaaatctatcctaaattttagaatataggaacaagaatcatatatggacatttatacattctttataaaatttttgcacagtaattttttttattatactttaaattttagggtacatgtgcacaatgtgcaggtttagttacatatgtatacatgtgccatgttggtgtgctgcacccatcaactcgtcatttaacattaggtatatctcctaatgctatycctcgccgctccccgcaccccacaacaggccc

SEQ ID NO: 464607 - DNA, 602 bp, Homo sapiens
tttatcatgtattctaaaaattttacaaaagttacatttctttttttgtgtatattgtaaatctacataaataacacattgatcrtaaaaagaaaatgaatcccattgtgaagatattatagcatggtcatgtttaaatgcctatttaaagggaaactatttcaaatgaaagagaatggaatgtagatcaattcacttttcattatcacatgatatgagcagaggaatgactttcaaagtcttcccaaacctgcctgaaataaaggcaggtctattctttcttggtagataggaacaaaaacatggcttgcatttattctgccaattcattttctctaacctgcaacaaatggtcaattcaagattatcaaggactcattttagtttcaatttctttcctcagttgcaggggcgcgtggaaaacataaatactaaagtcctgatttgacttccaacttgaatctctttctctttctttacatccagattaaggacaaaatctggaagacctttaattactgtcagcctcttctcaatttccttatttacagcatcctctgaacgtgaaaaagagaaatagaatcactggttccatcaagggc

SEQ ID NO: 464608 - DNA, 642 bp, Homo sapiens
tgatgctgctgactagaagtgagaacactaaaccacaaattagttgtttttctatctctccgtactcatttgtctaggggctgaatgtgacacgacagtgattttacttgccacatgatctaaagccatgttagactgcattaacgtttgcacattgtatttgaattggttatcataactttgtgaaacacttttaggagagcattaataaaatgaaggattccttgaaacaactaccacattgaactcaagacacrgtgtttgaagaaaatttgggaaagtaaatatatttagcctaagtagaattaggatggatttgagcattgttatgaaattcttgaagaactgttatgtggaatacatgcacctcatatttcatgctctgatgaacaaagaataatctttggaattcagtaaggtaagaatccagtaggctatgagtcaataaaggacaggtatattttaaaattccttttctatctaatcatagtggtttttgtaagacttcaatataataggccttcaaaaatatgctaattgaattaataagggggtagatattgaatttaacataaaaaaaccttgcaataattttaatggctgattgagacagcccttaccagagaattgttcctgtcaaag

SEQ ID NO: 464609 - DNA, 548 bp, Homo sapiens
tgagcctttgaccaaacaaggaagaatgctctcaattatgctatttcaacatttcctcaatattttaccagcacattttgatgtatgttcagttaaaagagtcagagcaagctcatttcccggaatataattctcatacacaaaggtatacattggttaaaggcattaagaaatacattgactagattctccagcccctctaataattggtaaattaaggagaatgtatatgtgatgcccaaatgcagaagtcagctaagaaaatctaaaggggagcttgtatttctaaagattatacatggtctttacttacccttgtggcctacattagtaaatttgcacataatcttgtttcatagtagctgcccccacagcaaagaaagaaatcacacagggtaagtttcccccagagacacaaagaagccaataatcctgctaacatttgctcctgtataaaaggccaagcctgcactctagtcaggtagctaccyaacatttccctgctgtatttcctcaatgaggaaacaggatacatgtttccactcaca

SEQ ID NO: 464610 - DNA, 605 bp, Homo sapiens
gaatggaataatacagtaggttagtgcacacgctgatttgagtatatgatttgaaactctgctgcagggtaataatgagaagcataccgactcttagctcacattattattattacttaaaaatttctacagacaaaacatcagttgtggcctctgctctagcaagattattcccacctcttttcccgtggggtgtcactgctgtgaggtctctggtagcctgtggagcacatggttgggtagccaagtcaaagttcaagagagttctgggctggacgttccatttaggtgtcattccacatagatgctattttgaaccataaatcartatcataaccaagtgctcaagtgtaaatagagacccgaggagtgagcccaggggtctgaaaaattaggaggaacagcataggggactgagaaggagtcaataaagtgagaggaaacccagaaaagcttgacgtctaagcggtattgcgagtgaccaaatagctcatatgaaccttcatagtcctatgaacagtggaaataataattggatacatagcatcatgggtgtcagtagtggtcttgagaagtctgttctggtgacattgtagggacaaaag

SEQ ID NO: 464611 - DNA, 529 bp, Homo sapiens
ggtgtggtattttgttgttttggcagccagaacagacgacagaaaggtttgtgactgtaactagctgagaaactgagccaagtaaggtcagattttacaggggaggggacccaggattgtttgggcttgcggctgaccttggaacagggacacaacctgcagggggttgttgtgagagttcttgagacagtcctcaggcatctggtctggcrggatctgcaccagcattcctgcatccacctgctgcagaaattgccaaaggatcccacaagatctatgttcttggatcatagctgatgcacgttctttctttaggaaataaattcaggaataatttctccttgtttttggacttgtcaaaatcagggatgactccactctttgacctaggactttctttggtttatttgctttaatcacacagcaaaagccatccattcaacagatggttattgagtgaccgctatgcaccaggcacttttgcaggcttgaagatacagcccaagacagcaggacaagctccctcccc

SEQ ID NO: 464612 - DNA, 529 bp, Homo sapiens
ggtgtggtattttgttgttttggcagccagaacagacgacagaaaggtttgtgactgtaactagctgagaaactgagccaagtaaggtcagattttacaggggaggggacccaggattgtttgggcttgcggctgaccttggaacagggacacaacctgcagggggttgttgtgagagttcttgagacagtcctcaggcatctggtctggcaggatctgcaccagcattcctgcatccacctgctgcagaaattgccaaaggatcccacaagatctatgttcttggatcatagctgatgcacgttctttctttaggaaataaattcaggaataatttctccttgtttttggacttgtcaaaatcagggatgaytccactctttgacctaggactttctttggtttatttgctttaatcacacagcaaaagccatccattcaacagatggttattgagtgaccgctatgcaccaggcacttttgcaggcttgaagatacagcccaagacagcaggacaagctccctcccc

SEQ ID NO: 464613 - DNA, 547 bp, Homo sapiens
ggcccctttctgtaagaggctgagacaaggctctgagaagagggggcttctgcaaagggttgggggaagagtgttttaggcagagggaactaccagtcattgcacctttactgtgactttattgactcccaagatgacactggatagcactgggatattccctactctgcctccagcctcctccaaagggagccttgacatgtaagcaagcctggagctgctccctgagacaaagcaactgaagagtgggtttcctgcaacacaaagtcccaccccscaaccccaagcatggtgggaccccgcttctaggaaggtggtcatctgtgcctgacatcttgctgtcactcactcagatgccaaggggcaacatggcccctgtcctggaatagaaacagaaccacatcgagcaggagtccctacggtccagcaatctcattgctggttatatatccaaagaaaataatatcaatctgtcaaagagttatctccacttccatgtttattgcagcattattcacaatagccaagatatagaatcaacctaagt

SEQ ID NO: 464614 - DNA, 626 bp, Homo sapiens
catgtttattgcagcattattcacaatagccaagatatagaatcaacctaagtgtccaccaatgaatgaatgaagaaaatgtggtatatttacacaatggaataaaatttagccataaaaaagaataaaatcctgtcatttgtggcaacatggatgaacctggaggacatcaygttaagtgaaataagccaggcacagaaagataaacaccacgtgatctcactcatatgtgaaatctgaaaaagttgatttcatagagagtaaaataggcattagcaggggctgggaggagtaggagggaggggtcaaaaggtacaaagttacagtgagataggaggaataaattctagtgttccattgcacagtaggatgacaatagctaacaaaaatatattatatatttcaaaatagatagaacagaagattttgaatgtttttactaattcagggcaggcaagccccaaagtggggcttagcccatgaggattcttggctttgcctaggaaagaatttgagggcaagctggcggtagaagaaaacaactttattgaagaggtgttactgccctggcagtattacagctctgtgactgctccatcagactaaggctgtcccataggataggc

SEQ ID NO: 464615 - DNA, 565 bp, Homo sapiens
cttgttttcatggattgaaagaattagtattgttaaaatgaccatacccaaagtgatctacagactcaatacaatttctattgaaataccaatcacactcttcacagaactagaaaaacagttctaaaattcatacggagccacaaaagaccacaaatagccaaaaaaattctgagcaaaaagaacaaagctggagacatcacactacttgacttcaaaatatactacaatgccatagtaactgaaacagcatggtactggtataaaaacagagacatagtccaactraacaaaatagagaacccagaaacaaacccacatatttgtagccaactgattttcaacaaagtcaccaagaacatgcactggagacaggacatcttcttcaataaatggttctggtaaaaccatatatacatatgtagaagtatgaaactagacccctatctctcatcatatacaaacattgactcaaaatggaataaagacttaaatgtaagtataaaattaataaaagaaaacctgaaaaacacattgatctatgcaaagattttataggtaagac

SEQ ID NO: 464616 - DNA, 543 bp, Homo sapiens
caactgattttcaacaaagtcaccaagaacatgcactggagacaggacatcttcttcaataaatggttctggtaaaaccatatatacatatgtagaagtatgaaactagacccctatctctcatcatatacaaacattgactcaaaatggaataaagacttaaatgtaagtataaaattaataaaagaaaacctgaaaaacacattgrtctatgcaaagattttataggtaagacttcaaaagtacaggcaacaaaagcagaaaaagacaaatgggattatatcaaactaaaaagcttctgcacagcaaaggaagcaatcaagagagggaagagacaacctacagaatgggagaacatgtttgcaaactattcatccaacaagggattaatatccaaaatatataatgaactcaaacaactcaacagcacctacagcaaataatcagattttaaaatgggcaaaggatctgaatagatatttctcagaagaaggcatacaaatgagaaacagcatattttttaaatgctcaacatcactgatc

SEQ ID NO: 464617 - DNA, 531 bp, Homo sapiens
atttttcatacatagtatatacatatatttttatccaatctgacaatctgtgctgatttggtatatttagaccatttacatttaaagtgattacccatatggttgaatataggtgaactacattttcatttattttctatttgtcccctttatttcttgttcatttcttccccatccttgccttctttkgtcctagttaaatgcttttaggactccattttaatttttcttttggatttttggctgtatctctttgtattattctttagaatttgctcaaaggactacagtattcatacctaacctatcatcacatacctagagttaatatatgcatgtaagccaacatggcacatgtatacatatgtaacaaacctgcacattgtgcacatgtatcctagaacttaaagtataataataatttaaaattttttttaaatagatatacatgtaagagctactcctcctcctcaccaacatttggtatgatcagtcctttacattttaaccagtctggtagatgtatagtgg

SEQ ID NO: 464618 - DNA, 525 bp, Homo sapiens
gtcacggttagtaacacatggaatggggaaaaactgaaagccttttctgtaagatctggaacatgacaaggatgcccactttcaccactgttattcaacatagtactggaattcctagctagagcaaccagacaagagaaagaaataaacggtatccaattggaatgaaagaagttaaattatccttgtttgcagatgatatagtcttatatttggaaaaamctgaagactccacaaaaaaaattagaactgataaataaattcagtaaagtgtaggatacaaaatcaacatacaaaaatcagtagcgtttgtatatgccaacagtggacaatctgagaaagaaataaaaaagtaatctgatttactatagccacacataaaatcaaatacctaggaattaaccaaataagtaaaagatctctataatgaaaattatgaaacactgatgaaagaaattgaagaggacaccaaaaaatgaaaagatattccatgatcatggataggaagaatcaatgttgttaaaa

SEQ ID NO: 464619 - DNA, 552 bp, Homo sapiens
tggccttcatgttgtagtttgtcaaatgctgatctagaagggatggtgattattcttgaaatcatatgcccgagcctgaataccactttgtatttgcatttcgcattataataattggagaccacccatgccctactggccgctatgaaccctagttccttaggtatccacaagtcttatgccctaccttaaacagcattcccttgtggccctctgtgcccattgaattcttcatagaatgaagtcctggaaacattcygttgatcccacagtccccagtctcagagtcctttgagaaagtcatctttaaagaagcctgccagtttttatatgccatgaccctggagtgaaatttctgccaatttaattatgaggtgtcagcaattagcaggaattagcaccaaaaagttcaggtttcctttagtgaaaacaactcatactcagacacagtgacagccatttgccagagcagtctaatttccttttgcaccagaggttatgagcatttctggatgactgaagctactattggcaatgtgcacttgggaagag

SEQ ID NO: 464620 - DNA, 522 bp, Homo sapiens
taatataactatacaatatggtgagattgacgctgtgtctaaatacgaaaattctaaagccaacagacacttcaattggtcatatctttcactccctactaaaaccatgtaaaactgaaaaggctctgtcttttcttattgaaaaatcctggaaacatgcattcaaaatttgccttgtcccttttcacaattgctagtaactgttttccgcatgaaatccttttatctattaagatatccccatcaccctttaagctcttgttcgaaactatatggagatgataggatctgcacatagtaagcttctgtcagccgaagatagatgtcagaacaattgagcaaagagtaagatttcagcaaatccaccaattgtttggtttattgcatgtcaatttggctactggtrtttttccattgaattgactagatggtttagctacatatacactttctaattcaccatatataggtggttctaatatgacatataaggggaaaagagggttgaaaagtaaagaagta

SEQ ID NO: 464621 - DNA, 535 bp, Homo sapiens
gtatgtgtgcatccaccaaggaaggccaagtgaagacacaaccaggaataaggccttcaccagcatgcaatcatactggcacttatatcttgaacttccagcttccagcacagcaggaattaaatttctgtcttttaagacaatcattctaggatattttttataacaccctgagttaagatagtttactttctttttatgcttaaggaagtaggattttctttttttgtatgtcttttcccacccaggtttattgaggtataattgacaaataaaaatatatatattagggtgtacaaagtgatgttttgatatatgtgtatactgtgaaatggttaccacatcaagctaattaacatatccatcaccttatatggctactttttttgtggtgagagcacttgagatctactcccgtggcaaactttaagtatacaatacagtgttattractatagttaccatgatgtacattagatcccccaaaattactcatttcacaactgaagatttataccctttgaccaacaacgcc

SEQ ID NO: 464622 - DNA, 619 bp, Homo sapiens
gacccattaaaggaaggtggacgagaacagccatgaaggtatgagagagagagagatttattacagggattggctcatgagattatggagactaagaagtcccacaacctgctgtttgcaaactggagacccaagaaagccagtgatgtcattcagtctgaatatgaagtactgagacctggaagggaatggggctgggaaacaatggcataatacaagtcctggtccaagtccawaggcctgagaaccaggagcactgatgtctgagggtaggagaagatggatgtcgcgacccaaacatagacagcaaattggcccttcctttgccttttgttctcttccagccctcaacaaattgcatggtgccccccacacacacacacagagtggtgagagccatattctttactcagtttactgattcagatgccagtctcttctggaaacacactcaggtacatactcagaattaaggttttaccaggtttctaggcatcccttagcccagacagaattaaccatcacataaaccaagcagaaataagccacattaaaaaactaatcattaacttcaatagttttagggtcctaaagagacaaaaactagagttcagagccg

SEQ ID NO: 464623 - DNA, 619 bp, Homo sapiens
gacccattaaaggaaggtggacgagaacagccatgaaggtatgagagagagagagatttattacagggattggctcatgagattatggagactaagaagtcccacaacctgctgtttgcaaactggagacccaagaaagccagtgatgtcattcagtctgaatatgaagtactgagacctggaagggaatggggctgggaaacaatggcataatacaagtcctggtccaagtccataggcctgagaaccaggagcactsatgtctgagggtaggagaagatggatgtcgcgacccaaacatagacagcaaattggcccttcctttgccttttgttctcttccagccctcaacaaattgcatggtgccccccacacacacacacagagtggtgagagccatattctttactcagtttactgattcagatgccagtctcttctggaaacacactcaggtacatactcagaattaaggttttaccaggtttctaggcatcccttagcccagacagaattaaccatcacataaaccaagcagaaataagccacattaaaaaactaatcattaacttcaatagttttagggtcctaaagagacaaaaactagagttcagagccg

SEQ ID NO: 464624 - DNA, 619 bp, Homo sapiens
gacccattaaaggaaggtggacgagaacagccatgaaggtatgagagagagagagatttattacagggattggctcatgagattatggagactaagaagtcccacaacctgctgtttgcaaactggagacccaagaaagccagtgatgtcattcagtctgaatatgaagtactgagacctggaagggaatggggctgggaaacaatggcataatacaagtcctggtccaagtccataggcctgagaaccaggagcactgatgtctgagggtaggagaagatggatgtcgcgacccaaacatagacagcaaattggcccttcctttgccttttgttctcttccagccctcaacaaattgcatggtgccccccmcacacacacacagagtggtgagagccatattctttactcagtttactgattcagatgccagtctcttctggaaacacactcaggtacatactcagaattaaggttttaccaggtttctaggcatcccttagcccagacagaattaaccatcacataaaccaagcagaaataagccacattaaaaaactaatcattaacttcaatagttttagggtcctaaagagacaaaaactagagttcagagccg

SEQ ID NO: 464625 - DNA, 506 bp, Homo sapiens
actggtaacaagacaagaatgttcacttttactacttctgtgcaatattatgtaggaatacatagccaaacaattaaacaataaaaaataataaaatagacaatatgatcatctatrgagaaaaaactaaagaatctactaaaaagttgctagaaataattttagcaaagtgtcagaattgaaagccaacatacaaaatataggaactaacagttggaaatggaaatttaataacaatatcattgataatggaataaaatgtatgaagtacttagggatacatttaacaaaatatttgcaagacttgtgcaccaaaaatgccagacattgccaaattagagatgacctaatacattgagagatataacatgttcatggatcagaagactcaatgttgtttaaatgtcaattttccctgaatttctctatgaatgcaaggcaacttcaatcaaatctcagtttccagatttattttgtcaactttgcttcttgtatcctatttcctt

SEQ ID NO: 464626 - DNA, 604 bp, Homo sapiens
tgcagcactattcacaacagtgaatacatggaatcaacctaaataaccatcaacagtagattgtgtaaagaaaatgtgttacaaatacaccatggaatactacacagtcataagaaagaatgagataatgtcctttgaagcaacatggatggagctggaggccattatcctgggaaaactaacataggaacagaaaaccaaatactgcatcctcttacttgtaagtgggagcaatacaacaagaacacatggacactaagaggggaacaacagacattggggactacttgagggcagaggattggaggacagggaagatcaggaaaaacacctattgggtactatgtttattacctgggtagtgaaataatttgtatcccacatccctgtaacatgcaatttacctatacracaaacctgcacatgtacccctaaacctaaaataaaagttaaaataataaatgaataaataaataaatacaattaaaatttattttcatttcctctttgacttttcagacatgtattaatggccacatatttgtaaattttccaattttctatgctattgatttctagttttatatcattgtggtcagaaaag

SEQ ID NO: 464627 - DNA, 593 bp, Homo sapiens
tggacctggtttgaggaaagtggaccttattaggtggattaaaaagttgcaattagtccattttacatgacactatagtcagaaccaagtaattatccattatagtctgatcaaaacttkcatgaaaatcaactaaaaattcagaattaagtatttttaaaagcttgcaatgcattgaagagcaggcaatcaagtgagaatacttaggggtggaggatgggggacaaataaaagtagctacaagagccacctctctctgtaatcccagcactttgggaggccgaggtgggtggatcacgaggtcaagagatggagaccgtcctgaccaacatggtgaaaccctgcctctactaaaaatacaaaaattagctaggcgtgatggcaggtgcctgtagttccagctactcgggaggctgaggcaggagaattgcttgaacccaggaggtggaggttgcagtgagccaagatcacgccactgcactccagcctggcgacagagcgagactccatctcaaaaaaaaaaaaaaaaagaaaagccacctttcatcttcatctttagggtttttcctaagctggatgaactggaagaccat

SEQ ID NO: 464628 - DNA, 599 bp, Homo sapiens
cattcaagatcagtgttgatatgtgtgggtttgatcctgacatgttgttagatagttattatgcagctttgtttgtatggttgccttagagtgtcactggtctatatacctgtgtttttttagttgctagtaacagtctttyctttccatatttagtgttcttttagggagctcttctttaatacatgtctcatggtaatgaattccctcagcatttgtttatctggaaaggatcttatttcttcttcaattatgaagcttagtttggctggatttgaaattcttgattggaaacttttttccttaacaacactgaatataggtccccattcccttctggggtgtagggtttctgctgaaagatccactgccagtctaatggggttccctttgtaggtgacttgtcccttctctctagctgcctttaacattttttctttcattttgaccttggaggatctgatgattatgtgtcttgaggatggtcttcttggataacattttgcaggtgttctctgcattttctgaatttgactgttggcctctgtagcaaggttggggaattattcatggatgacatcctgaaatatgtttccaag

SEQ ID NO: 464629 - DNA, 560 bp, Homo sapiens
ggttgccttagagtgtcactggtctatatacctgtgtttttttagttgctagtaacagtcttttctttccatatttagtgttcttttagggagctcttctttaatacatgtctcatggtaatgaattccctcagcatttgtttatctggaaaggatcttatttcttcttcaattatgaagcttagtttggctggatttgaaattcttgattggaaacttttttccttaacaacactgaatataggtccccattcccttctggggtgtagggtttctgctgaaagatccactgccagtctaatggggttccctttgtaggtgacttgtcccttctctctagctgcctttaacattttttctttcattttgaccttggaggatctgatgattatgtgtcttgaggatggtcttcttggataacattttgcaggtgttctctgcattttctgaatttgactgttggcctctgtagcaaggttggggaattattcatggatgacatcctgaaatatgtttccaagttrcttgctttctccccatctttttcagggatgccaatc

SEQ ID NO: 464630 - DNA, 465 bp, Homo sapiens
cctattcttaccacctctattcaatatagtactggaagtcacagtcagagcaattcggcaataaaaagaaataaagggcatccaaattagaaagggaaaagtaaaattatttctgttcacagatgacatgaccttatatgtagaaaaccctaaagagtgcatcaaaaatttattagacatactaaacaaattcagaaaaatttgttgtaggatataaaaatcaacatacaaaatcagctgtgtctgtatacartaacatcaaactatttgaaaagcaaattaagaaaacaatctcatttactataagatcaaaaagaataaaatacttaggaataacattgaccaaggaaatgaaagatttgcaaatgaaaaactataaaacactgatgaaataaattttaagagacacaaataaataaaaagacatcccatgttcatgaattggaagacttcaacatcattacc

SEQ ID NO: 464631 - DNA, 628 bp, Homo sapiens
tcaggctctagtaccatagagacaagttcaaatcctagtcttactcttaagtctgtgtgctttgggcaagttgttgaacttgcctcaatttccttatgctttgaaaagaataacagtcagtaaattttatagctgaagtgaagacaaatggaagatgtaggctcttggcacattttctsacatattataaataccaaataaatagtttctattactatttatgtagaacatctaactggaagcctaatcagagaaaataaattgaaaaataaggtcctgtaaccatgacattatagctttagctcattaactaggaactttaagcaataaaaacaagtctttatgaaattcactgaattaatactctgactaaatatacttatacacttactaaagttgttaatcacaattacaagagtatcaacacgtatggtggaaaaatggtaaaatgaaaccaggatttggcagttacagatacatttgacccttagtcaacagatctttccattataaaaactgcttctttttaattgatttgagtttacaaggttttctttaaaattaaaatgttcccttaaaaaatacataataaaaaataaaaataaaaataaatgtttccctgaaggct

SEQ ID NO: 464632 - DNA, 475 bp, Homo sapiens
aaaaatatgggcggggcgcggtggctcatacctgtaatcccaacactttgggaggccgaggcaggcagaccagctgaggtcagaagtttgagaccagcctggccaacatggtgacaccccatctctactaaaaatagaaaaatcatctgggcatgktggcgtgagcctgtagtcccagctactcaagaggctgaggcaggaaaattgcttgaacccaggagggaaaggttgcagtgacgtgagattgcaccactgcactccagcgtgggcaacagagcgagactccatctaaaaataaataaacaaacaaacaaacaaataaagaaaaaatatgctacttattttccactgattttgaagcttagaattcaggattaggattcaacacaatcgtaaaaaattagtggtgggcccactacacttacctggaattcagtgctactgtatggtaagtaggtggattggtaacaggttt

SEQ ID NO: 464633 - DNA, 557 bp, Homo sapiens
ggaaaaaacactattacatattacagttctttagatcttttccccaaatgaagcctctctacttctttcatttcttcattatgtgacatggtttcagattagtcttcagtttggtctccatctttgtacataattcctatgaaaatttggtttccaggtgtgataatggtgacagccacagagttcagttgctaagggagattcagggaacctaaaaagacaatgcttayggatttatgatttattgtaagcaaaaaggtacaatatagcaacaacattaaaataaagatgtacatcacagccaaaggttggctcacagcaagagatgaaagtctggaccaagctctaattatgatcccttcatgtctagcatatcctggacatgctttcctcttggataagaaaataccaaagtgtacaaagaacatcttggaacagggatcccaaaatggattcttggctcaggctccttataacttcctgttcaggtagccatgtttcttgccttgtaaccagatccagtggcagagtcctgtaggaatctcaccaagactggg

SEQ ID NO: 464634 - DNA, 592 bp, Homo sapiens
caatcttaatagcctaaatctatcaaaaacattgaatcaataactaataaccttccaaaacagaacgcatcatgtccaaatgaattcactgctaaatgttaccaaatatttaaggaagaaattaaagcaatctgtacaatctcttttagagaatagaagcagagagaatactttctaacttattctgagaccagcatcactctaataccaaaatcagatgaagacattcaaaaaaaagaaaactatgtacctgtatctctcatgaacatagatgcaaatattctcaacaattattagcaaattgaatccaacaatgtacaaacagcattatacaccacaaccaagtgggatttatttcaggtatacaaagctggttcaacattgcaaatcaattactgtaattcatcacatcaacaggctaaaaaagaaaagtcatatgatcatataaatagatgcagaaaaagcacctgacrgtatccaatatccatttaatttaaaaaaatctcaggaaactaggaatagaggaaaacttcctcagtttaataaaaaatatctacaaaaacctacagctaactagaagtgttcctactga

SEQ ID NO: 464635 - DNA, 532 bp, Homo sapiens
gtgtcaaaaaaattgtttgaaaattttctagtcaaaaataattttttattaaatatataaaattttctatattatgcaaaaccaaaagatatgcacatttaaattttacagaaattcagaggcacatttattttacttaggtcactgttcgatgggagaccatatcctgtacccctctgccaggggtgatgtattatctggctcaaccatgtgtctggagttgggcctcagcagaaatarcctgcagctattcctcttaaaagttatgtgactttgggcagttagttttcaaccctgtgcctgtttctttatctgcccaatagggataaaaatcctttacttgctcatctggtgactgatttttataaagaactgacgtcctcggcccaaggactaccccagctccagcactccccataggaatagctaagacttttattgcaacatctttgtaatccagcttcttctctgcctaatcttgcattctttacccctcaaagatattgttgccaagaacccttcccaacacacc

SEQ ID NO: 464636 - DNA, 567 bp, Homo sapiens
  misc_feature (1)...(567): n = A,T,C or G
ttagtttctcctagtcttcttcccttcctgagttctccttaagaaacctgaaacagtatctctccacgtgcaccagctctctccctaaccctataaaatttttgccattttcttatattggctctcggtgttttctgaaggtcaatggtcaatgttgcttaatagaaaaactgcccattatagcaatttcacttattttagctcatttttctccatttcaaaccccaatgttggtttgtattgttgagtgagtgtttgcattccacattgcyaactttggaggcatatgccactggggcctgcccactgaattacacacgtcctccttttcatttctattaggctggtgcaaaaattattgcagttacttttaatagtaaacttttgtacagcaattgttggcaaaactggtatcttatgcctcaagaacagccttcttttttcagctctcanatgtattgttctttcccctccccaccaactcctgccgcatcctattcctcacttcaaaaccaactttcttagtaagatttgccacataaggcctcccagattatgctctgcaca

SEQ ID NO: 464637 - DNA, 355 bp, Homo sapiens
tgaaactcaaaatgctagaagcatttgttgaatttcagttagattttttaaaatattgacaaattgctggcagagaggacatggtagtggttgcattttggataggagattgttgcagcagtggaggatggatcccagggaggcctggtttagatgcgtactgcagtggtccaggtgctgaggtgggcaggcaggcacagatctgagaaatatttaraaagtaatttagtaggagtggatgatgacagattggctaacttaggtgagtaaatggatagcagtgatagtaagttaggcttggaatataggataaagagcagtggtatggtttcgatctgtgtttccacccaaaact

SEQ ID NO: 464638 - DNA, 581 bp, Homo sapiens
atctaagcttaccacagtggttctcacccttgacaccacattagaaccacctttaaaaaatactgatgatgctcaagttcactcacagagactctgatttaatatttctggagtgtgatctaggcatcaggaatttttaaatagccccagatatttctaatagcccagttaagaaacactgcagaacagtttcctgagccagttactagaaccagtaaatgaggcggaaatatcacaattgtccttggaaaaacaaggacaattgtgaaaaacaaggaatccaaaaacatacaggaggtaggaatgttggagtggatctattatgtgcaatctacacaaccatccccacttttttcatgcttttgcctccactcaggaaaacctgcatgatgctccctcaattaagaaatgctgtggtcagagaagtgtaaccatccttagaaagctctacataaatgcaggggtgtccctgtgccagagatygggggagggagaatattgtagaactgggctactgatttcagtggcaataatgaaatgctgatgtgaagacttggagggaataattacctgttatggta

SEQ ID NO: 464639 - DNA, 553 bp, Homo sapiens
ttaaggcctggttctaatctcatgtccttcaaaactccttttaagatcttctagtttgaaatagtctctcaagccactgtatttgtatatcatgtatctacacyagcacttatctgtctgcccagtatcagagttatttataaatgtctgtttctcctattatgttgtatgctcttagaaagcaaaaatagaattgacaaaagaaatatttgatgagtttctcgtatgggagtttataaaaacctttttggaatagttctatagatatctaaacactaagagcaaccatcctgagcctaggacatgctgatctttcaagacccacacaatttctactccttgttctatggtaggttatcactagataagaaatgccaccctgacaggccaagaatcctccccgcccctctcagcccagtgttgtgtctaaccgtggagccaggctggcgatttggggcagagcatggtgttgatatcaaaacatttggacatcatccaccacactgccttagtccctttactcgactctggatctatcatctgaggtgaacac

SEQ ID NO: 464640 - DNA, 553 bp, Homo sapiens
ttaaggcctggttctaatctcatgtccttcaaaactccttttaagatcttctagtttgaaatagtctctcaagccactgtatttgtatatcatgtatctacactagcacttatctgtctgcccagtatcagagttatttataaatgtctgtttctcctattatgttgtatgctcttagaaagcaaaaatagaattgacaaaagaaatatttgatgagtttctcgtatkggagtttataaaaacctttttggaatagttctatagatatctaaacactaagagcaaccatcctgagcctaggacatgctgatctttcaagacccacacaatttctactccttgttctatggtaggttatcactagataagaaatgccaccctgacaggccaagaatcctccccgcccctctcagcccagtgttgtgtctaaccgtggagccaggctggcgatttggggcagagcatggtgttgatatcaaaacatttggacatcatccaccacactgccttagtccctttactcgactctggatctatcatctgaggtgaacac

SEQ ID NO: 464641 - DNA, 553 bp, Homo sapiens
ttaaggcctggttctaatctcatgtccttcaaaactccttttaagatcttctagtttgaaatagtctctcaagccactgtatttgtatatcatgtatctacactagcacttatctgtctgcccagtatcagagttatttataaatgtctgtttctcctattatgttgtatgctcttagaaagcaaaaatagaattgacaaaagaaatatttgatgagtttctcgtatgggagtttataaaaacctttttggaatagttctatagatatctaaacactaagagcaaccatcctgagcctaggacatgctgatctttcaagacccacacaatttctactccttgttctatggtaggttatcactagataagaaatgccaccctgacaggccaagaatcctccccgcccctctcagcccagtgttgtgtctaaccgtggagccaggctggcgatttggggcagagcatggtgttgatatcaaaacatttggacatcatccaccacactgccttagtccctttactcgactctggayctatcatctgaggtgaacac

SEQ ID NO: 464642 - DNA, 569 bp, Homo sapiens
taatggtttggttaagcagtcaggaacttggaaggaataaacttcatggatttgtgacaaggagttttggggaaaatacatataaacaaactaatcataatgggtgaaaatatatttattccatgagaatgttctcccaaaggtgtccacagtgtaggagactctcaaatagtgtacaagatttcatgccatatgaatgtcagtcaacctctttcccactcaccgcagtatttttctcagtgagtttatgaacatcaccatggtggtaggattaagatcatagataagctcaacaagtactttcctttactgaggctgatctgaccacaccactgctgagtattcaatttcttagaggcagtgactaaccttgaaacctttaatctagtaccatggcctagaggtctcagtctagcacttgcctggaaggctgattacattggattccttttcatggagggggcaacaatttggttctcattggagcagatatttatctggatatggatttgcyttctctgtccgccatgcttctgtcaggaacatcacttacgggtttaacagatgct

SEQ ID NO: 464643 - DNA, 466 bp, Homo sapiens
acattgcctctcccccgggccgctggtgcaccacctccctaagtctcttcctgcccacccctctgctgcgtcgcctcagacttcccaggccatggctttcctggagcatcagcaggaaaattggcactgcccaagagatccctcttcccatccttttcccrtcatcagaaaaaagagggtgttcactcacataacaagccttttttgggatttccactatgcccacaccaatgaactaagcataagccagcacaggaaaacacggtctcacaagtcacaaccatccagcacccagaataggcaccaggactaacctgaaaggaaagaaatgctaacctcccagctccaaaagtgtagggcattcctcactcccagaatcatactctctccccttctcctctaaagagaggcgagcaccttctacgcatcaggcactgggctagagacttcatatatatatatatat

SEQ ID NO: 464644 - DNA, 550 bp, Homo sapiens
cacaaccatccagcacccagaataggcaccaggactaacctgaaaggaaagaaatgctaacctcccagctccaaaagtgtagggcattcctcactcccagaatcatactctctccccttctcctctaaagagaggcgagcaccttctacgcatcaggcactgggctagagacttcatatatatatatatatatatatattgcctatttttatcttaatcattctattttccaattctataaggtagaccttttctgcattttacatttgaggaaaytgaggttcacagaaattaagtaacatgattatggcgacccagtttgtaaagtaagtggtagaatcaggattagaagttttcaccaatgccaacatttatcttattgctccttccgtgaaagcaaacaggtctcccaactggaattgaactgatgaaagtaaggttggctcttgttagatcacatgccacaggtgaccaaattcagaaactgtgggggtatctcttccctcaaaccctcccattctccaacttctcccccagactcctcaactta

SEQ ID NO: 464645 - DNA, 557 bp, Homo sapiens
atctcgggcaggcctggagattacaggaaaatgccgttttcctctgaatgtgcagaagggaagagctgcccagatacagacacactcatgaccctggagggagagcagggtatacaaggtaaattttcccttcgtgcttggctgacagagaactaaagcagtgaagaaactggatggcttgctagaaaagtccaggaagttcgcctcagggctgggagaaggctgaggtctctgactgtgatcatcccaagtcaatgaggtcaaacaactctccacccggggaccattcatcatggcatccaggacagctacgttgcttcagcaagggcttcacaaatgtggtttattccgcacctggctcaggcaatgactaacaaaagttgaaaraaaaaaaaaaaagtcatttgggctgtggatgtgaggtgattctctaaaggggcttaacctggcaatcaccacatagctaagaaggaccccgtaagcagatattcaatgcaccagagaaaaggacaggacgagggccaagggtgggaactgaggttctcccatgccctccc

SEQ ID NO: 464646 - DNA, 608 bp, Homo sapiens
gatctctttgttgtgctataatgaaggggaagaaaaagcaacattttttatatttaaattaaatttatttattttaatttcagcttttatttttgattcagggggtacctgtgcaggtttgttacctgggcatattgcaggatgctaaggtttggaatacaattgatcctgtcacccaggtagtgggcgggtagtacctgatggtttttcaacttttgcctctctccttccctcctccttctatacaatagacactactactccctagtgtctattgttgccatctttatgtccatgagtacccartgtttaactcccacttagaagtcagaacacggggtattttgttttctgttcccgtattaatttgcttaggacgatggcctccagctgcatccatgttgctgcaatagccatgattttgttctttttaatggctgtgaggaacatttattgaaggccttcagtgtaccaggtattttcacctcacaacactgtgagatagatagtatgttattatttccatttcatggaaaagaaaattcaggctcagagaagtgaagtaactttcccaagatcactcaataagtacagaaaaggttcacctg

SEQ ID NO: 464647 - DNA, 529 bp, Homo sapiens
tgcttttcttttattttgaaaggtgtttcagtcatgtccaagatatagtattaggtggtctattgaaaaaaaaaaaagtcgtaagacacaagatcaagaacttttctgccaaatatgctgttaactcagacaccctcagacatgtcactctgaaatagaggtatttccttgtgtgtaaaagtgaggtacaataccctgtacctgtcctgataatttagccattgatgttcaaagcctaattcaataatgatatggttaggctttgtgtccctacccaaatctcatcttgaattataatccccataatccccatgtgtcaagggagagaccaggtagaggtaatygaatcatcagggcagttttccccatgctgttctcgtgatagtgagtgagttctcatgagacctgatggttttataaggggctcttccccctttgctcagcacttctccttcttgccaccgtgcaaagaaggtgctttgcttcccttcaccttccgccatgattgtaagttcctgaggcctcccta

SEQ ID NO: 464648 - DNA, 529 bp, Homo sapiens
tgcttttcttttattttgaaaggtgtttcagtcatgtccaagatatagtattaggtggtctattgaaaaaaaaaaaagtcgtaagacacaagatcaagaacttttctgccaaatatgctgttaactcagacaccctcagacatgtcactctgaaatagaggtatttccttgtgtgtaaaagtgaggtacaataccctgtacctgtcctgataatttagccattgatgttcaaagcctaattcaataatgatatggttaggctttgtgtccctacccaaatctcatcttgaattataatccccataatccccatgtgtcaagggagagaccaggtagaggtaattgaatcatcagggcagttttccccatgctgttctcgtgatagtgagtgagttctcatgagacctgatggttttataaggggctcttccycctttgctcagcacttctccttcttgccaccgtgcaaagaaggtgctttgcttcccttcaccttccgccatgattgtaagttcctgaggcctcccta

SEQ ID NO: 464649 - DNA, 521 bp, Homo sapiens
aaacctggggacttccctgagggtagaatgggccagttattgatcatagatattcctatgatgctgttagagcacttagctgaaagtccctggagcttaaattactaaaatctagagaaaaggcatggtttcttgacctctctagatcctggaacarcttgtatccaagagctacacatgattctagaccctaaagttttctgagaagagatgcaaaacttctacttgagctgtttttaaacatctttggtaaaatcacgaggatctgttgagcttaatgatttgaaatttagtccaaagattatcagtattacctgcctggacccctagaagatttttggtgggcttcatggagcatagaaacccctgtgttcatttcaaagctttaggggaagagggaccacagtcttgatctattcataaagcactcttgacccaaaaaagattaaaagtcactgttctaggtataggaggtcaaaaaagattatttcacatcaacctccaaagtaattgaaacaacc

SEQ ID NO: 464650 - DNA, 521 bp, Homo sapiens
aaacctggggacttccctgagggtagaatgggccagttattgatcatagatattcctatgatgctgttagagcacttagctgaaagtccctggagcttaaattactaaaatctagagaaaaggcatggtttcttgacctctctagatcctggaacagcttgtatccaagagctacacatgattctagaccctaaagttttctgagaagagatgcaaaacttctacttgagctgtttttaaacatctttggtaaaatcaygaggatctgttgagcttaatgatttgaaatttagtccaaagattatcagtattacctgcctggacccctagaagatttttggtgggcttcatggagcatagaaacccctgtgttcatttcaaagctttaggggaagagggaccacagtcttgatctattcataaagcactcttgacccaaaaaagattaaaagtcactgttctaggtataggaggtcaaaaaagattatttcacatcaacctccaaagtaattgaaacaacc

SEQ ID NO: 464651 - DNA, 618 bp, Homo sapiens
gaaaaagaaaaggaagagaaagaagtgaagagagggatgaggaggacaggaacaaaaaggggaagaaaggtgaagagatttccttaaagtctctgcaagaatctgttaagaataagcccccagttagaagctcccttgggcttcaaaaacattagaatgaatagatataacttgactctccctaagacatgattcttccgatttatcagtctattatctttctctccaggacacacctgcagccttacaaaacaatgagtctttcattaagctgtggctcttcatccaaaagttcccctacttawaagcagaaagtctataagtccaagggctctcagggcacctgcttttaagtgtctgtggtgaccattgagaagggggccactggaggccctgcggcctcaagggcaaaccgatatagtcacaggaataatcaaacagcagcagaaggcttcagaacaagcacatcacaaaaaacactgaactcaactccaatggaagttgcgtcacttggtggctgtgtgattctgggcaagtcccttaatgtctccaagccttaatgttctcatgtataaaaagggtgcccctttttgtaaaaaggctttctgactgtgacaa

SEQ ID NO: 464652 - DNA, 335 bp, Homo sapiens
cattctcacaatctggaatgatctctccactccattccatcctaccttgatctattccctatctagcaaacatcttttatctttcaaggccaagctcaaatatcatgtcctcaaggaactgaggaacttcctcagcatgtgacttgttcttcagttttgcactgattcccctgtactttgtgttgtaattagttcttgtagacagagagaatgtctgactcaacttggtgttagtctaggctgcattgcacattcttttgyggcattttacttgtatggggttatgggcagcagcatatccctgaattcacatctccatctgaattaacacttag

SEQ ID NO: 464653 - DNA, 585 bp, Homo sapiens
gttctcaaaaaaccaaattgtccccattctgaacatttttttgaactttctcaattgcagttagtcttctgggacattgaagaaggcctagaactcaatcaaggaacaaaaatatctaagcattgtatttaaaaaacatgtgttagaggtttattaccttaggagatttttaaatatcatttatctgttaaatttagttgttgcatcagacattttgctcatttttccctttaataattatatctttataccactatctgaatttgtgtctttactctttttcaccttgaaaagggctttttcttttgattatataaataatagatactcagtgtaaaaaaagttcaaccataacaaaaacatgaagaaagttaaaaaatcacctaaaatgccactaccctgatataatcaccatttgctttcakcgactgtatctatgtaatccacatatctagatctatgttcatacagacatatacacacgtgtgactttttatagaagctgtgcattttaaaaattatgaacgcttttttcagtgcagtgttctagatatttctgacacaaggatccaggaaataggttgg

SEQ ID NO: 464654 - DNA, 598 bp, Homo sapiens
actgaggagacattggagcaaaaactggagggaggcaaggaagtgagtcaggcctgtatctggaggaagagtgttggagcagacagaccaaccagtacaagagccctaagattggtgtgggcctgacatgtttgagaagtagtaaggaaagcagtgtagccggagtccagcaatggagtaggaggaaaagagaaggaaatgaagtcagaaaggtaacagcaccagatgacatcagtcattgtgaggactttggtttttacactctgagaagtagagagccattgcgggactttgagcagaggagacacatggtctgacttatactttctaaaaagacctatttggctgctatgttgataatagactgtagagagaagagtggaagcagaaagaacagataggaagctgttgcaataatccagggaagcaatagcaaacgtggtagcggtggggtggtgagaagtggtcagattccagacatgttttgaaggcagtgcaaacagaatttgctgaaggaccagatatggagtataagggaaagaaggcggggagaaaaagatgactccacagaaaaayacagttgccatcaattaaaatg

SEQ ID NO: 464655 - DNA, 536 bp, Homo sapiens
tccaattcaagtgcccaattcacagtgatccgaaaagaaagaccaggccaaggaaaagaacaggtcgtaacctgggtcagtaagacagagagagagagagaaagagagaaagacaaagagagagaactggaagttgagagggatacaaccagtttccctttaggggtgcctgtggctttccatggaagagaaagaactattgacgacattaagttggtttgttgtggagaaaaacaccacaaacttcttagtacagattgagtaatcctaatccaaaactgaaattcgaaatgttccaaaatctaaaactttttgattgtcaacatggtgcttcaagaaaatgctcattggagcatttcagacttttaattttcagattagggatgctcaactggtaagtataatgcaaacattccaaaattcaaagagacctgaaatccaaagcacttttggtcacaagcacttcraataagggatacttaacctgtatatgcatttgtctctcagcaaattggtaacaagtagaggctcaaatc

SEQ ID NO: 464656 - DNA, 552 bp, Homo sapiens
tgccttcctttctaagcttaatcatttctagctttgcatttaaagtgagaaacttgaaacttttcctttcacttaacacttagaggccattgtagggttattaactggactaattttaatattgttgtgtctcaggaaataaggaggctcaaggagagggagagagatggggraaataccagtcagcagagcactcagaaaacacacaacatttattgattaagtttggcatcttatatgggggcggtttgtggcgctcccaaatagttaaaatagtaacatcaaagatcacagagttcaggatcagcctgggaaacatggcaaaaccctgtctctcaaaaaaaaaaaaattagctgggcatgatggtatatgcctgtagtcccagctgctcgggaggctgaggtgagaggatgagccaaggtaatgccactgcactccaggaggcagacgtttcagtgagccaagatcatgccactgtactccagcctgggcaacagagccagaccccatttcaaaaagaaaaacaaatcataaatcatagatcaccttga

SEQ ID NO: 464657 - DNA, 547 bp, Homo sapiens
tttccatcagggaaggaaatcactagcctcaggtgcaggtgtctgggtagcagctccctgcgctggacctacagttgttgggactccagattggcttcttttgtagctacttccatgcctttcctatatgaagggacttgaacaaagaatcccagaaggggccaggcacagtagttcacgcttgtaatcctagcactttgggaggccgaggcgggtggatcatgagatcaggagttcaagaccagcctggccaagatggtgaaacmccatctgtactaaaaatacaaaaattagccaggcgtggtggtgggcgcctgtaatcccagctattcaggaggctgaggcaggagaatcgtttgaactcgggaggcggaggttgcagtgagccgagatcgcaccactgcactccagcctgggtgacagcgagactccatctcaaaaaacaaacaaacaaaaaaagaatcccagaaggtggcactgttgatggaaatggtgcaactttgggatattgctttaggagtaaaatcctagaaaaatcccagtggtt

SEQ ID NO: 464658 - DNA, 547 bp, Homo sapiens
tttccatcagggaaggaaatcactagcctcaggtgcaggtgtctgggtagcagctccctgcgctggacctacagttgttgggactccagattggcttcttttgtagctacttccatgcctttcctatatgaagggacttgaacaaagaatcccagaaggggccaggcacagtagttcacgcttgtaatcctagcactttgggaggccgaggcgggtggatcatgagatcaggagttcaagaccagcctggccaagatggtgaaaccccatctstactaaaaatacaaaaattagccaggcgtggtggtgggcgcctgtaatcccagctattcaggaggctgaggcaggagaatcgtttgaactcgggaggcggaggttgcagtgagccgagatcgcaccactgcactccagcctgggtgacagcgagactccatctcaaaaaacaaacaaacaaaaaaagaatcccagaaggtggcactgttgatggaaatggtgcaactttgggatattgctttaggagtaaaatcctagaaaaatcccagtggtt

SEQ ID NO: 464659 - DNA, 472 bp, Homo sapiens
gacaagagtgacttctgatagtccactgctacactcccaccagygccatgacagtttacagatgccatggcaacaccaagaagttaccctatatggtctaaaaagaggaggaaccctcagctacaggaattgcccaaccctttcccagaaaactcatgaataatccatcccttgtttagcatataatcaagaaataaccataaaaatgggcaaccagcagcccttggggctgttctgcctatggagtagccattcttcatttctttactttcttaataaacttgctttcatcttactctatggatttgcctcgaattctttcttgagtgagatccaagaaccctctcttggggtctggattgggacccctttccaggaacaaggagactaaaaataaacatcttgtgaaggaaaaataaatctcaggatcccaagatcactaagccaaagggaaaagtcaagctgggaactg

SEQ ID NO: 464660 - DNA, 554 bp, Homo sapiens
ggttttcacctcgtgacccctgtggcttgggcacttaataagctcccaccttttcaagtgatctccgggaagcttggcatcaattggtggcccaccagtaatcaagagttggaatcattagggatacatttttgtatcccccttgttcctygtccttgtttttcctttcttttattcatctacctttaatttaatcttgattaactatatctgtatacgcactttaaatttttttaaagctatcccttacaggaaggaaaatcttttctagaataaggaagaggaggaaagaagaaaaaaaggagaaggtaaagaaggtcagagactactaaaagtccaaggaaaccacgaaggcctaagtcagatagaatggccagttcttcataagcatggggtaatgtataatgcatagcaaaacaaacatcaagaatagaaacctgtcagatcagagcatcagagctagtcggttgcaggagtcatgaagcatgatatgctgttaggaggagctccagagagcagagccccatatgaaccataagcaaggactgtttgat

SEQ ID NO: 464661 - DNA, 528 bp, Homo sapiens
gaacagatatttcaccaaagaagatatatgaatgactaataagtgcatgaaaagatgctcaacatcatcagtgccctgtctgaaggcagcagttgctacttcactccagtcaactgcaatgtggaaatacaggtatagaattgccagatcacctagttctccccccaccaaaagcyagaaattcagatttttatctaagattttccttttttccgtgttggaaacaaattcaaaatatttcttaaaacatcacatacttgaaacaaagcatatctacaggactgatatgacttgtttgtgacttcctccataggttttctatctggggagggacatggcagaagcagtattttgggaagatatttctggcagcagtatgtacagtctagactgaagaggagaaggtgaagccagggaagactaacaacgagtccagagatggagaggaacaaacctgactggggtggtggcacaaaggagagcatgtcctgttcatccttccctccacaaagcagctggacaagaccc

SEQ ID NO: 464662 - DNA, 586 bp, Homo sapiens
gtttaaaagggcatttaccaattcyatggcacaagggtggattgagcacaggctgaacctcacactttcattccacattatatatatgatatggttaggctttgtgtccccactcaaatcttatcttgaattgtaattccaataatccccataaatccccatgtgtcaaaggagagaccaggtggaggtaattgaatcatgggggcagttccctcatgctgttcttgtgacagtgagtgagttctcacaagatctgagagttttataaggcgctcttccccctttgctcggcacttctccttcctgtcaccttgtgaagaaggtgccttgcttccccttccaccatgattgtaagtttcccgaggcctccccagctatgctaaactgtgagtcaattaaacctttcctttataaattacccagtctcaggcacttctttatagcagtgtgaaaatggactaatacaatatgataaattgagtatttaaaactccatccatacataaaacgctaggaagagatgtcttcatggaccaaaaataaagtttctacccttaagaaaaggagaaaaaaaaatatatggaag

SEQ ID NO: 464663 - DNA, 586 bp, Homo sapiens
gtttaaaagggcatttaccaattccatggcacaagggtggattgagcacaggctgaacctcacactttcattccacattatatatatgatatggttaggctttgtgtccccactcaaatcttatcttgaattgtaattccaataatccccataaatccccatgtgtcaaaggagagaccaggtggaggtaattgaatcatgggggcagttccctcatgctgttcttgtgacagtgagtgagttctcacaagatctgagagttttataaggcgctcttccccstttgctcggcacttctccttcctgtcaccttgtgaagaaggtgccttgcttccccttccaccatgattgtaagtttcccgaggcctccccagctatgctaaactgtgagtcaattaaacctttcctttataaattacccagtctcaggcacttctttatagcagtgtgaaaatggactaatacaatatgataaattgagtatttaaaactccatccatacataaaacgctaggaagagatgtcttcatggaccaaaaataaagtttctacccttaagaaaaggagaaaaaaaaatatatggaag

SEQ ID NO: 464664 - DNA, 586 bp, Homo sapiens
gtttaaaagggcatttaccaattccatggcacaagggtggattgagcacaggctgaacctcacactttcattccacattatatatatgatatggttaggctttgtgtccccactcaaatcttatcttgaattgtaattccaataatccccataaatccccatgtgtcaaaggagagaccaggtggaggtaattgaatcatgggggcagttccctcatgctgttcttgtgacagtgagtgagttctcacaagatctgagagttttataaggcgctcttccccctttgctcggcacttctccttcctgycaccttgtgaagaaggtgccttgcttccccttccaccatgattgtaagtttcccgaggcctccccagctatgctaaactgtgagtcaattaaacctttcctttataaattacccagtctcaggcacttctttatagcagtgtgaaaatggactaatacaatatgataaattgagtatttaaaactccatccatacataaaacgctaggaagagatgtcttcatggaccaaaaataaagtttctacccttaagaaaaggagaaaaaaaaatatatggaag

SEQ ID NO: 464665 - DNA, 586 bp, Homo sapiens
  misc_feature (1)...(586): n = A,T,C or G
ttattcagcatcacaatcagaccattatatttagcaatcaacagcatgggtggaaaagaaaaaaaaaaaaactggccgggtgtggtggctcatgcctgtaatcccagcactttgggaggccgaggcaggcggatcacgaggtcaggagatcgaaaccatcctggctaacacggtgaaaccctgtctctactaaaaatacaaaaaattagcccggcgtagtgactggtgcctgtagtcccagctacttgggaggctgaggcaggagaatggcgtgaacccaggaggtggaggttgcagtgagccgaaatcgagccactgcactccagcctgggcaacacagygagactccatctcaaaaaaaaaaaaaaaaaaaactacanttaaaaccctttgttgngaatgctttacactnttccgcagaacagaaactaaaataacctgttatacaattagtcacaaatacagtcctcctcaagtttttttgcccatacacatgagtatttgtctcaaacatgtcttctttatagtagctaggccctgccaccactgtgcttggctgagttcacaaatcttttgtaacctgtag

SEQ ID NO: 464666 - DNA, 484 bp, Homo sapiens
aacaacaggtagaaatattcagattccctttaaaaatattttttgcccaagtctaatgaggtatcactgaaagacaataaactacaggtatttaaagtatacaatttgatctcttttgacatgtgcatacaccaaaactaagatgacaaacatttctattacttccagaaattttcttgcacttatttataatttatttctccatctacccatttccaatctctgatcagcttactgtcaccatagattaaatttcataatctagaactttatgtaaatggaataatagaatatattcttttatttcyggcttctttcactaagcacaatgattttaagatttatctatgtatcagtagtttgtttcattttattcctgagtagtatcacattgaatggatataccacaattagttactcattcacccatttttggatatttggattgtctccagcttttgactctaacacatgaagctgctat

SEQ ID NO: 464667 - DNA, 484 bp, Homo sapiens
aacaacaggtagaaatattcagattccctttaaaaatattttttgcccaagtctaatgaggtatcactgaaagacaataaactacaggtatttaaagtatacaatttgatctcttttgacatgtgcatacaccaaaactaagatgacaaacatttctattacttccagaaattttcttgcacttatttataatttatttctccatctacccatttccaatctctgatcagcttactgtcaccatagattaaatttcataatctagaactttatgtaaatggaataatagaatatattcttttatttccggcttctttcactaagcacaatgattttaagatttatctatgtatcagtagtttgtttcattttattcctgagtagtatcacattgaatggatataccacaattagttactcattcaccmatttttggatatttggattgtctccagcttttgactctaacacatgaagctgctat

SEQ ID NO: 464668 - DNA, 593 bp, Homo sapiens
gtactctgttgtgtagatgtatcatagctaataagacaagtttcctatggatggacgtttagggtgttattagtcttttactattataaatagtactgcaatataaaatcttgtgcatacgtcttttggtatttttgttagtgtatatgtagggcaaattcctagaagtaggaaaccccaggcttttctgygaaaatagcagcagaggaggggctaataagcagagaaatcacgtagttccatgccttctcatagtgattggatcctggacacttatcagagtcaaattcgaaggtgaaccagaaatatctaaaattgtattcaacactctcctagcccaaataatgagaaaatcaaggacagatgcactttgaattcaaagtcccaataggctaaaagtaaaaggatgaaaaaagatatattatgcacacagtaatcataaaaaatctgatgtggctgtattaatatcagacaaagtagactttaaggcaagaagtagtgccagagataaagaggaacattttgtaatagtaagaggatcaatttctcaagaagacataacaatcttgactgtgcatgtacctaataacaga

SEQ ID NO: 464669 - DNA, 593 bp, Homo sapiens
gtactctgttgtgtagatgtatcatagctaataagacaagtttcctatggatggacgtttagggtgttattagtcttttactattataaatagtactgcaatataaaatcttgtgcatacgtcttttggtatttttgttagtgtatatgtagggcaaattcctagaagtaggaaaccccaggcttttctgcgaaaatagcagcagaggaggggctaataagcagagaaatcacgtagttccatgccttctcatagtgattggatyctggacacttatcagagtcaaattcgaaggtgaaccagaaatatctaaaattgtattcaacactctcctagcccaaataatgagaaaatcaaggacagatgcactttgaattcaaagtcccaataggctaaaagtaaaaggatgaaaaaagatatattatgcacacagtaatcataaaaaatctgatgtggctgtattaatatcagacaaagtagactttaaggcaagaagtagtgccagagataaagaggaacattttgtaatagtaagaggatcaatttctcaagaagacataacaatcttgactgtgcatgtacctaataacaga

SEQ ID NO: 464670 - DNA, 631 bp, Homo sapiens
taaatcctttctctgaattatttgtaataaatgctttcyacatgattgttgtaaggtttttaagtattgtaatgacttttttgaagtacttaagttttgtattttcattaaggaaatgattactgttttctgacttcctctgttggttatctgttcaaaaaatcctttcctactcaaagctctaactaatattcatctcaatattttcaagttttggtttcacttaaaattttctcttttatacacttgggtttattttgatatatagtgtgggaggctatacattttttctttgtttgcaaatagccagatttttcaacagattgcatggacagtgtcttgatgttaaattggacaacattttttaaaaaggcaatgagaggatttggtgctggagaaattcattcataagcttggcgtattcagaacactgatgaattgttgggtgagtaccaggaaagttgtcaggacagacaagtattcaacagccactgggaaggttctaaactgtgccccctttccccttctccataataaaggggtctccctttaccaaaatgaactgtcctaaatttaagcagccaaaagtcagagcagtcccagaattgtttcttggtgtcaaggcctcaat

SEQ ID NO: 464671 - DNA, 631 bp, Homo sapiens
taaatcctttctctgaattatttgtaataaatgctttctacatgattgttgtaaggtttttaagtattgtaatgacttttttgaagtacttaagttttgtattttcattaaggaaatgattactgttttctgacttcctctgttggttatctgttcaaaaaatcctttcctactcaaagctctaactaatattcatctcaatattttcaagttttggtttcacttaaaattttctcttttatacacttgggtttattttgatatatagtgtgggaggctatacattttttctttgtttgcaaatagccagatttttcaacagattgcatggacagtgtcttgatgttaaattggacaacattttttaaaaaggcaatgagaggatttggtgctggagaaattcattcataagcttggygtattcagaacactgatgaattgttgggtgagtaccaggaaagttgtcaggacagacaagtattcaacagccactgggaaggttctaaactgtgccccctttccccttctccataataaaggggtctccctttaccaaaatgaactgtcctaaatttaagcagccaaaagtcagagcagtcccagaattgtttcttggtgtcaaggcctcaat

SEQ ID NO: 464672 - DNA, 619 bp, Homo sapiens
ttataaataatgatttttaattttttccaattgtatgttgatagtatataaaaataaaataaaaattttctatattaactttgtatcttaaaccttgctgagtttacttattagatttagtaggattarggagtagattcccttcaagtttctacctgcaaaatcatgtcattgtagagaaagataattttacttctttctcagtctttatgacttctatcttttcatacctaatggcaagacctcaagtacaatgttgaatagcagcatgagagtggatccctaccttatttttgaccttagagagaaagtgttccatatcttatcattaaatatgatgttatgtataagcttttatagatgcattttatcaaattgaggaaattctgttctattacttgtttgtctagaggttttatcacggaatagtgttgaaattttcaaaatcttttcctggatctactgagatgtttgtatttttcttttttatactgttaatgggatgaattacactgactgcttttctcatattttaattgatcttgcattttttgtgataaaacccacttagctgtgatgtgttatattttttaatatatagatggatctaatttgctaa

SEQ ID NO: 464673 - DNA, 619 bp, Homo sapiens
ttataaataatgatttttaattttttccaattgtatgttgatagtatataaaaataaaataaaaattttctatattaactttgtatcttaaaccttgctgagtttacttattagatttagtaggattaaggagtagattcccttcaagtttctacctgcaaaatcatgtcattgtagagaaagataattttacttctttctcagtctttatgacttctatcttttcatacctaatggcaagacctcaagtacaatgttgaatagcagcatgagagtggatccctaccttatttttgaccttagagagaaagtgttccatatcttatcattaaawatgatgttatgtataagcttttatagatgcattttatcaaattgaggaaattctgttctattacttgtttgtctagaggttttatcacggaatagtgttgaaattttcaaaatcttttcctggatctactgagatgtttgtatttttcttttttatactgttaatgggatgaattacactgactgcttttctcatattttaattgatcttgcattttttgtgataaaacccacttagctgtgatgtgttatattttttaatatatagatggatctaatttgctaa

SEQ ID NO: 464674 - DNA, 531 bp, Homo sapiens
ttacactgactgcttttctcatattttaattgatcttgcattttttgtgataaaacccacttagctgtgatgtgttatattttttaatatatagatggatctaatttgctaatattttgttaaaaatttttgcatctctgttcatgagaaatattggtctgtaattttcatttcttgtagtgtatttgttaggtttcggtattatgaatatgtcagcttccaaaaagggttgagaggtggtccttcctcctgtttctataagagattgtttaagattggtattatccstttctttgatagacttcaccattaaagctatctgggccagatatgttctttgtgaaaaaaaatgtaattgtgaatttaacttctttaacacatattcaggttacttatttcttcttttgtccagttatgaaaagtcctgttttttaaaggatttatccatttacatggtcaaacatgttggcataaatttgtttacaataccctctcatcatccttttaatgtctgtaggatttgtgggaata

SEQ ID NO: 464675 - DNA, 591 bp, Homo sapiens
tgtctttatttccttccttctattttggacttactatactgttctttttctagcttcttttttttgagacggagtctcattctgtcacccaggctggagtgcagtggtgtgatctcagctcactgcaacctccacctcccaggttcaagctattctcctgcttcagcctcccgagtagctgggatgacaggcatgcaccaccatgcctggctaattttgtatytttagtagagacggggtttctccatgttggtcaggctggtcttgaactcctgacctcagagctcaggtgatcagcccaccttggcctcccaaagtgctgggatcataggcatgagccaccgcgcccagcctttttctagcttcttaatgtggaagcttagctcattgatttcagcactttcttattttctaatacaagcacttaaactctaaattgtattcttagcgtcacataagctgcatctcacaaattttgatatgctatacttaccattcagtaaaagatatctaattttcctagagtttttctttagaagtatattgcttaatttccaaatgtttaaatatttgctgggtatctttttgtta

SEQ ID NO: 464676 - DNA, 591 bp, Homo sapiens
tgtctttatttccttccttctattttggacttactatactgttctttttctagcttcttttttttgagacggagtctcattctgtcacccaggctggagtgcagtggtgtgatctcagctcactgcaacctccacctcccaggttcaagctattctcctgcttcagcctcccgagtagctgggatgacaggcatgcaccaccatgcctggctaattttgtatctttagtagagacggggtttctccatgttggtcaggctggtcttgaactcctgacctcagagctcaggtgatcmgcccaccttggcctcccaaagtgctgggatcataggcatgagccaccgcgcccagcctttttctagcttcttaatgtggaagcttagctcattgatttcagcactttcttattttctaatacaagcacttaaactctaaattgtattcttagcgtcacataagctgcatctcacaaattttgatatgctatacttaccattcagtaaaagatatctaattttcctagagtttttctttagaagtatattgcttaatttccaaatgtttaaatatttgctgggtatctttttgtta

SEQ ID NO: 464677 - DNA, 477 bp, Homo sapiens
gtactaatgaatgagttgatgtggatctagagaaaggatcttgcacaccacagttttctggcttctgtcttgccttgttaggcatttttattaatgtcttggatgaagacattgacggcccagtgataaaatttgtgggtgacacaaagctggaagggatagctaatacattggacagtagaattgcaatgcaaaaaagatttgacaggctgaaacaatggaccagatctaacaagattatgtttaatggggataaatgtaaagtcttaacatttggttaaaataaacargcaaataagatggaataagcagcagatgggaaagatgtggtttgataggagcctgtgtgaaaataatagagatgtttcagctgattataagcccagaatgaatcactagtgcactgtaagctcaggctataatagaaatgtggagtatactataaggaaggcagcaatcctttcatagtctaaaata

SEQ ID NO: 464678 - DNA, 530 bp, Homo sapiens
tgcttgcttgcttccttccttcttttgtctctgacttcccttcagacctcctgcatcttcttctgtacagttcctagtaagattcagatatattcatttgcagtgcctttggctgttaagcaaatagcacagtgatatttgaaatagaaatgatgccatcaattggaggagagactttaatataaagggaaaataatgtatcatgaacaaaaaccttcttattcattttggacctttgcatcttagctaatgcttgcctctctttccctctctgcaattcctcctattctctccctctttactggtgagttcaatcattgaatggcygggggaactgcttttatttaattctcacctccccagaaaagctttccccaaattccccatcacagacttctgaactcctagtgttcttttggtctgtgcttctcattcaggacttagctgtgttgcctttcaccccggcttatgtatttgtcatgtttatctgttgcctcttatttacattgtaagctccagaaaagagagac

SEQ ID NO: 464679 - DNA, 491 bp, Homo sapiens
ttattttttaatttattaaattttgtagatctggggtctcctctgttgtycaggctggagtgcagtggcatgatcatggctcactgcagccttaagctcctgggcttgtgtgatccttccacctcagactcttgagtagatgagactacaggcgcacaacaccatgctcagctaatttttttttttttttttttttgtagagacaggatctcactatgttgcacaggctggtctcaaactcctgtccccaagtgatcttcccacctcagcctcctgagccactaggattacaggcatgagccaccatgccctgctgtaactaagactttaaaagcatgggcaacaaaaacaaaaacagacagaaaagactatattaagctaaaaaggttctgcactgcaaaagaaacaattgataaagaggcaacttgtacaatgggagaaaatatttgcaaactattcatctgacaaggaactgatatctagaatataca

SEQ ID NO: 464680 - DNA, 448 bp, Homo sapiens
taggggtataagaaaaggctatctctggggagatgcacaaaatcatcttggacctaacatctcaaactgatataaggcagaggttttctaccactaggaaaggcgaagaaaactcttgttcaagatcaactattattaatacaaagcagaatttggctgccacaagacggagtgacaggaatgcagagagaggcccaatttcagaggccctccctaagacatagactggagtagaacaacagataaatccatctaccctgaacacaaacctggcaaaaagtaacaagcaacagtagtctaagactggggatggggaaaatccatggtgagagatcttccctgtggtacaggcattcargaaagctgaaagctgatggtagaacaataaacctgagagaagactctggcataccagtgtccactctaggcacaaggcaaaggcggccca

SEQ ID NO: 464681 - DNA, 558 bp, Homo sapiens
ccttatcaggcagaatatccagggactcagagcttatctcccggaaactggccaagggccattgcggaaatcaggcctttcttgggaatgtatagggtttgagcaactcagatctcctgagctaacactttccttcccagcaagaaggggtagtttggaggcrgagggactttttctggccagtggcctcaggactgaagcctttctgcatagagactcagctccccacaatagcagtgttttggtaaccatgagcatttggtcagaccatctgtgctgggcataagggttgatagtgtccacactacctatgctactgctgagagtgggaaacctgctgggggattccttcaaggatgagtcatcctcaaggggcctcaaccctttgtccccaccgagcatcactcctaagtgctacccatttcacccttaaacattactcagacctgcccttcctctgagcctctgccagcattacctagtccagatcaacgtcatccttcacttgtaccattgcagcaggctcctccccagcctcctggcccactgtcatcccac

SEQ ID NO: 464682 - DNA, 596 bp, Homo sapiens
agccaaatgaaatagctccaatggtgtaacagaagtacacatgagataaaagagtagactcctgtggatcaacagcaaatctacaagatccatggcatgagcacgacacatggctgcagtccatttttccattggcctgtggctactgtgagctgagttactggactgcttcaggcctacaaggttctttctattgactgtgaattaatcattcagaagccaacagacaccgtttgttcacatttagcaaacattgctaatggtgacaatgtataatggtgactgactaataacatgttccccgttctcatggagctttcaaaccagtgcagaggtggggagaggactaatattaaacaaacacataaataagcctataattaaaatcaagatgtgtgctttgaagggaggggatgtaccagagattcaggggargctttctggaattaatattggagctgatacctagagaataactaggcatcgatcaaatcaagtttgcggaaaggaggagagtattttcaggcaaaaagaaatatgggggtaaagaaaggatctggagcgagagggtgtataatgaatacaaaattttttaa

SEQ ID NO: 464683 - DNA, 596 bp, Homo sapiens
agccaaatgaaatagctccaatggtgtaacagaagtacacatgagataaaagagtagactcctgtggatcaacagcaaatctacaagatccatggcatgagcacgacacatggctgcagtccatttttccattggcctgtggctactgtgagctgagttactggactgcttcaggcctacaaggttctttctattgactgtgaattaatcattcagaagccaacagacaccgtttgttcacatttagcaaacattgctaatggtgacaatgtataatggtgactgactaataacatgttccccgttctcatggagctttcaaaccagtgcagaggtggggagaggactaatattaaacaaacacataaataagcctataattaaaatcaagatgtgtgctttgaagggaggggatgtaccagagattcaggggaggctttctggaattaatattggagctgatacctagagaataactaggcatcgatcaaatcaagtttgcggaaaggaggagagtattttcasgcaaaaagaaatatgggggtaaagaaaggatctggagcgagagggtgtataatgaatacaaaattttttaa

SEQ ID NO: 464684 - DNA, 542 bp, Homo sapiens
ggtccatcaggagaatatgtactccaagggaagtacaagttaatcctttagggtacagaaagaaaatattcaggccaggcgcagtggctcactcctgtaatcccagcactttggaggcccaggtcaggagttcgagaccaacctggccaacatggtgaaaccctgtctctactaaaaataaaagaattatccaggcatggtgacatgtgcctgtaatcctagctacttgggagcttgaggcagaagaattgcttgaacatgggaggcagargttacagtgagccgagatcgcacaattgcactccagcctgggtgacaagagggaaactccgtctcaaaaaaaagaaaatattcaaactttattttatatttaagttttagctaaaaatgagatgtgttactattatttaatacacaggttgacagtgatgacttcaccgtaccagtgtctgttggtcacaaaccacgtgtatactctgcagcaaggatgggctggcagtgaaaacctcatgtgtcattttgctttcagcgaattgtaatgt

SEQ ID NO: 464685 - DNA, 608 bp, Homo sapiens
atggatgccttataatacatataatgtatcagtatattagtacttatgtgtaaattataaataaataagcgtatgctgagggagtgtgttcaatttttaactgattgtggtatgtgaccaagatgtctgaaaaacacctaaagattatgttttgcaaatgaycttttcaccattaatacctggctagcagacttttaaaaattatttcatttcctgattttcagagtaataggtttgtgttctatctacctctaaaggtgacttttattatatatatatataatgagattttatttgctttctccctctttctatgtgcatgtatccatacaaacatacacatgtatacacatatgcatataatcttttttaaccattgagaatgagtagcagattgttttcctttattcctaaatatttccgtgtatatttcctaagaacaaggacatagccatagtacagttatcaaatcggagaagttaatgttgattttgacagcagaatttaaagatcttgacttaatctgatcagataataaacttaaaactgaagaaaaaactaagaataagtccaatgtatttacctgaattgtctcatctgtgatatag

SEQ ID NO: 464686 - DNA, 559 bp, Homo sapiens
taacaccatagcataaacaaaaaaaggaggaagccacaaaccaggactcaaattgggaaagattcacaggcaatgggaagatccagaggccatgtatgctgatctgggctgtagacctgacaatgccactgcaagttctgctctcttcccagagcagataaccaatatttgagtgggaactcacagggggatccaaaccagctgcctatctttctgaatcatgtcagaatgaatgatgcagccaaaataaacaaaaatgtgcctctgatatatgtggattcttgcatgaaattaaagggaccggggcacaggtaatwttttttagctttttacatttaaaagttatgaaattggtaaagaaaggaggatttggaaagtgaatagaaacacccgaagacaatttcaatgatttccctcacccctgtcctccttaggttgtggcttacaataccaacatgcaaggcttttgggaagggtcaatttaacatgattcccctaagctaggagctttctaaatggtcccataaccccttgtaccggcctccatcataacactgat

SEQ ID NO: 464687 - DNA, 618 bp, Homo sapiens
aatttaataaattaacctgggggacgggggaaaagaatagctacgggaaaaaagtgaaattagttcttaagttcacaccacacacaaaaataattacagattactcagggataartaacaaaagctaagcttctatctttttttaaggagcgaagataagtaaatatccttctaatcttgagataagaaaaaatttagcaacaaaaatgctaaccataaaattaacaattgataaatgttattatattaaaaacttctgttcatcaacagaaccttatgaatgtgaaagacaacttacaaattggattagaaaaagatattttcaatacatgtaactgatgatgaatttatatcaaggatcatattaaaaactccttcaaagttgtcacaaacaacagacattccagaagaaaaatagcaaaagccatacataggcattttacagaagaggaaataaacataaaaagatgttcagtcagagggaattacctgtcaagtccacagtgagatatattttatatccatttaattagcaaaaataaaaaagcccaactatattgagtattggaaaggatatggaaccacaaaatcttctctactttgctggtagaaatgtaa

SEQ ID NO: 464688 - DNA, 554 bp, Homo sapiens
gcgttaccatggctaccacacatcactatgcaataggaatttttgagctccattataaccttatgagaccactgttgtatatgaggttttttgttgaccaaaatgtcgttatgcagtacatgactatgtataaatataccacratgtatttatccactttcttagtatattcacataattaaatattatgcagcagtcaaaacaatgaatttcaattatatgcaacatgtgaatgttgcttttgtccaggtttctgagaagaagatgacaaggtgagattaaacatagaaaatttttttaagggcaatgactatgagagaaaatggagacggagccctggaagggtgggggaaccatcagactaccatgcaagtctgacctagatttaggcaagaggaaaagaaggtggaatggaagtgaactacattgctgttaggtctaaggaagacttggcaaggccacctaggtgtcattaagccatcaggtgtcagggagccccatctctcccaggaatggggctgccctatgcctctgccacactcagtcattggctg

SEQ ID NO: 464689 - DNA, 550 bp, Homo sapiens
gaataaatgatatacacttgagtcaggagagcgggtgggcttcactaaaggacaggatgcagaaggggcacataagcacatgtaagctactgccaatattttatattatttaagaaagttaagtgatgcagaaggggcacataagcacatgtgagctactgccaatattttatattatttaagaaagttaagtcaawaaattaaaaatgacagtattttatgagaaaaaaggattatgattaatgtaattctgtgactataaggcccaaaatgcatttattttctctcctatgctcctatacgtttatctctaattgttagtgattgagctattgatggacaagaaattgcctctgtgtcactgattaaataataagttggttagggtttgtctcaatctggtaacctggaatttggatgtcctgttatagaatcttaaatggagtattcaaactccaagtgctcaaataggagaaagagaggacagttgatgtacatgaaccttctccaaggagtattcggttatctccttctcagacaagctaggagc

SEQ ID NO: 464690 - DNA, 646 bp, Homo sapiens
tatgtgatttttgctaccccaaataatgaaaatgtgacatatattaaaatctgttatatctgaacacttgaaacacttggaagcataaatatctaagctgttaaaaatttttccaaatcaagagttttatggattttaaacccattgttaaaagaaaaactaattcacattagaaagagacttactgtccaaatttcaataaaactttggaatatttcatagataagtaagaaaaatgagaataataatttagttaacacatcagtgattaacttctgttagacttttgattttttttcttatagcacacattttattctttcwtaagaaaaatgatctcccacaccaatgtgtatatgtctgaatgggttgagggattggaaacattcttttattaatatatgtttagtgaaaataaatagctctcaaattatgtcctatcacttatggtgtttatatagatgctaaaatacttttgtcacaaaagagtttctgttttttcccctgtaattattactaatgggataatattggcttatataaaataaattggaaattttactttaattttaaaaaattgggaatggttatccaccacacatatcagctcaccagcacaagtggaccatagataagtacagagcaa

SEQ ID NO: 464691 - DNA, 633 bp, Homo sapiens
ttcacatgcttatcatattttgtgataccatctgaatttttgtattacatctctttctgctatatcagccaaaaaacagattctaaataaattgatcttaaaaccagatgatcaaatcattatctcaaagggttaaacaatgagtttaacaaaattaagcttattgctctcagaagttatacatgatcaataaaaccttatgctgttaattggtttttgtgctgttaataaataaaattaattagtttattaatattatttttaagtttatcatatatttaataataaatatgaatatttaaatttataaatgtatctattgataaatacttacaaattttaaaataaatatttttatcatatctttgcatatcatatcttttgtatatcataattatataatatactagtacagtagtacatgtacaaagcttatacatgtactactgtactagtatattwtgtagttataattgggtatatacatataaatatacatatactcagtatgtatgccctaaatttttatctatggggtacaaaattttaaaaaataggttggaaacagatgtctcataaaagtaacaaataattacaaagcctttgtagtccaacagtatctggcaaagcact

SEQ ID NO: 464692 - DNA, 512 bp, Homo sapiens
aagtcactcctggtcctgccccagtgctcaaaattacagccttcctctaccttctctgccttctctggattcccagaggagatgccttccctcctgttcaggaataagcccttacttttcgtcttaattagatcccttcagttcagcagcccccactcaccctgctgttatttaaccttttccctcctatcctgacttctttctctcaacttcaaagattttcaggtccttcactgcttcaaaaccttacctgctagctaccttcttccaggaagatccttaaaacctttgtcttctgtcactcgctcttcctcctcactccttccccaaacttctagtccctgccgccctagggcttcccctccagcatgccattcagtgacaattcttttttattgagaccgagtctggctctgcctcccaggctggagtrcagtggtgcaatctgggctcactgaaacctctgcctcctgggttcaagtgattctcctgcctcagcctcctgagtagct

SEQ ID NO: 464693 - DNA, 509 bp, Homo sapiens
cctttactgattgccagatctgtgtttccacctcttgtttccaaagcatccccaaggtttgttgattctgcatctgaagcatctctcaaatctgtgtgttccattcacatttgcggtctcttacctggctcacagctttatttgaatcattacaatagccaccgagctagtatctgtgatctttctaaaccacacagctaaccyatgtcattttcctttctaaaaccatcagtggttttccattctctcccctcggggtcccgtttcaacactttttaaatcctccctctctaacaagaatcagtttatgtgccaatttctctggaaaattctcagctgaatggggtctccgctcccactttgatgcccgaagagctctgtcatctcttaaggtatttattcactttacctttagtagagctatttatttatctgtcttatttcctcaaatcatgttccatgagttcaggaaatgcaattcattcatctttttatactccaaagcactt

SEQ ID NO: 464694 - DNA, 638 bp, Homo sapiens
ttttagtaattacctttactgattgccagatctgtgtttccacctcttgtttccaaagcatccccaaggtttgttgattctgcatctgaagcatctctcaaatctgtgtgttccattcacatttgcggtctcttacctggctcacagctttatttgaatcattacaatagccaccgagctagtatctgtgatctttctaaaccacacagctaacccatgtcattttcctttctaaaaccatcagtggttttccattctctcccctcggggtcccgtttcaacactttttaaatcctccctctctaacaagaatcagtttatgtgccaatttctctggaaaattctcagctgaatggggtctccgctcccactttgatgcccgaagagctctgtcatctcttaaggtatttattcactttacctttagtagagctatttatttatctgtcttatttcctcaaatcatgttccatgagttcaggaaatgcaattcattcrtctttttatactccaaagcacttagcccaatgattggtactcaataaatgtttgttgaatgaatgattgagctcatgtttggttcaaaatatagtttttcatctgtgttttttctctcccagtagttagaaaatgaaagc

SEQ ID NO: 464695 - DNA, 593 bp, Homo sapiens
agggtagaagttggtaatgagggtctttttaagaggaagttttgctatgcgttatccatgtaatgcctttgatatttttctagatattcattggtttcacctaaacttttccgccaggctgatattttgtttaccgtgacactgccaaaacctagaccacagacatctggactttatatgggttataataacattgtatctctggagttagaaaactaytttttacttatatataataattaagagcagatttctaaatgtgtgtttatatttagttaattgtaattgttcacataaaacgacctaaaattattcgcataaaacctacccaaaagtataatttaaggagtcattaccctgaaataaaaatacgaactgctttcaatggcctgaaggatcttgggggaaaaaatgggctgccatgcagctgggctgtgtcatggacatattttggtatagtagtagaatatgtcccaaaatcagatgagctcagtttagcatttatcagatgcctaggatgagtcaggcatgatgtctgacacttagagaaataaatgtgattggtgaattgattcagcatgaccagtagttat

SEQ ID NO: 464696 - DNA, 367 bp, Homo sapiens
aaaaaaaaaaaaaaaaggactgcatggattgcaaagtactgtcacaaacactaccagaacagagacagcctcccaataatcctgtgggtaggtaaaggtggtgtatagtcatataatgaaatactatgcaactgtgaaaaaaatatggaagctggaaggtactgatatgaaaaaatacccaagatgtgttggtaaaaaatgatgtaaattgcagaagtacatatatatatatayacacacacacacacacacacacacacacatttggatttgcttctatatgcataaagagaccagaaaaggatacacagaaaactagcataggagtcacagattacccataggatgtggtggaacagggcacata

SEQ ID NO: 464697 - DNA, 530 bp, Homo sapiens
atgagccaattaaacctcttttcttattaattacccagtctcaggtatttctttctagcaatgcaagaatggcctaacacactgcttctgcctggtctaacactagctggcttttatacattaatgatgatatttgagcctgagtgtaattctataacctttcatcctacccaagtttcatcttgaaactgggcattgtgggggatcctgacaaatagaataattggtatcaactgaacatctgtatgtacttggtccctgccagaacttgtagggcaagcatggaccatttgaattcccataattatgaataaaggattcatgtggtccacacccaggtatctgtggtcatgtggcttgctactaagaaaactgggcgtgcctcttcactagttaaaagccatcacrtttggaataaataataaacatttacctgcttctatatttcttgaggtctgataacacattttgaataattttgtatgtgggctcattgtatctttcaggcctaatttctgacagtgtcattt

SEQ ID NO: 464698 - DNA, 475 bp, Homo sapiens
ttctgtgtgcatgttaataaatttgtatgccttttcttcaatcaatctgccttttgtgagttgatttttcaatgaaatttttttttttttttttttttgagacagagtctctgtcacccaggctggagtgtagtggcataatctcggctcactgcaacttctgcctcccgggttcaagagattctcctgcctcagcctcaagagtagctggactacaggtgcctgccaccatgcccggctaatttttgtatttttagaagagatagggtttcactatgttggccaggctggtctcaaactcctcacatgaatattcacactgaatattcatggtgatctgccctcctcagcctcctacagtgctgggattrcaggggtgagccaccgcccccggccctcagtgaaattttagagtggggaggggaagctttccttaggcccctatagcacaatggtcagtttagtataccttgtt

SEQ ID NO: 464699 - DNA, 572 bp, Homo sapiens
aattctcacttcatcacagagagttgtggttgtcaccatggaagggtagccaattgggctgaaactctggcataggcctacaagattgtttttttgaatggatctctaataacagctgatttgatcatggtttttttctttctctaggtgtggtgaaaacattcatattaatggagagctgtgactctgggtaactaagactttcatcttcatattagaatctcattcacatcccctttctctcctagtccacttttcccaaagtattatgacctagccaagaaatcccatgactccatgacttcagttctcaaaatatttagagcttctgtacaataaaagkgagcattaggggaggatgagttaaaagaaatgacagccagatggggatcatgagaaaatttaaactggaaaatcactcaagagaaatctcccactgaaactatacacagattatgacaaagtggataaatgcttttatggccctcagctaaactaaagacatgccaaaaggcagcgcctggatatatgagttaggatacaagtttaactgccctggcaaagagacccca

SEQ ID NO: 464700 - DNA, 595 bp, Homo sapiens
gcttttattacttcagaatttcctgaagacatcatatactcctcattaataataggagaaggagcyttcaggtcctgaacactgtgcaaaaaagtgaaaaatttactaaaatgcagtgcagatttaaatgccatctagaaaataggtacttaagaaaaaaatagttgctgtcaatatagaaataaatacctaggctttgccctagttggtggggattatttatatttccttgcatctaggaacatttttttttttaatatttcctagcaacattcctggaactaatgtatagacctctctgtatgccatgatatattataacctactcatcctctaaatattattatcacgacatgggcacactttagctcagaaaagttagttgtcatttgaattagaaaaggcactacattaaatcatagtctgcccttatatattcatcattttcaggttttatcactcagagaagtgaggaaaaaatggcatttatttgcttaccattttcaacagctcttccaaaagaagggaaagaaagataaaaagtggacggactataaaataaaaacagacacagtctcacagaattctgcagaga
